United States Patent Application Publication US 2019/0348154 A1 - sequence listing, part 8

SEQ ID NO: 26633 - DNA, 285 bp, Escherichia coli
atgggcacaccacgatttacacctgaatttaaggaagaagccgtccgtcagataacagaacgcggttattccgttgccgaagtatccgaccgtctgggcgtttctgcacacagcctctacaagtggctacgggctatcaaacctgataacagcgaacagcatgcccgggatttactggaagccaaaagcgagatcctgaaactccgggcgcagctaaaacgcaccgaagaagaacgggatatcctgaaaaaggccgcgcggtactttgcaagggagcccgactga

SEQ ID NO: 26634 - DNA, 810 bp, Escherichia coli
atgacgatgtgtcgggtactgaatgtcgcccgggccgggttctatgcgtggctgcacaacccggtctcggcgcgtgataaagataaccagcgtctgctgatgcttatccgcgactcatattcactgagcggaggcgtatacggttaccggcgggttcatggcgacctgaacgaaatcggggaaacctgcggcaaaaaccgggtgggtcgtattatgcaacaaaaccggatcaaagccgtacgcggctataaagcgccgcgtcgtatcgccggccggccttcagtggttgcccctaatcgcgtgcaacggcagtttactgttgtccgggccaatcaggtctgggtcacagatattacttatatccgcacctggcagggctggctgtatctggcggtggttatcgatctcttcgcccgtaatgtggtcggctggtcgatgaagcccactctctcacgcgaactggcactcgacgcgctgatgatggccgtctggcggcgaaaaccggacggcgaggtcatcgtgcactcagaccagggcagccagtacggcagtgacgactggcagcgcttctgccgggctaataacctggccccgagcatgagcaggcgtggcaactgctgggataatgcggtggccgaatcgttcttcagttcgctgaaaaaagagcggatcagaaaacgcatctataaaacccgggatctggcccgggccgatatcttcgattacattgaagtgttctacaaccgggcccggcgccacagtcacctcggcggcctcagtccggaggccttcgaacaggcctcatcgtga

SEQ ID NO: 26635 - DNA, 1134 bp, Escherichia coli
atgaaagcagtaatttacaacggtccttatgatgtaaaagtaaaagacgtaccggatgcgaaaattgtccgccccacggatgtactcgtccgcatcaccaccaccaacatttgtgggtcggacttgcacatgtatgagggccggaccagctttgaacagggacggattctgggtcacgaaaacctgggtgaagtggtcgaaattggctcaggcgttgaacgtattaaggtgggcgactatgtttgtctgccgtttaacgtgggatgtggtttttgcgaaaactgtgaaaaaggtctgaccggcttttgtctcactaccaatccgggttcggcaggcgcagcttatggttttgctgaaatgggtccctgggagggggggcaggcggaactgcttcgggtgccatttgccgactttaactgccttgttcttccccctgatgcggcagaaaaagaagatgattatgtgatgctctctgacatttttcctaccggctggcatgcaacagaacttgccggattgaagcctggtgaaagcgtggccatttatggcgcggggccggtcggtttgatggcagctcattcggcgatcattaaaggtgcttcacaggtgtttgtggttgatacgcacacagaccggttggctctggctgaaaaaatgggggcgacgggcatcaatgctactggcgatgaagctgtacaaaaaattctcgacctgacggatggacgcggtacggattgtggctgcgaatgtgttggctatcagtgctgtaacaaacatggccatgaagataactctgtcaccatgaacagtcttgttgcgtcgacgaaagcaaccgggggaattggtgtggttggcgtctttattcctcaggatccgggggctgaatcggagcttgccagagagggtaagatgccatttgattttgggagtttctggtttaaaggacaggcaatccgtaccggccaggcgaacgttaaggcctataaccgtcagctgtctcgcctcatccatcacgataaagccagtccgggcaaaataatttctcatcgtctttcgcttgaagaggctcctgccggatataagcacttcgatgagcgggatgaaggatggacgaaggttatccttaagccttaa

SEQ ID NO: 26636 - DNA, 132 bp, Escherichia coli
atgtatggtcagacaatccccctcgtaacaattggtactttgtctcagccctacaacaattcccttttcctgaatttgaaccccagcctggtgctctttcatgtcgggcgtatagttccttgctctgtttaa

SEQ ID NO: 26637 - DNA, 162 bp, Escherichia coli
atgtcggtaattcaatggtggttaacttatttctttaatgctgcttctgagtatttaatctccacccgacagatgtcgtgccgttttatcaaatcaactaactctggcctcttcctgaaactactctcctcttccgatctcttaagaaggaattacatttga

SEQ ID NO: 26638 - DNA, 639 bp, Escherichia coli
ttgagacgcttacccgtatatctgctactcgacacgtccggctctatgcacggagagcctatcgaagcggttaagaatggcgttcagacgctgcttaccacgctgaaacaggatccgtatgcactcgaaacggcttacgtgtcagtgatcacctttgattcttcagcccgacaggcagtccccctgacagacctcctgagtttccagatgccagcactaacagccagcggcaccacgtctcttggcgaagcacttactctcacggccagctccattgccaaagaagtacagaaaacgacggctgacactaaaggtgactggcgtccccttgttttcctgatgacggatggaagtccgaatgatgactggcgtaaaggcctgaatgactttaaagcggccagaaccggcgttgttgtggcatgtgcagccgggcatgatgccgataccagcgtcctcaaagaaatcactgaaatcgtggttcagctcgatacagctgacagttcgacgattaaagctttctttaaatgggtcagtgcgagcatttcggtaggcagtcagaaagtggagtccagcaaaaaagaagtgatcggtcttgaagacctgccaccgccgccgccagaagtaaatgtggtcttataa

SEQ ID NO: 26639 - DNA, 642 bp, Escherichia coli
atgtctgtcagtctgagcaaaggccagggcgtaagcctgaaaaaaaatgaatacgatctctcgtccgttactatcggcctgggttgggatattaatgaggaaaagaaaggtttcctcggcgggatctttggtaaaaaagaagaagaatacgaccttgatgtgatcgctttcctgtgtaattcagccggaaaggtgaccgatctcggcaatgtggaaaatggtaaaccaacgcttgtgaatggcgatatcatctttttcaacagccttcgccataagtcaggcaatatctggctgacgggcgataaccgaaccggagccggagacggtgacgatgagcaaattattgtgcgcctgaattcccttgacgctcagtacgagaaaattgtgttcatcgttcagatctacaatggtgaaaagctccagcagcactttggtaaagttcagaatgccttcatccgggcagtagatgcccgtaatattgaaatggcacgattcgatctttctggcggacccgccttcgccagccagcgctccatggtctttgccgagctgatacgcgaggctacaggctggaaactcagggcaattggtgagccttcagaatcagattcgtttgtctcgcacctgaggaattacatgtga

SEQ ID NO: 26640 - DNA, 639 bp, Escherichia coli
atgcgccgcctgcctgtttaccttgttatcgacacatccggctcgatgcgcggtgagtcaatccattccgttaacgttggaattcaggcgatgcttagcgctctccgccaggatccctacgccctcgaaagcgttcatatctccattatcacctatgacaatgaggcgcgtgagttcattcctctcacgccgctggaagacttccagttttctgacatcgttgtgccaagcgcaggcgggacgttcaccggtgctgcccttgaatgtctgatgcagtgtgttgaacgggatgtacgtcgctcagatggtgataccaaaggagactggcgtcctctggtattcctgatgactgatggaaccccttctgatgccctggcgtacggtgaagcggtaaaagcgattcgcggccggggattcggatccatcattgcctgcgccgttggtcctaaagcaggccatgagcacttaaaacagctcaccgataaggttgtgtctctggagacgctagattcaaccgcgtttgcaggtttctttaaatgggtatcggccagcgtgtcttccggcagcacaagcgcggggatcaataacggaactgatacccttccccctcctccaccagaaatccagctggtgctctga

SEQ ID NO: 26641 - DNA, 1041 bp, Escherichia coli
atgagacgccttcccgtgttttttgtcctggactgttcagagtccatgattggtgaaaacctgaaaaaaatgactgatggtctgcaaatgatcgtcggagatttaagaaaggatccacacgcacttgaaacagcctgggtttcggtaatcgcatttgccggtgtagcccgtacgattgtacctcttcacgaaattgcctcgttctaccctccccgccttcccgttggcggcggtacgagccttggggccgcattgcgtgagctgaccgtacaaattgatacccaggtcagaaaaaccactcatgaggctaaaggcgactggaaacccgtcgtgtacctccttaccgacggacgtccgactgacgacacaaccgcagaagtgaagcgctggaaggatcactacgcgagtaaagtgaatctcattgccgttggcctggggccgtcagcggacctgaatatcctgcggcaactgacagagaatgtcatgctgttcaccgagtctcaggaaggggactttacccgcttcatcaaatggatcacggcctcggttacggcgcacagccgcagcgtcggggacgacaaacaacctgagctcagccagactgaatacatagtccggctggccaaggacgagccagtaaaagcgtacgacgaaaactgcgttacgcttaccggccgttgtagcaagacccgtcgtccgtatctgatgaagtatgagcggccaccagcaagggtttccgggctcgatttcagcctgaacctgaacagctttaatattgccggatgctatcccatcgatgaggactattttgcatggtcagatgccaccgctaccggtttgcaggtaaacaccagcgaactgcatggcgtaccgggttgccctcactgcggtaatgccagtgcgtttgccctgtgctcatgcggaaaattgctgtgcattgacggcccggatgacgttatctgcccgtggtgtgaaacaggcctgtcattcagcaatgatggcggaaacagtaacttcgacgtaaacagaggaagaggttga

SEQ ID NO: 26642 - DNA, 1638 bp, Escherichia coli
atgtcgcaagatgcttcacttaaagagaagattatccgcttagttctgtctgagctgggccaccctgtagaaggtgagcggctttttcttctatcgcaggacccatcccttaccgaagagattatgcggcttaaaaagcggattgagagccttgcacagggtttatctgcgcgggttagcgaagatgataacgacgcagagattgccgcctcgtcagcttccagtctttccgatcagcaacaaacggtcgtaagtgttgctgataacccgggcattgacgctaccgatacaccagaactgcaacccctgccagaaaatgagcctcatcctccgttctggaagctgatgccttattacgaatttgataaaccagcacagagagaagacgaaaacctgtcttccctggtattaaaacccgggcagataccgacaggccaacagcgggccagcttagcagtgccacctgccgttcccccgagagctaaaataacgatccccaacgcccgcgcaggcgaacgtttctcttcgccggttgctatcgttctgggtgagggccagcaggctactgtcagggacgttgtctttccccggaacattggcctgtcctttgacaaagaacaggagttgctgacaggtacgcccaccgaaagcggcgatatagagctttcagtaatctggtcatgcgcgtcgcacgacgaatgtgaaacaaaacagctatttataatcaatcccgatccgagaagcctgtggaaggtggtagagccaccagcagacgctccctaccctaagtcccatctggacgctgctggcctggtcaggggtgatatacgtattgctgccgccagtcgccggggacgctctcatgagcatgccgggagcttcagagatgacgacttctacatcaaccactgccaggaaacaggatggtctgtcatgctggtcgcagacggagccggtagtgcggtaaattcccgggaaggctcccggattgcagtcaaaacggctggcgattaccttttaaatcagctcagtggtgtgaaaggcgtccatttaaagcagcacatcacggcgtgggaagggagcgatcagcaggcaacaataaacgccatgcttcatcatttcaaacaggcagctacgctcgcggtcaacagtatccagaacgaagccatttgtgcagaacaacctgtgaaatcctattcaacaacccttctggcaactgtagcgctacgaactaataacgagctgtttgcggctgcattctggcttggtgatggtgcgataggtgcatacagcccttccggtaaagtcaggatactgggaaatcccgatagcggagaatacgcaggacaaacccgtttccttgaccagagcattatcgcagacccctcgtttagcggccgcatcagcgtgggtaaatggaatgatgtatctcacttgatcctcatgacagacggcgtatcagaccctctgtttgagacggataacgggcttcgcagtgacgaaaaatggacccgtctcgttgatgagctcaaccctgtccttacagacgccagtattgcgcctgagaggttaggcgactggcttaactttttctccacagggaaccatgatgaccgcactattgcggtgttgtggtaa

SEQ ID NO: 26643 - DNA, 1500 bp, Escherichia coli
atggcaaatatcgttacgtgcaaaacaaaggacggcgaaacagtccagtatgttgacgaggtaattggttcgggctcgatgaaggatgtttacttctcgcctgataaatcatacgtcgtcgctttttatcataaaccgcagaacgagcaggcccgggatcggattgatatgatcaccggacgctacaggcaaaacatttttggccagtccggaggtgaatactggaaggacctgttttgctggccgacccatgttgttgagcatggggataaaatcggcatcgtggttccaacctacaaaagctactttttctttaaatacggctctaaaaacgatgatttccttggcataaaaggtcgtgaaaaggaaggcaaatggtttgccagcgccagcaaccagaataaatttctcgatccacgtgaacgaggcaatacgcttacctatctcaaggtctgtctgctgctaacaagagccgtcagaaggatgcatgcggcaggtctctgtcacagcgatctaagctataaaaacgtgcttatcgatccagaaatgggacatgcctgcatcattgacgtagacggcctggttgtccctggaaagtatcctcccgacgtcgtgggcaccccggattttatcgctccggaagtggtgaaaaccagccatctttccaaagaggatccgaaccgcgtattgccaagcattactactgaccgtcatgcgctgtcggtgcttatctacatgtatctgttcttccgtcatccgctacgtggcggaaaaatacatgacatgtcggatgaagtacgtgatgagaccttatctatgggtgagaaggcactcttcattgaacatccgacagacaaaagcaatgcagtcaaagtcagtcagctatcctccttttcactgccctgggctgacccggagaaaattccttacaccatcatgggcccttacctgacgcctttgtttgaacgcgcctttattgatggcttacacgatgccactaaacgcccgaccgctgatgagtgggaaagtgccctggttaaaacagtcgatctgatacagccctgccagaacaaggcgtgtgaacagaaatggtacgttttctcaggtaagacaaagccggtttgcccctactgcggtacgccatacaagggtaaattaccggttctaaatttatattcatcccgaaaggaaggcagttatcgtcctgacgatcaccggttgatggtgtggagcgggcagtcaatctatgcgtggcatgtgaatcgcctcattgcgccaaatgagcgcacaaccgatgcacaaaggaaacgagttgggtattttgttttccataacgatcagtggtggttagtaaatgaaggcataaatgggcttatgtcattaccggataaacgacagattgccattggtgaaaaaattgaactgacgaataacgctcagtttgttctgtcaaaggaggaaggcggcaggctagtcgtcgttcagttagtagaaaactaa

SEQ ID NO: 26644 - DNA, 1083 bp, Escherichia coli
atgcgtaagagttacacatttggtattccatttggactccagagagaatcaggactctttttagatattacagaggtcagccggggtatcgactgtaactgcatctgccccgcttgcaaaactgatctgttagcaaagcagggggaggtcaagctttggcatttctcacacagtactgctgtagccggtgactgtgatggtctgatggaagccatccggggaaaaattattgaagtcatcaacgagcaccaggttcttggtttcccaaatcttcttgctggccacgatggtgggccggtttcactgaatgaggttagtggaagcggcagtatgttcggaggcacagctgatctgttcgtaaaggttaatgatttatgtgtggccgtctttctggacagggatcgtaacatttctgcgaagttaacctttgaccaccttcatccttccgaaagagttgccgcattgcgtatcgatcttccagatattgaatatgaaatcagtcaggtgcagctcgggcgacgtaaaacaacatacagtgagtgcattgaaagcctgatcattgatgagaccagttcccgggaatggctatatcatccattaatgcatgaacttgaatctgaacctcttcaggagtatcggggacgggagccttcagaggaagggcctcttcttcagcgccttgctgactgtaagatgaaattgcctgatatccttccgggcagtcataacgcgctagtcaggttacagcaggatacgattgtatgtctgtgtcggttaacggttcgggcttatgacatcgctcagaccgatgaatttcctttgtttcttcgctatttcaggttgcactgcctggaaaacagcgaacatgtcagttacgaaagactgatctgctggcaggaaatgatttcaaaaacccaggaaggccagtccttgacacaaaacgaacttgaatatcttcatgagattgtccgcatcgccttatacaatcacaggcttaacaatgtcagtatttcagatgttaaaaaccatgacacaggaaaggagagcagcagggtagagccacaaaactattcacttttataa

SEQ ID NO: 26645 - DNA, 1176 bp, Escherichia coli
atgaagaatcaatcagtgatcagacagttttcggaaagcgaattgcatcagcagctggaaacgttcggcaaccatgatatacagctttcacgcttgatccgttacttttcccatctgagatacaacactgctaaaacctatctgcactggctacgagtatggaacgaatggtatctggcgaatgcccggttgcatacagactggccagtaagttcgctccccgtgtctgaggacgctctgcttgcgtttatggggcatcttgaaggcaaattgtcacgaagcagcataaacagctgtcttcaggccttaaatagtatccataaaaaagggcttaacctgcccgggattattacgtctgaagcatggtacatgctggaagccttaaaacaatcggaagcccggaagcgaaagacgactaaacaggcaactccctttcttattggcgatctcaaggctctgataaagttacgcagtactacaaactcagttcgtaaacttcgtgacctgtgcctgatctggacaggctttgaaacactgctccgttcatccgaaattcgccgtatacgtctgaaagatctgtctctggatagtatgaccggtgaatttaacctgacggtataccgtacaaaaacgaacatcagtacacttcttacctaccggctgacacgtcagttaactaactgcctcttgagattgatgaaccttgtgaaaatggatcagcacagtcatccggatgaataccttttccaggccgttaatttccatgatacaggctatatgccacccggctggaagcttcggagtaaagggaatgagctatctgaacttcttaaacggcataacctaccctatcgtgctaaacaaagtcttctgaacgaggaagatgaggaagacactgtggacgatgccggtatgctcagcaaaaattcccttttacgggcatttaaagagatgtggaatgagctttatccaaatgagactaaaactcgttactggacagggcacagcgttcgtgtaggcggtgcgatacagctaaatattgaaggttactcgctaccacagattatggaaatggggaactggtcgaatgaagaaatggttatgcgctacattcgcaatattgaagctggtaaaaaagctatgatcaagcttatgcgaaatgcctttgatgaatag

SEQ ID NO: 26646 - DNA, 330 bp, Escherichia coli
atggtgtgcatcgtgttgttactctcagtggcggcggcgtggatcagtaataagacagttgatttgctcgaaagattctatttcaaacgtccgctgagcatggagtacgcggcatggctacgtgtagtgtgtgcgggcttgttattagtttttattcaggttgctccacaatttacactcctgtatacccttaaacttgtcacgcttattaatcttggaatccagacaatgaagttaaatggcgtgtacaaatataaaaggacgggaattttgcctccgggaggggcactctctaatctcaccagacttaacccgttcaagaaaaaataa

SEQ ID NO: 26647 - DNA, 906 bp, Escherichia coli
atgcaatggatttccacagccagccagaaaatcgatgagcgtctctatcgtgtctgcgtctgggtaaaaaaatatcacgctgatgcgattaaccgcgttgtgcttaccgttgatctaagtaaagcccgacatgaccccgacgaggaccaggtaagagcagaactgctgtgcggccattattttttgctgcgtaaggaaaacgcttcgaattctgcgcctgacgatcaaaagtttgctttcctgcctgacgggcgcaatctgtgttggcagaccgcaaccccggtgcttcagcatctcctgctcaataaaaacgttcctgagtcgctgaggttgcttacggactacatacatatgcgtcttgccaggctgacaatggtaccaatgtccggaaccatcatgaacgaggctctgctggacagcatcagctgggttaaggtggatttgacctacttctggcagtacgaacagctcagctctcatctgggccccatccagataacccacaaggcacttgtacgcttcgggcacctggcaaagaatgatgaaaactccagtgccataagaatcctgcgtcagcgtctgtcttcagaattcttacaagaatttcagatggctgaggatgagctaaagcgcaaacagtcgttgatgggcaccatggacgtgaaaatgctgtttcatgctcattaccccagccagaagatgctggtggctcgatataaaaatggttgggtaatggtggattgttttctgtttcaccataccaaacctaagaaaaaagcaaaaaacaaaacaactgtggctaagcctcaactaaaacagactaaaagagaagggagtgaaaatggaattgggcattatggtgtgcatcgtgttgttactctcagtggcggcggcgtggatcagtaa

SEQ ID NO: 26648 - DNA, 981 bp, Escherichia coli
atgagcctggagaaacgtatgagttatgacgatttgccctattttcgtgaccagattctggaacgtatcgactcgcttaggtgttttctttccaacacacccccgctgatggcaagcctgatgactgtctccaccgtatctcgaacagaagagcgcctgaagcaggttaaacccatcagggttattgttaaagacgatgcttcggttgaggaaattattcaggcacttactgacatctgtgtggatgacatagagtcattaagtcatgattccaccaaagtgaccactaaatacccgggtcttatcattgtcccagaaagagcagatcaactcgaaagcttgatcacttctataaacgcagcaaaaaatgattttgctgcggcaatgaggcgtattgataataaaaaaaatgtccgttttgataaagtgcataagaagctcccgggccttgtcgctatgcactcaacaagaaatattcttttcatcaattcccagcttaaaaaagttactttttcatggcggctaaaccgaaatcaggaagttaaaacagcagagcaacttgtgagtttgttggagcgcaggagagcctcagaagtaaaaaatgtagcaaccaccaatttgaatgtcgtgtctaatatcgacaaggctttacaccgtcttgaatttcacccactaaagcagggcgaatcttatcgcctgtgtcgaactaattcttttcctgttccgattgctcacatttttgcatacaggcccgaaggtcaggaacgaaacgggaataaatatgctgagactgattattcagtagtaaaagcatcattgcccattttcgcagcaggcaacttacccgaagtaaaaacgctccctgactgggctccagaaaacagccaggggccgtccaaccaacggaaactgagtctgaaatatacagaactcgttccgggggctgagctgggcattttcattgtcagccccgataaataa

SEQ ID NO: 26649 - DNA, 447 bp, Escherichia coli
atgcataaaaaacttttccttctcgaatggaaaccctgtcagagccgcgtatgggccggttggatggccctgtggttgactatcagttttctgatgttatctgccttgcttatgacagatcatctcctgaacaaagtcatcctgccgccaacatggttgttgatctggttttcgccaatgctggggtttttgataaaagttcgcgtcgtcgaaactcatcatttcctggagcatgacctctgtgttgcaggtttctctttataccgctggaagaagttagtctctcccgggctttggtcagttgactgtataaatggtcgttttcgcctcaatcggatcacacaagtgggtaagactatccactatccatggcgtctccattatcatcctttgttcatgagccctatcgaacagaaatcgaatgctgtgaaagctgtttctgaatga

SEQ ID NO: 26650 - DNA, 537 bp, Escherichia coli
atgagtactcaaaagcaactttccagaactaccggcactgaacgtatgtttaaggaagagctagcgttatccttaatttgttgggttttcaccagtccatttaccaactggactgataaagtcttcagtggtattgaagttccgtctgaaggaccgtctacattactgggtgagacagaaaagttctttcgttttgtcgttaatgaagaaggctacgacgcaggaagggctgctcttggtcttgacctatgttgtttttcacttccgtcgtgtttgttcccggacgctgacctgtctgaggaagagtttatgagtaagttaaccggtgaagttatccatggggtccttctttcattacctgaatttattgacatgccagaagtgctcgcttaccaggtcagggatgaaattcttgcttttaacactcgctgtggggacgggatctttcatggatggaacacggcttcagaattgtggaagtttgaaatctttccccgcaccaccatcatgatgcagcatacttcggcaatacattaa

SEQ ID NO: 26651 - DNA, 258 bp, Escherichia coli
atgagcagaaccgttacacaaagtgtcccagaagactgtctttttgattctcgtacacaagtcagattacaactaagtcgtagcgttcataaaacgctggcttctgctaaagaaatcctacagggaaggggggtcgattcggtctctattgaagatctggtgcgagcctgtctcgaagagaaccagccaattgatctcgcctcactttacctggaaaaccgtttaaagcagaaaggtaccagcatttgcgatttttag

SEQ ID NO: 26652 - DNA, 591 bp, Escherichia coli
atgataggcgcaagtttttttgactgggtaatttacggaatttcctttttgatatttgcctcagcactaattgaaggaaagacaactcgctatccagccctttttttctatggcagtttaattttaatgttaatcctgatagttgctggaggccttaactggtggttctacaggtcaaaatatggcgcagtaatcgtcatctttacagtggtttctttactgatgactcgattccgccttgtcatatataaattaagattaagaaagttagtttcagaaatcagatttcatataaaaagtggttttcgtataattcttgttttgtcggataatgaggatgagcgtaatgttctgctggctatgcttaataaagtgttgctagagcaatcgcttatttacacccgtgatgcgctcggacctcattcaggagctatcctaaaagctcttgagcaacatcatcaacagggaacaggttacatacttgtctgtgaacaacaaatcccagcgcgtacgtggttgagcatcgtagaaaatgggaaccccaatacatctatagctgttaattttcattcgatcccagaaatggagtga

SEQ ID NO: 26653 - DNA, 276 bp, Escherichia coli
atgaatgaactaaaatccaaaaacgagaacagtaccaaaagcaactttcccccggttgataatcagttttgcttttaccatgttgatttcagcatagaacgactactttcaacggccgaggatcaccagcttgagtacatctttcagaaacctggaagtgaagtaagaaaggatttgtttgagcgattcgaacgtggagaacgctttgttacagcttcacactgtgacaacttctgtcaaatcctgggttgtcaaggccatcaggaaaaagcatag

SEQ ID NO: 26654 - DNA, 957 bp, Escherichia coli
atgacacattcatctgatgataaaaactatgtccgagcagttctgagttatcttggcatagattttgatgaggcggatatagtattaagtgtttgccattgtcaaagtgacgagctttcgtttacctgtaatatcaaagctattgaactcaagaatgctgttgatttatatgtcgatagtatctctgagagtgaaatagaagctttaaacagagaatctttaaaatcgcgactctgttactttcttgaggtgtttgacgcagtctctggtcagtaccttgaaatttcaggaaaacactttgcaactagtcgttttgaatatgatgatgtttgtagtgaagttcttagcatgtctaatgatgtttctcagtcgaaaggttatgaccgggatgaatataacagactgatgcaggttgatggtcaggttatgattgcccgttttgctttgcaacagttctgggatactcattttattggactaataacatttgtatctgagtctataacatcgagcctctataaagcttatgaaacttttagtgatattagtttggcttgctataaactgagtgaatattcttattcacgctctatcaacagtgaattgacccttaatatttcacttaaagaaaatgacttctgtgaggacctatctgattgctatatggaagatgagactttaccttctggtagggtaatttctcgacgcaacaatgactccataataagtatttatgagagctatgctgcggcttcttatattccgatgattgcatctttggaagtcgttgatgaatacggcgaagtggttactgacctctgccataccgtttacgtttcagagttaaccggtgggcagattaaaatccacgaccgtaatgacttagtatctgaagttttcgataacctaagaaatttaaatcttgcagttggagattcagtttcacaagctgcttga

SEQ ID NO: 26655 - DNA, 654 bp, Escherichia coli
atgcgtggatatagtaacactttaagcccagttaaagttattgatattgtttctatgattattaatgactgtgaagggttatctaaagaaaactcttctgctgatgctataagaaatctttatctcgataaaatgaacgttgatggaagagtgttagttgcgaaatttgcacttaaacagttttttcattccgattttggtgactttatctcatttgtcgagaaagaaattacagtctgtctcaatgaaacattaaggataataaaatctgttgaacatgccttcgtacgtgttggacagcataaaattaaacgtcgtattaatgatggattaaaattaagcattgattttagtacagatgaatatccggcaaatatgccagacgtttatatcaaatttactgaaactaatgatggcaatggcgcgttgtactgtgacaatgatgcacttattgccctctacacaaatgtcgcatctttgactaatgtaccggtaatgatggaagtcagtttgattgataagagagaaagagttatttgtgagtctttgcattcaacttatgtttcactcgatagtcatggtcgctacaaagttattgatcgcacgttgctgattaacgaagcttttgaggattttcgtaacgcgtctcaatga

SEQ ID NO: 26656 - DNA, 333 bp, Escherichia coli
atgcagcgggtcaaaattattttttctggcgagatggcgtgtttcctccagactggcgacaaattcaggccacgggagtatgttttctattgcgagccatggatcgccaccggagtcgcgggcatcagacagcgcctgaccaacatcgatgtactgcctcagtttggactggatcagctttccggtctgctgaaggcgctcagcctgtgttcttttggctttgttgaaaaggctgttcagcattcgttcatgcagctcaatcacttcgtctgtcagtgtggctctggcttcttccagcacgcagaccaggatcgcatgacggcgggctgctga

SEQ ID NO: 26657 - DNA, 924 bp, Escherichia coli
atgactaaaacaaaagggttacctcgtccgctgacgcactacgcttggctttccattgccacggctattgccactatcggactcaaaggtgtggcgtggaaaatgaccggttcggtcggtctgctatctgatgccatcgaatccgtagttaacctcgcaggagccctaatggcgctctggatgctgaccttggctgcgcttccggccgatgagaaccatgcatatgggcacggcaaagccgaatatttctcgagtgctttcgaaggatttctgatcctattggcggcagccagtatcgcctataccgcagttgagcggatgttaactccacagccgcttgaggagattggtctcggattactggtttcaacagtcgcatcaatccttaattttgtgacggctcgcattttgttaagggctggcaggcagcacaactctatcactcttgaggcagatgctcatcacctgctgaccgatgtctggacgtcggtcggtgtcatttttggtgtcggactggtttatctgaccggctggttttgggtcgatccgatcgttgcattgctggtcgcagccaacatcgtttggactggttatcagcttatgagtcgttcagctgcaggtctgatggacgtatcgctacccacggaagaactcaaaaaaatcgagtcactgctggcaggatatcgtgaacaggggcttgatttccatgcactacgtacacgccaggctggcgggcgggcgtttatgacaatgcacatcctagttcctgggcgatggactgttcaatatgggcacgactgggccgagcgtatagagaatgatatccgcaccgcactgccttttatccatatcaccactcatgtggaaccgttggaagatcccgcgtcaatgaacgaccaaacgctcgacatttctgatcactaa

SEQ ID NO: 26658 - DNA, 573 bp, Escherichia coli
atgaaattgcgactctggaatctattaccccatgattacgctcctttttttcgtattcttcacatcattgtggcatttctaatattatcacaaattattaactctaatctgacagagaccgaagcaattggtgaacatagtcttgaaggagttataacctggatgcacattatttcagggttaggactgattatttgtggttttattatgttaagttggatgcttactcaaagaggttttacttattatttttcatgggtagggcttgactttagtggtattaagcaagatataaaaacgttgactagtttccgactgcccgatgcacattcgggaggtattgccagtacaatccaaggatttggagttctagcattgctaattgtagcactttcaggtggcctatggttcttgttgaataccatgcagtcaaatctggctgaaacagtaatccactggcataagttctttactactttcattgaggtctatttttatgcacatggtgcaatgggagttttgcatattttaattgaaaaatataaaagccgctcagttaacctaagtgactaa

SEQ ID NO: 26659 - DNA, 1239 bp, Escherichia coli
atgactgtgactaatcaatttgctgcgcacgttggtctggactgggctgataaaaaacacgatgtctgtgttcagtttaaaaacggtgaacgcgtattcgatgtgattgaacatacagcagaagcgcttgatgcctggcttactgagttacaccagaaagtaaaaggtagaatcgcaatagctctcgaactgaagaagggccccgtggtatatgctcttcaaaaatacccctttatcaccgttttccccgtccacgcattgtccctggctcgttatcggcaagccttctcgcccagcggcgctaaagatgatccgcaggatgccgagctggcattagagttaatgctgcgttacccccagaagataaaagctattgaacccgacaatgcggatattcgcttacttcagcaactggttgagcaacgtcgtcagttggttgaagataaacgacgctttgtgaaccggataatcaacacgcttaaacagtattatcctcagccactggagtggttctcacatcggggtagcttactgttgtgtgagctgattatccggtggcccagtctgcaacaactgaaacgagccagacgcgacacgatccgcaactttctgaatgccaaaggtggtcgcgctatggcccttaccgagcaacgtgttgcgagtattgataatgcgatcccattgactacagacccgagtgttatagaggctaatgctttgatggcagcagcactggcgacacaaattaaagtcgtgagtgaaatcatcaaaacctatgacgaacgaatcgaaacgctgtttgacacattgccagatgcggggctgttcaaatcacttccgggcatgggaccgtgcatgggcccacggatgcttgctgcacttggtgataaccgtgaccggtttaacagcgctgaagaaattcaaaactacgcaggtatagcaccggtgaccgaacgaagcggccaaaaatcctgggttcactggcgatggcaatgtgccaagttcgtcaggcagacctttgttgaatgggctgccaagacggttaattcatcatactgggccaaactgtattatcagggcctcagagaaaagggcaaatctcatcagtctgcgatccgggcactggcgttcaaatggataaggatcatttaccgctgctggaaggccagaacctgttatgacgaagcgaaatatttgctggctctcgaagcgagacactcgcccttactgaagccataa

SEQ ID NO: 26660 - DNA, 312 bp, Escherichia coli
atgtaccttggtgtagccgaactgccgcttgatcacgcgaaacgggggctctaccttcgctcgcacttgcgccttggccttctcgatcttgcgcttggctttgtacagggcgctgcgtttatcgagcatcttgtaggtgctgcggcgtgctgcgacctgccagatcacttctcggtcggcatgctcggagcgcttttcgacgcctgtgtaaccgtcatcggcgcagacgacgttctcgtcgccgtgcagcagtttgtcgacctgggtgacatccgccacggtggcttgtatctaacagtttgtggtgattag

SEQ ID NO: 26661 - DNA, 1152 bp, Escherichia coli
atggcctatctcgacccgtaccaacgccccgcgtcggaccgcttcgtccggcgcgggctcttcatcaccgcctgcattgccgcgctcatgctgctgtggcagtttctgcccgccatcgaggcatggttcagtccgcgcgaggcagcagaacgcaccgtgatggcgcgtggcgatctggcggcggacgagaaaaccaccatcgaactgttcgaaaaatcgcgcgcctcggtggtctacatcaccaccgcgcaattagtacgcgatgtctggacgcgcaacgtgttctccgtgccgcgcggcactggctcgggcttcatctgggacgacgccggccacgtcgtcaccaacttccacgtcatccagggcgcgtccgaagccaccgtcaaactggccgacggccgcgactaccaggccgtgctggtggggacgagccccgcgcacgacatcgccgtgctcaagatcggcgtcggtttcaagcgcccgccggccgtgccggtcggcaccagtgccgacctcaaggtgggtcagaaggtgtttgctatcggcaaccccttcggcctggactggacgctcaccactggtatcgtctccgcgctcgaccgctcgttgccgggagaagcgggcggcccggccatcgatcacctgatccagaccgacgccgccatcaaccccggcaattccggtggcccgctgctcgattcggctgggcggctgatcggcatcaataccgccatctacagtccgtctggcgcctcggccggcataggctttgcggtgccggtcgataccgtcatgcgcgtggtgccgcaactcataaagaccggcaagtacatccgtccggcgctgggcatcgaggtggatgagcagctcaacacgcgtctgcaggcgctgaccggcagtaagggcgtattcgtattgcgcgtgacgccgggctcggcggcgcacagggccgggctcgtcggcgtcgaggtcaccgcaggcggcatcgtgcccggcgatcgcgttatcagcatcgacggtatcgccgttgacgacgtcaccacattacaggcccggctagacgacaagaacgttggagatgttgtggtcttgttagtggagcgggccggcaagactcgcgagatgcttgtggaactacgaccgggagtttga

SEQ ID NO: 26662 - DNA, 966 bp, Escherichia coli
atgacccgtcatcatcctagtgatccgcgcacggcgctcttgcaacaccgctggctcaaccgcctgcagaccgggctgttggtcctgaccctggtcgggatcgcagccgcagcagggagactgccgtttggggaaggctgcctgtggctcgcgctgtttgccattgcaggtgcgttgctgctggaaccggtagccgcgtcggcgctgagcttgcgcctgtaccgcgtacgggccttgcacccgcaagaagcccacaagatgtgggccctgttgcgcgagctgcccgcccgtgccggtttgcccgccacgccggtgccgcactatgtgcccagtgccgtcgtcaacgccttcgctaccggatcgaagcaggaggcatcgatcgccctcaccgatggcctgctgcgcagcctgagcccacgcgagctggcgggtgtgctcgtgcacgaggtcgcgcacatcgctaatgaggatctgcgtgtcatggggctggcggattccgacagtcgcctcacgagcctactggcccttatgggacagatcgcgatcctgctcagcctgcccgcgcagctggttggcgcggcggaggtctattggcctggtctattgttattggccgtatcgccccagctggccctgctcgcacagctcggcttgtctcgcgtgcgtgagttcgacgctgaccgccttgcggcggaactgactggcgacccgcaggggctggcgtccgtgctggcaaaaatcgagcgggtcagccgctcctggcgtgcctggctatggccgggatggggcaatcccgagccctcctgcttgcgcacgcgtccggcaacgcaagagcgcatcgcacgcctgctgacgttggcgcctgggccagcatcagcgttgccactccgcgcgccccattttttgccggaatccgctttggcgacgcgcccaccgcgctggcgcccgagcgggctgtggcgctga

SEQ ID NO: 26663 - DNA, 495 bp, Escherichia coli
atgaaatcaacacgccttaacccatttcaggtcttacgtgaccaattggccatcatgagtttttacgagcgcttcgagcaggtcgtcgcgctcgtgctgtcggcggtgatcgccgtcatcatcgtggtgtcgctgttccagctcatctccatcgtcttcacgctgctggttctagatgccttcaatcccctggaccacgaggtattccagagcgtgttcggcatgatcatgacgctcttgatcgcgatggagttcaagcattccatcgtgcgcgtggcgctgcgtcgggacagcatcatccaggtcaagacggtggtcctgatcgcgctgatcgcactctcccgcaagttcgtgatcctcgactccaacgcgagccccgcaaagatagccgcgctggctagcgccacgctggctctgggtgcgacctactggctgctgcgcaagcgcggcgaccgcgccgccgagacctctgagcatgacccgtcatcatcctag

SEQ ID NO: 26664 - DNA, 1716 bp, Escherichia coli
atgcagggcttgctcggcactacactaatcctgctggcggcttgcagcctggcggcgatggcgacggcggcgttcagagtgcccgccttgctggggtatctctctgtcggcgttgtactgggcccctcagtcatcggcgtgatcgcgccgggggagacgctgagctttctgtccgagctgggcgtggcgctgctgttgttcatggtcggactggaattctccctcggagacttctggctcgcccgcaggacggtgctgatggcgggcgctctgcagatgatcgccgtggccccgccgctgatcctgctattgatgtggctggggcagcccggccagagcgccgcgctgctcggcactgcggcggccatgtcgtccacggcgctggtcagccgacaactggccgaccaaggtgagctcaccacccgccacggacgcagtgccatcgccgtgctggtctttcaggacctggccagcgtgcccctgctggccttgctggcgatctgggcgcgcggcgagtcgccgaagatcgagcatgtgctgctcgaagtattcggtgtgctgctgctgttcgcggcagcggccctcgcctcgcgccgtctgttgcatggcctgctgggctgggtggcacggcggggccacgaggaatcgttcgtgctcgtctccttgtgcgtggtggtggctgccgccgccgctgcgcacgcggtcggcgtatccgccgccctgggggccttcctcgccgggatggtgctgggcgagagcgacttccggcaccacatggaaagccacctcaggccgtttcgcgatgtgttgtcgggcgtgttcttcgtgaccatcggcctgcaactggacgcagcacagattctttcggcaccgctggcggtgctggcgtggctggtggtgctggtaccggtcaagatcctgctcaatacgctggccttgcgggcgacgcgcctgtccgccctcgatgcctggcgcacgggcatagcgttggggcacggcggcgagttcgccctgctgttgttgggcacggtcttgcagcagcatctgatccccgcgaccgtcgtccaacccatgctggtcgcgctggtgctcagcatggccctggcaccgctactgatccgccatcacgatgtacttgcccggttcttgagccgcacaggcggcgtcattcagccaccccaggctgaagaagtcgagatcgccgcgcagacgacgcgatatcgagaccatgtcatcatttgcggcgcgggcgagcttggcctgacagtcagcgagattcttcgccacgccggcgtggcgcatctgctgctggaggcggacgcgcagaaggtcgaggccgcgcgtgccgccggcgcgccggtgttccatgccgatgccagtcggcccgataccttgctggctgccggcttgacgcatgcacacttggtggtgctgacgttcgcccatgcccagcaagcgttgcgcatcgcccaggcgattgccgagcaccgtccggcgctgacattgtgggtgtcatgcagaagtacgaccgcggccgatgcatttcgcgccatgcccaacgtgcgcgtgtatcagcaatcctttgccgcagctattgggctggcggaacaggtgatgtcgacgcttggcatgtcgaccgagctgattgaaggacacatcagcgcaatgcgccgccgtctcgacagcagccgtttaccagggagttcatcgtcatga

SEQ ID NO: 26665 - DNA, 441 bp, Escherichia coli
atgaagaatgatcttcacctcgtctgcccgcactgccagtccatcaaccgcgtaccgactgcgaagctatcggaacatcccaactgtggccgctgccagcagcccttgttcacgggcgagcccatcgagttgaccacggcgacgttctcgcgccacgtggagcgcagcgatctgccgctgctggtcgatttctgggcgccatggtgcgggccgtgcaagatgatggcgccacagttccagcaagcggcgcaccagctcgaaccgaggatccggctggcgaaggtgaataccgaggctgagccccacctggccacgcagttcggtatccgcagcatcccgacgctcgccctgttccagggtgggcgggagatcgcccgtcaggccggcgtgatgggcgcgcaggacatcgtgcgctggacgtcgacgcaagtgggacgctga

SEQ ID NO: 26666 - DNA, 1146 bp, Escherichia coli
atgcagatacaatatagctatcgagctatcgacaaagagtttcatgaaccttggcagagagctttgggaaatgtgatcgagcacgccctcaagccattgctcgacaaacacactaaagattcagcgcgacttcaaatcgtccttgatcgcgacaagatcaagcggcaatttctggccagtggctatatgcacctgcccggcaaaaagattgtcagtgttactgcatcacatgacgagctgacgcccctcgcgcagatgctcgcaaagtcgttgttccgtcaggccaagaagcattttgaccgactgcatgctcaggatcaaatcaagcgcaaagcacgacgcgagcgcttgcgcgagctcaaggtgcggattgccgcaaaacccgcatcagccgcccatgaggccgaggtgatccgaatgcctctactgtcgaaacttgaggctgtcgcaaggcgtgagctggcttatctgcgggccgtcggcgatttaccgcgcgattatccgacgctgcgcgacgtggtggatgaagcgattgtccgagctaaggtggaatggcaatccgtgccgggggaaaaagaggcttacaccggtcttttgaagcatctgttcgccgtcctggataacgaagtggcaagcagccggcaatttggcgaattcgtttctctggacgcgccggtcgaaccggatgcccaagacgtggccgaggccatggtggaagaggaaatcttcgaattttatcagcacgatgacacactcaagctggccgatattttcgctggcagtcagcatcccgatgtcgcaacgatcgcggaacaggaggagctgattgatcggacgagcgagttcgcttttgcatttgacctgctgaaggacatgccgcgtttgtggcggcgcatttttctgcttatccgtgtggacgggctgaatgccagctgcgtctctgaaatcctgctgattcctagtaaggaagatgctgtccgaaggtggctcatgcaggccgaagcattcatcgctgctcatctggaagaggccggagtaagcaaaaacgggaacgattggctccaaggcgttgattggttggcattgtctgtgacccgaagcgaggcagcctcactgtggtccaaggaggcgaaccatgaagaatga

SEQ ID NO: 26667 - DNA, 612 bp, Escherichia coli
atgaatacagacaccatcaccgattccagtgcggatgaccccaccaaagcactgtgttcgcttagccaaaattggtggctttttgtgctgcgcggtgtcttggcattgatttttgcagccctcgcgttctggatgccacaatcggctctgttggccatgaccatcatgttcggcgcattttccttggtcaatggcgcgttcaacttgtttgcagcggtgcgccatatccagaaaaaagagcgctggggctggttgttgttcagcggcattgtcggcatacttacgggcgtcgtcgtcctggttgctccttgggtcgccacgatagtcttggcttcttttttatgggctagcgtgggcttctgggcgattttcaccggagtgctggagatatccgccgccgttcggctgcgtcgggaaatcaagggtgaaatctggcttgccctcagtggactgctctcgattatccttggtgctatcgtcttgtggatattttttacccgtccggtcgagtcattcgtggccgcaggctggctgttgggtttccatgcggcagtctatggcgtcacgcttttgttcttgagttggcgtcttcgcaaaacgcgcctggggtaa

SEQ ID NO: 26668 - DNA, 888 bp, Escherichia coli
atgaatgagcaaacaccgaatcccaatgcgacgaacgaaggaaaaaacgaacaggccgcggtaagcagccttcctgtcagtccagagtccaagcctgaagtcgtcacggaggtacagcctgaggttcagaaagaaacggactcgcaggcggcagacaaacgtaaacaagtcctcgatgaggcagtctcggccttgtcgctgaccaaatcagcgctggccgcacttgacggcaaggacactgcacgcgcattggcaacgctggccgaagtgacgggaaagctggagctgatcgtcgcgcgcgaacccacgctcgccctggccggcgttgatgtgcgcaccatcgtgcacgacttgttcgccaacacggaaaccattgaggcgatgaccgacgaggcgctggatgccctcaaacatggcgaggtgcaacaggctcgccacgtgctggctttgctggccagtgaaatcgtgatcacggtcaccaacatccctttggcgtcctatcccgcagccgtgaaggcagtcgtgccgctgatcgatcagggcaagatcgaagaagccaaagccgcgctgcagtcagcgctcagcacgctggtcgaggagcgcagcgtgcttccgctgcccgtcctgcgtgcgaagctgctcctgaagcgcgccgagcctctggtagaagatggtcagcgcagcgaagcatccaatgagcgcctggagacattgttgaacgaagcccggcagcagttggaaatggcagaactgctgggctatggaaaaaggaaggactttgagcccctgtacgctgaactcaagaaaatcaaggaaaagacgggagggggaggcggcggaaaaggctggctcgatgaaatcaaggcaaagctgtccaggttgttctga

SEQ ID NO: 26669 - DNA, 915 bp, Escherichia coli
atgaatatcaaacagccacaatacaccttctccgcacttgtcctggcggtcgtcgtcggactgagcggaccggctctggcccaatcggcggcaggttctagcccaggtgctgcagcaccctctgccgcatccaaggcggcacagccacaggtagatgacaaggccgcccgggaagccgataaaaagcgtgccgagctcactcaagacgccatcacggcgctcaccaagacccaggaggctttgaccctccttgatgcaaacaagaccaaggaggcgcttgctgcgctggaactggccagcggaaagctggaactggtattggcacgcgacgccaaacttgctttggcgccggtcgatgtacgcgtcatcacccacgatatccacgccaacgtggaatcggtaaagaaagcggtcaagttgtctcgggagttgttgggtgatggcgaggtgcaaaaggcccggcccatcgttgccaatctggccagcgaaatcgtaatccaaaccgacaaccttccgatggcaacgtacccggcagcgatcaagtcggccgcacggctcatcgacagcggcaagatcgacaacgccaaagcggaactcgcccgagcactgaacacgctggtggtgacctcggtcgcctttcctctgcccgtgctacgggccgaagccgcgatggcaaaagctgaaaagctggccgagaccgacaggcgcgatgccaagcagaacgaggagctcagcaccttgctgtcgtccgtgcgcacggagatcgagatggcgcagatcctgggttatggcaagaaggcggacttcaaacccatcttcgatcaggtgaagtccattgagcaaaagtcggctggtggcaaaagcggcaagggatggttcgacgagttgaagacgcgcatccaaaagctgttttga

SEQ ID NO: 26670 - DNA, 459 bp, Escherichia coli
atgtctgcattgactccgtgggaccccttccgggaactggatgaattgcaaaaccgcctggcgacgatgttcggacgaataccccagcgacagggcgcccgtaccggcaacgaagccatgaccacggcggactgggctccaatggcggacatcagcgaggatgagaacgcattcctcctcaagctggatctgccggaggtccccaaggatgccgtgcgcgtcagcgcggaaaacggtgtgctcaccatcagcggcgagcgcaaactggaaaaagaggagcagggcaagaagttccaccgcatcgaacgtgcctatggccgctttgtgcgcagctttgtcttgcctgacaacgttgatccgaccaaggtgacggcttccatgaaagacggcgtgctggaagtgcggcttgtcaaggccgagcaagccaaaccgaaacagattgaaatctcagtcaactaa

SEQ ID NO: 26671 - DNA, 141 bp, Escherichia coli
atgggcgtgttcgagcgcgcctaccggattctcgacatcaaccgcgcggtgctggagcgctgtgcgcgcgagctgctggcgcgggaaacgctcgacgaaagcgatatccgtcaattgactcaaggacttgttcggaactga

SEQ ID NO: 26672 - DNA, 687 bp, Escherichia coli
atggaaaaaaagaatcaatggaataccggctactggatcgttgccctcctgctgttgttgagtttgcagagctactggcagacggcgaaaaccgtcgagccggtgccctacagcgagttcgagaaggcgctggccgaggggcgcgtggccgaagtgctggtgtcggatcgtacggtgaccgggcgcctgaagtcgccggacagccggggcaagacgacgatcgtggcaacgagggtcgaacccgatcttgccgatcgcctgtcgaagtacgacgtgccctatgcccgcgtgttggagagcacctggctgcgcgatgtgctgtcgtggatcctgccagcggtagccttctttggcgtctggttcttcctgttccgccgcttcgccgagaagcagggcatgggcgggtttctcaacatcggtaagagccgcgccaaggtgttcgtggaaaagaacaccggtgtgacgttcgccgatgtcgcggggggggatgaggccaaggcggagctggtcgagatcgtcgatttcctgaagaatccgcaggactatggccgtctcggggcgcgcattcccaagggcgtgttgctggtcggcccaccgggcaccggcaagacattgctggccaaggctgttgccgggtggccgaatcgacccaggcgcgcatcgatcaggctatccgcgacatcgtga

SEQ ID NO: 26673 - DNA, 192 bp, Escherichia coli
atggcgggcgaggctgccgtgtccgaccccaagggcctggcatgggcagcctccctggcctcgatcgcggtggcgttcgtggccgcgggtcacgcggtcgtctacaagcgtgatccgcggtcgaccacgccgtgggggctgctcatcagcggcggcactgccctcccgctcgctggccatccgtttgcgtga

SEQ ID NO: 26674 - DNA, 2850 bp, Escherichia coli
atggccagaaaacaatgccaggtctgcggccaacccgccaccgtgcgggtggaagccaatctcaacggtcgtcacagcaccatgctgttgtgcgacgaccattaccggcaattagtgcgccagcaaaagcgcaccgtttcgccgctggaagccttgttcggttcgcgcagcggcctgttcgaggacttcctcggcagtgacttcttccgcatcggcgacgacgcgacgccagttgccgccgataccgatgacgtggtcgatgcctcgtttggcgagcccgccgccgcaggttcgggtgcgccgcgccgtcgcggcagtgggctggccagccgcatcagcgaacagtcggaagccttgttgcaggaggccgccaaacacgctgccgaatttggccgctccgaggtggataccgaacatctgctgctggcgctggccgacagcgacgtggtcaagaccatcctgggtcagttcaagatcaaggtcgatgacctcaagcggcagatcgagtctgaggccaagcgcggggacaagcccttcgagggcgagatcggcgtgtcgccgcgcgtgaaggatgcgctcagccgcgccttcgtggcctccaatgaactcggccattcttatgtcggtccagagcatttcctgattggtctggccgaggaaggcgaagggctggccgccaacctgctgcgccgctacggcctgacgccgcaggcgctgcgccaacaggtcagcaaggtggtcggcaagggcgccgaggatggacgcgctgagacgccgaccaacacgccagaactcgacaagtactcgcgcgacctgaccaagatggcgcgcgacggcaagctcgacccggtgatcggccgcgcgcaggagatcgaaaccaccatcgaggtgctggcccggcgcaagaagaacaacccggtgctgatcggcgagccgggtgtgggcaagaccgccatcgtcgaagggctggcgcagcgcatggtggcgggtgaagtgcccgagaccttgcgcgacaagcgcctggtggaactcaacatcaacgccatggtggccggcgccaaatatcgcggcgagttcgaggagcgcgtgcagaaggtgctgaaggaggtgaccgagcaccagggcgagctgattttgttcatcgacgaggtgcacaccatcgtcggtgccggccagggcggtggcgaaggcgggctggacgtggccaacgtattcaaaccgatgatggcgcgcggtgaactcaacctgatcggcgccacgacgctgaacgagtaccagaaatacatcgagaaggatgccgcactggagcggcgcttccagccggtgacggtgcccgagccgacggtggcccagaccatcatgattctgcgcggcctgcgcgacaccttcgaggcgcaccacaaggtcagcatctccgaggacgcgatcatcgcggcggccgagttgtccgaccgctacatcacggcgcgcttcctgccggacaaggcgatcgacctgctcgaccaggcggccgcgcgcgtgaagctgtcggccacggcccggccggtggccgtgcaggagctggagtccgaactgcaccagctgcggcgtgaacaggattacgtggccgcgcgcaagcagtacgaccaggccgccgagctcggcaagcgcatcgaagccaaggaggccgagctcaagaagctcgtcgagaactgggagcgggagcgggcctccggcagtgcagaggtcaaggcggaacacgtggcgcagatcgtctcgcgcctgaccggcatcccggtcaacgagttgacggtggaagagcgcgaaaagctgctgcacttggaacaacggctgcacgagcgcctggtgggacaagacgaggcggtccgtgccgtggccgatgccgtgcggctgtcccgcgccggcctgcgcgaaggcagcaaaccggtggctaccttcctgtttctgggcccgaccggggtgggcaagaccgagctcgccaaggcattggccgaatcgatctacggcgatgagcacgccctgttgcgcatcgacatgtcggaatatggcgaacgccataccgtggcgcggctggtgggcgcgcctccgggctatgtcggttacgacgaaggcggtcagctcaccgagaaggtgcggcgcaagccctacagcgtgctgctgctcgacgagatcgagaaggcacaccctgacgtctacaacatcctgctgcaagtgttcgacgacggtcgcctcaccgacggcaagggccgggtggtggatttcaccaacaccatcatcatcgccacgtccaacctgggttcggacatcatccagcgacggctgaaggcgcgtggggcggccgacgaggagtacgaaaagaccaaggccgaggtcatggacgtgctgcgcggccacttccggcccgagttcctcaaccgcatcgacgagatcatcgtcttccatgcgctgggtaaggaggagatccgccacatcgtcggcctgcagctcgatcgcgtggcgcgcagcgccgccagccagggcgtgacgctcactttcgatcagacgctgatcgaccatttcgcggaagaaggctacaaacccgagttcggtgcgcgtgaactcaagcgcctgatccgcagcgagctggaaactgcgctggcgcgcgagatgctcggtggcggcatcggcaagggcgatcacgccagcgcacgctgggacgacaaggccgaacgcgtggtgttcgaacgcaaagagccactgcagaccccggccgagccggagcagccggatgccgcgaaggcgaccgagacgccgcacggcgacgctggcaaaggctcgcgcaagaagaagtcggcgagcgacgcatcttga

SEQ ID NO: 26675 - DNA, 570 bp, Escherichia coli
atggacatcgatttcaagaagttggctccctggaactggttcaagaacgagcagcaagagcagcagaccgtctcttccctgccggtgcagcgcaatgacctgccagcggcgagcgggccagtcagcccgatcctgcaactgcatcgggaaatcgaccggctgttcgatgacgcattccggggcttcggttttccggcgttgaacatgccgcagtggccatccgattggtcgggcatgctgaagccggccctggacatccaggaaaccgacaagcagtacaagattgccctggaagtgcccggtgtcgaggagaaggacatccagatcaccctcgacaacgacgtgctgatggtgcgtggcgagaagcgccaggaacaggagaagaaggaaggtggcttccaccgtgtggagcgctcctacggcagctttcagcgtgccttgaacctgcctgacgacgccaaccaggattcgatcaaggcatcgttcaagaacggggtgctcacggtcacgatcgacaagcgcgaggtcagcgcgccgaagcagggacgctcgatcccgatcaacggctga

SEQ ID NO: 26676 - DNA, 516 bp, Escherichia coli
gtgcagcgttctcccgccccattgatgcaggtcaactgctcaggcaatggacagcgccgggctcgtcagcctgcgtgtgccacaggcgcctcgatcaaacaccgatcctcacgttgtagccgagtgcccgcagccccttgctcgtctgcatgttccttggcggaaactcgtctgggcgcgcccagacgacgatttccccgaggctgctcaggccaacgtgcggaattgcccagtcgtcgctgcggatcgcgttccagagtcgggccgaaacacttccgttgccccagacaacgtagttcaacagtatccgtccggccaacacaccttcccgacaccgccgccgaaggccatggcccatcaagcggattttccatgcgccctcagcgccgtacctacagcaaatctttcaaggctcaggtcattcaggagtgttctgaacccggtgcctccatcgcaaacatcgccttgggctacagcctcaatgcggctttgttgaataaatcgaacttttgctga

SEQ ID NO: 26677 - DNA, 240 bp, Escherichia coli
atgacgactgaagtggctgtaaacgcagtacctatcaatttcaatataaacaatgaactaacgctgttagcgtggttttttgcatcattggccctcaaacccctaagagaaaaatacccatggctggtccctgttcatgccgatggtgtggttggaggcaagaaagaattcaccttgctgaacaagtcagagatggagttactggctgacgcctatgagatggcaaacatcatgcactaa

SEQ ID NO: 26678 - DNA, 1554 bp, Escherichia coli
atgcacgaatatttaatgtttgctctggcactctctcctttgctgctgatggtatttttaatactgaaattaaaaatgcccatccattattccgtactgatctctttggtattcaccgctgcactatcggcaatattctgggaaatgcccgtacaaaatctgaaagccgcgatagggtatggcgcactgaagggactatggccgatcgtgattgtgatcctcggcgctattttcagttataacgtcatgcaggcgaccaaagcgctggatattttgcgcgatattctcgccagcattagcgaagataagcgtattcaggtgctgctgatttcatggtgttttggtggatttcttgaagccgcagcgggctatggcacggcggtcgctattccgatcggcattctcattgcgctgggattcaacccgttgaaggcggcgattgcctctctcgtggcaaatacagttcctaccgcattcggcgcggtcgggatcccggtttctattctggctgaacaggttaatctgccggtttataccttaggcggaaccattattttgcagctcgcgttgtttaatatcctgctgccgtttgtgattgtctgcattattggcggtggcctgaaagccattcgcggcgtatttctgatcacgttgatttgcggcatttccacgctgattccgcaatattttgtcgccatccatcttggcgcggaattacccgcttttgccggtagcctggtcagcctgtttgccgtggcgatggtcagtcgcctgcgcaaagggaaaaccgatccagagtggcgcattgaggtcagccatacccgcgaaaccacgccgcgctcggcaaaagtgttgttccgcgtgggctctatctatctgtttatttttgtgtttatcctgctgtgttcgccgctgttcccgacaataaaaggcgcggcgtcccaactggcttcggtgctgcatttcacgttggctgacggcaaaacgatggcactgaaagttgaatgggtgaccacaccagggatgctgattatctttgcgaccattatcggcggttttattcagggagcgtccgcacgcgggatgctggaagtatttatcaaaacgattttccagcttaaaaactctatcgtggcaattatggcgatcgtcgcgctggccacggtgatggatctcagcgggattatctccacactggcgcagtcgattgtcgatctgaccggcagctcgtacgtcttcctcgccccggtgattggcgcgctgggcacgttcgttaccggcagcgataccaactcgaacattctgtttggcaagctgcaaaccatagctgccagcaagttacatatcgatcccaactggctggcggcggccaatacctctggcgctacggggggcaaaatgatttcgccgcaaagcatcgccatcgcggtttctgccaccaaaatggacggtcaggccaatcagatcatgtctggcaccatgaaatactgctgtgcctacattgtgatccttggcctgaaagtcggtctcttttattactggtttatggcgtaa

SEQ ID NO: 26679 - DNA, 1698 bp, Escherichia coli
atgaaacatactgataataagacctttttgacgactcttacccaattggttggccctgctcatatcctcaccgaaccgtcaaaaactgcgcgttaccgtaagggattccgctcgggtcagggtgatgctctggcggtggttatccccggctctttgcttgaactctggaaagtcctcagcgcctgcgttgaggctgataaaataatcctgatgcaggcgtcgaacacaggcctgaccgagggttcgacgccaaatggtaatgactacgaccgcgagatcgtcattatcagcacgctgcggctggacagtctgcatgtgctggatgagggcaagcaggtgctggcttatccgggcaccacgctgtactcgctggaaagggcgctgaagccgtttggccgtgagccgcattcggtgatcggctcttcgtgcatcggcgcgtcggttatcggcggtatctgtaataactcgggcggttctctggtccagcgaggcccggcttacaccgagatgtcgctgtttgcccgcattgatgaacagggacgcttgcagctggtcaatcaccttggcattgagctaggtcagacgccagagcaaatccttgcccggctggataacaatgtgattgaagccgcgctcgtcaaccatgacgggcgtcacgcgcacgatcacgactacgttagccgcgtgcgggacatcaatgccgacacgccagcacgttacaacgctgacccggatcgcctgtttgaatcctctggctgcgcgggcaagttagcggtgtttgccgtacgtctggatacctttgaagccgagaagaaccagcaggtcttttatatcggtaccaatcagactgatgtcctgactgagattcgccgccacatcctggcgaattttacaaacctgccggttgctggggagtatatgcaccgcgatatctatgatattgcagagaaatacagcaaagataccttcctgatgatcgacaaacttggcacggacaaaatgccgttcttcttcaacctgaaggggcgtaccgaggccatacttgagaaggtgaagatctttcgcccgcactttactgaccgcgcgatgcaggcttttagccatctgttcccgagccatctcccggcgcggatgaagacctggcgcgataactatgaacaccatctgatgttgaaaatgtccggcgagggtgtggccgaagcccaggcatggttaacggacgattttaaatcggccgagggcgcgttctttacctgtaccgcggaagagggcagtaaggcgtttctgcatcgttttgccgccgcgggtgctgccattcgttatcaggccgttcattctgacgaggttgaggatattctcgcgctggatattgcattacgccgcaatgataccgaatggtatgagcatttaccggctgaaattgacagtcagttggtgcataaactctattacggccattttatgtgccatgtattccatcaggattatatcgttaaaaaaggcgtagatgcccacgcgttaaaagaacagatgctggaattactgcgccaacgcggagcgcaatatccggcggaacacaatgtcggccatctgtataaagcgccggaaaatttggcacgtttttatcaggaaaatgatccgaccaacactatgaacccaggtattggtaaaaccagcaaacataaaaactgggcatga

SEQ ID NO: 26680 - DNA, 720 bp, Escherichia coli
gtgaatgtaaatttctttgttacctgtattggtgacgcactgaaatcacggatggcacgagactccgtattgctgctggaaaaactgggttgtcgcgttaatttccccgagaagcaagggtgttgcggtcagccagccatcaatagcggttacatcaaagaggcgatccccgggatgaaaaacctgatcgccgcgctggaagacaacgacgatccgattatctccccggcgggctcctgtacctacgcggttaaaagctacccgacgtatctggccgatgaaccggaatgggcgctacgtgctgagaaagtttccgcgcgtatgcaggatctcacctcctttatcgtcaacaaactgggcgtggtggacgttggcgccagcctgcaggggcgcgctgtgtatcatccttcctgtagcctgacccgcaaactgggggtgaaggaagagccgctcacgctgctgaaaaacgtgcgcggactggagctgctgacgtttgccgatcaggacacctgctgcggctttggcggaacgttctcggtcaagatggccgaaatatccggtgagatggtgaaagagaaagtcttacatctgatggatgcaaagccggaatatttgattggcgcagacgtcagctgcctgctgaacattggcggccgactgcaacgggaaggccagccggtcaaagtgatgcatattgctgaagtgctgatgagccgctga

SEQ ID NO: 26681 - DNA, 1428 bp, Escherichia coli
atgtcgataaaaaccagcgatgtagaatttaaactgcgcattcgtcagcagatagaagatccgatcatgcgcaaagccgtggctaatgcgcaggagcgtatcggcgcaaatcggcaaaaaatggtcgatgagttaggccactgggaagactggcgcgatcgtgccagccagatccgcgatcacgttctgagcaacctcgacgcttacctgtatcaactctccgagaaagtgacggaaaacggcgggcacgtctatttcgccaaaaccaaagaagatgccactcgctacattttgcaggttgcgcaaagtaaaaatgcgcagaaggtggtgaagtccaagtcgatggtgaccgaagagatcggcgtcaaccatgtgctgcaggatgccggaatccaggtgatcgaaaccgatctcggggaatatatcctgcaactggatcaggatccgccttcgcacgtcgtggtcccggctattcataaagatcgctatcagatccgccgcgtgctgaacgaacgtctggggtatgacggcccggaaaccccggaagccatgaccttgttcattcgtcagaagatccgtgaggatttcctcagtgccgaaatcggtattaccggctgtaactttgccgtggcggaaaccggctcggtgtgtctggtaaccaacgaaggcaacgcgcgcatgtgcaccacgctgccgaaaacgcacattgcggtgatgggcatggagcgtatcgcgccgacctttgccgaggtggatgtgctgatcaccatgctggcgcgcagcgccgtgggcgcacgtctgacgggctacaacacctggctgaccggcccgcgcgaggcggataacgttgacggaccggaagagttccatctggtgattgtcgataacggtcgctcgcaggtgctgggctcagagtttcgcgatgtgctgcgctgcatccgctgcggagcctgtatgaacacctgtccggcgtaccgccacatcggcggacacggctatggctctatctatcctggacctatcggcgcggtgatttctccgctgctcggcggctataaagattttaaggatctgccgtacgcctgttctttatgcacggcctgtgacagcgtctgcccggtgcgcattccgttgtcgaaactgatcctgcgtcatcgccgggtgatggccgaggagggcattacgccgaaagccgagcgacgggcgatcaggatgttcgcttatgccaatagccatccggggctgtggaaagtcgggatgatggcgggcgcgcatgcggcgagctggtttatcaatggcggcaaaaccccgctcaaggttggcgcgattggtgactggatggaggcgcgcgatctgcctgatgctgacggcgagagcttccgcagctggtttaagaaacatcaggcgcaggagaaaaagaatggataa

SEQ ID NO: 26682 - DNA, 696 bp, Escherichia coli
atggataaccgtaccgcgtttttaaacaccatcgcccaggcgctgggtcgcccgctgcgtttcgaaccgcaagcagatgccgcgccggttaacaactatgccaacgagcgcctgaccgaacttagcccgcagcagcgctgcgatgcgtttatccagtttgccagcgaagtgatgctggcccgctgcgaactgaccagcgaggaccaggccgcagacgcggcgctgcgcctgtgcgaagaattgggtcagcagccggtggtgctgagcggcgacagccggctggtggagctgggtatcaccgaacgcttgcagcaggaatgcaacgccgtggtttgggacccagcgcgaggtagcgaaaatattacccaggcagaacaggcgaaagtcggcgtggtgtatgccgaatatggcctgacggagtccggcggcgtggtgctgttttccgcaccggagcgcgggcgttccctgagcctgttgccagagtcctcgattttcgtgctgcgtaaaagctccattctgccgcgcgtggcgcagctggcagaaaaactgcatcagaaagcacaggccggtgagcgtatgccatcgtgcattaatatcatcagtggacccagctcgacggcggatattgaacttatcaaggtggttggggtacatggcccggtgaaggcggtgtatctgattattgaggattgttga

SEQ ID NO: 26683 - DNA, 438 bp, Escherichia coli
atgggccgttttgatgaatggttagacgacacaaggccggtaacagtcgcaccggttaccggcatcggcgataccatcggcatgctgatgtcgcacggtaatatttctccctacatcatggcgtggttgataaccgtgctgattcgtctggcaacgggtcagggcgtggtctccgccatgacggcggcggggattattagcgcagcgatcctcgacccggcaaccggtcaactggtcggcgtcgacccggtgttgctggtactggcaacggcggcgggctccaacaccctgacccatattaacgatgcttcattctggctgttcaaaggctactttgacctgtcggtgaaggatacgctgaaaacctggggtctgctggagctggtgaactccgtggttggcctgattatcgtgttgatcatcagcatgattgcataa

SEQ ID NO: 26684 - DNA, 312 bp, Escherichia coli
atgcacgttgtatcgagagcacctttcgatacagccaccaggcaattccccaatcaggcagcggcactagacgacgtataccggactttgaagagagagaactacacttcaccggacgaaatgaaaaaacgatttgcctcgctggacagaatgaaatatcgggagaagtggtgggtgatcgatgttggcggtgggaatttaagggtgatgttttttgctgattttgaacgtgggaaaatctttataaagcacataaccacacacgccgaatacgataagctgacagatttttaccggagaactaaagaatga

SEQ ID NO: 26685 - DNA, 420 bp, Escherichia coli
atgatgtacaccgatgctatccaggcggcaaacagcctggttagcattgtccccctcctggggggcaatgcctctcgcaaggactatgaagacgcgctgacgctggttgaatacctggttgaacacgagccagatcatccgctggtggacatgctggttgcgaaaattgcccagtatgaagatgaggcggaagagttcgcagagttcaacgaccgtattgcagcgttaccaagtggcgtggccctgctgcgtgtcctgatggaccagcacaaactgactcagagtgattttgaggaagagattggtaagaaatcgctggtgagccgcatccttaacgggactcgctcactaacactagatcacatgaaagcacttgcgcggcgcttcaacattccgcccagctcattcatggacgcgtaa

SEQ ID NO: 26686 - DNA, 1203 bp, Escherichia coli
gtggctgattttccccgcgccagtaacgggcgataccagacagaaggcctaagcgcgcgcgagttcgaacgcctattcaaccagattgagaaggataagcgaagcaagcgccgcgctgctcgccgcactctgacgccgttttcactgaagaacaaaacagccgaagatatcatctcgctgggcaagaagaaaaaaggcggtacgttcttcaccgtcgaagatctaaaggcatttgaaggtcgccgcaaggatattcgacagacgttcaattcaggcatagccgggatcacctatgcccagctcatagccggaagtgaggcgatcgacgttaaacgtgctaacaacgccgtagacgacggttccggcattaagcgcgccgtgccttcatcattgaaacataacgtcgtcacagtcagcgtggaggcttcagatcgctccgaagaccagcatcactgcgtaaaagtgcgctttgaggaatgggattcactgattgatgagctgggggatgagactagcgcggtaaaagtgacgaaaaagctgtgtgccggtcgcgtatccttcgattgtgattgtgggcgtcatcaatactggtatcgctacatcgcgaccgccggtaactttgccctggcaccgccaaaagaatatgccttccccaaaatccgtaaccctaatctcaaagggattgcctgtaagcacgtgatccacgcaatgacccgactccagtcggcaagctggcaattgcggatcggtcaggccatgctgcaggccgctaaacgtgtagggttcggtgacgacaaacgacgtactactaagcatttcactgaggaagaccggaaaagattcaacaagaaccgtaactcacagactaaccagggggcgatgcgtcaggagtgggataaataccagcgccgccagaaagcgctgggtaatcagattgcgcgagacagtacaaagctacgcaccctcagcgacaaactgttaaaagcccggaaaatgacgcaaaaacaacgggcaaaggcagaagaaagtcagcaaaagcttaaagccgagcaggataaaaacaaggtgctgctgcagcagctcgccgaccgtttcaaggtggaacgccaggcgtttattgatgcgatggtaatgactggtgtatcacgtcaggatgccgagaaacgcttcctggactacgtgaaaaacaaaggcaggggttaa

SEQ ID NO: 26687 - DNA, 330 bp, Escherichia coli
atgagttacaaccgcctggatgaccgcacaattgacgatcctatcctgctggcattgtttcatcaggaagtcattgcacgggccaccagctacagcgccgacaacatctcttacaccatcaagccagatgaggtttaccgttctgatttgtcggcgtttcgctgttacggcaatgaagaattacgttgggtattccgcctgctggtggggcatgaatctgaaactgaagccatgccggttggcacaacgttaaccgtgccgccggtggcctggatacgtgaccggatgcgagactatgcgtcgggaacagtggagttaatcagtggctga

SEQ ID NO: 26688 - DNA, 660 bp, Escherichia coli
ttgagtcaaaaaatagctgttttcagtctctcaacatcaaacccgctctatgtcactgccatctatgacgatgacaacaacctgataatgagcatcccgaaatcactccccaactcattaaaacaacaacgagtaaaggtgatccccgccatcgagaagctgcttaaagctgactttaaggtgctggtggatgaaaccagtgggaccattgctagtgaaagcggcgctcaccatgtttcactgaagacgcgacatacagactcgcgcgcagccgttctcgtcggcatcgagcgctacaacgaattgcgcctccagaaagccatttctcttcctgagaaaaaccccggcgcatatgagatcccgtcttctatcgtggacattgattacaacgccgccggtgacgaggtgtatcacatcaactggcaggatattcgacctgagcatctgctcacgatcatgtgctgttttgccacggtataccatcctgtcacctcagctgcgtacatcaaagccatgaccggcggcagcgaagaacgcgagcagcacccgctattacgcgttttcgggaacctcattaagcatcaggaagtgaccagcgcaagcgcagttccgccatcgctaaccgggcagcggatcagtgataacgaggtcattctatga

SEQ ID NO: 26689 - DNA, 231 bp, Escherichia coli
atggctcgcaaaacaacggaacgggccttaaatccccacggtcacgtatacttactggatggattgaccaaactccatatttgcaagatttgcggaacctgtgagcgccgaaacggacaatattggtgggctggtaagtggagtaagacagagccgccgtgcggcctcaatacggaggaacagcgggactggcataacaatgcaaaccccgacaacgaagacgaaccataa

SEQ ID NO: 26690 - DNA, 354 bp, Escherichia coli
atgccagaaattgcatccctacaacttttcaaaatactatctgatgaaacccgcctgggtatcgtgctactgctcagggagatgggggagctgtgcgtatgcgatctctgcacagcgctggaacaatcacaacccaagacctcccgccatctggcgatgcttcgggaaagtggcctgttgctggatcgcaagcaggggaaatgggttcattatcgcttatccccgcatattccttcctgggctgccctggtgattgagcaggcctggttaagtcaacaggacgacgtacaggccatcgcccgtaagctggcatccgccaactgctctggcagcggtaaggctgtttgtatctaa

SEQ ID NO: 26691 - DNA, 1752 bp, Escherichia coli
atgaaattcttagagaatatcccgtcttacctgtttttcaccggtaagggaggtgtaggcaaaacttcgatttcctgcgcaacggctatacgtctggctgaactgggaaagcgtgttctgcttgtcagtaccgacccggcttccaatgtcggtcaggtattcgatcagactatcggtaacactatccagcccgtgactgctgtgtctggtctttcggctctggagattgacccgcaggacgccgcccagcaataccgcgccagaatcgttgaccctattaaaggtcttttgcctgatgacgttgttaacagcatcagtgaacagctttcaggagcttgtacgacagagatcgctgcattcgacgagtttactggcttactgactgacgcttctctgctgacccgctttgatcacatcatttttgatactgccccaactggccacactattcgccttcttcagcttcccggagcctggagcagcttcatcgaaagtaacccggatggtgcttcctgtcttggtccaatggctgggctggaaaaacaacgcgagcaatatgctcatgcggttgaggcattatccgatcctgaacgaactcgccttgtgctggtcgcgcgattgcaaaaatcaacactgcaggaagtcgctcgtactcatgacgaattatcagctattggccttaaaaatcagtatttagtcattaacggtgtcctgcctgcgagcgaagcagaacgtgatgcactggccgctgcaatatggcaacgggagcaagaggcgctggcaaatcttcctgccgggttatctgatttgccgacagacaacttatacctgcagccgctgaacatggttggtgtatccgcattgaaaggcctgctcaacgaacacgctgagataacatcgcttcctgaacaaagcccacagaacaagccagagaatatgtcgttgtctgtcctggttgatgatatcgcccgcagtgaacacggtttgattatgctgatgggcaaaggtggtgtgggcaaaaccacaatggctgcggctatcgccgtcagtctggcggataagggttttgatgtgcatctcaccacctcagatcctgctgcacatctcagtacaacgctcaatggcagcctcaaaaatctgcaggtcagccgaatcaaccctcacgatgaaactgaacgctatcgtcagcatgttcttgagacgaaaggcagggatctggatgaggctgggaaacggctgctcgaagaggatttacgttctccttgcacagaagagattgcggtgttccaggcgttttcacgcgtaattcgtgaagctggcaaacggtttgtggtcatggatacggcacctaccgggcatacgctattactgcttgatgctaccggggcttatcaccgtgagattgccaggaagatgggggataaaggtcattttaccactccgatgatgcagcttcaggaccaggaacgtaccaaagttttgctggtcactctgcctgaaaccacacctgtactggaagcggcaaacctgcagtccgatcttgaacgtgcggggattcatccctggggctggattatcaataacagcctttcgattgcacagacgcaatcgccgctgctttgccagcgcgccctacaagagcgtcctcaaatcgaggttgtgaaaaaccagcatgcaagccgcatagcgttagtaccggtaatggctgcagagcccactggcatcgagaaactcagagagctggttgtttaa

SEQ ID NO: 26692 - DNA, 405 bp, Escherichia coli
atgagtgatgtaaaggcattcaacaattgcatgagtgtgttctggcgacagcatgaagccgaattctctcgctttctgacatcgaagacaggtgatagcgaaaaagcagcagacccggagaagacgaaggtgattatcgtgacgcttgccgaaacgacacctgtactggaagccactaacctgcagcaggatctacgccgagctggcatcgagccgtgggcatgggtcgttaataacagcctggcagctgctcaaccgtcttcgcctttcctgaagatcagggcgaaccgcgagctgcctctcatctctgatgtggaagagcagtatgcaaagcgtattgcattaacagcgctacagagcgaagagccggttggtattgacctgctggaagatatggcgaagtaa

SEQ ID NO: 26693 - DNA, 300 bp, Escherichia coli
atgaacccattcaaaggccggcattttcagcgtgacatcattctgtgggccgtacgctggtactgcaaatacggcatcagttaccgtgagctgcaggagatgctggctgaacgcggagtgaatgtcgatcactccacgatttaccgctgggttcagcgttatgcgcctgaaatggaaaaacggctgcgctggtactggcgtaacccttccgatctttgcccgtggcacatggatgaaacctacgtgaaggtcaatggccgctgggcgtatctgtaccgggccgaggtggtagatgcatag

SEQ ID NO: 26694 - DNA, 228 bp, Escherichia coli; identical to SEQ ID NO: 8955

SEQ ID NO: 26695 - DNA, 294 bp, Escherichia coli; identical to SEQ ID NO: 13522

SEQ ID NO: 26696 - DNA, 258 bp, Escherichia coli
atgaatcctttgttaaccgattcccgccgtcaggcgctgcgttcagcttcccactggtatgccgtgctaagcggcgagcgcgtcagcccacaacaggaagcgcgctggcaacagtggtatgaacaggatcaggataaccagtgggcctggcagcaggttgaaaacctgcgcaaccagcttggcggtgtgcctggcgacgttgccagccgtgcgttgcacgatacccgcctcacccgccgtcacgtgatgaaaggataa

SEQ ID NO: 26697 - DNA, 1272 bp, Escherichia coli
atgattaaaaaaaagggcttaggcttcaacgcaattaccgcattgatcatgctcacgacttcgaactgcgtaatcgctgaagaataccaattgccagcaacaattaataacccggttgtaatgccagttggcgctgacggatttcagaatggagctgcaaaagccattattccgggtcaagctggtgctgaacaatcaggtgcacaatcaaaccttagtgaagccggtaatgcgcagggacaaaaacctacaactgagctccctaccgtgcaactttccccagccagcaatgcttcgcctgcggtaagcgctattactggagcattatcaaataatcctagcctccccggatttgacgcacagacccgatctggtgcaattgatagctacgggagaccaacaggtacctcttcccagcagaatgcaaccaatacggccgctacgtcaaaagccgatgaactttatgtcgaagctcgtaaccgatataaagaagttcagcgtgtaaatgtgccgcctggtgggaatgtcgtactgccggtttcacgaggacttcaaaacagaatatcgaccagcttcaagaatgcttctgtcagcacatctacccctgctgaagaggcaagcatatttgttaatggtggcgatgtctttatttcaactaataccgataaaccaatcgggattatgttgtcggaagatcaggtacctgaatcgacctataacctgaccctggtaccgcttgatgtacccggtgcgatgatttcagttacgacatctttaagcccatctatgcaagccaaacgtgaaacctcattggataagcaaaattatgaggaaatgttggcccgctcccagtcagaagaactggctccatcggatcctaaacaagacgatcataaacaaagaatcattgatttactgactcctgtggctcttggtgaggtcccttcaggatttagtttacaacaggaccgactttctcgtattcctgcgtcagagcagtccccatgtaactttaatatgtatgcaaagctcggtcagagactggttggctcacgtgaacttattgatgtaattcttgtgaaaaacgacaaaccatacggtcaaatcgttgctgatcagcagtgtatggcagaaggcgttattgcaagtgctttatttgataaagcatacctgcaaccgggagaagaaacagagctttacatagtccgggataaattgttcaaggaacgcgaggcccgggttacaaccagaccaagtctaatcagaaaataa

SEQ ID NO: 26698 - DNA, 462 bp, Escherichia coli
atgggaaaagttactttgcctgctctgcttggggccaccgtgattggttttgtcgtatttgctttaaccagcttttactacaggtcagaatatataccaaaaaggagtgtattaatcgttccggacgcacccattagtatcgaagatggcagtaacgcttttcccgttcagacagtaataatgaacgatccaactcttattgatagatttgtaggagaggacaatattaatgaggagagtgcttttgactatcgcaaaagtaacgttttggaacctaattacaaacatggaatatctagaacgagccagacagataaagctgaattgaatcatccatctgttcgtgaaaactgggccagagcaggtgaaccctatatcgttcctcagatgtcagacagcgaacgaaatctaaaaattaaacgattccagaaacctacaagtggagctaatcatggacattaa

SEQ ID NO: 26699 - DNA, 1356 bp, Escherichia coli
atggacattaaaaaggcctgggaaaataagaccgtcagactttctgtaattggcgctctgctggtagtgattgtttatattattagccagtctattttttccacaccagttaagaaagaaaagaaaacacagaaaaaagacatgcagaccaatttgttgttagatgattcgcaaatgaacaaattgagtaatgaagaaagccagaaagtatataaggaaatggttaagcaaaaccgacttgaccaaaatgcggcgaaagaggaccgcgaaaaagcagaaaaggcccaacaggaaaccaaggcccaagttgcgagtttaacttctcaacttcagcagctgtctcagcaaattaatgatatgcaaacaaatcgaaacggcaatcgtaatttggatgctggtaattcgcgtaaatcgattaatgagcaggcaccggcagctccttatcagcttaatgctaatgcgccgattaatggcgtaaaccctaattacgcttctatcacacctacgcgtaatagcccaatgagaacaatcacacaaagttccattaagactaatggtaccgatggtgtcattcaggttatgcccgtgtctgaaaacagaatcaaggaaggcagagaggtcattgcaggagataaagcgcctactcgaactgtacgaggggatggtactgcgccagttgatagcaaagcgcggcatgctgcccgaaaagatgaaatgtttcttccggcaacatctattatcactggtgttctgattaccgggcttgaagcgcctacaagcctttcttccaaatcagaaccaatgccagtaacgatgcgtattaaaaaagatgtcatcatgcccaataatttcaccatggatttgcgtgactgtaaccttctgggttcagccgttggtgatctggcttcacagcgtgcttacatacgtgccacttctatctcttgtgttaattcaaaaggaaaagcttttgacgtaaaactggaagcatatgctgtaagtgaaaatgacggaaaaaatgggatccgaggcacgcttatcagccgaaatggtaacgcaattgcaggagctgcatttgccggtggactttcttcacttgccggtagcttaagccccagtaaggtatcttcactcaacatcgaccctaattcacaggcacagtatcagtcccctaattttggtgcacttggggcattagccggggctggtgcagctcaaggtggccttaatagactcgtcgattactacaccgcaattgcagagcaacagtggccaatcgtagaaattagtcccggccgagctattacatttgtcgttcagaccggaactacaattccaacaaatctgaccagtcgctga

SEQ ID NO: 26700 - DNA, 483 bp, Escherichia coli
atggatagtttagaaaaaaaagaatcgactgaatcagctggacctgaaatcagtaaaaaaatggtgcgagaaaggacaacaaaaaaaattaccttcgaaattgatattgaaaaaatattgaagtatttatttttctttgcctttgccgttttggtccttatttatggttataaaggctttatgaatgtttacgattacttcaataaacaatctcagccttcgtacaagattgcagtgcttgacatgcctgaattacgtaaggaatttttcaagcatcacggtggccgtactgctgacaatgatagatcacaattcgaagaatatttcagaacattaatgaagatctaccgtgaccgtggctatttaattattgatgcaacgcttgccgttactgtaccggatagtgttgaaatcgtcacttatatggaacttgaagatagctctgaagcggtacaatcaagttcttataatgcaaagaagtag

SEQ ID NO: 26701 - DNA, 858 bp, Escherichia coli
gtgaaaaagttacttttccctttaatggcagcctttgccattatggcgaatacggtcacttatgcttcagaacaggtcctaactaatagtgatgctgctgcgttaatggcaaaggcaaaggaaggcggcgtttcacccagtcagatctcgggtgtaatatcaaaaatgaaaggatataaacctaaggatgccatatacattccttctggtgggctatacctctttcaggacgaacgttcgcagctaatggcagtaacgaccgatggccggtactcccttactgggggaagccttgttgatgtaattaaacgtaaacctgttctgactgtagaagaaatcaggagttcctattttattagtcttgatgaggcccccttccctctagaaactgtagcgtccattcctttgggaaattcaaagctcaagagacaagcagccattttcataacgcttgattgtgacggttgcatggaacttattaagaaattttatgcagatcgggataagtatcggatagatattgttttggttccctcacccggtgagccaaaagaagagcttagaaggctctggtgtagtaaagaaaaagggaaaataaacaacctcgatattcttcgttggctaatgggaagcaaatccgacattgaaaaaagattgctcactcaaaaggaagcagaagaatgtccggctgaacctttggtagcgtcattgatgctcgcaggaatttataaattgcagggtgtaccttcagttgtcagacaggatggtttggctggtaatggcattccaaaagatttcgactactggttgaaccaaagcgttgaacctctcttaaaaaatccatttgagacaaattaa

SEQ ID NO: 26702 - DNA, 951 bp, Escherichia coli
atgaacatcaaaagattggtactcagtgctctggttgtaggtacatcctcatatctcacggggtgctccatagggagttccgaatccgaatgtccaggcattgaaaagggtgttatctgtaaaggtcctcgcgaagttatggagttaactaataatcgtgatgatctgtctgcacttgcgggggaagagtcggaatcgggaaaggagaaatcggctgtcaatgacagccgttatccaacagaaattagccctccaggggaagtcagatatccacggtctactacccttaaaaatcagcctgtggcttattcaaaaaccgaaactaagccagttggtcagttacctgtcatgtacgataaaactttaaaaatgggtgcccctacttcatccattggaccacggcctatttctggtgtaccggttaattcaaacgtaaggatgaccagcagttatagcactgcctcttcagctgggaaccctttcgttcatccggctgcggaagtcgttaaacaaacaagctacccagtttctgctggaactgccccacgctacgttgcacctaattcagatatcagccctggtaaggatatgtactctctttacaatggccagcccgttaaccctactctcaaccctgggcagatccagcaataccgttcgcaaggttataaacaagctgtagttgctcctgaaccacttgctgttctgcaacaggggaaagtaatgagaataacttttgcaccttataccgatgataacgatgcgctcaaccttcccggctacgtttatgtcaacgtaaaaccacaaacatggattgctggcaagaattcgacctcaaacccagctcgcatagttcctttagaagtacaggatgcggccagggaaaatatgcagcagcaacaaaaagcaactaaagctgtctcttcgaacggcattgttagacaactgtag

SEQ ID NO: 26703 - DNA, 2682 bp, Escherichia coli
atggaagctatcaataattacaatagcggtttaaatcgccatcaattaggtgggtttatccctgtttacgatcaattagcagggactcactattttttgattgatggcaacagattagggtttatgtttatctgtaatccatcaccaggagtttttgataatcagcaagatgttctcgctgaaatgttcaaaatggattttcctacagatactgtctgtcaaatatctctgactgctttgccagacctgactttacagcttagtgcctggtcagctgtgcgtggtgggcgaatgactgggaacgataagcttaaagcagatctgcttaatggttatcagttggactactacgacagaagtatgcataagcctttgaaacctgatcatgataaccttatgctgcgggattttcaggtatggatctcgctatcgattcctttacagtctgcccttccgacagagctggaacattcgcgtatcgattctctatactctgaacttgtaagtaagttaattacgattggattgaatccgtttaaggtcgatgcagaaaactggctctattgtatagataaagtcgtaaaccccggaaagaactcccggtgggctgaaggtttcatagacgttaacactatgaaaaggctcaatgaacaagttaacgttcccggccgtaagtatacagtcacagaaaatcatttttcatcagtcacacaaagtgacgacgaatctgagcatcgttacttcaaacaactttccgttgtaaagtttcctgaatacgtcaattttggttgtatgtatgagttagtagttaactggatgcatggtcgtaagactattttcagtccatttatgatcactcagacagttcagtttgccgacccgctcaagttgtcaaaagaaaacgtccggtacaaagcaatcactaataaacaggcaagtataccttcagttgtcaccttctgccctcgcctgcgggatatggataatgactacatggccgtaactcgcgagctagaggatggcgcaaagcttttaagagggtatctaactttcactgttatgggtagtaatgccaattccgtgcagacagctgctaacgatctaaaatcattttacctcgaaagccgggtcaaagtagcagatgattcctttatcgttttcccgtcatttatgtcatgtctgccaatgtgcaatgacccaaagacaattttcgaccttgaccgttccgaagtactgagcaacaccggagcggctcatatgacaccgatctttgggccatggaaaggtaatacagatagaccagtactgagtttagtttctcgtgaaggtcaactcatggggcttgatattttcaagacttctgcaagctataacatggttattggtgctacgtcaggtgcagggaagtcattctggacagcttatctaatcaataactatcttggtgctggaccgcgttcgaataaccttgttcattatcgctcaacatttaagcattttttagaaaacgaatacccagatgatgatcctgatggtgctcaagtatttgttgtggacgtgggccgatcttaccaggggattgccgaacagtatacaaacagtcaatttattgatttcggtaaaaccccagacttcaccctaaatccctttgccttcctaactgacatcactgttaacgatgatgtgtttaacgaagcacctgaatttactggtgaatcaacttcaaacgatgcagaaaaagacaaagtttctcaaaccataatggttttgaatcagctaaaaattatggcttcagagaaaggcctcatcgatgattatcaacaatcagtgatgcttcagcttattgcagaagagtaccaggaatccagaaaatcaggtcggaccggttcaataaccggctttgctctgcgttgcaagaaccatgaagacaaacgtataaaggatattggggagcaacttggagcatggtgcgaaggtggaatttatgggcaccggtttaccgatacgttgcctccaatcaacttcgacagcagatttattgttttggaactggaggagctaaaaggcaccccccatcttcagacagttgtattaatgtcaatcattcaggctgctcagcatgcaatgttcatcaaaaaagatgggcgtcgtcgcttgttcatccttgatgaagcatgggagtacattcgtcctgataattcatcaggggcgggaaatcaatcaaaccaattcttctcttccttcctcgaagcggcatggcgtaggttcaggaaaactaactgcgctggcatctgtataacacagtcgtttgaagattattttacttcttcggttggccgggccctgactgctaactcgccctggaagataatcatgaaacaagaaaaagaaagcattgaagcaatgaaggctaataaatatttttctacttcagatgctgaatatgaacgtatgaaaaatattcgtacagtcaaaaaggtgttttccgagatgttagtccggttcgaaaacttccaagagatctgtcggttatacgtagaccggaaaatggagctttgttttactacggatagtgctgacaggagtaagttatgggaaattcaaagccgcgagaattgtagctatggcgaggcaatcgaaattctatatgctcaagaggtagcagcgggtttggccgcctag

SEQ ID NO: 26704 - DNA, 1254 bp, Escherichia coli
atgaatttacttgaaaagatcgccctcgttggtcagcgcatgaaaagcgagcagatttctctaaaggaatctctgatggcttcatcaagagtatctgtttctgatgatagtgttgatggtgttgatagactgatctacaaccactgtttaaataaaaaaaatctctctgatttttttgggaagtcacgagtaacgttcaataaaatactttcggatttagaagaaaaagaacttgtcggtgcacctatttatcaaaataaaaatcatctttacacccgctgggatgttcaaaaaataatggatgccctgggttatcccaagtaccgcgatcattactttagcagagctattgttactcagaatcataaaggcggtacagggaaaagcactacatctgtagctttagcagtagcagctgcgttagatctacaactcaatgcacgtgtattaatgattgaatgggacccacaaggttcgataggaagcagcatgattcaaagtgtctcagaagatgatgtcttccttacagcaattgatgcaatccttggaatttatgaagaaaattctgagtataaaaaatatttagatttaggtttctctgaagaagaaatcatcactaatatgcctttttctacgcatctgccaaacttggacgtaataacggcatttccgacagatgctcgctttaaagataaatactggcaatgttccagagaagaacgaacgtctttgttactacgtttcaaggaagttatcttaccggtactgaagcagaactatgatttgattattatagacactccacctgaagattcgcctttgatctgggctgctgacgaagcggccgatgggattcttgtcgcagtgtcaccacgtgaatatgattacgcctctactacagacttcatgcttacaataagtgaaaggtttaaacaatcaccaagtaagggcgataatttaaaatggttcaaagttcttgctgtcaatgttgatgacaaaagtccatatgaaagaatagttttggataaattaatcagaactgttcaggaccttttgatgtccgctaacataaaaaattctgaagcatttaaggcagctgcttccaaagggcgtacagtgctagatatcaaaaaatcagaggaactttgttccgcaaagcaacttgatgtcgcagaagaatctgtattacaggtatatcagcaatttataaatgaaataaaaagtttttcagctaagcaaggagttaacgcatga

SEQ ID NO: 26705 - DNA, 1005 bp, Escherichia coli
atgagcgatgagcaacatatcgggaatgataaatctcggtatttaaacgcaccaaagcggacagaagtcggtcaccgttcaggtcttgcgagtttgaaaacagcacctcgcataaaaaagttattcactcttcataaggcccggaggcttgaagcggaacatgttattgttccagccgagagagtggagaaggagactttagtccatccagcgaacccccgaaatcaagaagcccttacagattattctgttagagatattctaaagcagattgaagaaagaggggtcgataccgaagggatcgctgtaaaaagagatggggtttatttattaatagaaggaagtcgcagacgtttctgctgtataaaggcagaaaaggatctccccctgtgggttcttccggatgaattaaccgaagaggatataaattcaattatatccgcagcacaaacatctcgaaaattttcatatagagaagttgggtttcaatttatcaagaaaatggaagaaaaaggattttcaacaaatgaagaacttgcatcatatcttgggattagtcatgtatcggtagccaaaagaatccaggcggcccgtattgacgaaacattgatctctttattcccggattatgaaggaatcccaaactcctattatagtcgcttgtctcgtttacagaaatatgtgcaaaaaaatctatttcctttagatgaagtaattgaaaatgttaaagaggaaacgagggatttagacattggggatatccaggttgcccaaaaagttgtaatggaaaaaatcacacaatctgtggaaagtgtttgtgagaaatcttattctacaaaatgggaaacaagtgatctaattacttttgataataaagataagtatgcaagaatcagtaaaaacaatactggtaggaaaattcgcattgaattcaataggataaattctggttttattaaagagcttgaggagttcataaaagaaaaattaaaagtatcagaataa

SEQ ID NO: 26706 - DNA, 390 bp, Escherichia coli
atgaaaaaaacattgtttgttattttattatgtttttgtcactcagctttagcatatccataccgtatatatactgtcccggagggggctttagtaaaaaacatactaactaatgaatatctaggaaaaacccctgtggttgtggacgtgagcaataccgaagctggttctacttttgggatttcattatttagacatgaaaatgttgctataaagatttttacagtaatgccttcagcagaaaataattttgctgtttctggacctgacgttgcaactatgtcattgccgggcaaagcacctttaaacgtagtaaatgatgggaatggcgcttctgttcatatagaactaagaccttatatgtctgaacctgcgcacaccccatattaa

SEQ ID NO: 26707 - DNA, 522 bp, Escherichia coli
atgattaaagttatcactcttttattgtttttattactgactggttgtcagtcagtagaaagtaaaatcgaagaactcccgacagttggttttgaccctattctatacaataaaagtgaggcctttactgacggaaaagttactttacgtgtcgaaagttcaggaactgatgtttggcttgtcgccaagaatggaaccagaagttttattgagctttcaggcctaactttaggtggtagtcgttgtgcttacaatgcccgtagtaagcaacttttgcccccaggcagcgtaagcacattcgtagttcctacggttggaatgcttggactttgcttcaacaatgaagatcaacttatctttattaaccgtgcttttagcagaatctctcccaaagcaaaaggaagagattcgctttctcttttattttctgtaagttacgattttcccgggaaagcggacctaattactaaccacgaatatcaagaattatatcttttatttttgaatgaggataatctatga

SEQ ID NO: 26708 - DNA, 837 bp, Escherichia coli
atgaatataaattggaaggttatctcaatatctacattgctgtggcagcttcacgcagcggctgcaccacatcaagagaaagagcatagaagtgatgctttctcttcagccactcagaaaagtgatttacttataactgcaaaagctgagcttataaacggtaagtggtttataaatggtaaatataggcctgttctaaagacaagcatgaccaaaaccaatttcttagaaatcatgaatgttgcaaacaaagaatcactttttattgtgataccgaaacttgagtataaaatcattgcaaaaaacaaaatcatactaaatgaaaaaatagcattaagcgaagacacatccggaaaaagaattgtttggattgaaccaaaatcaagtataactttatcgtttataaatgaccttgctaatactccccttcaggctatcgtttcgatcacaagaaacaagaaagatgtaattgccatctttggaccggatcagggtaaagggtttactcttcccggaaagacctctgatgagcaaaagtccgttcctgactattcagatctaaatttaaataaatttatcatacctcaaagtgttggtaatccagtaatcatcaatcctaaagagaagaattaccacttatctggacaagtaaaatatgaaatcttatctcttccgaaatatcaacatttagaattttctgaacccgtttatattgagaaaagaacagatatcctcggtggttatggttattggacgaaggaaacaattctctaccccggtgaatcattatcttttgtaaccagcgccaaaaacaacctaaggaagcgagatgattaa

SEQ ID NO: 26709 - DNA, 207 bp, Escherichia coli
atgtcaaaattagatgaccaggtaattgtcgctccgggtataccgccaactgactcaccagcacttacattagtagaaataatcatgaagaacaatccagttttattgtgtcatcagctaatacaaacaacggacaagttttattcacttaaaacctttcctttagaactcgattcgattgtaaacaacattgaggtaacaagatga

SEQ ID NO: 26710 - DNA, 4032 bp, Escherichia coli
ttgggatttacttctaacggcttcactctttcaggcgttcccaatacaaccggtgatttaaaactaccttacaagatttcttacttctctggttctgaacggaaaaaagtagaaatagtaaaaggtgaatattcaatcaaaagtgtggcaccggtaaaaccaactatcaccggacttaaatcatccctgaacggattagtctatgacggcttttctttcaaatcgtatttaaaggatgaagcgatcaaagatatcgctgtttctgtggagccccgcaattatattcaatacatctctataggttcaggctccgcctgtgaagtacctattggcggaacttcctgtaccattgaagttggaagcattaaggccagtgatacagatgaacttttgggttcacgtgatataacaattacagcaaactctaagaataattatttcgcacctcctgaatccaaaaagcttgttgttaactgggattatcggcctcctgtagtagaccatacactttggaattttaccgatgaggctaaaacaatcaaagtaggtggccaggacatctataccggagccaaaaccgttgctgtggccgttaaggtaccccagcaagaaacagaaggtgaatggtggctcccaacagctatgtcgctcactatgacaccggatggcgtctttaaaccgacgactaaagtgactttagatgatggcactgagattgatttcaaacagtcttgggcaacccctttacgtagaactttacagccggtaagtggacctcaaaaagtcggtgatgagtacctctatatcttcgacttaacggatcttataaacgggtcctacgcagcgacatttacagtagaaaatacgagcaaaaactcttctacgtacactgagcctgaaagcaaactgatgctgtctgataacccaacgctcatggttctcaaagatgggcaggttttaactaaacgagcacccgtatacttcctgaacgagattatcgttgcagctttccaggggcaggctggggttgctgacataaaatcagtaacaatagacaacaaagtagtttcgttaacacctacaaattataaaggtatttactacctgccggttggagacgatttagcagttaactcggatcacgagattactgtggtggctgaaaacctttatggaaaaaacgtaaatttcagtaccgtgttcacttatcaacctactggattcactcttaagaatctggaaaaaaacataactctttactcgcgtgtacgtcagtatacggacctgcttagtcaaacagctggtgataaatgcactctgtttaccacagaggaaaatgcgaatgcttacctcgcctggtatggggaaaaatcagatgtcacagcatgctaccctcagtggaacaatgttcctgatgggttggagttctattttaaaggtcgtaccccgggtctaactggattctttaataaaacaggtgagaatctgctcgactatcaagtctatatgattaacgggaagggctctaaagcggtttccgcaaggaatcgccgtactctgaccacacaattaccatacaacccgatcatcacttacaaaaagaataaagtcatagctggcatcaatccgaacactgctctggcttatacgaccgggggggaggccgctcgaatattagcgaaggtggtaccagctgacgttacgatgatcgtctctcaaaacggctctgaggctgtcaaaacgtcatttaaaaatcgttcctcaaacaacgatgcaacgacctttgtacaaagggttaaggttgctgctgcaccattgtggacaaagaacgtctttgacatagctgttgaatattcaaaggatccagaattaagaactaccgacacactcaacgtatatacggtgcctgatttcaatattcgagcatcgatggaagtggatgacaaaaaaacagccacatctcttgaagtgcccttaaaggtaacagtggggcgttataacaactccacacgtaaaagtgcatttgaccgtaaaacaatgggagagtgggacgtcacgatatactctcaaaaaagtgtatacggcaaagatccagaaacaggccgttataaaactacatacgaaagaactgcgctgactgaagcattgccggtcaatgatgcgggcattgtcgaaaccaagattaaaattgaaaatatggatctgggtaatatgcgtctggttggtgtggctaaggtcagatcgccattctctgattttgaaatgaaacgtgagaccagtgctgtaggcattcgaatctataaaggtgaggaactggagggtaacctgtcgaaaagccttattatcggaaggatcccacttagtactctggtaagcttcaaatctgccagtacggctaactctgacgcactcgcccccaccgaatggcagcagtcctctgataatggtcaaacctggaatatgctttccgacatgaccggaaagagaagtgtaagtatcaaaaagacagaagtaggaaagtggctttatagggcaaaaatgaccaataaattcacatctaaagtttcctacacagatgccttaacggtagttacctacaagcagcctaagctcagtatagatgtgacagacattcttcagggctcagatgtacctgtaaccctgcttgataacgatgagcctataccagcaggcaccgctgaggttctctggtcagaggataaagtcaactgggtgcagggagatacaacttacactgtggcttcagctgataccctaccgtctacgatttatgcccggatgcgttaccttgattccgatgaactggcagaggagtcttcatggaaggaaacgtctgctcggttggcagccgcaaaacccaagcgcctttctgtctcggtaacgggggtttctaaggtagaggttggtcaaaaagttactttggaaggtaagttcacgaaccctaacagtaagtaccagaatggtaataacgtagttgaagaatggaaaacaccggatggccagacatttaagggctcttcactgtctgttacccttactgagcaaatgttggataaacagggatatgctgcttttgaatacagtgcatggttagcggacaataaggagaatacggtttctacccgtagagtttctgtcaaatcgtgggtttataaattccccgaaatgaaaataagctccaaacttaaatacgacatggcaccgaccaccctacgcgttgcgttgagcggtattaaggatggagactatccgggtgttacttattcccgtgaatggatttacgacaaagagaatctggtaatcactaaagatgaaggtgacaccaaagaatttacaattgaaaatcctggcaaatatacattgatggttgttttcaaagataaccgcaataatgaacagcgtatcgaaaatacctttgttgtcgatgaacaaacgccaatgaacgttgagatgacacccaagttctctaacaaatatatgagagctccacttgatgtaaccttaaggtcaaacatcaagctatctcattcggcggactcgatagatacggtcacatacaaggtgaacggtgaggtaatacccagcggcaaaaattattgggctcaactgatttcgggtttaaaagaaaagaaatacgagatcacaattgatgttgttagtaaacttggacagagaggttcagcatctgttgagtttgatgtcgttaaaaacgcagtgcctaattgtacattgagctacacggaaaccaacctaagctggagctttaccaataaatgtgatgatactgatggaaaaatggttagatatgaatggttcatcaacggcgaattaaggaacgttttcggtagtacggctacactttctaaaaaccttaaccgtggtaagcaggacataaaagtaattgcttatgatgatagtggagactttgcaacgcagcacgtgacagttttcggaccggctgaagaggcaagtaagtctgaaaacactgtatcaataccaagcagtgagtaa

SEQ ID NO: 26711 - DNA, 513 bp, Escherichia coli
atgagcgactacatacctaaaaagagagggctgcttatactggattggtatgtcccccttaatattttattgctgattctcgttatgtgtgtctttttcacccgttatacatttggatacggtttattgaatgggtgcctgcctgctgatttttatatgattgatcattcagataaaagtattaaaactggtgaactcatagcatttaacatgccgaaatcggtacgttttatcccagaaaatgaacgagtcataaaaattgttgccggtgtgggcggtgacaaacttaaagtaacaatggatggggtttataacggggacaaattttttgaagctaatgcacgtcgtatttcaaagaaatacaatattccgtccattttgattgaaaaagaattgataattcctgaaggcgaggttttcctaattgggcaaaccgatcactcatgggattcccgtttttggggaacagtaaagctgaattcagtaattgggaaaacatatgcgatcttttaa

SEQ ID NO: 26712 - DNA, 1512 bp, Escherichia coli
atgcgatcttttaatgtaaataaaaaatatttaccaatacttcctggacttgcgttatgtgcagttttaagtaatacaaatgcaagcactgagtatcaacatgatgctgacctaatcgctcagcaagcaaaagggcttggggcacaggctaaaggtgcacagcagccagatggggatcttagccttgatgctacgctaaaatcaccagatgtgcagaagtacatagcgcaagctgaagcactcaaaaaaaaccaggacctgagcaagcaaataaaccgtggttacgtccccggtatgaatgcggatagtgttcaagcagttatagaccatacccaggctatcagggcccaaagtaataactctgaagctgtcaacgatataattagaagacgtgatgaaattcaggaaaacgccagccttaatgaagcggctctgaaagcggtggaaaataagccggaagtcatgcgaggacaatctaaaaatatcgaaaagttgtttggttcctcgggcataacagctgctgacttcgaaagaaaaatggatagcacacgtgaagaagcactatcaactgaaaatggtataacgatctttgcttcatttagcttgccggattatgtactggaagaccttctacgtacggcctcagagcataaagctcgtgtagttttcaatggtctaaagaaaggaactactcggctaccagagacacaggcagcaataaatcaaatgattgtcaaaggaaaattcgaatctcctttgattacaattgatcctgatagcttcagtcagtatcaagtaactcaagtaccgacaattatttctcgggagcaaactcgttttgcaaaaatggtaggttccttcaacgttgatttttttcagcgagaacttgctaaaaaacccgatcaggacatttttccggttgcaggtaccacttatcccgttgaagaaaagagcatcattaaagaactggaagaacgcgcacaaaaatatgactgggaaggtgcaaaaaaaagggccgttgcagacacatggaaaaatcaatggatggtcgatctccctcctgctcaggaacacaaagaatttttaattgaccctactgtgagggtcactcaggacgtaaaagataagcagggccgtgtaatagcttccgccggtgagttgattaatccactttcgagatttcctcaaaacctgacgatgataattttcgatccactcaatccgggccagctggtatgggctgagcagcagtatcgacaacgtctgggtagtggaaaagtaatgcctatgtttacccgaatccaaaaagataatggatgggatcacctaaatgatctacgcgaaaaatttaacggtaaggtgtttaaagtaaacgaacagattatctcacgctttcagatcaaaaatacacctgctcttataactactgaccaagataagtttcggatcaccctctttagcgaggcagaagtccgtggaatcggagccccaaatcgttcagaggaaaattaa

SEQ ID NO: 26713 - DNA, 174 bp, Escherichia coli
gtggaatcggagccccaaatcgttcagaggaaaattaagatgaaactcggatttattataggtgctctctttgctacatggctgacgctaaattatccggaccagatgagaagttatttttccaaagcagtcgaatatatcgaaagtgttgcaacatttattacatcaaagtga

SEQ ID NO: 26714 - DNA, 3189 bp, Escherichia coli
atgaaacttagaaaaacaatcacctcgacaattattgcatcaatggttgccaatactatgagttgggctttttatgtctcactcataaacatggtaatgacaccacgtatttacgctgctgacgctatatttgaccagctcgaaaataactttaaccttgcaaatcctaacgcaaatcgcaatgcgacaaccagtgctcaggacattgtggagaaatacaagaacgcggattcaggcgagaatgtcagtgggaagatcaccgagaaatacgtgggtaaagccgaatccgctaatcttaatctcgggaagtatggggcagggaactcaaatgacagtgtcatgaaaaacgcagcatccgatggaaagtctattgggggcgctgtacaactgccaagtatgtctggggggacaatcaactcaagctatagcaaggagggggaaaaattactctctcgggatgctaatggcaacattggtataagcaataaccccaatactactcctggaaccaaaacaaacaccggagaaattttcagctcagagcaaaaccatagcgatattaagttcaattccgctaatcgttatggggatgaggatggctttgttaacgatataaagaatcgtaaaagccagcttttcgatgctcagagttatgatggcgtagcctatcgcaccctcgtaaatgctaataaggacaacccggcatcgtctataaagcctaacgaccccatgtttaacgcgggtagaaatgagatcacaaatgctgttgctggtactggaaactggcttcagaactgtaatgttgagaccaccaaaaaaacagtaaccacacactatcctgattacaaagagttctattgtaactcgcctaagcaagataacttcaacagctgcacgataacccgagacttctctgtacctgtatacatttcaggaggtaacggagacatgtcgatgtgcggcgataattgtgtgcgtatatggtttggtcgccgagacgacaactactggaaggacggggtatttgataacgaactgacgttgaaattccatccggatgctaaattggcctcagcaaaaattgttaatgcggagtgggatgaccacatgagggtaacacttgatggcacgcagatttttgctcacatagatggtgaatatcgagaaagtgactatccggctccaaagggatcttgggagttaaaaaaatcgtggaaactcgacaaggtttacgatgtgactgataaggtcagaaaatcggtgtatgaggagcctgatcgagaagtgacaatggcatccagagtatgggttggtgggaaaggtgaagggtactttgaggttgagctgacgtttgaaaatatgaagctcgaagataagcacgtccaggaaccagctggttgttacgatgctgtccaaacaccaaatactttctgccgtttcgaccagtttaaagatatggatgttggcacaaagcggcttccggaaagcgtgctttcaatggcaaagccgctgtatgaaggtgataaaggctttcttacctggaagactaaccttgaaggctatttttgtgatccattggctaaagacaagatttgctcttatgacgctagtgggaaaattatgaaagacgctaatggaaaggacctctgttacaactatgaagaaattaagagtatgcctgatgcatgtagtacttataaaaatgatgcagcatgtgtactcgataaacaaacatgtgcagagggttggttcgacgagggcactaacagctgctacatgtatgagcagaaatacacctgtgacagaggtaaggatgtagttcgtgaggttgaatcttctacaaatgcctgtgttggcatgatcccatgttctggcggaacatgtgaaactgggccaaaggaagagaacaacgattttggaaaagttgcggcttattcaaacatggttcagtacatgcagggcgaagccaaatgcgaagaccctaacgatgccaattcctgttccgtctttgaaggaaaacctgaatggtgtggtcgttcagtaggctttgtaaatggcctggcaaaaacggactgctgcgaatcaccgcagggaaccgcaggagcacttgaaggtatcatgcttgccggatctatgattagaaacactaactggaccagagttaatgctcagctaattaaatggaccggcggtgatacaggtacatgggcttctatgtccaatgcggtcggagagtggactgcatcagctggtaaaacagtagggcaaatgtggaacaacgtcacgagctccttaacgagcgtatatgaaaacgtcgctggtaatctaagcagggcagtcgggtcttccgcaacttctggaggggcaggaggtgctggccagttggcacaggaaacaatgtccagcttcggtataggtcagcttaagcagatggcaatgaagaaagcctacgaattgctaccagatacagttcgtgactttgtctttaagaacgttgctactaccggaggagaggttgtcttctcggctgcggttcaaaactttatgcttgcattaaacgtgatcggttggatttatacagcctatcaggtcactaaaatgcttttagaaatgttggtagcatgcgaccagaaagagatggaagcttctattcataagaatcaaaaatcctgttttacattagatacggaacgttgcgtcaaatatctgaatgtgggtttcacaaagaaatgcgttaaaaaagcaacagacatgtgctgttataattccatgttgtcacgcgttattatgcaacaagcttatccgcagttaggaatagaccctgtcgcctcaaattgcgtagggctatcaataaagcaaatacagcaactggatttcgataaaatagatctgacggagtggattaatgatgcagttcaggtaggagaagttcctgaccaatattcaaaattctctgaagaatcaattgtggataacttaccattccagaacgagaactatcaacttccatcagaacgaaccaaggaagcaatgggcggtgaagaaaatatgattaaggccagacaagaaaatgctcaggctataaaagaggaaaatgtagattgtagctatctaccacgaccggccatatgcgaggttggttcaactacgctggatccggttacaggcaagcagttgccgaaatattga

SEQ ID NO: 26715 - DNA, 873 bp, Escherichia coli
atgaaactttcacgtttagtatctctggtctcttctgtcgtcattggtgtttccctatcgggttgtgccggtgacaccggcactacgccaggcaccgctctgaattcgtacagtcacggccagtactggcatgctaatgcaaatgattctgtcgccaagaatgcctattcgcttgctggcttcgacgttaattttaaggaacaagaggttactcctggaggggatgccgacaactttctttctaagtatctcatcaatagttcgatgggctacgtaacaggcggtctaaaaggttttgggatcatgagcctcggctctttgtacagttcttctgacgccgaatacatccaggtcaatcaatacctagtgttcgtccccaatccaaaaaaattgccttacaatgatgaaagtttggtacgtgaaggagctaagtatgtttttgagcatacaaaggcaactcaggcttcatttggctacaaccctgaaaaacagaaagcagctttggccaaatgtaaaattgatatggcagtcgtcaataaatggagtacctgtgagctgccttctaagcctgatgcggatgttttcccaacagattcaatgtacagctttcaggcgattcgccccgcaacaggaaccgaaattccgcagctaaaccttcccgctggtgactacgctgtaattcgttatgtgttcatcccatttaaaggaaacgaaacaagcgcgaatttttcgggtatcattttccgttctgatagcccaaatacaacaactccaggtggtgttgcagcctccattaacggaaaagattattacctctttaccggtgaatacggtaaaaaaggcttcccagaaaaaacattgaaagccaaataa

SEQ ID NO: 26716 - DNA, 1785 bp, Escherichia coli
atgggtaagccaacagaagagcaaagacctgttatcgagaatgctagcgcaaacaatatggtgatagcagcgcctggatcaggcaaatcgttcaccatgatagaagcggttatatcgattctcaaaaagtatccatatgcaagaatagggatggtgaccttcactcgcgctgcaacaaacgcacttgcagcaaagttacaaaagcgattgagcaagatggatcttgaccgggtgctggttgatacttttcacggactagttaagaagcaactggacatgattcgctggccgggaaagatgctgatagggccagcacagagatctgtcattcaccgagctttgaaagaatccggtgtaacgatgaagtttgctgaagctgaattcgttattgatgctatcggcagagaaatggatacggatgtgatttcagttcgacataacagacaacagatccatttgtttaatacctatcaggcgttatgccagaaagaccatgtggcggacctcaatgccctttcaaaatttgttgttggtcaaatgcattcgggaaaaatgcgcacgttagatttgacacatttgatagtagacgaagttcaggatacagactctatacaattctcatggatagcattgcatacaagagctggagtctatacgagcatagttggagacgatgatcaggccatctactccttcagatcctcaggaggagtcaaaatatttcaacagtttgaaaaacacttcagacctaacatattttacttaaacacatgctttaggtgtgaacctgaaattttagaggtggccggagcactgataggaaagaatgtttaccgttatgccaaagagttacgctcggcaaaaacgggaggaggaaaggtcacttttcgttcatatgtagatatggaggaacagatacagggtatcttaagccttataaatcaggatccacatggatgggcaattctaagccgcaataatgctcatttggatgagctagaaagtttgatcgaacagccagtaattcgttacggaggtaaatcattctgggatgaaaaagaaacaagcgatgtgttaagccttatggcttttttccgacaatcaaatgatcctcgcttaatgaagagagtattggcattgtttggagaacaggaatcagttttggatgaagtggcactgagtatgagaggaagaaaagttacttttggcgactttgccatcccggaagacagttctctcgaaacaaaaacattacattcaaactttgtgcgctttacccaggaaagtattgataaagttgagatagcaaaacgtttcgccaaccttacgaaatggatggaatcgtcgtcaatcaagatgaggtctaataaaggtacagcaaccttaacaaaaattgctttagacacttgtaaacagtgggctgaaaaaaatggttggctgaatatgatcaatcgtgctgctgcaatgtcattaggccctaggaagaaggacgaggaatacagcccagagaaagtagtcctatcaaccttgcatggttcaaagggtcttgagtggaataaagtaataataatgagttgtaatgcggatcagataccaagtaaaagatcagtaggggaggaggcaatagaagaagaaagacgtttgctttatgtcggatttacgcgtgcagaaaagcaactttttgtaatgtggtatggtgacccttctttctttttaagagaatgcagtgaagaaaagataaaggaagcagctaatattagaatttctccagtttatacagaataa

SEQ ID NO: 26717 - DNA, 1128 bp, Escherichia coli
ttgtctggagattcagggggccagtctactggtaaaggtgtatggactgtagtaccgaagggctttcgtctgggaagtgaagaagttctcgccggtgaacacgcagatcatcttctgtatattatcgatgaagcctccggtgtcagtgatagagctttcggtatcatcaccggtgctcttaccggacaggataaccgcatcttattactgtcacagcctacacgcccaagcggctatttctacgatactcaccataaactggccaagcgtcctggtaacccagatggcgtttatacggcgatcacgcttaacagtgaggaatcaccgctggtaacgtcagaatttatcaaaatgaagctggcggagtacggcgggcgtgataaccctatgtacatgattaaggtacgcggcctattccctaaattacaggacggcttccttcttggacgtgatgaggttgaacgtgcgacgcggcggaaagtcaagattgccaaaggatggggctggcttgcatgtgtggacgttgctggtggtacaggacgggataagtcctttatcaatatcatgatggtgtccggccagcgaaataaacgccgtgtaatcaactatcgaatgctggaatacacagacgttacagaaacgcagcttgccgccaaaattttcgcagaatgtaatcctgagcgattccccaatatcaccatagcgatagacggcgatggcctgggtaaagcaacggcggatctgatgtacgagtattatggtattaccgtacagcgtatacgctggggtaaaaagatgcatagccgtgaagataagagcctgtactttgataaacgtgcttatgccaacgttcaagccgcagaggccgtaaaatctggtcgtatgagactggataagggtaatgaaactattgaggaagcgtcgaaaatccctgtagggattaactccgcaggtcaatggaaggtgatgagtaaggaggatatgaagaaaaaactcaacctgcactcaccagaccattgggatacatattgtttcgctatgctggcggattatgttccccaggacgaagtgcttagcgtcgaagacgaagcgcaggttgatgaagctctggcatggcttaatgaataa

SEQ ID NO: 26718 - DNA, 255 bp, Escherichia coli
ttgcaggataaatcctcagactttgccggcatgattgaggaagataactgggatgcgcaagcaacggaccatctggttgcagcgatggagacactggatcccagaagtcaggacattatccgcgcgcgctggctggatgacgataataaagcgacattgcatgaactggcggaacgttacggtatatccgcagagcgcgtgagacaacttgaaaataacgcgatgaaaaaacttcgcagtgcgattgctctttaa

SEQ ID NO: 26719 - DNA, 807 bp, Escherichia coli
atgaataatctacatcgcgaacttgcgcctgtttccgatgcggcgtgggaacagattgaagaggaagcaacccgtacacttaaacgtttccttgctgctcggcgggtggtggatgtcactgatcctcagggggcggcattgtcggctgttgggacaggtcatgttgcctatctggatggcccctgtgcaggggtaagtgcagtaaaacgtcaggtactgccggtggttgaattcagggtcccgtttaaattaactcgtcaggcaattgatgatgttgaacgtggctctcaggattcggactggtcccctctaaaagaagctgcccgcaaaattgcggctgcagaggaccagacaatttttgatggctacatggcggcaggtattgctgggattcgaccacagtcgagtaatacacctttaaccttacctgctactgcttcagattatccaacggtggttgctcaggcactggatcagttacgcgtggcaggagtgaatggtccctaccatctggtgttaggtgaaaaggcttatacgtcgattaccggcggtaatgaaggcggttatccggtattccagcatatccgccggcttatcgatggtgaaattgtctgggcccctgctatcgaaggtggattactgttaaccactcgtggcggtgattttgtcatggatatcggccaagatatatccataggttacctgaaccataccggcacagatgttgagctgtatctgcaggaaagtttcactttcagtgcactcacgtcagaagccacagtaacattacttcctcctgaagaatga

SEQ ID NO: 26720 - DNA, 1056 bp, Escherichia coli
gtggggtgtccattttcacagtccgtctctcaacctgtggatgagagacttacgcgtgcagccatatttctggttgtgactattaatcccggtaaagcggctgaagtcgccgtgcgtgctcactgcagcatactttcctctcttatcagaggcgtcggttttcgtatatctgatggtgggttgtcgtgtgtcatgggggtgagtgaaggagggtgggagcgcctttttggggatacaaaacctgaatatttgcatgtattccgtgaaatcaatggtgtacatcatgctccatcaacacccggagacctgttatatcatattcgcgccgcccggatggatctttgttttgagctggccagccggatactgtcggatctcggcaactcggttagtgttgttgactccgttcagggttttcggtatttcgacgatcgcgatctattaggttttgttgacggtactgaaaatccggtcgctcaggccgctgtggatgcaaccctgattggtgatgaggacatggtattcgctggcgggagctatgtgatcgtccagaaatacctgcatgatcttgataaatggaatgcgattcctgttgagcagcaggaaaagattattggccgcgaaaaactatcagacattgagctcagggatgctgataaacccagttatgctcataatgtactcaccagtattgaagaggatggcgaggacgtcgacatactgcgtgacaatatgccatttggcgatcccggcaaaggcgagttcggaacctattttatcggttactcccgaaaacctgaacgtattgaaaggatgcttgagaatatgtttattggtaatccaccgggtaattatgatcggatcctggatgtcagccgtgcgataacgggaacattatttttcgttccgacgaccagcttcctggacagtattgaaccccagtcagctcccggtcaacagggagatgatgtgataaatacactacgctcaaccgccattaaaggagacataatgcccggttcccttaatattggttcgttaaaaaaagaggtttag

SEQ ID NO: 26721 - DNA, 777 bp, Escherichia coli
gtggatctcgacgcggccgcgaaggcaggtatcactgtcgcggaaattactgggtcaaacagcatcagtgtggcagaacatgtggtcatgatggtgctttccctggtaagaaattatctcccttcgcatcaaatttcggccgatggtggatggaacattgcagactgtgtgacacgaagttatgacgttgaaggtatgcattttgggactattggcgctggccgtattggacttgctgtattacgcagattaaaagcgtttgatatgccattgcattacacccaacgccaccgtcttgcgtcagctatcgaagaggagttagggttaacataccatcctgatgcagagtccctggctcgtactgtggacattgttaatctgcaggtaccactctacccatcaacggagcatttttttaatcaaaaaatgatatctgagatgaaaagggggtcttatttgattaataccgccagggcacaacttgttgacagagatgcggttgttaacgcgctgaagtctgggcacctggcaggatacgctggtgatgtctggttcccacagccagcccccgcgtctcacccctggagaactatgccctggaatggcatgacgccacatatgtcaggcacgtcactttctgcacaggctcgttatgctgcggggacgctggaaattcttgaatccttcctgggaaactcgcctatcagagaagagtatctgattgtggatcgcgggcaactggccgggaccggggcaaagtcttatcaactgaactga

SEQ ID NO: 26722 - DNA, 369 bp, Escherichia coli
gtgatcaagctgaagccgggcgtggataaagtaaccgcgcgcattagcgatatcgtcgaaaacccgaaaaagctgaagttcctgccaaacgtggaagccgcgctgttaccgcagatgtataacaacgacgaaggcgatgcggtggtgattaacgccaactacgccatcgatgccgggctggatccagtgaaagatcctattgccgttgaaagtggtgaaaacaacccgtatgccaacatcattaccgtgcatcgtggcgacgagaagaaaaaggatatcgtagcgttggttgatgtcctgcattcaaaagagatccaggactggatccgtactaaatataaaggtgcggtgatcccggtaaacaactaa

SEQ ID NO: 26723 - DNA, 3066 bp, Escherichia coli
atggctaatttaacccgtcgtcagtggcttaaagtcggccttgccgtaggtggcatggtgacttttggcctgagttatcgggatgtggcaaagcgcgcgatagacggtttgttggacggaacctcgggcaaaattacccgtgaccgcatttttgccaacgcgctcatccccgaagccaacgcccggcctcactggcagcaaaacccgcagcaggtgatctcgatgacgcagtgctttggttgctggacgcagtgtggtgtacgggttcgcgttgacactgagcaaggcaaagtgctgcgcattgcgggcaacccttatcatccgttgtcgcacgagcaccatatagacgcctctgtcccctttgccacggcaatggaacagttgaccggggagtcaggtcttgacgcacgttctaccgcctgcgcccgtggtgcaaccttactcgaaggtctgtacagcccgctacgtattctggagcctatgaagcgcgtcggtaaacgcggtgaaggaaaatggcagcgcatcagcttcgaacagctgatcaaagaggtggtggaaggtggggatttgtttggtgaaggccacgttgatggtctgagagctatccacgatcccactacaccgcttgatgcgaaacatcccggctttggcccaaaatccaatcaactgctggtcaccaataccagcgatgaaggacgtgatacctttttacgtcgcttcgcactgaacagtttcggcagtaaaaacttcggcgctcatggcgcttactgcggtctggcctatcgggccggttcaggtgcgttaatgggcgatctggataaaaatacccacgtaaaacccgactgggataacgtcgaattcgcgctgtttatgggcacctctccggcgcaatccggcaacccgtttaagcgccaggcccgccagctggccagcgcccgtttacgtgacgacttccgctatgttgtggtggcgccagccctgccattaaccacggtgctggctgacgatcgcggccactggcagcccgtacgaccgggaagcgactccgcgctggctatggggatgataagctggattatcgataaacaacgctataacgctgattatctcgccattcccggcgtgcaggccatgcagcaggcaggagaaaaaagctggactaatgcaacgcatctggtgattaccgatgaaattccaacgcttgccggacaacacctgaccctcgcccatctgagtgcaaacgcagcccaggagccggtggtcgtcaacgaggccggtgagattgtcgccgccagcagttgcccgcgcgctcagctgtttgttacccgtgaagtgacgctggccgacgggcagacagtaacggtaaaaagcagcttccagtgtctgcgtgagtccgcagagaaactgtcgctaacgcagtacagccagcagtgtggggtgtcagaagcagacattgccgttctggccgacgcattcacccgccacgggcgtaaagcggcggtgatcacgcacggcggaatgatggcaggcaatggattttataacgcctggtcggtgatgatgctcaatgcgcttattggtaacctcagccttgaaggcggcgtgttcgtcggcggcggcaaatttaatggtgccaccgacggtccgcgctacaacatggacagcttcgccgggaaggtaaaaccgaaagggttaagcatcgcgcgcagtaaaaccgcttatgagtcttcggaagagtaccgcaataaggttgctgccgggcaatcgcccttcccggctaaagcgccgtggtatccgtttgtcgccggtcagcttaccgaactcctcgtctcggcgcttgaaggttacccttatccgctgaaagcctggatctccaacatgaccaacccgttttacggcattgcggggttacgcggcgtggcggaagaaaagctcaaggatcctgctcgtctgccgctgtttattgccattgacgcctttatgaacgaaaccacggcgctggcagattacatcgtgccggatacccacaacttcgaaagctggggattcagcgctccgtgggcgggcgtggccagcaaagccaccaccgcgcgttggccagttgtcagatcggcgaccagcctcacggctgacggtcaaccggcctcgatggagtctttctgtatcgcagtggcaaagcgcatcgggctacctggattcggcgacaatgcaattaccgatccgcaaggtaatcactatccgttgaaccgtgcggaagattactacctgcgtctcgcggccaatattgcgtttatgggcaaagctccggttgctgaagcacagccggaagacatagcgctgaccggggtccagcggatcatgcctgtgatgacccaaacgttgaaaaccgatgaaatcagccgagtggcgtttatctactcccgcggcgggcgctttgcgccggacaacagcgggcgagttgataaccgcgtcggcaatgcctgggaaaaaccgctccaaatctggaatgcgaacgtcgccgcgcaccgccatgcgattactggcgagcgctacagcggctgcccggcctggtatccatcacgtctgtcagatggacgtgcggtcgaggagttgttcccggaacaagagtggccgttgaagctgatttccttcaaatccaataccatgtccagcgccacggcggtgatcccacgccttcatcatctgaagccggttaatctggtggcgctcaatccacaggatggtcagcggtatggtttagcacacggcgatatcgtgcgtatcaccacccctggtggtcaggcgcaagcgcagataagcctgctgcatggcgtcatgccgggtgtcatcgccattgaacatggttacggacataaagaaatgggcgcggcacagcataccctcgacggtgagccgatggcgtttgatgagcagattaagtcggggattaatctcaacgaattgggttttgcggacccaacccgacaggtagccaatacctggcttgactgggtgtcgggtgcgtcggtgcgtcaggggttgccagcgagaattgagcgagtgtag

SEQ ID NO: 26724 - DNA, 1023 bp, Escherichia coli
atgaaccattcactgattatcgacgaggttctggcccatccccaggacgtaagctggttaccctgggccgtacaatatttctttttcatcggcattgccgcctgcgccgcgctgttcgcatgcgttctccactggcgcaaaaaagaaacggcagacctggagaatctgacgctgctaatcgccctgacctgcgcgattaccgcgccgctggcgctgactgctgatctacaccaaaccgcccgcgtctggcacttctatgcgtatccgacgccatggtcctggatgccgtggggcgcgctgtttttaccgctgtttaccggttttttaggtctgtggtttctggcgcagcatgtgaaacggctaacgctaaaaagttacagcgtcacaaaatggttagcacttggtagcgcgctgtccgccatcggattgctggtttacaccggccgtgaagtgtcggtggtacaggcgcgtcccatttggttcagttacgcctttccggttgcgatgttcctcagcgcgctgcaaacatttcttgccctgcttattgccacgacaaatagcaaggacgcactaccgcgtaagctagcgtgggggcaaatggtcacgttgatcgcgctggctatcgtggtggcgatctgggcgagtgggaatacgctttccggttcggctatccgtcagtggctggatgttgcctcttcagcacaacactacgctatcggttgggttgcgctatggcttgtttcgcttgctctttgcgggttggttgtacgttaccccttatcgctaccgctgcgcatattactcgcttttagcgctatggcgctgtgctggctaatgcgctggacgttactcatccaggtgcagaccgtaccgaaatttaacgcgcagtttaatccctataccctgcccggcggcaccgatggctggctggctattgtgggtaccttcggcctgtggatagcactgattattattgttcgtgaagccctgaacgcgatcgcaaggagaatgcaacatggctaa

SEQ ID NO: 26725 - DNA, 735 bp, Escherichia coli
atggacagcagtaaacggcagtttctccagcgactgggcgtcctgaccgctggcgcatcactggttccgctggctcaggcgcaatttcccttttcgcctgaacgccacgaaggctcacaacagcatcgctacgccatgctggttgacctgcgacgctgtatcggctgccaggcctgtaccgtcagttgcgccattgaaaaccagacgccacagggcgaatttcgtaccctcgtcaaccagtatcaagtacagattgaaggccagcaaagcgttaccaacgtcctgctgccgcgactgtgcaaccattgtgataatcccccttgcgtgcccgtttgcccggtacaagccactttccaacgcgaagacggcattgtggtggtcgacaacacacgctgcgtgggctgcgcctattgcgtgcaggcctgcccttatgatgcgcgattcatcaaccatgaaacgcaaaccgccgataaatgtaccttttgcgttcaccgcctcgaagcggggctgctcccggcctgtgtggaatcctgcgtcggcggcgcgcgcatcattggcgatattaaagatccgcacagccgcatttcgcaaatgctgcatgagcaccatgatgccatcaaagtcctgaagccggaaagcggtacgtctcctcacgtgttctatctggggctggatgaggcgtttgttaccccattgatgggacgtgctcaacccgctctctggcaggaggtttaa

SEQ ID NO: 26726 - DNA, 1782 bp, Escherichia coli
gtgggacgcaacgtagtaagatgtctgacggtactggcgtcgctgtggatgctaagtggcgcggtcagggcgcagacatggaacattggcgttttggcgatgcgcggggaggtttctacacgtaatcactggcagccgctggaaaccttgttgaatcagcaaatccccggtgagcagtttcatattcaaccgctggacctgcggcagatgcaggaggcggtgaatcgtggaacggtacactttgtggtcaccaatccggcgcagtttgtccagcttaacagccgctcagcgctacgctggctggcgtcgttacgatccacccgtggtgggaaagccaccagtaacgtgattggcagcgccattctcgtcaggcgcgacagtgggttaacctccgcacacgatctgatcggcaaaacggttggcgccattgatgctcaggcgtttggcggctatttgctgggatataaagcgctcagtgatgccggtctgcgccctgaacgtgatttacgtctgacgtttaccggatttcccgccgatgccttactctatttattacgtgaaaaagccgtgcaggcggtgatcgtgccggtgtgcctgctggaaaaaatggatgaagaaggcctcatccgtaaaaccgattttatgaccgtgttgaatcatccgacttcaattccctgtttaaccagtacgccgctctatccggactggtcatttgccgcactacctgtagtgagtgacgagctggccgatcgcgtcacgcgggtactgttcaatgcaccgcaaaacgcgacgtttcgctggggtgcgcccgcctcgacccgtgaagtagaagcgttgctgcgcgacgtccgacagcatccgcagcagcgtcagctgtggctggatgtcaaaagctggtttattcaacaccgactggcgatggggggcgtggtcatcgtattgctgttgcttacgctcaattacatctgggtgatgctgttggttcgccgacgtggcaggcagctggagcggaacaacgtgttgttgcacaaacaggaacaggcgctggagactgcccgccaaatgagcgtgctgggggagatgacctccggttttgcccatgaactcaatcagccgttgtctgctatccgtcattatgcccaaggctgtctaattcgcctgcgtggtcaggatgagcagcatccgttgctgcccgcgcttgagcacatagacgcccaggcgcaacgaggagccgatacgctgcgcaatctccggcagtgggtcagccaggcacagggcaatccggtactcaccgatgactggcaagccatcaacgttcacgatgctatccatcacgtctggcaattactgcgtatgccccagcaattcccggcgataacgctgcacacgcaggttagtaaggcgttaacgttgatgctgccaagcgttcttcttgagcaggtgctggctaacctggtactcaatgccgcccaggcaggcgctacgacggtatggtttagcgccctgcataaggatggcggcgtgcgtattcaggtgcaggataatgccggaggtattgacgaggctcagttgtatcaggcgtttcagccgtttatgaccacccgcaaagaaggtatgggactaggactggccatttgtcagcgactggtgcgctacgcaaacggagatattgagatcaaaaatcagcaggccccggacggtaaagcgggggcgagagtgacattatattttaagccaaatcaggaaggaggccgtagtggcgataattcatctgctggatga

SEQ ID NO: 26727 - DNA, 585 bp, Escherichia coli
gtggcgataattcatctgctggatgacgacattgccgttacccaggcctgtgcgtttttattggaaagtctgggatatgaagtgtcttgctgggagcaaggcgagaaattcctcgccgaggcaaatttgcaccaggtgggcgtactactgctggatatgcgtatgccggtactggatgggcacgctgtgcatgaaatcatgcgtcagaaagcaagtacgctggcggtggtctttctcaccgggcacggcgatgtgccgatggcggttgagcaaatgaaacgtggcgcggtcgactttttgcaaaaaccggtgtcagccgtgccgcttcaggcagcattagaacatgccttgcaggtctcggcagcggcgttctcgcgacaagagatcatctcatgctaccaacaacttacgccaaaagaacgggaactggcgcatctggtagcaaaagggttaatgaatcgggaaattgctgatgccatgaatattgccgtgcgtacggttgaagtgcaccgggcgcgggtgatggaaaaaatgcaggcaggaagtcttgctgagctcgttaatcgacttcagagaattcagtag

SEQ ID NO: 26728 - DNA, 204 bp, Escherichia coli
atgggaaatcagacgaaagacgacgagttgtaccgtgaaatgtgcagagtagtcggtaaagtagtgctggaaatgcgcgatctgggacaagaacctaagcatatcgtcattgcgggagtactgagaaccacccttgctaaccagcgcgtgaagcgcagtgagttagggaaggtgcgaataagtggggaaattcttctcggctga

SEQ ID NO: 26729 - DNA, 528 bp, Escherichia coli
atggtgaaggatattattaaaacagtgacattctcctgcatgctggccggcagtatgttcgttacctgtcatgtctgtgcagcgggttctgtggtgaatattacaggcaatgttcaggataacacctgcgatgttgacattaactcccgaaaccttgatgtcagtctgggaagttatgacagccgacagtttaccgcagctggtgataccacacctgcgtcggtatttcatgtcgggttgacctcctgcggcagtgctgtcagtgcagtgaagctgacatttacgggcacaccagataatcaggaggcggggcttattcagattaacagcataaatggagcacggggtgtggggattcagcttcttgataaggataaacatgagctgaaaattaatgtgccgacaacaattgcgttaatgccgggaacacagaccatagcgttttatgcccgtctgaaagccacttatcttccggtaaaggccggtaatgttgatgcggtggttaattttgtacttgactatcagtaa

SEQ ID NO: 26730 - DNA, 2631 bp, Escherichia coli
atgtttttcggagatggcggacagctcctgtctgataaatcactgaccggctctgctggcgggggtaataacagaatgaaatttaatatactgccgctggcattttttatcgggataattgtttctccggcccgggctgagctctattttaatccgcgttttctgtctgatgacccggatgcggttgcggacctgtctgcatttacacaggggcaggagcttccgccaggcgtgtaccgggtggatatttatctgaatgatacgtatatctcaacccgtgacgtgcagtttcagatgagtcaggacgggaagcaacttgccccctgcctgagtccggagcatatgagtgcgatgggggtaaaccgttatgccgtgccgggtatggagagactgccggctgacacctgcacatcactgaattccatgattcagggtgccacattccggtttgatgtcgggcagcagcgattgtacctgaccgttcctcagttatatatgagtaatcaggcccgtggttatattgcgccggaatactgggataacggaattacagcggcattgctgaattatgacttcagtggtaatcgggtgcgcgacagctatggtggcaccagcgattatgcctatctgaatctgaaaacaggactgaatatcgggagctggcgtcttcgggacaacaccagctggagttacagtgccggaaaggggtacagccagaataactggcagcacattaacacctggctggagcgggatatagtttccctgcgctcccgtctgacgatgggggacagttatacccggggggatatttttgacggtgtaaatttcagggggattcaactggcctctgatgacaatatggttccggacagccagagagggtatgcaccgacaattcacggtatttcccggggaacatcccggattagtatccgccagaacgggtatgaaatttaccagagtacgctacctccaggcccgttcgagataaacgatatttatccggccgggagtggaggtgacttacaggtaaccctgcaggaagctgatggcagtgtacagcgatttaatgtgccatggtcttcggtgcctgtactgcaacgtgaagggcatctgaaatatgctctcagtgccggagagtttcgcagtggcggacatcagcaggataatccccgttttgctgaaggaacgctgaagtatggtctgccggcaggctggacggtgtatggaggagcctggatagctgaacgctaccgtgccttcaatctgggggtgggtaaaaacatgggctggctgggtgctgtttcactggatgccacccgtgcgaatgcccggttaccggatgaaagccggcatgacggtcagtcatatcgttttctgtataacaagtcactgacggaaacagggacaaatatccagttaatcggataccgctactccacacggggctatttcagctttgctgataccgcctggaagaaaatgagtggttacagtgttcttacccaggacggagtgatacagatacagccgaagtatacggattactacaatctggcttacaacaagcggggaagggtgcaggtgagtatcagccagcagacgggggaatcgtcaacgttgtatctgagtggcagccaccagagttactggggaacggacaggacggaccgtcagcttaatgctggctttaactcatctgtgaatgacatcagctggtccctgaactacagcctgtcccggaatgcatggcaacatgaaactgaccggatactgtcatttgatgtcagcattccgttcagccactggatgcgttcggacagcacatctgcatggagaaacgccagtgcccgttacagtcagaccctggaggctcacggacaggctgccagtacagcagggctgtatggcacactgctggaggacaataatctgggatacagcatccagagtggttatacccggggagggtatgaggggagcagtaaaacaggatatgcctctctgaattacagagggggatacggtaatgccagtgcaggatacagtcacagtgggggttaccggcaactgtattatgggctgagtggcggtattctggcacatgccaatggtctgacactgagccagcctctgggagatacgctgattcttgtccgtgcaccaggtgcatctgatacgcgcattgaaaaccagacgggggtgtctacagactggagggggtatgctgtactgccttatgcaacagactatcgtgaaaaccgggtggcactggataccaacacccttgcagataatgttgatatagagaataccgtggtcagcgtcgtgcccacgcatggtgccgttgtgcgggctgactataaaacccgtgtgggtgtgaaagtgctgatgacgctgatgagaaacgggaaagcagttccttttggctctgttgttacggccagaaacggggggagcagtattgccggagagaatggtcaggtttatctgagcggaatgcctctgtcaggacaggttagtgtgaaatgggggagtcagaccacggaccagtgtactgcagattataaattaccgaaggaaagcgccggacagatattaagtcatgtcacggttagttgcaggtaa

SEQ ID NO: 26731 - DNA, 447 bp, Escherichia coli
atgcgcttccagggaaaaataattgctgaagcatgcagtcttgccctgtcagacaggcagatgactgtggatatggggcaactcagcagcaatcgatttcacgccgccggtgagtatggggactctgtgggctttgatattcaccttcaggactgcagcactgtcgtcagtcagcgggtggggatttccttttatggcgtgtcagatattcacgagccggagttgctgtcggtggatgaggagaatgatgcttcagacggaatcgctatcgctttatttaatgaaagcggagagctggtaaaacttaatcagcctccggagaactgggtgcatcttacccgcggagatatgaaactgcatatgcaggcgaggtataaggccacacattatcccgtcaccgggggaaaggcaaatggacaggtatggttttctctgacctatctgtaa

SEQ ID NO: 26732 - DNA, 330 bp, Escherichia coli; identical to SEQ ID NO: 15458

SEQ ID NO: 26733 - DNA, 966 bp, Escherichia coli
atgaaaaaaatagtttcccgtggacgagtgctgggcaagaatagctccgagtttgctcgcatgcttgaaggcagtgaaggcaccaaaacctttaccctaaaatctggccgccaggctaaatttttgcttaccgttgtgctgagtggtgagattgagtcgcgcacgttcgttgacccggcagttaacggccgcgatcagtctctgctcacccctgagtcggtaagcgatatttcccgcaccattaaattgcaacagttcttcccggctatcggtcgtatggttggggagcgcattgaggtattggacggatcacgtcgccgcgctgcgtgtatcttcaatgaaacgaaatttgagattctggtgacgaaagatgagatcagcctggcggatgcacgccagctggccattgatatccagacagcccgcgaacacaccctgcgcgaactgggtaaacgcttcgaggttatgtatggtaagagcatgaccaaagaagagatcgcccgcgctgagaacatttcaaaggctaaagttacgcgcgcgttccaggcggcagcggtgccggatgagatgattgctgtcttccctgttgccagcgatctcgccctgccagattaccagttactgctccagatctccgaggatgccaacgctaaaagcgtgcctattgaagagctggttgatacggtgcgcgaacgaattgcagagactgagggcgcgaaagaggataaagcgaagatactggctatcttcaaagcggaaagcaaaagcctgaagcccgcgccggttaaatctgtggtggttgagaagctgcgagacttctctgaccgtcgccaatatgctcgaaagaagtccgatccgaaaaaacgggttgtcgcctacgagttctccagactcccgtctgaagtgcaaactgaaattgacgaagcaataaaaaaaatcattgggaaaatgtctgctggggaataa

SEQ ID NO: 26734 - DNA, 1206 bp, Escherichia coli
atgaaacgcgattacggcggtgtcggcaccatagctcttcgtgcaagcgcattacttaaggccatgagtcaggatattgaagatcagcgcaaagagttcaatcagaccgagtattatcagacgttcactcgtaacgctgtggcaaagttgccgaagctgagccgccgcattgtggagcaggccatcaaagagatggaagatgatgggtaccagttcaacaagaaacaggtcggtaacgttgaacagtacgcgctgaccatccagaacgtcattgatatctatgcccaccgtaagatcccaaaatatcgcgacattcacaaatcgccttacgttatttttgtcgtaaacctgaagggtggcgtatccaaaacggtttccacagtcacgttggcgcacgctctgcgtgtgcatcaggatttactgcgtcacgatctgcgcattctggtaattgaccttgaccctcaggcatccagcacaatgttcctcgaccatactcacagtattggttccatcctggaaaccgccgcgcaggcgatgctgaacgacttggacgcggagacgctacgcaaagaggtgattcgtccgaccatcgttcctggcgtagacgtgattccagcctctatcgacgatggctttgttgccagccaatggaaagagctggttgaagagcatcttcccggacaaaatcagtacgaaatccttcgacgcaatatcattgatcgtgttgcggatgattatgactttatctttattgataccggtccacacctggatccgttcctgctcaacggtctggcggccagcgatttgctgcttacccctaccccaccagcccaggttgacttccactcaacactgaaatatctcacccgtctgccagaaatgctggagcaactggaggaggaaggcgtagaaccgcgtttaagcgccagcattggttttatgtcgaagatgaccggcaagcgcgatcacgagacatcacacagccttgcgcgtgaggtttacgccagcaacattctggactcttctctgcctcgtctggatggatttgagcgatgcggcgagtctttcgacaccgtaatcagtgccaacccgcaatcgtatccaggcagtgcagaggcgctgaagaaggcacgaaccgaggccgagcgtttcactaaggctgtgtttgatcgaattgagtttgttaggggtgaggcggcatga

SEQ ID NO: 26735 - DNA, 558 bp, Escherichia coli
atgaaagcctttgttgaagaaaaaggatttcgactggccagttggtacaccgaaaatgtatccggggcatcacttcaacggccagaacttttacggctacttgatgatgctgcacctggtgacattattctcatcgagcaagttgatcgcctttctcgcctggatgaagagggctggcaaaaattaaagcatcttatccaggaaaaacaccttgtggttgtcagtcttgacctcccgacgagccatatggctcttgcaacacatgctggcgatgattttacccttgcaatgcttaaggctattaacggaatgatgcttgatatgctggccgccatagctcgcaaagactatcaggatcgtcgccggcgccaagaggaagggatagcgaaagccaaggtagccggtaaatttcggggacgtcaggcagatcatcaattgcatgaaaaaatcatagagcttcgggttaaaaatagacagagcatccgtgataccgcgaggttgtgtggagtttcagaacgaacggttatacgcattgttaaacttaaagcatgttcttga

SEQ ID NO: 26736 - DNA, 828 bp, Escherichia coli
atgaataataccgttattgcctgcgttgacggttcgccgtcgacccgagcggtttgtgaatacgcggcatgggccgctgctctgctggattcacctctgtcgctgctgcacgtactggagaaagatgcgcatcctgccgtgtcagatttgaccggaagcatcggcattgatagccaggctcatctcaccgaagagctggtgaaagttgaaggagagcgtagtcggttattaatggcgcagggcaaagccatactggctggctgtgcggagttgctgaatgatgccggtcatgctgatgttcaattactgcaaaaacatggcgcgttggatgaaatcctggctgatttaggggatgttcgcctgatggtgctgggccgccgtggaacgcagaacccggttggcagccacctagaaagaattattcggctgcagaaaaaaccggaacttatcgtgccggaggcttattctacaccgaccaaagttatgttcgcctatgatggcagcgatgagagtcgcaaaaacctgacgcgcctgacacttagcccgctactcaatggtctggtttgccacatcgtgatggttaagggggatacacgaaccttgcaggaagcacagaatgtgctgcaagaggctggcattacgaccgaaagccacatactggaaggtacatccgttgctgatgcgctctgccgttacgctaatgaaaacggcattaacctgattgtgatgggtgcctatggccattcgccattgcggcgattctttatcggcagcaacaccaccgccatgttggaaaaaacacaaattccactcttaatgctgaggtga

SEQ ID NO: 26737 - DNA, 996 bp, Escherichia coli
atgaaacatgaaattgcggtgagtgtaataatccccgtttacaacgcagaaaaaaccatcaaatccttgatcaaagatatcttgatagaagacaggatcaacattgaagttattatcgttaacgatggctcctcagacaacacgtcaacgataattaactccataaaggatggcagggttcaagtgattgaacaaaataataaaggtgtatacgcggccagaaataatggattagacaagcataaaggccagtgggtcatgtttctggatgccgatgacgatgtgtctgaaggattcatttataacaggtatatccaggcttccagccataatgctgatgtgcttttgtccaatgcctggaagctttggcatgaaggcgataataaaaaacccgtgcatactaaccagccttatgatgaggttttatccggcaatgcgtggatgagtcacgcagtaaaagtcagggaatggccacattacctttggttacagatagttagatctgactatatcaggaataacaatctgtcatttcatgatggccggagtcataaagatattttatggacgatggaattggcgttggcaaatgggcgtttctacatatcaaaagatatggactacacctacaagtacaataatgaatccatcacaaatcgcggtgattatttcgacgtccgagcagaatgctatattgatgtaatatctaaaaccatcggtcacgcaaagtcgataaaaaataatgatttgagcgtatcgctgtttaggcatgccctgtatgaggctagacactttctaggtttatatagaaaaaaggtgagggacaaagaaaaaatcaggcggttatttgttagagaaatagcatataaagatttaataaaaggtgtatatagccttagtgatattttctttttactgaaagttttcgtaaaaacaaaaaaattcactggtgctagcccgaaattaaaatggataattatattgctattggcttaa

SEQ ID NO: 26738 - DNA, 1821 bp, Escherichia coli; identical to SEQ ID NO: 10034

SEQ ID NO: 26739 - DNA, 1221 bp, Escherichia coli; identical to SEQ ID NO: 9049

SEQ ID NO: 26740 - DNA, 129 bp, Escherichia coli
atgaccgacgtatcaataaatgaaaccgagcagaaaactcctgatgtaaatgcccgcacctctcaggcatctgacaatacccgcaaagtcgtgcaaagtaaaatgaactttacggcatggccacagtaa

SEQ ID NO: 26741 - DNA, 486 bp, Escherichia coli
atgtctaattcgaaactaataaagtcacttgaattatcgcgcagcttaatgcgttcacaaatcgaggctctgcgggaggaggctgaagacttgtgtacaaattactggatcgagtggaaagaacggaatcatctggagattaatttaccccggcctagcaatacactaaaacgtgagtatctgggttcgtatgcaccgaaactagaattaattggtaatgcgaaaaaagtcactatcacctggcataagttcagtccgtttaaaaccagggcacccagctatatgtcgaaacgggtttctgcgatgaaaaacggaaaatattcaaaaagctgctttgttaatcacgcgtcttgggaatatgaaatgatcgaaaaaacggagggattactggaaccctacagagaattacttgaattctatcatgctgcatatatcgaactgggacggaaaatccgtaaatactcaaaatataaggtggcacaatga

SEQ ID NO: 26742 - DNA, 531 bp, Escherichia coli
atggctgttgtcgatggtgacactaacgttattcgagaatatgacagtgacgatgctgacttcggtatttacaatgctggggaaaaagttactttactgtatggccgggaagacttttataatccgacaaaaattcagcagttacgctctaagtgtgtagatatacaaaatgattactttattcaaatcttctttatgtcaatgcttgcacctgagtttgtcagcatattttttggattaaagcctgccaccgcagatgcaataaaagatgttggcgtttcatcacttaaagcaattaacgatgttgttctctttccgcgaacaattgcctttacgccaggactgggggatgatagcactacgttaaaatctaaagtattcgcctgggcatacgaattatctgccgacattcgtttgggtaaagttagtgatgacttaatggaactactgcgttacgacactatgtttacgtgtcaccgtcaggatgtgtttaactcattagcaaataaagtgctcttgaaggattattga

SEQ ID NO: 26743 - DNA, 1587 bp, Escherichia coli
atgcgtattcaggaaatcacgcaatatattctgaataatttccgccagaaaacccaccgtaccttccctggctcaaaaggttttaatgctatgttggcagtgagcagcgtggatgccgcgaaagcctattatgcgacgtttaaacggttacaagaagaagccgctaataaatcggctacctataaaccgctgcgtattgcgacaatcttctcctttgccgccaatgaagaacaaaatgccattggtgaaatttccgatgaaacttttgataccagcgcaatggacagcagtgctaaagagtttctggacgctgcaattcgtgaatataacagccattttaaaactaactttagcaccgacagtaacggttttcagaactactatcgtgatttagcccagcgggttaaaaatcaggatatcgatctgctaattgtcgtggggatgtttttaaccggcttcgatgctccaacattaaacacgctattcgtcgataaaaacttgcgttttcacggcctgatgcaggcattctcccgcaccaaccgcatttatgacgcgactaaaaccttcggtaatattgtcacgttccgggatctggaacgctcaaccattgatgccataacgctgtttggtgacaaaaataccaaaaatgtggttttagaaaagagttatgcagagtatatggaaggctttactgatgctgccactggtgaagctaaacgcggcttcatgacagtagtttcagaactggaacaacggttccctgaccctaccagtattgaaagtgaaaaagagaagaaagacttcgttaaactgtttggcgaatacctgcgtgccgagaacatcctgcaaaactatgatgaatttgccacgctaaaagccctgcaacaaatcgatcttagcgatcctgttgcggtagaaaaattcaaagcagaacattatgtggataatgaaaagttcgctgaattgcaaacaattcgtctccctgctgatcgcaagattcaggattatcgttctgcctataacgatattcgcgactggcagcgccgtgagaaagaagctgagaaaaaagagaaatcaaccactgactgggatgacgtagtttttgaggtcgatttgctgaagtctcaggaaataaacctggattatatccttggactgattttcgaacacaatagacaaaataaaggcaagggcgaaatgatcgaagaggtcaaacgcttaattcgttcaagcctggggaaccgggcgaaagagggcctggtggtcgattttattcagcaaacgaacctggatgatttaccagacaaagccagtatcattgaggcattctttacgtttgctcaacgcgaacagcaacgtgaagcagaagcattgataaaagaagaaaatctcaatgaagatgcagcaaaacgctatattcgcacgtctttaaaacgcgaatacgccaccgaaaatggcacagaattaaacgaaacattaccaaaacttagtccgttgaatccgcaatataaaacgaaaaaacaggcagttttccagaaaatcgtctcgtttattgagaagtttaaaggcgtaggcggaaaaatatag

SEQ ID NO: 26744 - DNA, 774 bp, Escherichia coli
atgcctttcatcagccatcactacccacacgatcatagttgccggtgggtagaaccctttataggcggtggtgccgtttttctgaacatgtttgcacaaaacgcattgcttgcagatagcaatccagacttgatcaacctttacaggattattcaaagacagaaaactaactttataaatcaggttctaaacctggcggttagaacctttgtcgaaaaggactactatgagatgagggaccgcttcaacaaaacctgtatttctgttcaaccgcttcaaagagcggctttgttttactccctgaatcgcctgggctacaacggtatgtgccgctataactcagaaagaatctattcagtgccttgggggaaacatacagaactgaagcttgacctcagtaaaatagactacctatcatttcgactttcaggtattgaactgatcaccgctggttttgaggagactctggccgcaaccggtgaaggagatcagatttattgtgacccgccatatgacaaaacaagcaaaactagttttgtcagttacgatggtaaaccgttcagccaaagcgaccacgtgctgttagcaaatatgctcgttgacgctcacagaaaaggcgctgctgttgcgatatcaaatagcctgaccccattcactttgggcctctatgaagagcgtggattcgtcatacacagactcagcgcttaccgatccgtaggaagtaagtctgatacacggaaaacggaaacagaaatactggccgtgctgaaatag

SEQ ID NO: 26745 - DNA, 666 bp, Escherichia coli
atgataatccataaccatctttcgtctgcatgccctatcaaccaaaatgaatgttcaaatcatatatcgcaattttctatcgacattaaagtacaagattggcttagccgttcaagagtagcgtttattgatttccataatctaagaaatacagataaaaccacattaataacagtggaacatcttgaagctttacttactattatgtcgactactcttgtcgcttacgctccatattcaaaaaagagacttaactttagctttctaaattcatttactttgtctaaaacttctcaaagttacacattaactttcccggtagttctcagtccgcttttagatgctcttggcggtttcattcaggaatgcataaccgaaaaattgttaaaacgacgaaattcgaatttcatggtttacgagtatcttaaacgttcaggccagagctctcacaaagtggaggacattaataacgacttacagcttaaaagtctaaatataaggcttatgagcgtccttactggcctttctcagcaaggactcatttcatttatttgcgaaggaaagaggggtgaccggagaatagaagagcttcagtttataccttatattcaacgaacttaccctgaggtattaacttttgaggaatggattagcccagttgattag

SEQ ID NO: 26746 - DNA, 342 bp, Escherichia coli
  misc_feature (322)..(331): n is a, c, g, or t
atgattaaaaacagagagttaatacatccttttgacgtaaccagtaatgaatcaggcaagacttatcaactgacgcctaactcgtctaagtcggttcaacccgtggccctgctgagattgagtgtttttacccctgtcggcacaaaagaaaaccgcgaccgaaactttgaagttgatgcctctgatgagctttcgtgtatggaaattgcgagatcggagggttatgacgacatcaagataactggtgtcaaactatctatgtctaccgatttcaagtgctggctcgggatcatcatggctttcagtaaatatggttttactnnnnnnnnnntttacttctga

SEQ ID NO: 26747 - DNA, 516 bp, Escherichia coli
atgtgtggtatcagttcaacaaacatcaacaaacgaactcgtgcgcgctttaaagagtcattaatgaatcttgcatctgtagtgcttgccttctcagactctcgtagtggccggttcacagtaacgcatctggtgcagaaggctatgattgatccaaaaagcgatactgttgagctggttggggatccttctatgtgggaactgtatcgttacgaccataagacattgttaagccttcaggttctatacattttggctaaaaaagaagctgcgcaatctctctatatttattttgaagcaatgccagctggtacgttgttcgttaatatgaaacggttgagggaaaggttgcttcttacaacccctgttcgtacgcaaaaccagataattcgtaaagcaatgcgggaacttgaatctatcggatatctcgattatcaagaagttaagaaaggtcgcgacatacaatttcagatcttcaaaagaagccctaagctggcccttgccaaacaaggttga

SEQ ID NO: 26748 - DNA, 240 bp, Escherichia coli
atggaactttctttaaatattggccttagtgaaaagaaatctaacaccgctgcactttttaaaacaaaaagcgcaaaagtgattttgtttgttctgctgaccgttcttttttgcggtctggcatatgcgggttcagatgatggggcactgggagatatttggtcatacatgagtgaaagtatgactggtgctcctgtctcttatacacatctgacgctgccgacgaatagagaggtgtag

SEQ ID NO: 26749 - DNA, 1038 bp, Escherichia coli
atggctgaactattaaaatctgaaagtcctgtttcaccatcagtgcaggatatcactgaagctttaaaaatcgttgtcgatgatggaagtaaagctgcaaaactggtttgtcttaatgaaagaaacgaattagttcccttgctcacacaaaatagttttgttccagatttccgtgttcgccatgagggtctcaatccttttaactatcttattgatgggttggaaaggttttcgcatcacagcgaatctagtaactcactggaatcgactgatgtatctcaccaatacgatgaaattagccgattaaatgttcaccatgcacttcatgcttctggtttagttcctcaggatgttcacctctttgttactttaccacttagccagttctatactgctttaggggaaacgaatattgaaaatattcagagaaaaaaagataacctgatgaaaccagtagaacgttatcttgacggtaaacgctattcttttaacgttttgtctgtgactgttttccctgaatctttaccagctgtgacccgggcagatgaaattgaggatattgcttcatttgaatcaagtttggtaattgatcttggtggtactactcttgatgttgctagtattactgggcaattagaacagatttcgaaagtaaaaggttttgaccgtattggttgttctattgtttacgatgagatcagcaggtatcttgaatctgagaaactgaatacgagtaatgcttacattcatcatcttattgataatcgtcatgataaatcagctttgaaggtagcagaggacaagcgtgacggtgtttttgatgcggtaaactctgcggtgcaaaagttgcaaagtaaagtaatcagagcggttacacaggtcgaagagaggcctcataatgttttccttgttgggggaggttcatatctcatcgaaacagctattcgtaaacaatttgaaactgcaaaagttatcatggtagaaaatccgcagttcgcattatctttggcaattgctgatactatttattcagaataa

SEQ ID NO: 26750 - DNA, 954 bp, Escherichia coli
atgaaaaagatagctattttgataaccgatgatatcagtgtatttcatctctccgtaccactggcaatttttgcagatattatcccggatcattcattatttaacgttgttttatgctccgtgcagggaaagactataaaaacctcacatggtatgcatattacaccggaatatgacttatcggtgttacgtactgctgacatggttatagttcctttctggccatctcctgacattgtaccggagccacagttaacggaagcactccgggaagctgcacagcataatgccaccattgtgagtttgtgccttggtgcctatgctctggcctattcagggctactggatgcaagaaacgcgtcgacgcactggttgtatgagagtgattttcagtcacggtttccgaatacccacctggatatgaatgcgctctatgtagctgacgataatattattacttctgccggtacagctgcgggtatggactgctgtctgtatctggtcagggagttgtacgggagcaatattgccaatcagatagcaaggcgaatggtgatcccacctcatcgggacgggggacaggctcagtatattcagatgccttttccatctgcaacaaaggatcgccagataattctgctggttgaaacgctgcgccaggacctggccagacgctggacgctggatgaactttgtgaagtcgttagcatgagccgacgaacctttacacgccgcttcagacagtcgacgggcatgacactggttgactggttaacaacggagcgtctgagagaagcgcaggtattactggaatctacggcccactctgtacagaaggtatctgagctggttggttttagttccgcaacatctttacgggaaaagtttgtcggaaaatttggcgtatcgccgtccgtatggcgaaaaacattcaggggttcagaagcgatataa

SEQ ID NO: 26751 - DNA, 399 bp, Escherichia coli
atgaaaaactcaaatgaaaaacttgtacatgatttttatcaggctcttgaaggttatgattttttaacccttaaatcactttgctccagtgactttgttttctattcacagatagataaccccattcatggagttgacggttttatcgcatctgaaactgccacacttgatggattccggggcttcagcatgaagcctgaagttcttatcagtgaagcggataaagtcgcagcttatgttgtttttgaaggtatccacaataatgaaatgcacggatataaaccaactgggaaaaaagtacgtatttctctgatgatgctgctgactattgaaggtggtaaaattaaggaaaaacgtgcgcactttgattataacgatatcgtacggcagattagttaa

SEQ ID NO: 26752 - DNA, 135 bp, Escherichia coli
atgcgccattataggtcctggatgtgggatttttttatcctgttagcgaccttgacgagtaccaaaaagcgcgaagttcaactattgttctgtggtgttctgttgcgtgttgacggcaaaattttgctggcgtaa

SEQ ID NO: 26753 - DNA, 258 bp, Escherichia coli
atgagaacccgtctgttcaaactgctggataatctgcaccttattgcgcatgagattctttttatctatcaaatagatgttctcaagacgctcgtcatcaaaaataaagtcgcaaatatagtcgatatggattttacgggtcttatccagaatgccatcgctcgggttatccagatactgctccgtgaaacgccgccactcgctgtcattaaacaccacaccattgaggttctgaagctgttcccgaacattggctag

SEQ ID NO: 26754 - DNA, 1134 bp, Escherichia coli; identical to SEQ ID NO: 8777

SEQ ID NO: 26755 - DNA, 222 bp, Escherichia coli
atgactcagataaaaacttaccgtgtagaacatgaaaaagtcggtgcgatgcataaagtccgtattttcggacgtgttggtgaagttataagcaatgatagccctcaggaaagaatcttccgcgaagtcactatagcggagggtaatagccagcaggctgcgttacttgtagataactacatacagcgtcttgagaataatggcttcacgactgaagcataa

SEQ ID NO: 26756 - DNA, 435 bp, Escherichia coli
gtgaaactatatataagtgcactacagttagaaaatggagagcttttactcgtcgtttctcctcagtttaatgccaatgctattcaggattatgcattacgctgggaaattgaaaccttattcagttgtctcaaaggacgcgggtttaatcttgaaaatacgcgcttgacagaccctagacgagtgaaaaaattgattgcggtgttagctataagcttctgttggtgttacttaacgggtgaatggcaacatgatcaaaaaaaagcgataaaaataaagaagcatggacgactctcaatgagtttatttcgctatggtttagactatgttcaaatggcgattcagcgtttaattggttttgggaaaaaagaagagtttaaggaaattttggcaattttaagaaggcagaaccctgataggataagggttctgtga

SEQ ID NO: 26757 - DNA, 150 bp, Escherichia coli
atgggactggatgagttggcgaacaatcctctctacctgatgcgctatcagcagtttgtttcgccaatggtgtatggagagcgacagatcacatgggatgaggcttactccaggtttaggagcttagcgctagccatcctgaatgcttga

SEQ ID NO: 26758 - DNA, 186 bp, Escherichia coli
atggcttccagtaaatcgctacagcaggcaattgccaatataaaaatctggcacaagggtgaacagcgcgcgccgcataagccattgttattgctatacgtattagcgggatacctgaatggacatccgcgccttttcgattattgtagtggaacagtctacgaggatgcagttcgaagtgagtaa

SEQ ID NO: 26759 - DNA, 453 bp, Escherichia coli
atgctatctcgcaactcactaatacatggtttacgccgagaccagttaatcggagttctgactatttcagagtttccggtagttatggtagaaagccacttcattcagtctgaggttatgggaataaaacccgtaatttttaatattgatgagcttcttgtttctatatccccaatttcctctcttaagttcgattgggagtgggccccagttgatacaatactcattgaagttatcattccacctgtagagtcagaccttgtaagtgcagaaaatgacttcctccgtgattctggtattggccatatccagtgcgagcctggcggagcatcaatacgacgtacagttaccttcgttggtgggataaccgctgataacttactgtatcagttgaggcttatgtgcgtaagcgcgttaaaacttttaggagaggaactgggggatgatgtctaa

SEQ ID NO: 26760 - DNA, 591 bp, Escherichia coli
atgctcaaaatccttgatatgccattagagcttcaacgtttgattagcctaaatctaatcaaaaaaacgctcgccattgaaataatgttaaaatattccaacgatcacaaattggttttaaaacatatagaaggtttcttacctggcgttaagaatattgagactacaacgagcaaaattgtaggcatacctgaacacaaggcagctgtagcagaaccagacaccttaaataaaggcggaccagaaaagaaaaattcggcagtcacacgtaagactttgggtattaagcgcctctcgcataagaaaacagaacggctaaaatctgaatttcttgagcttgtggaaagtacacatacggaatctataacgaatactcaaacagaactaaaatttggtagagatagtgcacacttgttcaaaaatgttgatagtaaaaatgtaatattttctaatgatggtgttcaaataatcttgaatgatgaaaagctaaatattttattgtctttacttaacgacgaaaatacagcaatcattgtttctaaaccaaaattagaagagcttctggaaattcgagatctccttaaggaataa

SEQ ID NO: 26761 - DNA, 219 bp, Escherichia coli; identical to SEQ ID NO: 22815

SEQ ID NO: 26762 - DNA, 288 bp, Escherichia coli
atgttaaagcgtattatttcaggagagcaaaaggttactgactggttggaatctattaccagatcatttaatcaaagctcacaaacagaaccgaatgcactacagaacacaggtattgaagctattttagattcaacaaatgtgttccaggttgaacctgtcgtagagaacgatataaataacagcacattttcaaacactgatcctgtagctgaaactgagaaatcagtttcgcaacaggaagacaatgctgaaaatggttttgatatcgagctcaaaggctggtaa

SEQ ID NO: 26763 - DNA, 435 bp, Escherichia coli
atgtacggaacatgcgaaacgctctgccgggagctggcagcaaagtatccgggagacacgccgctgatgctggttgtctggtccccggaagagattcaggcactggccgacggtatggaaatttctctgaccgatcatgaaatcaggactgtcctggcgcgcctggaggacatcccggaagaccagcggattgagtccggtatttcttccggtgcggcgatggagattatcagcaacgtgagcgaaaaccgccaggtgtccgtccctgttgaactgctggcgtccctgattcagaccgctgaacaggcattgtggaagcgtgaatgggccgcccgtgataacggcctcaccgtcccggaatgcgtcacccgtcgtcaggcggtggttaatcaggcccgcagcttgctgaaaaacaacacacacgaaaacaactga

SEQ ID NO: 26764 - DNA, 555 bp, Escherichia coli
atggctacttcagacttctctcttaaaaaccataatgtaaaagcttttggtcaggatgctgcccttgtcattgagatgaacaatgaaaatgttagctcatcaaaaccttcacctttttcaaatgagattgataattattatcttacgctgcacgtcgctccgaggaacgcaaaaaaagattatgactggggctcaaaccgttctgtacttctaaaattgtcgacgaatgaagttatgcagatggcatctgtatttcttagaatcatgcatactttaaagattgataagaggaaaacctcacatcatggccacgtcgtatacaaaaatataagcgttactccaaacgagaggggcggtttgttgttatccgcagggatagttccagtcgataaagacggcttaaaacctttcgtgcacatggtccccgtctcacaaatggactgcgttaaaattggcctctacatacttggatatcttgctctaaaaacgccctgggtaagctccgagtctataattaccgcgcttcgcttatctgaagccaagaattcaaaatag

SEQ ID NO: 26765 - DNA, 378 bp, Escherichia coli
atgtcatatcttgattatatcaatgaagtaaaagtgtccgggatagttatcagtgctgtggagaaaaaaatgactgaccagagtataggtttgttaataaagctcaaaaataggatgaagacagaagttgatggtgaaatcactgagagagaattttcagttcaaatcaaggtgtcgcctgaaatgtattcaacctgtttcactggtatcaatcagggtgatgagttgatggtctccggttatattgttgtcgatactattatgattgaagggagagaacaccctcttgactacatgagagtggtagcaacaagtaagttggctcacatacctaaacctctaaaaggttttggacaaagtagctttaatcagatctga

SEQ ID NO: 26766 - DNA, 174 bp, Escherichia coli
atgcaactgaataacgactattctttattgttttatcatgatggtaaaataaatatggaaggtctgattaaagaaatggaattaaaaggctatatgtatcagggagcaatgggcaatgatgatgttgctgctgagtttcccggtattcttttaattgcaccagagaagctttaa

SEQ ID NO: 26767 - DNA, 249 bp, Escherichia coli
atgaacaacagcaaacatacagtcattgaagtggatactaatctagttgaaattgaaaagggatttaatccccgagaggcggtaatcggagatttgtgttacgaacaagaacctgtcaaatcgatgattgtgtcaatcaaacaagcctttaaggaaggaaggcaggttgatatgatcaaggtcgtaaaaagaaaaggtaaatatttagttcgtcaaggtcatactcgtttttataatcgattaggataa

SEQ ID NO: 26768 - DNA, 204 bp, Escherichia coli
atgctgtctagtccaggaaaacccccattaaaaggaaatcttggacgatttgattatataaaacttgtggttgaggaccttcgtattcgaggttacgctgattatcttcctgcgtataatcttgatgaccttcgccgttttgccttacaggacgaccgcccatcccttgtcagatacattgacaatgtaatggcaacggtctga

SEQ ID NO: 26769 - DNA, 132 bp, Escherichia coli
atgattctgaaaggcgtgaaaatcacctttatgaaaaatccaaattacttaaaaatcaaattttgcatacaattaattttgcagcagaaactgattatctatatacggtcgaagaatataactcagatttag

SEQ ID NO: 26770 - DNA, 297 bp, Escherichia coli
atggttttatggatgggggcatcattttttggtgagcctggtttggtattatcaatattactgattggctttatttttaatggattggcacaagtaccatttgccagtattcaatcccgaggtcatgctaagataactgcatttgttcatctcttagagttgtttccttatttattacttttattttacctcataaaagcacatggggttgttggcgcgggtattgcgtggtcagtgaggatgatagtagattatatagcattaagtcttttggacggtaagtatattaataaataa

SEQ ID NO: 26771 - DNA, 1449 bp, Escherichia coli
atgaataaagaaaaagaaatttttataaagcatatatgcaaagaattgcaagatgagaatatagcgatttttgctggggcaggaatgtcagcaggcgcaggctttgtaagttggtcagaattattacgtcctattgcagatgagcttgaacttgatattgataaagaacatgatcttgtagcattagcgcaatatcactgcaatgcaaatggaaataatcgtagccaattaaatcagagattaattgaggagttttctcgagatgctgttgaaacagaaacacacagaattctggcaagattaccaattagcacctactggacaaccaactatgacaaacttatagaaaatagtttaattaaagcgggaaagatacctgatgttaaatataccaaagagcaattagctatcacaaaattaaaacgtgatgcaattgtatataaaatgcatggcgatatagatcatgcaaacgatgcagtattaacaaaagatgattacgaaaaatactacattaaaatggaacaatttttatcagcattaaaaggcgacttaatatcaaaaacttttatttttatcggatttagttttacagaccccaatcttgactatattttaagccgggtccgtgttgcatatgaaggaaatcagcgccgacattattgttttattcgcgctacgcaaaaaggaccaaatgaatcagaagcagattatcaatataattgtagaaaacaagaattatttatttccgatctaagcaggtttaatgtaaaaacaataatcatcaaagattatgatgaaattaaaaaattgctcggcctgatcgagtttaattacaaaaagaaaacattgttcatttctggtgcagctcatgaatatgaaccatggggtgaaagtgcgtctcagaagtttgttgctaaactcagcgcagcactgattaataaaaattataaaattgtttctggttttggcttaggtattggtagttcagttatttgtggagcattagaagaaatatatatgaaacaaaataacagaattgatgatagattgttgctacgcccttttccccaacactcaagtaaacaatcattgtctgcgttatggacacagtatcgtgatgatatgatatctcatgctggcttttccatatttctttttggaaacaagcaatccaatgatgagatcgtattatcaaatggaatgagggaggagtatgagatatcaaaaaataaaaaaaacatcatccttccaattggggcgacaggatacatggctagagagttatgggaagaagaagttaataggctacatagtttaccaaataaagatgatgaattttgtaaattattcactttattaggagatcaagataaatcattagatgaaatcttagataacataataaatatcattgactatagtgttaaaaaaggagatttacatggctag

SEQ ID NO: 26772 - DNA, 345 bp, Escherichia coli
  misc_feature (269)..(278): n is a, c, g, or t
atgcgtcagtatcgtttattgtcacctatgattaaggtagtcatagtattattttcccttttattctctacagcacaagcaggcttagtgatcggtggaacgcgttttgcgtatccggaaaatcagtcctcaatatctgttgaactcaaaaacacttcagacagagatatgttagtcaaggttgcagtctcccctgatgatgctcgtcagttgacgggaacggttgaatctttgccctcatattctgaaacggtatttatcgcaactcnnnnnnnnnngagtcattacgttattcctgcaaatgcgagggggcgcaattgcgccactgtttattttgaagcctga

SEQ ID NO: 26773 - DNA, 1221 bp, Escherichia coli
atgacatggagaacgaccagaacacttttacagcctcaaaagctggacttcaatgagtttgagattcttacttccgtaattgagggcgcccgaattgtcggcattggcgagggcgctcattttgtcgcggagttttcactggctagagctagtcttatccgctatttggtcgaaaggcatgagtttaatgcgattggtttggaatgtggggcgattcaggcatcccggttatctgaatggctcaactcaacagccggtgctcatgaacttgagcgattttcggataccctgaccttttctgtgtatggctcagtgctgatctggctgaaatcatatctccgcgaatcaggaagaaaactgcagttagtcggaatcgacttacccaacaccctgaacccaagggacgacctagcgcaattggccgaaattatccagctcatcgatcacctcatgaaaccgcacgttgatatgttgactcacttgttggcgtccattgatggccagtcggcggttatttcatcggcaaaatggggggagctagaaacggctcggcaggagaaagctatctcaggggtaaccagattgaagctccgcttggcgtcgcttgcccccgtcctgaaaaaacacgtcaacagcgatttgttccgaaaagcctctgatcgaatagagtcgatagagtatacgttggaaaccttgcgtataatgaaaactttcttcgatggtacctctcttgagggagatacttccgtacgtgactcgtatatggcgggcgtagtagatggaacggttcgagcgaatccggatgtgaagataattctgctggcgcacaacaatcatttacaaaaaactccagtctccttttcaggcgagcttacggctgttcccatggggcagcacctcgcagagagggtgaattaccgtgcgattgcattcacccatcttggacccaccgtgccggaaatgcatttcccatcgccaaaaagtcctcttggattctctgttgtgaccacgcctgccgatgcaatccgtgaggatagtatggaacagtatgtcatcgacgcctgtggtacggagaattcatgtctgacattgacagatgcccccatggaagcaaagcgaatgcggtctcaaagcgcctctgtagaaacgaaattgagcgaggcatttgatgccatcgtctgtgttacaagcgccggcaaggacagcctggttgccctatag

SEQ ID NO: 26774 - DNA, 696 bp, Escherichia coli
  misc_feature (673)..(682): n is a, c, g, or t
atgagtcatggtaatttcaaaataaaaagaatagcagcgacttcgattttgtgtttttctgttctgtattcaaatacagcttttgctgtctggcccgtcacggaagaagtattgacaccttacgtaatgggggcatcccctcaatctatggggaatggaatgattgagacattagtctcaatgaatgacaaacttgcgcaggctaatataacggctaatgaaaatcaaaagaactctgttataagcaatgcaaaccaagctattcaggagcaaagaatgcaaaatatccttaagcgaattcctgatgctaatgcttgtgaggaagctacagcagcaggaggtagagggtcggcaggatcaaacacaagctcagctaaagcagctttagctgaaaatagtgtgaaaatgtttacgggagcaagcaccggtataaatgaggctaaaaataacgtgatggggcgagtctcaattgaagtctgttctgacgaggatgtgaaatacaacagaggtggatgtagtgctattggtgcatatgctgataaagataaatctgctacctcactcaccacaccaccgctatccatatctgatgctcaggggaataaagtttcaaaccaatcatatgacgttaaacagatgaaagtggctgacgctgcggatcggcgcgtgaccnnnnnnnnnntaagcgaaatctga

SEQ ID NO: 26775 - DNA, 867 bp, Escherichia coli
atgaagtatgtctttattgaaaaacatcaggctgagttcagcatcaaagcaatgtgccgcgtgctccgggtggcccgcagcggctggtatacgtggtgtcagcggcggacaaggataagcacgcgtcagcagttccgccaacactgcgacagcgttgtcctcgcggcttttacccggtcaaaacagcgttacggtgccccacgcctgacggatgaactgcgtgctcagggttacccctttaacgtaaaaaccgtggcggcaagcctgcgccgtcagggactgagggcaaaggcctcccggaagttcagcccggtcagcaaccgcgcacacggcctgcctgtgtcagaaaatctgttggagcaggatttttacgccagtggcccgaaccagaagtgggcaggagacatcacgtacttacgtacagatgaaggctggctgtatctggcagtggtcattgacctgtggtcacgtgccgttattggctggtcaatgtcgccacgcatgacggcgcaactggcctgcgatgccctgcagatggcgctgtggcggcgtaagaggcccaggaacgttatcgttcacacggaccgtggaggccagtactgttcagcagattatcaggcgcaactgaaacggcataatctgcgtggaagtatgagcgcaaaaggttgctgctacgataatgcctgcgtggaaagcttctttcattcgctgaaagtggaatgtatccatggagaacactttatcagccgggaaataatgcgggcaacggtgtttaattatatcgaatgtgattacaatcggtggcggcggcacagttggtgtggcggcctcagtccggaacaatttgaaaaccagaacctcgcttag

SEQ ID NO: 26776 - DNA, 906 bp, Escherichia coli
atgagatcagtcgctttcaaaaatatcttcatctatcgtctttcacgcgaagttagctgggatactgcagaagtaaatgcagcccttagcaagtttgtgtttaccccatgcggttctcaggatatggctaaagctggttggacccccgttcttggcgacaacctcacccatgaataccagggttttcttctgatgcagcataaacgagaggaaaaaatcctaccttctcaagtactcaaagaagagttacagaaaaaaatcctgaaacttgaagaagagcaagacagaaagctgaagaagaccgaaaaagattcgctgaaggatgaagtgcttcactctcttcttcctcgcgctttcacgagaaaatcagtagctaaaatcctgatagaccgaagcaatcatctggtttttgtcgaggccagcagtgctaaaaaagcagaggatcagctggctttgttacggaaatcgcttggcagcttgcccgttgtccccttctctccgaaagacccattagaactgaccatcactggctggattaaaaatggcttcccgaacggtttccgtgccggtgaggaagcgaccttaaaagcattgcttgatgatggcggcgcggtccgctgcaaaaaagtggacctgctatccgacgagatcatgagtcatatagaagctggtaaggttgcaaccacagttgcggttaactggcaagaccgtgcatttttcagactgaatgacgatatgagtatcaaggctttgtcgttcagcgacgaattgtacgaccagaacgacgatattgatcgagaggatgttgcgcaacgatttgacgctgactttatcctgtttactgctgaattatccgcgatgttcacttcgctagtggaggccgttggtggtgaagcagaacgttaa

SEQ ID NO: 26777 - DNA, 654 bp, Escherichia coli
atgaagcgtagagcgcaaattgttggaactgtgcacccggcagggcttatgcgtgctcaagtccgtgttttacctgactggaatggcgttcctgatgacgatctaccctgggcggaatacctgttacccatcggaaacgcttttgtacccacagtcaaaggtgacctggtctgggtagagtttccttatttagatgttaacggtcgaatagacaccagacgcccaatgatagttggtgccgctcaggatgcaccgggaggaattccaaacgttgcaccagaagcatctggcaaaggcaacggctggacgccgccggaagtagatggagcgcctccccgcccccaaatctcagcaacgaaagacttcgttattcaccgcaacaatattcttgaagtacgaactgctggtggcggctatgaaattgccaatacggctgcaggctcaaggattggcatgaatgagtccgggcagatatatatcattggtccggctgatgtaatcgtgaatgcaggagggagtgttaacgtcaaatcagccaacaacatcaatgttaaaggggaaaatattgctgtcaccgctaacggagacatagctttcaaggcaggaggaacctttcaggccactgctagcaacttcgatttcaagaaaggatag

SEQ ID NO: 26778 - DNA, 981 bp, Escherichia coli
gtggcccaggagttacaacaatattttctacagtcagtgctcattaacgataacaaagtgccacgagactggatttttaccgcagtatatgtagaaaaaaccagcctcaaagcccctttgctaaaactggaaattcatgacgctaccggcaccgtaattgatgactggaaagccaaatacggtgcatcgctggtggctgaaatgggcgatccaaacggtaatgcaggcacttttaaaacagatttctttgttacgtctgcaatgctggctggtgatgttgttaccgttattgctgtcagtgaagacgtgcgcaggtttaagatcccctccccgcgcacaaatttacataccaacaaaacaccagacgctatattcaaggcatattccggcaagcttaaaattaccagcagcgtgctaaaacgcgcagttacatatcatctgaatgccggtgacaaaccgtcaaaaatgctttcggagatagcgcgagacaaaggtgcattatgttgggtatgccggggggaatttaacttttacaccctggctgatctgatgaagcaaacgccatcatttacctacgaggggaataaccctaaagcagaatacactttgtccaaaatgcgcctactccaacaggaacatgcgacaacagcaaagaatcaatatcgttttgttgggtattccatgaccgatggctacgtcgaatatggcgatagctcactcccagtgcgttatatatccgactctgatatggaaactcttcgcaatatgcagctgtctctcgtccccaaaatggatatagaagtcgcaggcaatcctgatataaaaccggggatggtgatagagattatcgtataccgctatgaccaggaaaaccgcattgatgaatcaatgccccgtaagctgatagtaaaaaatgttgcgcactttgaagaccgcgtaggctacacaacacgaatgatattgggagtgccgaacaaatga

SEQ ID NO: 26779 - DNA, 768 bp, Escherichia coli
atgacttcaaataaaaccctcctggcgcgaaccggtgaatggcaaaccttacgcacaggaaaattccagaccacgggctttgaaaacgtggataacgcgtttgcgacgctaatcagcaacattttttctgatatcttactggtggcccccgcgccggaagaaaaacgctttgcgtcattcctgaatcgtccaccagcagagcgtgtctatatggcccgtttcgacaatgcgatcgagtttcttaaagcagttcgtcgcgcaaatgccgggcaagggagaaaacctgaaaaccagaacattaaccgggatgctctccccctggtcaatatctcacgcactatggatatcaattatatcaacgatgatcagcagattgaccgcaaaaaagtagccagtttttgcgaaccagataccggaatgcctttagcagaactggaatacacccaggccattctgacgtatgacgttacgttaatggcaactgataaagcgaccatgagtctgatgtgtaattcgctgggcgcacggcttcgcctgatgacaggtacacaatttgaagcaaccactcaccttgttcgtgtcccggtcccgctgatttgctcgatacaggatgccaaagaagtcggctttacggatgtttcagcaccaattggagaagagcgtatttatgccacacaagcgccgataagtgtgattacagacgtgatcacagcatgggagttggacgcaaaacgtattattaccgaaacctcgatatctatggggtga

SEQ ID NO: 26780 - DNA, 792 bp, Escherichia coli
atgggccgttttgacgaatggtttgctgacgatgcaaacctggcaagtaaggagtcagaacatgacagcacgcagagagaaacgccagcaccgattgaagcgaatgcaggaggcgcgccggaacatggcaataccggttcggattcattcagcattctggaagagcaacccgccgccaaagctgatagccatgataattttgctgatagcaacggtggccttacttcggatgctggcgaatcagatatagccatacttccatcttccctggctgggagagaaccgactccacagttaaaagcacgctataacgggcataaagcctttaacgaccaaatccgcgcagactggatgctgattattgaatccagcccagacgcgtttcaggctctcttatatcgaccagatgttggcacatatggggtagtcagcgacgaaacaggagaagagtcattcactgaactggataacaaccaacgcgaactgacttaccaggaacctgaaatcgtttatgtgctggataaccctgacgggcgtgactctttccatgcgattgacgcagacggtgagcaggatggcttaaccgatgatgttctgattctgcgtattgcagcaaataacgtccccgtcggctcaattcttgaatggaatgaagagatggtaaacggcgtagcccgccgctggtggtacgtgcaccgtatttttagctacggcacacagcatgttggttcgctttactactgcatacctgccagaaattttgatacgactcaaaacggagtgatcgaatga

SEQ ID NO: 26781 - DNA, 303 bp, Escherichia coli
atgaccaaaaaaattaacataaaggatttcagggatgcgtggcttgatgatttttttgaattttcaacaccacatagaaagatacctcctgatattcatatgacattgtcacggaagttggacattatcaatgccgcaactacctgtaaggatttaagatcaccaccaggtaatcggtatgaggaactgtcagggaagctaaatggctattcatcagtaagggtgaataagcaatataggttaatttttaagtgggttaacggaaaggccgaggacttgtatctcgaccctcacaaatactaa

SEQ ID NO: 26782 - DNA, 339 bp, Escherichia coli
atgaaacaggcaaccagaaaaccgacgaccgtaggtgatatcctgctgtacgaatacctggagccgttagagctgaagatcaacgagttagcagaaatacttcatgttcatcgtaacaccgtaagtgctcttgttaataataatcgtaagctaacgatggatatggcatatcgcctggcaaaagcattcgatacttctgtagatttttggattaatctccagaccgcagtagacctgtgggaagtcgaaaatgacatgcgcgttcaggaagagttaagtcgtatcaatactgctgaaaaatttatttctcagcggaacctgaataaaaaagcagcctga

SEQ ID NO: 26783 - DNA, 228 bp, Escherichia coli
gtgggctttcctttggaattaatgaacattaaaactatccgtacagaacaagattatgaggccgcactgcgtgcggtagaaccgatgttcgataacgaaccggaaacgaacaccccggaaggtaatttcttggaggttatgtgtcttctcattgaggagtacgagaaaaaacattacccaattgagccgccatcacctattgaagccattaaatcccgtatggaatag

SEQ ID NO: 26784 - DNA, 741 bp, Escherichia coli
atgagcactgattcatcaatagaaaaggaaaatgaaaaatcatccgcccaaaatctgatagaagatgctgtaaaagataagttgtttaataaggtttttgcctacatttttatttcatttttaatttctaactggcgagatatatttatattgttgaagtcaaaagatgatgttatgtatacattatctatggtgtttgttggggaaaagattccattatttgggaatgtttttgtaccctcattcgtagctcattttgtcttgccttttatttatggtgttgtggcttcaatattagccccaatgttaactttactaatttctatggtgactggcacaatatacgctaaattgagagagatagataaaattgaagacaaaaaagaacaagtaagaaaaattaacagagacattaatgatcttactaagaaacggaaagacgttgaagagcgtcttgaaaaagaaaaagaagaacatgaatcattaaaaagaaaggtagaagaagttagggaacagattgaatgtgtggatagcgatatccgtcatgttattaaattatatagagagaaaggtgagagcttaaattcgttggatgatttttatgaattttttactgccgtgaaaaactcatcttttcgttcgggtgatacaaatgacagggagacacttgaggagattctctcaaagctttctgattcacttgaaaaaattaaatgcgatgctaataaaaaggtgggataa

SEQ ID NO: 26785 - DNA, 135 bp, Escherichia coli
atggatgttatcttcgaattattaatgctaattgatctgtttatgaacgcttcattgaccacgcaaatactggcgtcaatatttttgttactcttctacctggtattgagggagttaacaaagctactaatgtga

SEQ ID NO: 26786 - DNA, 654 bp, Escherichia coli
atggaaaagatcgcaatattcagcctgaccaccagcaagcctcaaatgctcactgcaatactgaaagacggtgctctcattattaacgaagtaaaaccccttcccgcgtcagcattggagcaaaagcaaaaaattcctccagctatagcagccctgcggaaaagcaaatttaaggtactggtagacgaaataacgccaacgatctccgctggcaccggagcaagccaggtgactctcaagacccgtcatgccgatggcagagcagcaatcatcgtcgggatggaaagatacagagagttaaaactccagaagctattatccctgccgcaaaataacaaaggtgctttcgaaatccctgactccatcgttgacaccgaatacaacggtaacggagaagaagtctaccgggtgaactggcaggatatcaggccggaacatattctgatggtcctgtgttgctacgcgaccgtataccacaacgttgccagtgcggattacgtagagcagatgatcggtacagtcgagaaagagcaaaaaacaggcatactcgcttcgttcctgtccattattgggcatgaaaaagttaaagcaggcacctcccagccaaagtcactggctgggaaagaagttgatgaagataccgtgatactttga

SEQ ID NO: 26787 - DNA, 609 bp, Escherichia coli
gtgaagttaagggttttagggaccgcgctcgcggctatgttgggatgcgtatctgttaatacagccaatgcaactgcgttacctgcacaattcagggcagggcagcaggttatgaataacgctggtggggatcattcacaagcggcaattatggacttttgcaagagagagggcattccattacggcctgttggaactcagtttattggtaaaactgacttttgcgtttttgcatatacagcatatctgacggacaaagctataacaaaaacaggttattcaaccaaagatactctttccagattaagtcagggatggcagcaattcgaagtgtatcgccagcaaggattaggtgagttattacaaccactttttatgcttgcgttggtgcccgaggggcagcaatttttggttaaaaagggaatgcttcgccaaagtgatattgccgggttcgatagcatgatggcttatgagcgcaaactaaccgagcagcgaaataaaaaaccatctgcttcatgtgtgcaaagtaaaacagcagaatacagtgcagtagccgggcctttagccaaacaaatggcagagcaatggtgtaaaaaatacgggcaataa

SEQ ID NO: 26788 - DNA, 579 bp, Escherichia coli
atgcagaaacagagctattgggagaaacagagacaaaaagccatgcaaaaattggctgacccagcctggcgagaggaacaaagggcaaagcgccttcaacaagctcaacgccagcagcagcgagcgagagaaaaagccgcatcgcctgaatatcggcaaaagaaaattgaaaaagcaaagcaatatgaacagcggagaaaagataaagctgtatccgctccgcccaaaaaaacacgcacgtcacgcggcctgaagggcagatcactcacagccgatgaacgccggatacagaccgctatcggtactctcccctgcattgcctgccatattcacgggcaacatagcccagtggtatccctgcaccatatcttcgggagaacggcagagaacgcacataaatatgtcctccctttgtgtaaatggcaccaccagtacgcagcgccagccgaggtccgagaacaatatccctggctggtccctgttcatgctgatggaaaaataggcggaaaagcagatttcatacggcacaatgccgatgaaatggcgttgtatcagatggcgattgaattaataaattag

SEQ ID NO: 26789 - DNA, 153 bp, Escherichia coli
atgcttatagctttaagtgcgatccaccagccatctgtgaatgagattggcctgttctatgtgttgtttttcggggcgttggcgctacttgaacttggtattgagcttttcgcagtgcttatgttttgcgtcacgattttggggaaattttga

SEQ ID NO: 26790 - DNA, 612 bp, Escherichia coli
atggtgaaacgtgttttgaaaatttacatcgcggggccgatgactggttatccagattacaaccgtgcggcgtttaatgcgaaagcgagcgagctgatggctgaagggcatatcgttctgaatccagcggtgttacctggtggcctttgccagagtgaatacatggatatttgcctggcaatggtgcgttctgctgatgcgatttatttgctcaatcgatgggaagaatcggttggtgctcgtgcagagcacgcgctggctgaaaagctggggctgactgtaatttatgagtcaccaaccaacattgaatgccaggttgctccgcatatttaccgggaactggtcaatgcactgcgtgatatcgctgctgtatatcacggcacagaacagcttcgtgagcgtttagcccataccatttcctattacctttctttatctcatgagcacaagctccgccagaaggtaatgatcaaatttatcatgaggttatcgaaatccctggcaaacgccgatccaaagaatccattaccgaaagaggcaatgaattacctgaagtcctgcaacgttgtttctgaagatggcgttcttttggttagaaggagttctgcgtga

SEQ ID NO: 26791 - DNA, 504 bp, Escherichia coli
atgaagtctgaaggtttaacgcccgcacaactggcagagcgtaacgctgagtatgtaacggaaatttcccgacttgagaaagcgtgtgctgcgctggcggcggagaatgcacttgctcgtaaagcagttcaggcattctgcgatgttgttggcgacaacaccgaggttatctgcgaggtggcagggagagatggcgttctggttattttggaggccatgaaggcaacaggaaatatgccagtcaccgatgctttcctggctgaaattcgtgcggaggctcgcaacgaggggattaactataccgcaagccgtcttgctgctgctttcaaccacggatttatcaataagtctttacgtgaagttttcgacgttacgcgcatgattctgtcagcgaaagaagagttggctaatgaaccgcacccgattgatggcctgtccggtgaatatgcggagaaatcccttgaagaatgggcggaacagattcgcaaaggagctgacaagtga

SEQ ID NO: 26792 - DNA, 411 bp, Escherichia coli
gtgaagaggatgatttttgtggcggcattgctgaccattacccaacaggcgcaggcttcagcagttattgtggcatctaccgccgcgaccacggctgctgtagctgctgcgaactctgcgaatatcgcaaaccaacagtcacagcgtgctgccaatgcatcagctagtgttcacccaatcgccattaagaccggcaagaaaaatataggtttcataacatgcggcaaacgttctgacgaggctgtaggttcacttggatgtacggtatatggggatagtgagagtagagaaattccatggaaaacgtggcccggatacgttctcggctcgaagcttcctgccagctatgaagtaaacgccgtatcgtttgatcactataacggtgtggcaactgtctattttgcatattga

SEQ ID NO: 26793 - DNA, 249 bp, Escherichia coli
gtgagcaattcagcacgactacagcttggtttttcaccgctatcaaaaacaatcgtgttggcaaaaatgcgtgacttaggggatggaacaaaacgtcgtgtcggcaatgatcgcggtcgcgatgtaaccaacgaggccgcacaactcgtttggcatctagtcatggctgaaggcggtgaaattaattgggagctggatgatggttctcgcatggtattaaaggcagaaaagcaggagccaccacagtga

SEQ ID NO: 26794 - DNA, 225 bp, Escherichia coli
atggcagcaaagcgaatgactaatcgcgaacttgttgatgccgcgattgaacttgctggcgatttttattccatgatggggtacacgcatcgcccaggcttcaaatattgggagtctccgcacccgcaagagcaacgggtatttcaaatggcctgtcgcgcttttgaagttattcgcggttctgatgtgatggacgcggttgctgatttggaggatgaagagtga

SEQ ID NO: 26795 - DNA, 588 bp, Escherichia coli
gtgagtgaaactaactatcaggagttgcgcgaggcagcggagcaggcaacgcaagatgaatgggtagcatatattttgccgggtcataacggcatttatcctgcgcgcacgtctgagggtaggcattgcggatactttattgactggcctggcgtctgtcaggggcgggagagcatcagcatcagaacctacgcagtgaattgcaatgacgcatggctaaacaccgaaggtgatgacatctccggctcatacgttaagtacaaagaccatcaggaagtggttgccgctcttgaggccaagtgcgcggcgctggcagtggagaatgcggcgcttaaacagtcggagaaggaatttaataacttctgtcgtcaggagtactacggttgggaggacaacttcacggaaaccccagctaccgacgctctcctggctgaagtacgtgcgcagggggtggatatggctcgtaacgcgatgattgattttgttgatggtgaagttgggccaaacaagaacgttccggggctgattagaggcgcagagatatgcgtaagtattgctgaacagcttcgcaaaggaggcaaccagtga

SEQ ID NO: 26796 - DNA, 1095 bp, Escherichia coli
atggcgactaagagcaatatttataaagatccgcgctggctgtcgctggtggagaaatataaagacaattgggtactggcagcaaaagaattgtttgatattgatttaagccaccagcaacaacaaattgttgaagctatacagcccaataatgcaaaagctactgtcaccactccgtatgggatcggacgaccgcaagtgcttgctgttattagtaccctttatacgattatgtatcctgattcccggacagtaattgtttatccaaaatcaaatgtttgcaaaagaggaattgttgcatatgtgtggcaatgttgggaggcattgctgaaaaaacaaccttttatcattgagtattttaaggtcggtgatagcggtctgatgttcaatgaattttggggaatgtgcttttgtaacttccgccttaactatgaagatagcattgcaggtcactacgccgaccatcttttattcattattgtggattccgcacatatcagcgatcgggcatacagcattgtgtgggcaagcatgactagtggtgattcacgcatattgctcacttcaattccgtcaccagaggaaataggctttttttatgattcacatcatggacgtgctttagctgaagataatccgagtggtgtatataaagccattaagctgagtgcggaggattcaccatttattacccaagaatatcttgatcattttgccgaaaggtatggcgggcgaaatagtgatgactatcgtcgtatgattcttggtgagttccctggtattagggaggctgttcttgaatcagatatgccgaagacaatgcgcttttcgatgcctgatggtagtgaatggacaataccattacgagtgatagcccggcatcatgcgcagcaccacgccaaaaaacatggcgtcacgacattagaatggttgaaatcgcacaccattccactcttcactgcagatcacaatgctatcgttgagtgggcaaaaacaattccgtgggagaatgtcgctgaatacgcccacatgctaaaaccgccgaaagacaggcaagaaattagctggctgacagcagaaaaaatcattgagtga

SEQ ID NO: 26797 - DNA, 768 bp, Escherichia coli
atggaaagcactaaaacaattcaataccgcttgcgtaatggcctgctggtggctgttaacgccgacatgtcactgccgtttgacacgattgaacgcactatcatgacgtatctcggctttaatgaagagctgaatgaagagcatggcgtagctatatggagtgatgcagacagcggcgttcgtcgttacatcaccgccaggggcaaagactactctctggaagaactgtttgcccttgcgcagtctttcgaatgtgtagcattagacctgtttaatgatcctgctatagcgcaacgacttatacgcgagcttgggctatccgttacaccaattatatttaaaaatggcagcctgactggcacatggcgcgtagaacgcatctcaaactaccttccatataaccgacagttaaatggagtaatctccggcgttaaccagcccgtagcgtgtgaaaatgtaaacctggttgtcgctgttttggcaaccgcatgtcgtgttatcggtttggctaaacaggcatttattcatttcccaaatggtgcagaaggtggcgcagagattatcgcgtgtgatttcgaatttacctggatgctacgcgaatatctggaccaaacagtattccgtgccgaagaactggatatgtatatcacgtcaacgattccagacgatgtgcgagctgaagcaatcgctacagccagggcgaaatgccgtgcggcgattgcagaacaggccaaagaagaagttaaggaagtggcagatggcgactaa

SEQ ID NO: 26798 - DNA, 441 bp, Escherichia coli
atgaataacatggcaacgaaagagctttttaagttccgtcccaaatacaaagctcacaaaaaaaatggaaccacggtcatcattacggatgacaacggcgtgatgattaatcttaccgggagcgtaactatttctgctggtggcatcaccacccagcaagaagaaatcgaccttgaagcagccgacttttcagacgcgctgatgtggctgaaggaaggcaagaaagttgctcgacgcgggtggaacggcgaaaaccaattctgctggctggttcctgaaggacagtacccggcacgaatggaagccattaagggatatttccccggcgacctcgttccgtatggtgcttatttcgccttaaaaaatgcacaaggtgtagttgttccgtgggtgccttcagttggcgacctgctggcctgtgactggtttgttgtggagtga

SEQ ID NO: 26799 - DNA, 477 bp, Escherichia coli
gtgaaaacttattacccatctctgaattgttacccgtcttcctatccagaattatccgggaagctgttagctctattagctaaagcacctacggaatggtttaagccagtcgttatcaatccacacttcctgggttacggatctgttcgcactcgtaacgaactcaaaaacctactggcgcatggattcattcgacaccgtgccgggaaaggctatcagttagcgattgcgccagaagaggccgtgcggctattcgcatatcgtgacagccagacaaaagctcgggtaatagctcaaatacttcataacggcagcacctatgcccgccagtttggcggcgacacgtcgcagttcttgcgggcggtgcgatcgctggaggagcaaggagttattgaaagttcctgtcttcctgttcctaccgttccacatatcaaacgtcgggtttacaccttcacgcagagagctaaaaaacaatga

SEQ ID NO: 26800 - DNA, 345 bp, Escherichia coli
ttgcagagtcaaatcacggaatcaagacgcttcaaggtggatggttacaccgtaaccttcgccgctggtgttaagaacagtcatgctgtcgttgtgttcggcatcatgaccgggcttgaggccgtccctgtgtttaccctcgaaaaaaactggcgaaatctggaggaagcagaaagctacgtccggaaagtaaccatcattgccgccgaaaaactcctggcccactatcaggaaaattatcgcactatggtcgagaagattaatctcgctttcactcgccccactaccggctttattgcaccggatactaatgccggtcgatatcctgcaagggggcgtcggtga

SEQ ID NO: 26801 - DNA, 1038 bp, Escherichia coli
atgagtaagaagtcgatcgagaaagagtacaaacggttcctgcaaaccgctgaacggtggaaagagctggtggtcgcaaactctgttttccatgataccagttatgctggcgaggaattccgccatgttgcattaacgcatgaccaaaacatattagaagaagctgaaaaatgtcttgctgaatggaaagccttcgttgacatgtgccgcgatgccgacggcaaagcgtcgaacattgttgagtctgtatattctccgatcccattcatcattgaggacaccaatcaaagcacgcatgtcgttgtgcaaagcgctacaacaacacgtacatttacacgtgaacaattgctaaaaaaatacgacaaaatcataaagaaaagcctgaaaaatagggttttttctcaaatcgtaggtgctcttgaagaagaacagcgcttctttgaagctgagcctgaaggcgagatctaccgggcgcgtaaagaggcatatacagatgttgtgctgacaacaaacatcgaaggcagcaatgccctttctcgctttagagttggcgcacatggcgcattggttttcgcaagactaccgaagacaacgatccccgttgtcaataatgttggtgaacgccggagcattacaatttattctggcgtcgaatcggtaccatgcagccttctcggcgattttaacttatatcgtgttcgtgacctggaaaaacaccagccaagctacgttgcgaagtcgtacatcttaaggaacatcgatattcgcaatgaaagccttaagcagaaatccgctaagatgctggaggatgccgatccggctattcgccatatcattgaacgtaagatacgtacatcacgtgaagcaatggcaaggttggataaaatggatctggaattgttagacgtaatgatggcctctggagacgacctgaccggcattaaactgaatgaagctcgtaaaaaatacggcaaagcaatcgaagaacgttacggatacacattcccccaaacgcagtacgccgcgaagctctggtaa

SEQ ID NO: 26802 - DNA, 1365 bp, Escherichia coli
atgagtctggttaattgggaggagcaccgcgcccgctttatagcgttgcgtgaagaaaaagggatcactgtaaaggaatactgtgaggagcatggccttagcttcaatacagccagaaagcatctcaatatgaaaaaaaatgaggtgcggtcgcaggtaaagacaacaaaaaaaagcaccaaatcacctgaaaaaaaacgggcgggaagagcaacaaaaaagctggaagagggtgcagaaaaaacaaaatttacagaaattgacaattcgcagggcgcaggttctttccgaagtatgccgagaaagaaaacttcggatcatgaaaataatgcaaataataacaatgagataaaagaatctgtcaggagatcattgcgcgaaaaaatggcgaaaatgatccccgaagaagataaaagcgccccaaaaattgagggatcttcagcaatgatccctggcggtgctgtgcagcgtgccacattgcccactacgaatgtggctcgcgatatgatgaagaacggcgcagaagaacacctgcggttagcaattcaaatggcgcaagagcgcgcacttcagtatcaaagcattgttgatcaggaggccgaacgtctacaggcggaaatagacgccttgggcgataaagagccagaaggaatgcaccctgggcagcgccttctcggtctaatcagtgacgctgcctactacatgaatgattttatcagtaggttggcagctatatatcagtccgaacaaaagctgcgacagggggatgaaaagcttcgtcagagcgctcgccagcaagcattcaaagaggctgaggccagagaaaaactcgaattagcacgcctacaggccgaacagcgtggcaaagagattgaatatcgcattggcgctgacgcacgcgcagccagagttatcgccgccgctatacgtatgcgtgagcgcgaggaactggatgatatcggtgttgctgaatacatcgagcgccagggggtcagcgtcccggctatcctcgcggcgcgcgcggcgaaagctatcactcttctcgaaccacctgtttctgacgtcaatgatgttgatgatgaacagctggacaaagaggcaagggagtttgcgacgcttcaggctaaccatccgcaatggctggcagagcgccgggcggatgtggcaaccattgttgaagaattggggtgcggagattacgaccgcaatggcgagcgtaaagctggagaattcgaggccaacgacgaagagctggatattgacccttcggcaacggctgaaatttacggtgattatgatgcatctgatgcagggtatgacgccggagatgaagatatcgcgatagaaccgccggaggatgattaa

SEQ ID NO: 26803 - DNA, 393 bp, Escherichia coli
atggagcatatcagcagcgcagaaattgcggatatcatgattagggctgactgctatctgacagtcaccgaaatcaccactctagctaaagaaaaatatcctcaccttcatgtttcacgcgtaagtgtaaccaacatcattcggcattttgtgcggtcaagccgagctatttgtgagcttgatgatcgtgtttacccacggaaatactggttgcatggcctgaacggatatcagttcaaggtgcgcgggcgcacgcctgaatacggtagcttactggttaaaaactgtagcaggaaatcagtcgaacaggcgcgaaaagagcaacgagagctggtggacatggcgaataagctgtggaatgccgccgttaaaaagcgtggtgttgctttatga

SEQ ID NO: 26804 - DNA, 393 bp, Escherichia coli
atgtacgagaccacaaaattaagcattcacgaagtatccaatgtggagtggaatatcgtcacctgtaagattgtatcgtgtaatgctgcgcgtactgatgcaggccataagagcacgataacaggctacatggtaatggcttataggggattgagagttcgctttatctggaaagctcggcaattgacaccattcagagagccgtcaatgccattagaggtagaacaggattatttaagcctgccggaaatagacggtgcaacgctggtggattctgatggtcgtaaggctgattttgaagtcagcttaaaggtggcgcaggccgtaattaataactcacgtggtaagtggatcgctaaggtaaaacacgtcgttcgcttatctcgctggtag

SEQ ID NO: 26805 - DNA, 300 bp, Escherichia coli
ttgagcaaaaaatattatgtgagtctggcgttcgctgacgatgcggggaggacgcggagtatcacgttgagcacaccggttaaggctgtgacagcgccgttaatccgtgaagctctcagagagctggaattgggtgaaaactcggcactgttgtcggttagttggttagggaaaatgtcagagaaacaatacgtggatggagttaccccaataacagtaatgaggctactttcattgctgcaatgggccatcgtacctgtatttatcgcgtatcttatttatcaggctgcaacacagtaa

SEQ ID NO: 26806 - DNA, 201 bp, Escherichia coli
ttgcgtttacttaacgtggcagaacttatccctgcaggaactaatgctatcgctcgtcgtcgctcatggcagcaggctctatgtattgagatctcgaaacgtatcaatggaagttttgaagctcgcaatattgttactggcgataaggttcacataaccccggaaagtgcaagcgctgatgattgggagtttgtacattga

SEQ ID NO: 26807 - DNA, 999 bp, Escherichia coli
atgcaatcactgaatactgttacggatcgcttctccctggtagagaaaatccgcaaacacacaccgcagaacaaccgaaattacgtcattcagtcggtacgagacacattcaactcgccagaaacaaaagagcgtatcgcgctgggtgagatgtatggttattacggtcatggtcgccgggcgatgcactataacaaaacgaaaagcctgaacttgccggaagtctctgttgtgatggtagatgggaagcctgttgtattggagaacgtgccgtcaaacaggactatcgacatttcgattgacgacaacggcattgttactcatacgcaggaaatactggatacagacaccgggcgtattgttcagggcatgattaattctggtgctggtggttggtcgtgggctacatctggtccagattcatcggtatccctggtaaagtctttccacggctttgattacgtaactgtgcctaactatatcagcctcgacaagaaaagcctgatgcttgaatcagcagaagagcgcgatgcggctattcatgcagcacttatcgaacaaggttttaccgataacgctgctacggatctggttcaccacttttcagcaatgaaaaatcagcaagccatgctcgaatctgcacatcgtgaagccctggaatcagaattgatgctccttgaagtggaaaacatacagcttcgagataagctgcgcgctcaaacagcgatgatggaaagccagggggaaaatgcaaagcaatgccgccggattttgcgtgaagctatccaggaaatgcctgtttttatcagcgcagaacagcgccgggcgctctgccgtatgcagtctgaagatgatgcccgcatagtggctgcgatgcttgaatctcttggggcaaatgctacttatggcttaccggtatcaggcaagaaagaaccagagttatcaccgaaggagaacaaaaacactaccccgttactcttcgtttccagaagggggtaa

SEQ ID NO: 26808 - DNA, 303 bp, Escherichia coli
atgaaaagctctttaattaattccaaattacaccaacttgctatcaaaaatcgagttcctgcatggtcggtttacatgcatatcagccgcgcatgtctgagcaatgaaaacatttacaatctgcaaattctaagccgggaaggcaggactttgtttagcgttgcagaggattcctataaggcctgggatatgctggatgacgcgttaagccaatacgcgcaaacagaagaatgccaaaaagaatgggccaggtactgtgatgaagggatgccatgctgcggtctattcggcgcagctctgtga

SEQ ID NO: 26809 - DNA, 294 bp, Escherichia coli
atgaagtatagcattgtgagtcccgctgggattagagggattgttgaatgctctgatgacggcacattgcgtatatttgaaggcgatatttcggaagaaaatattgcgcaagatttacgctttatcaacacaaattccgcaatggggatcgtgaataccattcatgccgatggggtgtttgttctgcggagcctggaaactgttggctgggaggttgagtggccagaggtggaaggagatcctgacgacgaagacgatactggcgaatcatatcaagacattgatgtgaattga

SEQ ID NO: 26810 - DNA, 375 bp, Escherichia coli
atgactatctctgttttagaccgtctgaaattgggtaaagagctatcagatttaatgcaggcgcagaaaaccgcgccagtattacaacgcgtcgcaattggtaagcagattgttgatctgatgcttaagctggggctgggtgctgccgctcaaccgatatcggaaccgcaaccgcacccacagtctgatcctgttgcagatgaagttcctaagatagtgactgacttcctgggcggtgtgttcacaaagtccacacaaatggaatttattgatgcgctgcgtgggatctcaaactatgttggcgagttccttacgttggaacaggctaaagagcagaccataagctgggtgaaagccaacggttatgcagggtaa

SEQ ID NO: 26811 - DNA, 1938 bp, Escherichia coli
atgattaacaatcctttacgaattaatattcagtctacttttgctgatacgatccccggctatatgccaagtcgctggtcttcagaagaattaagcgaagatgacctgatttttgaggcggcgaccttagaagatattgagcttgcctatatgggcaatgaaattctggttgtgtctgacgaagctatgtttgagtccataactacaaccagaattcggttagctcaaacaatgcgagctttcgtccgtgcgctgaatcgtggcctgaatggtacgaatattatggcagggactgatgaagctgggaccgatgaaaatggacgtaattgtattggaggtgcgattatcggtcgtgtacgtcgggtagctaatatccctgttttgaccgcgcagataccgcttactgacgggcagagtacaagcataattttccactctccaacagctgacggggcaaaaataaagagtaacgacgagcttgttgcatttcagtttttacttaataaacgtaacgtaactcacgttgtcgccccgattggtgggagagatgtttctttaagccaggtatgccaggcgctatctaatttgattgagcgtaacagcgaaaaatttaagaaagcaaaagagcgccaggacaaaatgaaggcagatattgagagttatctcaatgaagcagataaactggcagaagaacggtcaataatgattgatcaggtggaagttgcgcaacgtgggctgactgaaaagcgtgctgctcttacggagatgcaaaaaaaacttgatgcccagaaagccatcaacgaggaattacaagcaaaacgcgataaattgttgtctgctaaaggtgaaaaaacgaaagaacgagcgtttagtgaccagctgcgacatgtaaaacataatcttgccattgacggaaaaacagtgctggataatggcgctgaagttaattatgtcacgtccggcagtgataatttcgttacgatagtagcacctgaaggtaaattcagtattgatgccagtgctgtcaaaggaggcagtttggcagatgctgcaaccaaattacttaaagcctaccgagagcataacgcagataaatataaagttgatgtgttaccaggccagcaggaagaccccgaaccaccacagacagaccccgagacgaacccagtatcacaaccagagagccaggatgtaggtaaataccactatgcacttcaatctcgtccggctggtgttggtgctgttccggatggaaataaagccgtgcttgatcgtcctgaccaggctgatcagtattatgaatatgctcgtcacggtatcattacgtatgaccgtaaactgacagatgaagaagtcagccagtacgagttgctctatcttcctgatgaagatgagctgaaagattttgcaggccaattggttgtgtccagcatgtcgaaacatattgatggctatgtagacctgtttggcagtgacctgaaaacattcaaggcgcaagtgaaaattcttttccgcaaagcgtttccaaacgtggcttatccgcttggtgatggggagaaccttttcattatggacgtatataacgcccttcaaaatcattcaaacgaagcaacgccagagcctgaattagcacctgtagttgagccagaatcccacccacaaacagaaccagagcaacagccaacgccggaagacgctggagaagcggcaactgaagctgatcaggaagcagataaagcgttggagtaccttaaatccgtcccggtgcagtttacatcccgcgatctgacggtaatcagtgccgaacttgaccatgtgcaggaagctgcaaacgctcttatcagtgctggtcgatacgacgagaacgaatcaacggttggcgcagcagttgactacctgatcaacatcctggctgaaattcagcagggaggtgcttaa

SEQ ID NO: 26812 - DNA, 621 bp, Escherichia coli
atgtcaaataagaataattatgttcttcttaattatgatgagttaaacgaaaaggggctggcaaaactcgtcaaagaaatcagcaaaggtggttacaagatagcgagggtgatccctgcaagtaatggcaggaagaaagatgggatcatgacgcgcacgtttacccttattggtattgatgaacagacaatggaagttcaggttaacgataccggtgatatatctgggatcaaactgaatggtaaaacagtaccgttcaagccagtaaaaacaatgtcggctttggggcaatctcttgcggctttatttaatcgcggagcaacttctttccagaagtcattagctcgaaaacttgctcgtgcagcaaaaaatattgatgacggaaataagaagcggcagggagttaaatctaacgctcagaaattagctgaagcgaaagaatcacgtgatgcactccgtgaagatatcgctaatgctaacgacaaactgtctaaactccagagcaagtcagacaaagtaatacaagatacgggtaacgttaaagctgccttgtctcaggaagtagctaagacacgtgctcttaaagaagaaatcgcgcgcctggaggatgagcatgattaa

SEQ ID NO: 26813 - DNA, 447 bp, Escherichia coli
atggctgaaaatttaaaggcaagagatggtaaccgcctgtataaggcgcaattactttcctactattattcacgccgcgcagagtcggcgatcggcaaaggtgcgcgttttgttatctctaaggcgtattggtgcaaatctagtctggtaactgctaatggtgcaggaggctggaatatagcggacattccgctcgattttaaattgagtggcgctcaacagtttgctgtgtccgatctgatattgtccagcgtggatgggattatcacgatcaatgcagccttccctcaagaaagaatgccggataacacgccttacgactttaacacgcttgtgcttgttgatgctgaggaacaggcttttggtgtgctttgcacccagcaagataccctctataaaggtaaacgttacagtattctcatgacaatcgagcaagttgagggttga

SEQ ID NO: 26814 - DNA, 846 bp, Escherichia coli
atgaaagataattggcttaaggaacgattaactaaagtaaaacaggattcacatctctggagtgcatttatagacgctttacaggatgtctggaatgaggcagtagaaccaatattaacaagaataagtaacagaaaatccttcttcactatggacagtgaggatatggatgcccgcattgctgaatacgggcgttttttcgttatcactgaaaaagataatgcccgtaggccaatgcttctggcgcagcgtttagatgaagtgcactttaaaggtactatcttgcctattgagcagacattctggcgtgaattcggttgtattcctgttagttgggaaccgctgtatgcacctgtaaatatagaaaaacacccctatggttcatattttgcgaccgaaatagaaatacctacggcacaggctcaattcggtgagctcttcctgacatcaagggggctggtcgttgttgatcagaacaagctatatcgctcatatggagagcaggataaagaagccgctgtgcagaaattgttatctgacttcgaaacagtaatagcccctttgttgccattgcatattgtttttgatggcgtctcgtttcggcttagtgctgtattccctgaagtggcagaaatattaaattacctgtctacggatgtttcggtaattgaaggtgtttatgttactgagagtatggctgatatgctatcccgtagtgatacctcctgccaggcagacaatatttctcttaatgccataccgaaccgaacggcagaaaagcaattacatcttgatgtaaccccactcgatgcgtggcctttggattaccaccttcaatctgtttaa

SEQ ID NO: 26815 - DNA, 1431 bp, Escherichia coli
gtgacgattacagaattactggacaaatttaacgccaagttaaatgaaaatacatggtggtcacgatttgtaaatagtcagtttgtgcagatgcacgctatattcggatcgcagcttatttatattgcccgtacatttgcaagtcgcggcctcactgagggacttatttcaacggcaacgcgccgctcaagtattttagcggttgctgaagaccgtagctacgtagggcgatttgttagtgcttcatacggaacaacgtctataacaaataaaactgatcgggatattacgttaccagccggggctgaattgcttgccaatgaccaaacacctttggcaattattaacagtgttgtaattcctgctggaggaactgtttctggcgtagaaactaaacagcatgaagctgttagcattacgtttgatattgagaaggaaactttatttctgacattgttgctttccagagagttaacaaaagaagtctctagcctggatgtttatgttattacagatggagtagaagaaaaatggacatataacccattatttagaatgtccagagacaagagtaagcactattcattggcatataaacctacagaacaacttggagtcaagtttggtgatggttctatgggtatgatgcctccagcaggctgtcaggttcgaatcgatgttatggctagccttggcgactatactttggctgaaggacaaaagttagaaccggctggaaatatcgctcaatatgtggagtcactagagtttaaaactgattcgatcattaccggtggtagtggtatggaaactacagaagaaactcgaaatcgtgctcagtattatgttgcatacgatgaacaagtggtatggggcggtgattatcgccaattcattcagaatgttgttcatggaacttcatggttgaacgtttggggcgaagcgttacaagagaaaataactgggtttgacgttcgaaacatcaacaaaattttcttttgcggacataagccgggtgtaagccagtctcagctaaaatcagaaatactgaaagctctagagaatgttccaaatgagttgaacaagcggttcgagtatgtagatacaaatgaacagccatttactataaattttataggtattgcacgtaaaaatgttctgatagacgatgctcaaaatgctattaaagcagcgttggaagataattttggccgtgattcgtcatcattcagtttattactacagagtgatgatgattcccagcaatgttatgcacaggtaaaagttaaggatatttggcgagtaatagagtctctggatatgtttctgtcttacgacataacaatacaaaatatgaaagatgctgtttactttaatgacttcatttatcttaacgtaaaatcttcaacgttcagcatttcttacccgtaa

SEQ ID NO: 26816 - DNA, 375 bp, Escherichia coli
atgctttacgaaatagacgcaagacttcaaacgaatgagagcggtgtcattattgcagaaggaagtaccgcagcatggatggcccgacttgacgagtggctacgaacccctgaagggagtgtttatggtttaccctcttgggggagtccaatggaagaatttaagcatgaaccattcggctctgaaacttcgcacatagttgaagtggctattgaagggagaatgatgaaaaaactacgacaagacttgccaggtttggatgtgcaagggattcgttgcacatcaatttctgaagattctttattaattagtttttatgcgaaaggtgggagcatggatattgttatgcagaaatcaagtggggtgggcgcgtga

SEQ ID NO: 26817 - DNA, 3963 bp, Escherichia coli
ttgaaagagaataaagaccgtatcgcaataattgacgctattcagggggcgagcacaaacgaacttaacgctcttgctgagatcaaagacgccattctctctggtagagggtctataactcaacttggtgaaaatcaaggtaaagtaagtcaaagactatcccgtagactcatagcaagcgaaccctatgtctctgatgatgccaagaatacccaagctaacccatatataaaacgccttccgatgaaaaaagggaggacgcaggtcaacaacggagaagaacgtctcattgttgcaaccaacacatcagagcgcgttcattttgcgtcatcacgccagtcagcccaaaagttgaaaggttctgtgccattagccgctaattctgctcctcttgaaccacaatccccccaaagccaaaaaggaccgcttcgggatagtaacggacgctttgtatcccagaaaaacaacgaagatatagccagaaaaaaagaatggcagaaagcacataaggccgacgccaaactacaagaaggcttcctccggaaattaggctccattataggggtagatggcaatcagtcttccagtgaagagtctttaacagatgccgcaggtgttggcgctggtggtccgttgtggatggctgctcgcggcatgtacgacattactaaagagatcacaggtaaagcagaatctcttaaagaatgggtagaaaaggggaaaggtgaggcttcaccttcgaaagcgacatctccagctatcacttatccggcggtggttaatactcaaaaagcaacctctgcaacagcatttaataatgctgttgagacaaaatcagcacaagcagtagaagagcaaacaaaaattcttcagaccaatgacaacaaaataattgatggtctggaaaatgtctccgacgaagtagttaagctacgcaaatcagtatcttctgggaataagttcggcttaagtgatctctggagaaatcgagcaagcagaagaaataaaatcaatattggcgatcaggctggtaaaaataaacggaacaaaccgaaaaggaaaggtcgcaatctggggaaaaaagcccttactgttggtgaaaaagccgctgccggaaccgctgctgctggagctggtgccggagctgcaaagactgttaaaacaaaggttagtaaagccaaagacatcagcaccacaagcgacgcatctaagggtattgctaaagaaacaaaaaacacagcaaaggcagttaagccagcaggtgttgttgccgaagaggccacagttaaaacaggtgaaactgttgcaaagaaaaaaaccgaatccgtagccctcaaaagtgctgcaaaaataggtgttaaatcagctgcttctacagctgcaagagctatccctatcatcggttcgctggctatggcgggatatgacgctatagatggttacactgatacagatgcgcaaaaggcagcctttggattaagtgacgatgatgctgtagccgaacagcaaaaaacggcttacgcaacagctaatgtgctcgatatggggggcttggtgtcgggcgcaacgaacttgatagggaaaggaatttctgcgctaggatttgaaagagcaggtgaaaaacttcagaattttgataccggagatattgctcgtggtgttaacggcgcggtagatatcaccaaatctgtttttggtagccttaaggatacatttttatccactgacgaaaacacgaaacaagtaaaaaaagctgttgaagacggcaccaaaaaaactgtcgatgcgattcattctctaggtgaacaattacaaggtgggcgtaatggcgaggatggagttggtgagcacgggtatacttctccaactgaatttagttcacctgccaacaacaccattgcagcggatctgaatattggcggcagcaacgctaaaaaccgcaattaccgaaataataatctcggcaatcttgtttttgccaaccaggaaggggcgacgctggaatcgccaaatgcaaaaggtgaacaacgttttgcgcgatttaacacacctgaagaagggatcagggcactggcaaaccaggtttccagctattacaacggcaccagtgccgcagcgggatatcagaagttacagacggtatccagcatcatttcaaaatgggcaccgccaaatgagaacaatactaaccaatatattgataacgtcagtaaatatcttggtgtatcgcctaatgaaaaaatagatgtcagcaaaccagaggttatgacgcaattagttcgtgcaattgcgacgaaagaaggcggaaatccggcagttaataatgagttcattaagaacgcacttggagcatttaacacaaacactggtctatgggagggacaattctctgacgaaacattggcgcggattaataaaattcagaaagaaaatggtggtcagctaattgcccgcgattcgcaatatagtgttggtcgcaaggtaaaatatgctaatggaaaatctccagctcaaccagttttgaatgccgttccgacagcaacacaacagccaattgaggttgcacaacatgcccaggcagtcaaaaagccacaaaaaacaggtaaccaaccacaaccgattaatccagagaacactgatgttaataccggctctccatcgagtttgcttgagcggttaatcgcaataaatgaaagcggaatcagtggtgcaagtaatttatttggcggcgcggctaccagccttgctggaacaagtctggacctggtaaaggattttgcgttggctacttcgtttggttctatatcttcgctttccgaaaaagcgaaaggaatggatcaggctcttactgaaaagatatccggcttaaccggtaaatcttttggatttaaaaaagcttctcaagcggctgatatcgcaacagccatacaacaaaaacgcactgttaatcacgatacagaaatcattgatctacttccgggagatcaagtatccccttctactccgaaaactccacagcaggagcaggctctagcaatcagccaggctatggcgggcttttcatctgcagcgccagcaccgaaaactccacagcaggagcaggctctagcaatcagccaggctatggagggcttttcatctgcagcgccagcaccgaaaaccccacagcaggagcaggctctagcaatcagccaggctatggcgggcttttcgtctgcagcgcctgcaccgaaaaccccacagcaggagcaggctctaacaatcagccaggctatggcgggagctgcgccagtagttacctctggaaaacgaactatcacggcaccaagtgatgtgcagatttatgacaacggctacaaggtggttacaggtgaggataagagcttctttggttcgctatttgattccacggtgtcagggcttaaacagacaggaaccgcagtaattcctgccgttggcgataacctttcacgacttgttggggggattgatagtacagggatattgaacgatcttgtaatgcagtctactgggcagaatagtgcgattgcgcgagctattagcccattaacaagaaatgttggagactggctgaatggggggattcaacaaaccgctaatagcattaggggaatagcaactggtgccaataacgccatatttggctctgcttcagctgtgcaagaaccttttcttgctatgccgccacaactccctactgtaaccgatctcgcacgaagcggaataagacaaccattaactactgacactataaataacgatcctgctatgttgaaggcgctggataacatctgctctatcctgaacgatctgctgaatgtgaacaagaacaatacaaaaggcgatccggataatgttgtcaaaacatcgcagccgcagccgcgaccacgtgcgagcacaactattaatgaccagtcgctggatgctctgcttgaggattaa

SEQ ID NO: 26818 - DNA, 708 bp, Escherichia coli
gtgagtattttcagcagcgttggcagaacgttgaccaccgcactgtcatttaacacaaaatcattcaccagcaacctcattagcgacattctggataaagcaatatccggcggcggggtaagtgggaactacagcagcgatattgcctacgggaaaaatattgttgctgccgctatgcgtattcgttacgcccagggatggcagtggacggttgaagtggacggtctgaacggtttcgatatgttcgtgaaggatatcacctacagcagcggaaatatcgagacagaaaacaaggtgataggtagcgtagagttcagcaagccaacctacgtcaccgccggaccagtcacgatgaccgtaagggataccgaagacggcaagatcatgaactggttcaaagagcgtcgttcccgcgtgacaaacccggacggaacaataaaccttcctcctgaatatctaatgaagatccggctctaccgggtaactcaggatggcggtaaagaactggaagaggaaatgcgcgtattccccactcaacttggggaaatcacccgctcacgagaccaggtgtcagagttcttgtcatatccaatcactttccagaaatacacatccgcaggctcaggtgtttctgctttggtcaacggtgccgctggcatggctacaagcgcgttaaagggggctgtgagtggagtgatcaaattctga

SEQ ID NO: 26819 - DNA, 492 bp, Escherichia coli
atgtccggttttgcaaatacaaaagccgatatcgccttcctgaaatcccggtttaataaaaacctggcagcaggcgaaaaacttattggttcagaattctggatgactattaaaggttacgaaaacctgtctgtacttgttcgtaccactcagttaccggaaatgacacgcgaagacgtggaggattatgcccccggcggcatgaagttcaaccaacacgggccattgcgcaactctggtgagttccaggtcacctgctctgagacaatcgaaggggatgtactcgcagccgttaaacaaatggtttatggcaaagagtatcttgatatcaccttccaggcagcggctgaatccaacagcggcaaccacaaaggtctgattcgtacctactctcactgcaaagtgtattccgacgccgtggacttctcttccgaagacgtaacggcagtcgtgaaaccttccctgcgtattgtttacaactgggtagagtga

SEQ ID NO: 26820 - DNA, 549 bp, Escherichia coli
atgaaggtttatatcctctcttcagaggatatggtcgtcggttatatcggtgaaggatctaccgcagaactatcatcaatgtggcaatcaccatttgaaaaccagtcagtaggaggtttgcttggtggtattagcgctgcggctggctctcttgcagatacgcttcagaccgcaaccggcgtaacaacaaaaaccctcttcaactcaatgcttgtttgggaaggtcagcaaccgcctgaatttaatctggtaattgatttcatggcgacaacgaacgcgcaacttgaagtgaacgcagccattacagcattgctgaagatggaatcgccggaactgaacaatgtagcgccattcggtcgtcgcccggagacagtaacgttaaacataggtaggaacatagcccttaccgacgttgttatcaaaagcgtgagttaccaactggacgccccgcgcacaccagaaggctatttcactcataacacggtaaccctgcaatgcagcggtaatacatcgatcaaccgtagcaatatctcatctgtttttgtgtag

SEQ ID NO: 26821 - DNA, 735 bp, Escherichia coli
atgaaaaattatactgctgatccgtttatgcgtgcgattttcggttctggctgctttgaaagcggtgataaatccactcaggacaataatgataacgccatgctggaaagtgcaggacagaaaggaaaggacactcaaccaaagcccaaagacgacattgaaaccgcgatgatggaagcggttgaatcccgtgcacaaggtgatatgcgcagcctggcagcgtccatgcttgctggttgggttgaagatggtgatccggaggctgactcatttgatgcattagcaatcactatggctggcctggctgatatcgatgaaggcaccgatttcaccgatgaacaaatcgatgcttataacgatgctctcgcagctcttgctgatgcagctgttgcgcttggcgctgatcaggacgatgtaaccgaaatgatcgacgatgaagatgactcagctgccgaacgtgtttttgacgctctttccgaaagcgacaccgacatgatggaaacagctattgccatttacaccgttgctggtggtgatagcgcaatgctggaagcggtacgtaaaaaagtggttcgtgatggcaaggttaccatcatccgtaaacgcccgcgtcctcgccgcatgacgtcattgcaaaaacaggcgctgaaaaaagcacgccgcaaagcacatacatccgtagcgaatatcaaccgcaaaaaatcaatgcgcattcgcaaaaaacgcggtttgtaa

SEQ ID NO: 26822 - DNA, 1659 bp, Escherichia coli
atgaataagattagtttttcggtagggcaggcagctggcgttgctgtaatgtcagtaaatgctgacgctaccctcaccaataccagcggtggcgcatccgtctttgctgggcttgtaatatcgcgtcgtggcgcaccgggtaaggtactgaaagttgacgatacgacttatcaaagcgtattaggttcaccgattcaccctcgcctgggcgcggcatttgaaccatatcgccacgtggagcgtgcagtaaaaggcggctctggatatgtcgttcgagtttgcgctaaagacatgaaggtgccgggtatttctgtttccgttgtgggcaaagcaaaagcggcaaaggcgagcaaagaactttccgttgaacctactgaaaccacagcaaatccaggtgacacattaagcgttggtgttgctccaactgcaacgactcaatcagtgaccttcacacccaaagagacgccccagattaaaggtggagagaaggcattattcttcatcaaagatggtgatgcatctcaaaatcgcacgttatcactaactcgcgatgatgaagaaagcgaactctttacgctgacgctgaaagaaaaaaaaaccgatgggtccattgaggtgctggaaagccaccaagtgtctttcaatccagaaggcaccaacgacatgggccaaccagcatggattccgacactgcttgaaagccagtccactcgcattggtgccgtactggcagataatgcagaagcatccgctgctcaactcatttttgaggatgtggcttttgaaggtggtactgatggaaatctgtccgaaattgccgctgcagactatctggaagcattaaaggttctcgaagcttcagaggttaattacaccgcattgctgtcattgggttgttatgacgcatccgccttagccgcaatcaaaaagctggctgaagatgttcgcgtagacatgttctatgacctgaagggcaaccagacacctgaaaacgctatttcagaagcgaaaagccatagttttggcggctcacatcaaccaagccgttactacttcccgctctcctgccgagatactttcactggaatgaatgtcgtctatggcattagctgcgacgcattcgtagcgaaggcaaaaggagtggcgctggtaccggatgttggtggttggcattacgcaccggcaggtatatcacgcgcgattattgatcgacagaacattgcccgaattccaaatatcggtgcagttgatcgtgaagcgttcgttcttgcgcgcattaatccagtttcagttgctgctgacgggtccgtttacattgacgactctttaacaacttacagcaaaaacaactatctgcgattccagcatgtgtcttccttgatgaacgccatcgccagagatttctatgaagtagctcaggcgattaagcacgaaccggatggcattaccaaagaagcgctaatgaaagcaatgactgaattgcttgaccgttacgttgcagccggtgcgctggttactccacgtgacaagtcccagggtgaagatccatatgttgttcaggttgtccaaaaggacatcgatctgtgggaagtggcctggtctgtttgtccgaccggtacagctcgccgaatcgtcggtaagccaattctgatgcgctga

SEQ ID NO: 26823 - DNA, 279 bp, Escherichia coli
atggcaaacattcaagtaactatcacgccacctgacgcaacagacaaatctttcactgttgagtcagatcaccctgatattgtccaggttgatggcactacatgtaccgctcttaaggccgggcaggcagtgctgacaatcaaaacaaatgacggcaataaaaccgcacagtgcacagtcactgttagggaggcacataaaagcgtaagcaccgtcagtgttgaaccaactacgaaagaagtaactgtaggcgataacttcacggtaagcgaatcctga

SEQ ID NO: 26824 - DNA, 1698 bp, Escherichia coli
gtgaataaaaacattcagccagctcgtgatcgcgagcgcgagattatgaatcgggcggcaagcgtcatggctatgaccgtcgatccgaccaccgatgcagcaggcaacatgattgctgaccaggcagtaatgatggaaaacctggataaagcaatccagaaagtgcctatgtttgaaggcgtaaatccagaggtcgctcgtcagatcactggtgggtgggctatgtctctgcatgagtataaacgtcaacatggtcattacccggcaagtgacatcctggcgaacgcacacatggctcttgaacgcctgatgactgaatgtgccagtgatacccatgaaggcacgggtaaggcaatgtttgagtctgtcgcgcaatcaatgcgtagctctgacggcgtaatgaaagttgctcaatatgctgctctaattctgcctgcttctctgggcgctgctaccagtgatgcctgtacttttgttccttgtgatcgtgacgagtcaaatatttatgaactggtcaacgtagcaggcacaaaattcggcaccttcaaccaaggtgacgaactgaatatgcagtcagctggtgtttattctcaaatgaagcgcctgtatgccctttccactaaaggggatggcagcaccaaaaccttccagttcaacatccaaaaatttgagggacaatcctgcccgcttcgcgctggttataacaaactgctgatcaaccgcaaaccgtccaaagttgacgacggcgatggcaacctttatttcaatgctaaagacagcaaaggtaatactttctcagcgactgccaaagttgcctatgacactggtgtcattgacattacatttacccaggctccgccagtaggtactgaaattgctgttcaggtcgaaattaacatcgagcgcaatccaagcctgattccggtgatcaaccaggctatgcgtaagtacgaagttcgtccgtcccagtacgtacttgcttccgaacacacggtaatgtccgcatccgatttaagccgtgagcacggccttgaattagcggcacttcagttctccgcgatgcgtaactggatctcccatgaaaccgacatcatgcgtctgcgcaccctggtattccataccgtttatggtcgtgaatttgatgtggctctgccggaagctcaaaactatgagtcctgggtcggcctcctgcgtcacgcagtaaacgctctgtctcaagaaatggcaaatcgtaccctgacaacgggtattcgtggcggctttgctggtagtgacgccgcgaacttcctgcgctctctgcctccacagcacttccagatcgcaccaggttacgttcagtcgccgtatgtacagtacatcggcaccctgtttggcacgattcgtatttacgaagtgccgcaacctgtctgtgagcaattcctggcacagggatatgacttcgggctggatgacatcttcttctatgggcgtggcgaaggcatcggtaaagccggtctgattgctggtgatgcagtcccagcaatcccttacgttcacgaaaccaatccgtctctcgttaaccgtaccactctctggggcagtgccatcaacgaagtacatcctcgcaacggtgaaaactacttcacccgcctgcgtctgactcgtgccaaagaaggtgctatcgacatgctgacaggcaaggttaacgaaaaaaagtga

SEQ ID NO: 26825 - DNA, 393 bp, Escherichia coli
atggcgtatcgaatctttgtttcgtataaaaatggcgctaagagccactctctgaacacaacaagtcgctttcttgttgaggcgcagttggcatcaattcttgccgaaagtgagatactctcgctcgctgaacggatcgttatccagttttctggtagagatatactcaatgtccccgctctcaccccggcctccgaagttatggaatcaattaaatggcctgtatgcggatgtcctgccagggttgaagaaccggtaactgcaacgctctacatgccgaaagctgtaagagattggcttgctatggttggcaatgggaaagtcagtgctggacttcgcaagttaattgaaatggcagatattcctgagttaaaaaatgcatggcgacaatga

SEQ ID NO: 26826 - DNA, 453 bp, Escherichia coli
ttgaaaaagataattttgattgtaattgcgcttttagccatttctggaatttaccgaacaacgacggcagttatcgaacacatcaggtatgtccgatcgcttgaagactcaaaatcacaactggaaagcacgaacaacacgctttctaccgcattacagttaagtgagaacgctcgctcagccatgctgaccgaaaacgaaagaattaaagcactggaaaaggagtaccagcgcaaaacagcagaactgaatgccaacctaatcaaacaacgggaggaaagccagaatgaaatcactcgccttgaaaatgcgttacgccgtgctgggattaacgatgtgcgtgtgcctgatgacgttatcaggatgcagcgggaacgggcaaaagccatcaaccagcgtgccagtgaaaattaccgtagaagccaccagcaggccgcaggcaaatctgattga

SEQ ID NO: 26827 - DNA, 804 bp, Escherichia coli
atgcttgattcaataggtgaagttaaagccttcaaaattctgtcagatgccggtatctctacaccagaatctataaccataagccgggcagcgtctgtaaaagcctcatcactcgccagcgccatacagggaatagttcacgccgataaaacctatcctgattctgtttcggcctggactactcaattgcttggcttttctgaacagctcaatgaggccagcaaagcgtcttcattactggctgattctctttccccatacaccaagccatcagagctgttacagatgaagattggctgggaatgctacgcaaaaggtaacgagctgacccccatacctgctttcgcccttgttgagggaatggggaatgtttccattccgcaatctctaacggacgcattgacggcgctaaaacttgatgctctgaaaaccgccatgaacgccattaacgcaaaaatagaagctgctggaagcgctggtggtaatagcaatggtggacagggtggtgctgggggcgctcaggctccagtcattactcaggatgaaattgatgctttacgggaagcagtgacagccgccgaagttttactctccgaaattaactcagcaagtgagagtgtcgtagcccttacaggtcgcattaaaacgtcaaccactcaggcaaccaaaggtttagagaacgctgtcgccatcacgttaactagttctctactggatgatgcagtaatgagtccggcaatcagtttaatcatgccacaaggcgttatcgatgcgctccaaaagaacaccaaaaaggaaccatag

SEQ ID NO: 26828 - DNA, 285 bp, Escherichia coli
atgagcgcaatagccaccagcgacaccctttgttctggtcacggaggatttccgccgcgactggtagctgaaactgttccctggttcaccgttaacggtaagccaattgttgtagatggtgccatgtttcccagtcacactgacggtaacagtgcacatccaggggcagctgtatcgacgcgagtatggttttcgataggtggaaagggagttgtctgtgtaggcgatccgctttcttgtggttctgttatcgccaacggcgaggatatttttcaggttgcataa

SEQ ID NO: 26829 - DNA, 339 bp, Escherichia coli
atgtctcaggaacgtaagaaagtgatgatttatcttcgcccagaggcttatgccaatgaaaaggcggcgagcgagaagataaaaaaacatagcgatatggcaagaaccgcattgttggcagggcttgcgctgggagaagtcgatagcaggcttccaggattactggcttccctgctgaccgaagataataatccggagctgatccgaaaaatgctggcatccttcctggaactaccagctgcggttgaggagcgccctgcctccattgagccagtgaaggagcaagttgttgccaaaagcgcgtcggcgcgcaatctggctgactctctacctgattga

SEQ ID NO: 26830 - DNA, 282 bp, Escherichia coli; identical to SEQ ID NO: 14756

SEQ ID NO: 26831 - DNA, 1473 bp, Escherichia coli
  misc_feature (713)..(736): n is a, c, g, or t
  misc_feature (1444)..(1453): n is a, c, g, or t
atgaaaataaaattacgtattactattatattaatttcagccttatgcatttttaatggattattgactcctggtgcatatgccgcaacagcgaatggatacgtagcaaataaagaaaatctacgtagtttttttgaaacggtttcatcatatgcgggtaagcctacaatagtaagtaagcttgccatgaagaaacagatcagcggaaattttgatttaaccgaaccctatgccttgattgaacgcctgtcggcgcagatgggacttatttggtacgatgatggcaaagctatttatatctatgactcatcagagatgcgtaatgctctgattaatctgagaaaggtatcgactaatgagtttaataatttcttaaaaaaatcgggtctgtataactctcgttatgaaattaaagggggcggcaatggtactttctatgtatcggggccaccggtttatgttgacctggtcgttaatgctgcaaaattaatggagcaaaacagtgatggcatcgagatcggacgcaataaagtagggattattcacctggtcaacacattcgttaatgatcggacttatgaattacgtggcgaaaagatagttattcctggcatggcaaaagtactatcgacgttgttaaataataacattaagcaaagcactggggttaacgtactttctgaaatttcaagtcgtcaacaactaaaaaacgnnnnnnnnnnnnnnnnnnnnnnnnataccaacagtttacttgttaaaggaacagtatctcaggttgattttatcgagaagttagtagctacactcgatattccaaagcgacacattgaattatctttatggataatagatattgataagactgatctagaacagttaggagctgactggtcgggcacgataaaaattggatccagcctaagtgcatcatttaataattcaggttcaattagtaccctggatgggacacagtttattgcaacaatacaggcacttgcgcaaaaaagaagagccgccgttgttgctcgtcctgtcgttttaacacaggagaatattcctgctatatttgataataaccgtactttctatactaaattagtcggcgagcgtactgcggagttggatgaagtaacctatggtacgatgattagcgtgctaccacgatttgcttcgcgaaatcaaattgaattactcttgaatattgaagatggcaatgaaatcaattctgacaagaccaatgttgatgatctgcctcaggttggtagaacgcttataagtactattgcgcgcgtgcctcaagggaaaagtcttttgattggtggatatacacgagatacgaatacctatgaaagtcgcaagatcccaatattaggcagtattccatttattggtaaattatttggatatgaaggaacaaatgcgaataacatcgttcgtgtctttnnnnnnnnnngagccaagagagatcgatga

SEQ ID NO: 26832 - DNA, 135 bp, Escherichia coli; identical to SEQ ID NO: 16026

SEQ ID NO: 26833 - DNA, 447 bp, Escherichia coli
gtggtgaatatcatcgtgtttgatccgaaaggctgggcgctgttccgttccttcaaagccgtcagggagaagctggatacccgtcgcggctctcattccgagctggagacagcggtaaaagatctgggcgaagcggtgtcctataaggggatgtatggcgatacggcgatcgtcgtgtattccggacagtacgtggaaaacgacgtcaaaaagaacttcctgccggacaacacgatggtgctggggaacactcaggcacgcggtctgcgcacctatggctgcattcaggatgcggacgcacagcgcgaaggtattaacgcctctgcccgctacccgaaaaactgggtgaccaccggcgatccggcgcgtgagttcaccatgattcagtcagcaccgctgatgctgctggctgaccctgatgcgttcgtgtccgtacaactggcgtaa

SEQ ID NO: 26834 - DNA, 396 bp, Escherichia coli
atgacgaaagatgaactgattgcccgtcttcaggtgctgggtgagcaactgaaccgtgatgtcagcctgacggggacgaaagaagaactggcactccgtgtggcagagctggaagaggagcttgatgacacggatgacgctgctggtcaggacacatctgtcagcccggaaaatgcgctgaccggacatgaaaatgaggtggtatcagcgcagccggataccgtgactgatacggctgatctggtcacggttgtggcactggtgacgctgcatactgatgcacttcacgccacgcgggatgaggctgtggcatttgtgctgccgggaacggcgttccgtgtctctgccggtgtggcagctgaaatgacagagcgcggcctggccagaatgcaataa

SEQ ID NO: 26835 - DNA, 843 bp, Escherichia coli
atggttcggcatggtgaccatttcgccttcgccctgatagttttcgatgaccagtttcaccggatcgataaccgccattgcgcgcggcgcattttcgttgagatcttcacggatgcaggattccagcgacgccatctcaatggtgttgtcctgcttggtcacgccgatgcgtttgcagaactcacgaatagaagccgcagtgtaaccacgacgacgcagaccggaaatggtcggcatacgcgggtcatcccagccttcaacgtgcttgtcggtcaccagcaggttcagcttacgcttggacatcacagtgtattccagattcaggcgcgagaattcgtactggcgcgggtgaacaggaatggtgatgttgtccagcacccagtcgtacaggcgacggttgtcctggaactcaagcgtacacagagagtgcgtaataccttccagcgcatcgctgatgcagtgggtgaagtcgtacatcgggtagatgcaccacttgttgccagtctggtggtgttcagcaaacttaatgcggtacagcaccggatcgcgcatcacgataaacggcgacgccatgtcgattttcgcacgcaggcaggctttaccttcttcaaaaccaccggcacgcattttttcgaacagcgccaggttctcttcaacgctgcgatcgcggtacgggctgtttttacccggctgcgtcagggtgccgcggtattcgcggatctgttccggcgtcagttcgtcaacatacgccaggcctttgttgatcagttcaacagcataggcgtggagctgatcaaaataatcggaggagtaacggacgttaccagaccagtgaaaacctaa

SEQ ID NO: 26836 - DNA, 426 bp, Escherichia coli; identical to SEQ ID NO: 15476

SEQ ID NO: 26837 - DNA, 2196 bp, Escherichia coli
atgactctggccaacgccccgttcaatgaggcccttaccatccccctgactgacaacgcgcagctggatctcagcttgcgccaactgctgctgcagctggtggtcaagcgcgaagcgctgggcactgtactacgctcacgtagcgaagacatcgggcagtccagtgttaacaccctcagcagtaatctgagctataacttcggcatctataacaaccagttgcgtaacggcgggagcaacacatccagctatctgtcgctgaataacgttactgcactgcgcgaacatcatgtggtgctcgacggctcgctgtacgggatcggtagcggtcaacaggacagtgaattatataaagcgatgtatgaacgcgattttgccggtcaccgatttgccggtggaatgctcgacacctggaacttgcagtccttagggccgatgaccgccatttcagcagggaagatttacggcctttcctggggaaaccaggccagctccaccatcttcgacagcagccagtcagccacgccagtgatcgcctttttaccggcggcgggcgaagtacatctcacccgtgatgggcggttactaagcgttcagaacttcaccatgggcaatcatgaagtggatacccggggtctaccgtacggtatttacgatgtggaagttgaggtcatcgttaacggtcgcgtgattagcaaacgcactcaacgggtcaataagctgtttagccgggggcgcggcgtcggtgcaccactggcgtggcagatatggggcggtagctttcatatggatcgctggtcggaaaacgggaaaaagacgcgaccagctaaagagagttggctggcaggtgcctcgacctccggctcactgagtacgcttagctgggcggcaacgggatatggatacgataatcaggcggtgggtgaaacccgtctgacgctgccgcttgggggggcgatcaacgttaacctgcaaaacatgctggccagtgacagctcatggagcaacatcgccagcatcagcgccactctacctggaggattcagttcgctgtgggttaaccaggaaaaaacccgcattggcaatcaattgcgacgtagcgatgccgacaaccgtgcaatcggcggcacactcaacctgaactcactgtggtcgaagctgggcacattcagcatcagctacaatgatgaccgccgttacaacagccattattacacggcagattactatcaaagtgtctacagcggtacctttggttcgcttggcctgcgggccggtattcagcgctataacaacggcgacagcagcgccaatacagggaaatatatcgctctcgatctctcgctaccactgggcaactggtttagcgcagggatgccccatcaaaacggctacaccatggcaaacctgtcagcacgcaaacagtttgatgaaggaaccattcgcactgttggtgccaatctgtcacgagccatctccggcgataccggtgatgacaaaaccctcagcggtggggcgtatgcacagttcgacgctcgttacgccagcggaacgctgaacgtcaatagcgcggcggacggctacgtcaataccaacttgaccgccaatggcagcgtcggctggcagggtaaaaacattgctgccagcgggcggactgatggcaacgctggggtgatattcaacaccgggctggaggacgacggtcagatcagcgccaaaatcaacgggcggattttcccgcttaacggcaagcgtaactatctcccgctctctccctatggaagatatgaggtggagttacagaacagcaaaaactcactcgacagttacgatatcgtcagcggtcgcaaaagtcatctgactctctatccaggcaatgtcgctgtcattgagccagaggtgaagcagatggttaccgtctccggtcgtatccgtgcggaagacggcacactgctggctaacgcacggattaacaaccatatcggccgaacccgaaccaatgaaaacggcgagtttgtcatggacgtggataagaaataccccactatcgattttcgctacagtggcaataaaacctgcgaagtggcactggaactcaatcaggcgcgcggtgcagtctgggtcggtgatgtggtctgcagcggcctctcatcgtgggcggcggtgacgcagacaggagaagagaatgagagttaa

SEQ ID NO: 26838 - DNA, 336 bp, Escherichia coli
atgcgaacgatcaccacacgtgaacagttattagtgaacggaaaagtcagggaacggattgccacacatatcgtgacaggcgctcacgggtatgaaacgctttgcacaagtggttataacttacaatacaataaggaacgggtactgattgaaaactgcgaaaaggtggctgatggagaactgcctgtcacctgccacacctgtttttctatatggcaggatgtacaccggttcaaacctggtgactttgacacagaatcaggaaagggaaatttcactgatacggagctcacgaaaatcacaattggacaagaaaaaacgccgaatgcgtgttga

SEQ ID NO: 26839 - DNA, 357 bp, Escherichia coli
atgttagttagtaaaagtaatggtcataacgttaatacagttttgggtagtggaagttgtaatgaaaacaattcttccaaccccatggagctactagcttatagtattataaatttaatttgtaaggaagctgcctcagggatgtatcgcgctgctcttgaaactttacaaaaaataatgtctgaatgtatatatcaagaaggcaacgcctttgtcattatgggagctggagaacaattaaaacgtattaaatatgatgttgatgaaaataacttaaaagtattcaacgtacactttgataataatgaagagttagttactgatggtgagcctgacgtagtatgtttaagcaagtag

SEQ ID NO: 26840 - DNA, 279 bp, Escherichia coli
gtgagagatttcacgttgcgtttcagtgataaagcagatttcagggcatttctcaggaaacttaactgggaagaggacgaagagctgcagaatgccattctggttgatgagattggttttacgttcagtgagtcaggtgtttctgctgacggggagcctgaatacacgcgagacgaagggtactttgttaatatccgtcttcttgacgatggatttgatgattccgtgttccgtgagtgggtggttacaccagagcgcccgctcagggagtggttttaa

SEQ ID NO: 26841 - DNA, 327 bp, Escherichia coli; identical to SEQ ID NO: 10003

SEQ ID NO: 26842 - DNA, 144 bp, Escherichia coli
atgaaggagaaggtggagaaggtggagaaggtggagaaggtggagaaggtggagaaggtggagaaggtggagaaggtggagaaggtggagaaggtggataccatgataatggtggcaatgaagattagacaaggaagggagtaa

SEQ ID NO: 26843 - DNA, 2424 bp, Escherichia coli
atgtattcaagtagcagaaaaaggtgcccgaaaaccaaatgggctttgaaaattcttactgccgcatttttagcagcgagtcccgcggcgaagagtgctgttaataatgcctatgatgcattgattatcgaagctcgcaagggaaatactcagccagctttgttatggtttgcacaaaaatcagcactcagtaataaccaaattgctgactggttacagattgccttatgggccgggcaagataaacaggttattaccgtttacaaccgctaccgtcatcagcaattaccagcgcgtggttatgcagctgtcgccgtcgcttatcgtaacctgcaacaatggcaaaactcgcttacactgtggcaaaaggcactctctctggagtcgcaaaataaggattatcaacggggacaaattttaaccctggcagatgcgggtcactatgattctgcgctggttaaacttaagcagcttaactctggagcaccggacaaagctaatttactcgcagaagcctatatctataaactggcggggcggcatgaggatgaattacgggcgatgacaggatcattacctgaaaatgccttaacgcaacaatatcccacagaatacgtgcaggcattacggaataatcaacttactgccgcgattgacgatgccaatttaacgccagatattcgcgctgatattcatgccgaactggtcagactgtcgtttatgcctacgcgcagtgaaagtgaacgttatgccattgccgatcgcgccctcgcccaatacgctgcattagaaattctttggtatgataaccctgaccgcactgcccagtaccagcgtattcaggttgatcatcttggcgcgttattaactcgcgatcgttataaagacgttatttctcactatcagcgtttaaaaaagacggggcaaattattccaccctgggcgcaatattgggttgcgtcggcttatctcaaagaacatcagccaaaaaaagcacagtcaataatgacagagctcttttatcacaaggagaccattgccccggatttatccgatgaagaacttgcggatctcttttacagccacctggagagtgaaaattatcccggcgcgctaactgtcacccaacataccattaatacttcgccgcctttccttcggttaatgggcacgcctacgagcatcccgaatgatacctggttacaggggcattcgtttctctcaaccgtagcaaaatatagtaatgatcttcctcaggctgaaatgatagccagagagcttgcttataacgcaccaggaaatcagggactgcgcattgattacgcgagtgtgttacaagcccgcggttggcctcgtgcagcagaaaatgaattaaaaaaagcagaagtgatcgagccacgtaatattaatctggaggttgaacaagcatggacaacattaacgttacaagaatggcagcaggcagctgtcttaacgcacgatgttgtcgaacgtgaaccgcaagatcccggcgttgtacgtttaaaacgtgcggttgatgtacataatcttgcagagcttcgtatagctggttcaacaggaattgatgccgaaggcccggatagtggtaaacatgatgtcgacttaaccaccatcgtttattcaccaccgctgaaggataactggcgcggttttgctggattcggttatgccgatggacaatttagcgaaggaaaagggattgttcgcgactggctggcgggtgttgagtggcggtcacgtaatatctggctcgaggcggagtacgctgaacgcgttttcaatcatgagcataaacccggcgcgcgcctatctggctggtatgattttaatgataactggcgtattggttcgcaactggaacgcctctctcaccgcgttccattacgggcaatgaaaaatggtgttacaggcaacagtgctcaggcttatgttcgctggtatcaaaatgagcggcgtaagtacggtgtctcctgggctttcactgatttttccgacagtaaccagcgtcaggaagtctcacttgagggtcaggaacgcatctggtcttcaccatatttgattgtcgatttcctacccaatctgtattacgaacaaaatacagaacacgacactccatactacaaccctataaaaacgttcgatattgttccggcatttgaggcaagtcatttgttatggcgtagctatgaaaatagctgggagcaaatcttcagcgcaggtgttggtgcctcctggcaaaaacattatggcacggatgtcgtcacccaactcggctacgggcaacgtattagctggaatgacgtgattgatgctggcgcaacgctacgctgggaaaaacgaccttatgacggtgacagagaacacaacttatacgttgaattcgatatgacattcagattttaa

SEQ ID NO: 26844 - DNA, 600 bp, Escherichia coli
atgacacccgatgcagtgccagccagagataattctcccaaaccaaggtatgtgagaagaccagctacatcctttccactcaaattggtaagcgtattgtccagcggttgtttacctgccagcgcattaagcattgtcgtggcaaagttcggatcattccccagtgccgccgccagttcgttcagtgtatccagtgcagcaggtgcagaacccaccattcctgcaatcgccgatttcacaaaagccgtagtggcaatctgtgtattgttgaccgactgcgccgccgtgggggctgttggcgttccggtgagtgccggactcgacaacggtgcttttagtgccagcgcattgttaatggtggtactgaaattcggatcattgttaatggctgcggctatttctttcagcgtgtccagcgtggctggcgcaccattaataagggccgtcagtgccgcctgtacaaacgcagtggtcgcaacctgcgtggtattattccccgccgctggcgttggcgctttgggggttccggtaaatgtcgggctggcttttggcgcgtactgtgaatgcgggtccggtgcggcaagatgttttgccatctga

SEQ ID NO: 26845 - DNA, 600 bp, Escherichia coli; identical to SEQ ID NO: 6952

SEQ ID NO: 26846 - DNA, 2820 bp, Escherichia coli
gtgctgaaggtgacggaggccatttcgacaggactgaaactgtcaggggctggagttgcggaatccggttcggtgatcacccagttcagccaggcactggcacagggtgtactgcgtggcgaagaatttaatgctgttaacgaaaatggcgaccgggtgatccgcgcgcttgctgcggggatgggtgtggcccgtaaagatctgaaggcaatggcggatgacggaaaactgacagcggataaagtggtccccgcgttaatcagccagctggggatattacgtgatgaatatgcggccatgccggaaacggtttccggtagtatcacaaaggtggaaaacgcctttatggcctgggtgggcggtgtgaatgaggccagcggctcgacgaaaacgctctccggcgtgctgaatggtgtggccggacatattgataatgtggccgcggcggcgggcgtgctggttgctgtcggggtggcccggtactttggcaatatggccgcaggcgtgggaaaggccaccacagagctgatcgcggcgaagtccgggacggttgccctggcagccgcacaggcagatgcgtctgttcaggtgcagcgtaaggcggcagctgacgcgctggcggcagaacgtgcctggcaactggcacaggctgaacttgcactggccagaaacaccagtgcggaggcgctggccacacagaatgccgtcgcaaaacgccgggccatgattgtggccaatgccgcactggtacagtcgaatcaggcggtggcggcctcgaggaaggcgctggagaatgccacgtcggttacgggaatgctgaaaagtggcgcggcatccctgctttcgcttgtcggcgggatacccggtttactgatgctgggagccggtgcctggtacacggtgtaccagaatcaggaacaggccagggagtccgcccgtcagtatgcatcgacgattgatgaaatccgggcaaaggtaccgggaatgacccttccggaactggctgataatgagggtaaaacccgcgaggcactggaagagcagaatcgtctgattgctgagcaggaaagtaaagtccggggactgaaaacacagattgctgactatcagcgctggctgcaggaaaatccacagggtggttcaggtgcggagattataacccacggccttgcggaggcaaccggcaggctggcggtcgagcagtcacgcctgacacagatacaggaaaaggcgaagtctgtacaggaaacgctggcgtcactggaatacaaccgtgtggcgaggatacgtgaggaggcggcagagcagaacagggcataccaggcattactgcagacgaatgttcagcatacggaattcaaccgtctgctggggctggggaatgaactgcttcagcagcggcagggactggtgaatgtgccgttacggctgccacaggccactctggatgataaacagcagagtgccctgacaaaaacagagcgtgagctggccctgtccagactgaaaggggaagaaaaagagcgtgtccgactggggtatgcggcggatgacctcggttttgtgggtgatccgtatcaggaggcgagacaacgttatatcagtaatgccctggaagcctggcgcaataacgaggcgaataaaaccaaatcccggggtggaaaatcagagacggaaaaagcggaagacagtttttcccggctactgaagcagcagaaagagcaactggcactggcgggtcagaatacagagctggcgaagctgaagtaccagacagcgcagggcgaactgaaaaccctgacggagatacagaagcaggaactgctgcgcaatgcggccctgattgaccagcaaaaaatccgggaacagttgcgatcccgggaagagaccctgaagaatgataatgtggctgcgcgtgcatcaaatgaagccgaactgctggggtacgggcagggagaacgagccagggaacgcatgcgggagttgcagcagatccgcgacagcttccgccagaaggatgcggaccttcagtctcagtatcagaccggggatatcagtgaggatttttacagacaggcacgggcacagaacgcgcagtatctgagcgaacgccttaaggaccaggcagccttttatgccgaatcggatgcgcagcgtgcggactggcagaaaggcttgcaggaggggctcagtaactgggtggacaatgcatccgattacgcctctcaggcagcacagctggcaacggaggggatttcaggactggtgaataacatcacggagatgctgaacggaaacaaagtggaatggcgcaactgggcctcatccgtactgcaggaaatctcaaaagttcttatgaatgccgcgattgtcaacggaattaagacggcggcaaacggtatgtccggtgcgggaggatttattggcagcattggtgactggctgggcggtgcggtggccaatgcaaaaggcggcgtgtatacctcggcaaacctgagtgcgtacagcaacagcattgtggacacgcccacgtactttgcgtttgcaaaaggggccgggctgatgggggaagccggacctgaagccattatgcccctgacccgggcggcggatggctcgctgggcgtacgcgcggtgggcagtatgaacggcagtgccggtctggtgtattccccggtctaccacatcgccattcagaatgacggggctaacggacagatagggccggaggcggcaggcagtcttgtgcagctgattgaccagcgggtgcaggcggtgatgctgtccatgcgacgtgacggaggaatgctgagtggctga

SEQ ID NO: 26847 - DNA, 327 bp, Escherichia coli; identical to SEQ ID NO: 5216

SEQ ID NO: 26848 - DNA, 1062 bp, Escherichia coli
atgacagagcgtgaactgtccattatccgtgcgctgggtgaagaattcgccacggtgctggcggatttacagcgcacatttgaggagaagatggccgcacagtcgggggcgtttgaagagaaactggcttccctgtctgctctgttacagaagcatgtgacggtggatgaggtgcgccctgttctgcaggcgatgatgaatgacgccgtgggggccattccggtaccgcgcgatggtcgtgattatgatccggaggtgctgcagcaggcggtgaatgatgcggtcgcgaaaataccggtaccggcggacggtaaaagtgtcactgcggatgatgtacgcccgatgatcgagcagatggtgaaggacgcagtgagtcatatccctgctccgcgcgatggtcgtgattatgatccggaggtgctgctgagggcggtgaatgacgctgtcggaaaacttccggtaccggcagatggaaaaagtatcacaccggatgatgtgcgtccgatgctcgagcagatggtgacggatgccgtgagtcatatccccgttccgcgcgacggtcgtgactacgatccggaagttctgcagaaggcggttctggatgcggtgagtgccctgccggctccacaggacgggcgtgatgccacggcactggaaatattcccggcgattgatgagcaaaaatcctttccccggggcacgtatgccacacaccagggcggactctggcgggcgtatgaaaaaacgcacgggatgcggggatgggaatgcctggttgacggggtggccgatattgacgtcagcatgaccggcgaacggtcgttcactgtggtggtccggcagagcagtggccagtgtacggaaaaaacattttccctgccggtgatgctctatcgcggtgtattcagaaccggcgaaacctaccaccccggcgatacggtgacgtgggggggctcgttgtggcactgcaacagcatgaccggtgataaacccggagaagctcattcatcaggctggaccctggctgcaaaacgagggcgggatgcaggaggtggaaagtga

SEQ ID NO: 26849 - DNA, 327 bp, Escherichia coli
gtgacagcattactgacactggaagaaatcaaggctcatctgcgtgttgaccatgacgcggatgatgacatgctgatggacaaggttcgtcaggctacagctgtgctgctggcctacattcagggcagccgggataaggtaatccgtgaggacggtgaactgatcccgggcgaggcattaacccggatgaagggggctgccatgcgcctgaccgggatgttgtaccggaatccggatcttgctgagcgggaagacctcgtgcagggggaactgccgttttctgtgtccgtgctgatttacgatttgcgttgtccgacggtgttatga

SEQ ID NO: 26850 - DNA, 351 bp, Escherichia coli
atggcaatatctgcaggtcgtctgacacagatgataagtgttctgaacccggtgttaacccgtaatgctgccggagaaatgacggaagagtgggtgtcatgcgggaaaattcatgcggatatccggggcaggagcagccgggagcggatgcagtccggtgcggaaatggcgcaggcggaaatccgcatctgggtgcgcggtccgtcaggacggaaaatcacggcggcgtcacgactgcatgtgctgagcggcccgtggcgtgaccgaattctgaatgttgtcggggggccggtgccggatgcgaccggcgggcgtctggaaattctctgtcggctgggaggggaaaaatga

SEQ ID NO: 26851 - DNA, 447 bp, Escherichia coli
atgatcgaaaccctgctggatttttcggggcttgaggatatcagtcgcgatttgcagcttctgagtggtgcggaaaacaaccgggtgttgcgtgaggcaacccgtgcgggggcgaatgtactgaagaacgaagtggtgtcacgggcaccggtgcgcaggggaaaactgcgccgcaatgtggtggttctttcccggcgttcccgcgatggcgggatggaatccggtgtgcatatccgtggtgttaatccggacaccggcaacagtgataacaccatgaaggcggataatccccgcaatgccttctactggcggtttgtggaaatgggtaccgtgaatatgccaccacacccgtttgtgcgcccggcgtttgatgtgcgcagtgaacaggcagcccgggtggcgattgcgcggatgaaccgggcaattgatgaggtactgagacgatga

SEQ ID NO: 26852 - DNA, 327 bp, Escherichia coli; identical to SEQ ID NO: 7566

SEQ ID NO: 26853 - DNA, 168 bp, Escherichia coli
atgcacttccgagtcacaggtgaatggaatggagagccattcgacagggttatcgaagcagaggacatcaacgactgctataaccactggatgatatgggcgcagatagcgcatgcagacgtaaccaatattcgaattgaagaactgaaagaacaccaagacgcctga

SEQ ID NO: 26854 - DNA, 708 bp, Escherichia coli
gtggccgccagacgggcttctgcagcaatctgcatctccgtcccgcgggctgccgccacagcctgctgtgcacggtacacggctgcccttgcccgcgccgtggcaatctgcgtccccctgagctgtgcttccgccagtgccacttcattacgtgctgccgtcacaagtcctgccgtggcagacaccgctccggaggccatattgccaaagtaccgggcaaccccgacggcaaccagcgcccccgcggctgttgccacattatcaatattaccggcaacaccgttcagcacgccggagagcgttttcgtcgctccgctggcttcattcgcgccacccacccaggccataaaggcgttttccacctttgtgatcccgtcagagaccgtttccggcatggcggcatattcatcacgcaatacccccagctggctgattaacgcaggaacgactttatccgccgtcagtttgccgtcgtccgccatcgccttaaggtctttacgggccacgcccatacccgcagccagtgcacgtacgatccggtctccgctttcattgaccgaattaaattcctcaccgcgtaacacaccctgtgccagcgcctggctgaactgggtgatcaccgagcccgcctctgccgtactggcaccggagattttcagccccgtggaaatggcctccgtcaccttcagcacatcatcagcactgtaa

SEQ ID NO: 26855 - DNA, 309 bp, Escherichia coli; identical to SEQ ID NO: 17677

SEQ ID NO: 26856 - DNA, 132 bp, Escherichia coli; identical to SEQ ID NO: 17678

SEQ ID NO: 26857 - DNA, 405 bp, Escherichia coli; identical to SEQ ID NO: 20458

SEQ ID NO: 26858 - DNA, 216 bp, Escherichia coli
gtgttgataacctacaaaggaaagctaccgggaagaattactgatgctctgaagatgccgccgtcaacactgcggtcagaaaaagatgatgttgaatcacgtattgaaaaactggagcgctatatcgctgaattgaaaaaaagcgccccaacaaaaaatgaggtgcttgcagcagatgaaatgaaagaagctattcttgatcgcgcgggcatctaa

SEQ ID NO: 26859 - DNA, 168 bp, Escherichia coli
atgagaggacttgcatacaatcccggcattcttccggcagaaatgattattcgccaacgcgtaaagccaatgccatcgagagaggaattgcttaagagaaatagtttcggttctgttaatgacaacaaatatctgaatgcgatgtggcgcaaaggaggcaaccagtga

SEQ ID NO: 26860 - DNA, 600 bp, Escherichia coli
atgcgtaaattatgtgctgttattctgtccgcagtagtctggctggttgccgctggtacgccagtgagcgcagcagagcatcagtccacactaagcgccgggtatcttcagacccacactgatatgccaggaagcgataatctgaacgggattaacgtgaaataccgttatgaatttacggacacgctggggctgattacgtctttcagttatgccgacgcagaagatgaacaaaaaacgcattacagcgatacccgctggcatgaagattccgcgcgtaaccgctggttcagcgtaatggcggggccgtctgtgcgcgtgaatgaatggttcagtgcttatgcgatggcaggtgtggcttacagccgtgtgtcgactttctccggggattatctccgcgtaactgacaacaaggggaaaacgcacgacgtgctgaccggaagtgatgacggtcgccacagcaatacctctctggcgtggggggctggcgtgcagtttaacccgaccgaatccgtgaccattgaccttgcttatgaaggttccggtagtggcgactggcgaacggatgcatttattgttggtatcggataccgtttctga

SEQ ID NO: 26861 - DNA, 219 bp, Escherichia coli
atgtcagtcagtgccaacgggggaacgccgccgtataaatacgcctggaagaaggatggtcagccggttgacgggcagacgacagacaccttcagtaagccaggtgcgcagtccgctgatgcggggaaatatacctgcgtggtgaccgattcggcagagaaagcacagagtgtgacgtctgttgaatgcaccgtgacagtgagcgcagccgccggataa

SEQ ID NO: 26862 - DNA, 375 bp, Escherichia coli
atgaaaaaggatctgaaaacgctggcgctggccagactgtcagggtttcgtcataaaacggtgaaggtgccggaatggggtaatgtcagcgtggtgctgcgggagccttcggcagaggcctggtatctgtggcaggaagtgctcaatggtgatggagaggatgacgataccctgtcggtggtggcgaaaacccgccgtaacctggaagcggatgtgacgctgttctgcgatgtcctgtgtgatacggatctgcagcgggtgttcgctccggacgaccgtgagcaggtgctggccgtctatggtccggtacatgcccggttgctgcgtcaggcactggaactgatcgctgatgcagagtcggccagaaaaaagtag

SEQ ID NO: 26863 - DNA, 375 bp, Escherichia coli
atggcaaaagatctgaaaacactggcgctggccagactgtccggatttcgtcataaaacggtgaaggtgccggaatgggggaatgtcagcgtggtgctgcgcgagccttcggcagaggcctggtatctttggcgggaagttcttaatggcgatgatgcgggtgacgataccctgtcggtggtggcaaaaccccgccgtaacctggaggcggatgtgacgttgttctgtgatgttctgtgtgataaggacatgaaacgtgtgttcaccgcagatgatcgcgagcaggtgctggctgtctatggtccggtgcatgcccggttgctgcgtcaggcactggaactgatcaccgatgctgagtcggcaagaaaaaagtag

SEQ ID NO: 26864 - DNA, 537 bp, Escherichia coli
atgggtgatggacgcaggggaaacatcggccaccgccgcttttttcgggtccacaaagtctgtgtccagacgcgccaccaccgcttccgccagtgcattacggaccagcgcatcggcggcaggactggaaaaacggatcagctcttccgtcagtaccgcaatagccgccaccttcgcatgactgaaggtgatggattcaaaatcaaacttcgtcaggggtctggccttaccctgccccacccagccggcagcaccaccggacacctgggcatgcacgcgaatattgaacggcacctgacgaagtgccgggatcccgccatgaccaaatcgcccgataatggtctgcggacgcagataatcaataaagtcctgcgcatattcctgatattcagacaggctgcctgcccactgtgggtccgtggtggtccctgcccccaccgccgacttcaggacatgatgcagacggctgtcatccggatactgacgacgggccacttccagggcttcagagcggacacctttagccgcggccagtga

SEQ ID NO: 26865 - DNA, 132 bp, Escherichia coli; identical to SEQ ID NO: 7576

SEQ ID NO: 26866 - DNA, 270 bp, Escherichia coli
atgtcagaaatcacatccctggtcactgctgaggcagtgaaggaagtcctgcgctctgaagaagtcctgagcgcactgaaacagaaactccgccagaaccttgaggcgcgtcttgatgcagaagtggatgccattctggatgagctgctgggcgtaccagcggttccggagccggaaggcattgcggatgacagtacggtttcagatggcgtcgggtctcagcctgacggtagtgaagagcctcagcctgacggcgaaatgatgatgtaa

SEQ ID NO: 26867 - DNA, 294 bp, Escherichia coli; identical to SEQ ID NO: 25632

SEQ ID NO: 26868 - DNA, 576 bp, Escherichia coli
atgcccctgcgtggccgccagcccggcagcatacaccggcggcagccccacaagcggatgaaaaaaacagttaaaccggtcgtggatcacttccctggcaggcaccgtcaccgcctcagtgatcccgcagttccggtccggtgtaatgcgatagaacacctcgccgtcatccgccaccagaggttcaacccggctccagtccagaatacgcagttctttgatctgcccccgggagttacggattttcagcaccaccgtattgccgtgacgcagtttggcgttcagccacagttcaaaaaactggatacgattctgctgtgcattgggacgacgacagagacgggcaatatccccctggcgcgtttccctgcgtatcccatgcgcatccgtctgcatcaggcgcagccgcattttggcgatatcctgggatatcagcgaaatgcaagaaaacaccgcgtgaaaggacaaaacggtttccggatcggctttcacaccctgctgccaggcaccggcaaaaggctcagccaccgcctgaaacaggctggtccagcccacctcttttacatcacgtcctga

SEQ ID NO: 26869 - DNA, 225 bp, Escherichia coli; identical to SEQ ID NO: 8892

SEQ ID NO: 26870 - DNA, 435 bp, Escherichia coli
gtggcagcaaacctgcagcccaccggtgcggtctggctgatgtccagcaccaatgccctggcactgtccatgcgtaaaaatgcgctgggtcagaaggaatacccggacatgaccctgctgggtggctccttccagggcctgccggtgattgtctcccagtacgtgggtgaccagctggtgctggtgaatgccccggatatttatctggcggatgacggcggcgtggcagtggatatgtcccgcgaggcatcactggaaatgcagtctgagccgggcggcgacagtaccacgccgtccccggtggagctggtttccatgttccagacaggcagcgtggccatccgtgcggagcgctggatcaactggcgtcgtcgccgtaccgcggcggtggcggtgatcaccggagtgaactacggcagtgcgtccggcggctga

SEQ ID NO: 26871 - DNA, 309 bp, Escherichia coli
gtgctgacgcacttccgccaggaacttaaagcccttaccggacggaaactgcaccttaaacgcatacaacgagtcattgtcataggcatcacgcagggcgttctgggcctgattcagataaaaattacccgacatggaaatctcagacgacgcccccagaccgttgatgttctcctgctctgtggagcagagcgtggtcacatcaatatcctgtttctgaccggcggtgaactggacttccttgatggtgcagtccaggcgcagatattccgccttatccatagtttcagcagtcgccggggcagatga

SEQ ID NO: 26872 - DNA, 384 bp, Escherichia coli
atgctgggctcggcagagatggttgagttggctgaagcgaagctgcatggcgaagatgtttctctggatgcgctaaaacgtatcctacgcccgtggttaagaatgaaagagccgccagataccgttgtactggggtgtacccatttccctctactacaagaagaactgttacaggtgctgccagagggaacccggctggtggattctggcgcagcgattgctcgccgaacggcctggctgttagaacatgaagccccggatgcaaaatctgccgatgcgaatattgccttttgtatggcaatgacgccagaagctgaacaattattgcccgttttacagcgttacggcttcgaaacgctcgaaaaactggcagttttaggctga

SEQ ID NO: 26873 - DNA, 471 bp, Escherichia coli
atgctacttgataagggagagcataaacttctctcagcagtcgaacggggtaatttgcctctgtatctcgcagtgcaatttgcaagatgtgaaactgaggaagcacaagatattcttaccgaagcatatgataaaaaattaataaaaagtcgggacattataaagataaaacacattctaaatcaaagaacagttgggaataaaggtgcaaaagcagccggattttattatcacaaaccatcaaaaaggatgactgcagaggagttgattgagctttatgaaaatagtatcgctgaacataaatctgtttataacaactcaaaattcataaaaaccaacctactaatagtaaatgagatttttaacatcataatgatgaataaaagctttcaacatatacttgaacaagagaatctttcagaactaccatctcagatattaaccccagtaaacaaagaggtattaaaatga

SEQ ID NO: 26874 - DNA, 207 bp, Escherichia coli
atgagcatggggattcttaccatccaaatcgtggaaaacgatatcagcgatcattcctttatcaacaaagttcttctgacagtattcggtaaccaattttttcttgtcatcattgctgagttctacgggaatagcgacatcaaaataacgggctgtttgaccgttgttctggcgttccactctttcaacttcattccagagtgctga

SEQ ID NO: 26875 - DNA, 909 bp, Escherichia coli
atggatgattcggtttctgtcgttataccttattacaatgattcccctcgtattgaaaagtgcttggatagtatatgttcacaaaccaggcaagctattgaagttataatagttgatgattgttcaaaagatagtgcattactactaaaaatcattgataaatttaaaaataaaataaatatacgatatttgagaaatgatgaaaataaaaatggggcatattccagaaacgtagggatgagagaagcaaggggaggaattgttgcttttctcgatgctgacgactattgggccacagatcatctcgaggaaagtgtaaatgctttgttgttaaatggggtggagtttgttttttcaaatgtaatagaggttgattgttgtggttgtgagagtcgaagaaaagttactaatccccaatatttggataataaatacgatataatactgctttctcctcctcaaactaattcattcctatttaggaaagaaatatttgactctaaagagattttttttgatgaaaacttacgtagacatcaagattatcaatttcttactttaatattagaaaaaaatatttcataccaatatattgatactgtttttttattttgggaaaaatataattcttatgtttctgggaggttactaaaaaaatttattaccggtttagttcttgaggtggttcttgtgtatgggaaaaataaaacaaagagttttattgattcgcatgaacttgtcaagataaacgcatcgaaactatttctttatctggtgttaaaaacaaattttggtgttaatgctaatagggtgatttatccttttttttattatattttattcagccccaaaagcatattaaaaaagatatcacaaaggattaatagaaagttggtacataatgcgtaa

SEQ ID NO: 26876 - DNA, 309 bp, Escherichia coli
gtggaattttccgtattaagtaacaatctgaaaatgccgatgatgggatttggtgtttttcaggttaccgataaaaacgtgtgcaaacagtcagtgttgaacgctatccgcacgggttatcgactcatcgacactgcagcggtatacggtaatgaagatgccgtcggtgaagccgttcgtgaagctatatctgaaggtttatgtacccgagatgagttatttataacgtctaaattgtgggtgcaggatatgttgaatcaggatacggcagcagcaggtattgaagcatcattaaaaaatcgggactag

SEQ ID NO: 26877 - DNA, 726 bp, Escherichia coli
atgcactcaaccccaactaacctcatgaccaccgccagcctgcctgtagatcgccctttctttgcttaccagcatgaatggaacagcggcgcacgcagcagaaaccgtgtgcttacaaaaatgcatcaggctggcgcggatttctttttcgcctacgaagccctgaacgatgcactgcataccggacgcaaccagatttttcttggctgcaccccggcatccgccctgacagtcaaaacctatatgtcagcctttatagatcaggccgcaacctggacacaccttgggaaaataaaatcaggtaaagcgcatctggaactacctaacggtgcggtcatttattttatcgggccgaaaagtctcgccgccgcgctccatggaaacgtctatgtgtcagagtatgcctgggcggactccccgaaaaatatgattgcgctcgccaaaagcctgtccatgcacgcgcgctatcacgctacctactacaccaccccaagccccagcccggaagcatggcgggaatacaagaagctgattgcccgcaacagcacaaccagcatgatttttaccgctgatgacgctgcagcatccggggcaacgctcgcaaccggagccgcgctctttgatgatgaatggcttaatgacatgaaaaaagagttatcagcagaggactggaaaatgctgtttatgtgcgaatggccccagactgacaaggagcaggcggcatga

SEQ ID NO: 26878 - DNA, 1434 bp, Escherichia coli
atgatccagccaaaagtttttatatcctatagttggtcaagtaaaactcatcagcaacatatcaaagatatagctgaacgattggcggcagatggagttgaaactgtcatagatatttatgacttgaaagaaggggatgataaaaattattacatggaaagaatggttcaagatgaaacggttacgcatgttttagttatttgtgataaaaaatactcagaaaaagccgatttaagaaaagatggtgtcggtgttgagtcgatgataatttcccaagaaatatattcatccgtgtcgcagtccaaatttataccattaatatttgagtacaaagataatggagagccgtatactccaatctttctgaagtctagaatctatattgatttttcaacaccagaaaaagaaaatgataattgggaacgtttaatcaggttgctttatggaaaaccagaatttactaagccaccattaggtaagcctccggtttatttagagcaagacacgtcaaaaccgacgtatgaaattcatgcaaaatttcaaactttaaaatcagctgtcttaaatcaaaagcagacattaaaggattgcagaaggcaatttttagaggtgtgccgaaattattgtatctctctacaagtcgtaacaaacccaactactgaagattttgcagcggaagttttgcaaattcataaagagcttattgccgttagggatgccattacagactgggttttacttgagggtgatacgcagggcgaagacttttccaaagcactattacagtttatggaagtaatgttagcgattagaaatcgtccgaaaaatgtaaattcatataatgaaatatggtttttgccccataagatttttgcgtatgaaacgtttttgtatattttggcggctttaataaaaattgaagctttccagcatgtacatacattactgcatacatcttatttgctacccgatcatataaccagtccgggaatggagtttgctaattacagtgagttatatttaagctctgattaccttcaaagtaaattgtcccctgaaaactatcgactgtattcccctgttgctgagttagtaaagcaaagtgcaactagagatgatgtgtctttcgatgatttgaaacaagctgatcttgttgctcttatgatatccttcattaatcccagtattttttggtacccgcaaatgttgttgtattccgggcactatgagaaatatcctctatttacaagagcaatacagcatagaggattcaagagtattgcagttattaccggaatcgatgacagtaaacttttggctcaaaagttgacagagggtgaggcccagcgaaatactagcaactggtatcatttcggttttaatagagactttctcaatcaaatgaatgttagtcgcctagatagtattgaatga

SEQ ID NO: 26879 - DNA, 633 bp, Escherichia coli
atgagtttaatcaaggcgggaaatgatagtggtgggcgcgatgcaattaacaggcttattaaggcttacaacttcagctcacgacagcagctctgcgaacatctggaggtatccaaaagcactatggctaacagatacttaagggatagctttcctgccgaatgggtaattcaatgtgcccttgaaacaggagtttcccttctatggctggctactggtcaaggagatatgtatgcgtgtgagaacgaagaaacaaatctcaaaaatgaacctcccgtcactgtaagaccactttctaagatcgttgctcctagtatcaaacgtgttgaactgaagaacggcgaactgcaggcaagtgatgaaattcttcttgatagcagcctgctcgatggtgactcatccaacgctttatttgttaaaacagctaataatagctttgtagtggatacgtccgttaaacaagtcagtaatggcttctggttagtcgatatggacggagttaaaagcatcgtcaaaattgcgcgcatacccggaaacaaaatagtagttaaccaagatgacacttcatttgaatgttctgtagatgatgtggaagtcgtaggacgtgcagtcaaagtaatcaagaacctctaa

SEQ ID NO: 26880 - DNA, 927 bp, Escherichia coli
atgttctattgcttcaattggcttaaactaaatgagaaaaatctattaaaacaaccattattcatagcatctattatcgtaccgttaaaaatgtttgttttgtatggcctctgggcttggaaaggccacgatttaaatttcacatcagacggttttaatcactttcttgacatctctaaattgccattatttattttagcttcttcggtacctcttgcagcaatcgtcaacaatatacatagaaccacacaaacagagaaccaaatagaaaaaacacaaaagcaaatcaatcttgttattgaaaaaaacaccactgattcatattactcacatctgaaaagcttcgctgatatattccaaacactaccaacatttaaattatcaagattaaataaagaaactagtgatatagacagtattgaactatctgtagttcatccgtacactctttataaaaatattttcaaatcatcttccattgataatggctatagcaccgctgtcgaagaagattttattcgaaaaacaacaaatcattataacaacataaacaaatcgcttaagtccaacaacaaaaatcatgacaaccaattagttagcctacaactcatagaatcaaacataattcaactttgcagactacttggaattgattataaataccaagaacatcttttctcaataattcctgaacatccaaaaccagatacggaagccataagcatctcattcaatgatgaaaaacaactaaagcaaatgctttggggactaagaaatattctcattgagttatatgttttaatcgacaaggacccctctatcttccaaacaggtaaaagcaatggtgattacatacctgagtacgcactatatgacgaaaaactctttacaagcattttacctatatcaaatgaccagcgcatttaa

SEQ ID NO: 26881 - DNA, 1269 bp, Escherichia coli
atggccctaacggatactaaagttcgctctgcgaaacctgaggagaaagagtattcacttgttgacggcgacggcatgtccttacttgtaaaacctggcggttcaaagtattggcgatttcgtttccgttttggcggtaaacaacatttgatggcgttcggcgtttacccggatgtttcgctggcggatgcgcggaagaaaagggaagaggccagaaagctggtagctgctggtatcgatcctcgtgagcataagcgtgctgtgaaagaagagcaggcgaaagagattattactttcgagaaggttgccagagagtggctcgtgaccaaccaaaaatggtcggaagatcatgctaatcgtgtaaaaaagagcctggaggacaatatcttcccggcaattggtactcgcaacattgctgaactaggcacccgcgatctgttaattcctattaaagccgtggagaagtccggacgtcttgaagtggcttcccgccttcaacagcgcactacggccatcatgcgttatgcagtgcaaagcgggttaattgattacaatccggcgcaagagatggcgggggcggttgcttccagtaatcgacagcatcgtccggcgctggagttaaagcgtatcccggaattactccagaaaatcgatgaatacaccggcaggccactaacccgctgggcaactgaacttactctgcttatctttattcgatccagtgagctgcgttttgctcgctggtcggagatagatttcgacacgtcgatgtggaccatcccgcctgagcgagagcctattcccggcgtgaaacattctaagcgaggatcaaagatgcgtacacctcatctagtgccgctttcaaagcaggcgctagcgaccctgaagcagataaaacagttctgtggcgaacatgagctgatttttattggcgatcatgatccgcgtaagcccatgagcgagaacacggtaaacagtgcgctacgggtgatgggttatgacactaaggttgaagtttgcggccacggcttccgcacaatggcctgtagttcgttaattgagtcagggctatggtcgaaggatgcggtggaaaggcagatgagccatatggaacgcaattcggtgagggcggcgtatatccataaagcggaacatctggatgagcgcaagctgatgttacagtggtgggcggattttctggatgcgaacagagagaagggtatcagtccgtttgaatatgcaaaggttaacaatccgctgagaaggtga

SEQ ID NO: 26882 - DNA, 618 bp, Escherichia coli
atgataaataccatgacaaaaaatgacaaacgctggattggcgatctgctgggtggttcgttgatggttcgtgagagccgaaccattgctgagctgttgctctctgaaccagatgaaacaacctggcagcagcaaataatcaatgaaaatattcttcaggcgtcctccacgagtacggcaaatcgttatgcccgaaccttaaggctgcgattgatgaccctggatcgggagtgctggcaactgattgctgatggcagtgaaagcgagcgtctgcaaatgttgttggttgcgttgatgatccagtctccagttgttgcgacgtttattgctgaagttgtaaatccagctcgtcagcagtttaaagaaaagcttggtataaattgttggagtgagtttgtggatgagaatctccgtttacacccggaactggcagctttttctgattcatcgatccaaaagatgggtaacaatcttattaaggctctcgcagaagctggttacctggatagcccacgccgccgcaatttacaaaacgttttcctgctaccagttgttgcagcggccttgcatcgtttaaacaaagccgaactgctccctattctggagggtaacgcatga

SEQ ID NO: 26883 - DNA, 603 bp, Escherichia coli
atgaatgacccgatccttgaatatcgattaaaacagttagaagaacgtatcggcgacgaccgttttttgaaaaaccaaggttccggcaatgagattggcttctggatctttgattatccggcaaaacaagagcttcaggtccgcgagtacttgcactttttattcaaaaaactggataaaaagtacacctataaaacgctaaatatcttccagattatcatcgatatgttggaagaacgtaagctctttgaacgtatctgccaacgagagcctgagcttggccttgagacactgaaaaagcatctggctgccccgctaagccagaaaaaaatcgcggaatatattgcacgcacggtcgatcttcctgcgcagcaatttgtcattctgacgggacttggtaacgcctggccgttggttcgtggtcatgagctaatgagcgcacttcaggacgtgatgggatttacaccattgctgatgttctatccaggcacctatagcggatacgatctttctccactcgctggcattaattctcgtaactattaccgcgccttcagactggtaccagaaaccagaccggcggcgactttgactcctcgttaa

SEQ ID NO: 26884 - DNA, 3615 bp, Escherichia coli
atgaatattgaacaaatttttgagaaaccgctaaaacgtaatattaacggcgtggttaaagccgagcagaccgacgacgaaagcgcctggatagaactggatgagtatgtcattaccagagagctggatggtcacctgcgtcagttctttgaagtatatgcccctgctactggccctggcagattacagcttgctgacaaaataggcgtctgggtttcaggcttctttggttccggtaaatcacacttcattaagatcttatcctatctactggcgaaccgcgaagtaagccgtaatggtgtcactcgtaatgcactttccttctttgaagagaaaattgatgatgcactgctattggctgatattcggaaatcggtacaacatccgaccgatgtcatattattcaatattgactcacgtgcgaatgttgaagatggcgttgatgccatactcaaagtctttctgaaagtctttaacgaactagctggttattgtggcgacttcccacatattgcacatctggaacgtgagctcgataagcgtggacagtttgatacctttagggcagccttcgcggacattactgggtctcgctgggaagacgaacgtgatgtttatctgatgataaacgatcagatggctcaggcactgagtattgctacaggccagagtgaagagtcttctcgtcaatggatcgagcaacttgataagaacttcccattggatatcaaaaatttctgtacgtgggtgaaagagtggctcgacagccatggtaatcgcaatatcctgtttatggtcgatgaagttggtcagttcattggtaaagatgctcagatgatgctgaagctgcaaaccatcaccgaaaacttgggcgttatttgtggtgggcgggcatgggtgattgtgacctcccaggctgacattaatgcggccattggtggtatgagcagtcgcgacggtcaggatttctccaagattcaagggcgtttctcaacgcgcttacaactctccagctcgaatacttcagaagttattcagaaacgtttgctggtaaaaaccgatgtggcaataccggcgctggaagctatctggcaggaaaaaggcgatattctgcgtaaccagttggcgtttgacacgacaacgaccgctactctgcgagcctatacaaacagccgcgagttcgtggataactatccgtttgtaccgtggcattaccagatcttgcaaaaggtctttgaatcaatccgaaccaaaggggccgcaggtaaacagttggcaatgggggagcgctctctgctggatgccttccagtcggctgctgtacaaatctccgcagatggtctggatagtctggtcccgttttggcgcttctattcagcgattgaaagcttcctggaacctgcagttagccgcactattattcaggcctgccagtctccgtcactgactgaatttgacggcaaactactaaagacactgttcctgatccgctacgtcgatgtgctgaaaagtactctcgacaatctcgtcacgctctctattgagcgtattgatactgataaagtggaactccgtcgacagattgaagccagccttaatcgtctgcaggctgagatgctgatctcgcgtattgatgacaaatttgtttttctcactaacgaagaaaaagagattgaaaacgaaatccgcaatattgacgtggaattcaccaccatcaataagcaactctcaaccatcattttcgaagagatcctgaaaaacaaaagatatcgctatccggccaataagcaggattttgatatcagtcgtttttgtaacggacatccgctggatggtgcgaatcttaacgatctggtggttaaagtgctcacgccactggactcgaactacgagagctataagggtgcgcattctaatagtctgctgatgacggacagtaaagactgcatcttaatttgcctgcctgatgaggctcgtacctggcaagacctgaccatgtacgctcagaccaaagctttcctcagcaagcaaagcggccagcgcccggaacaggcaacgctgttggcggaaaaaggccgtgaaaatagtatgcgcgaaaaaacgcttaaggcgcagattgaaggcttgctggctcaagctgatgtctgggcgctgggcgaacggctggataagaaatcctcttcgccgttagctatcgtggatgcagcctgcggttacgttattgagaacagtttctctaaactgaaattactgcgcctgagtactggggacgtgaaccgtgaaactcacgctctattgacggtagaaaatgatacccagctcgacctcggggaaatggaagagtctaacccagaggcgatgcgtgaagtggataactggatcagcatgagtattgagactcataagccagtttacctgcgggatattctcaccacttttggccgtcgcccatttggctggccggaagatgaagtcaaattgctggttgctcggctggcacgcagcggtaaatacagcttcactctgcaaggcagtgaaatcgcactgaagcaggcgtgggacgcgtttaataattcacgtcgttacagcgatttgcgtctgcataaagttcgtcgccatgatgaagcacagttgactaaagctgcgcagctgatggctgagattgctggagagccgtttaacgagcgtgaagaacagtcgttggtctctcatattcgcgaactctttggccgctggaatagcgagttgactgtttttaaaactcgtgcagagagtggacaaaaccctggccgtaaagagatagaagaaggtctggtattgctgaacgggatccttaacgagaaagaggaatacgcggtcattgaaaaaatcaccgcagcggctgacgatcttaaagatttttcggaagactgggacgatttggttagcttctacaaaaaccaatacgctacctggcagcgcttgagtatggcgttgaatggcagttttaaagctaaccgtaacgcgctggataaaaacgaaacggcccataaagcgttgcaggagttggaaggcatctacagtaaggaacgaccttacggagagctgcaccggattattccgctgattgaaaccgttgaaaccatcaaccagcgtctagtggaagaataccgaagcaatgcgctgcagcagatagataaccatatcaatgagcttaagcaaagcatgcaggagatgcacgtccctgctgacttgcaacactcgcttttacacccgatgcaacaatcgcgtaagaaagtggagcagaacggcctgatcccacagattatggaagaacaggctgaggttcgggcgctacaatttaaagcgaatgaacggctgaacggctgggttgaggatcagcgtaagaaagtgtctgatccaaaacctgcccctcagccagggattatcgaccccgtagttaagcctgaacccaagctgaaaaaaaccatctacgtaaacacgcgtaaaacgatggaacgagcggcgggtgtgacaacgctggataacgccgaacaggtagacaaagcgctggaacaactccgtaaaacgctaatggatgccattaacgcaggtgaacgcgtacagcttcagtaa

SEQ ID NO: 26885 - DNA, 3630 bp, Escherichia coli
atgaatacgtcaaatatcaaaaaatacgccccggtggcacgtaaacagttccgcgatgcggtcatgcaaaaactgaccacgctgggtattgacgccgataaaaaaggcaacctgcaaatagcgcaagcaaccgatcttggcgacagtgtgcgatatggtcagttctcgctggataaatcactggcttcacgccgtgaacgtctggtcaagcgtgcagaaaagcagggctatgacgtgctggtggagcacatcgcttacacctggtttaaccgcttttgcgctattcgctatatggagctgcatggctatcttgatcacggtttccgtatgctgtctcacccgaccctggaagggagttttgaggttctggatcatgtgccggaagtggctgatgcacttgggctggacaaatcacgcctggtggagatgaagctggcgggcgatcgtgacgaagagctgtaccgtgaactattgcttgcacagtgccatgcgctgcacggcgctatgcctttcctgttcgaagcagtcaatgatgatatcgaactggtactgccggataacctgactcgcaccgactccattctgcgcgggctggtggacacgattcctgaagaagactggaaacaggtcgaagtgatcggctggttgtatcagttttatatttccgagaaaaaagatgatgtgatcggcaaggtggtgaagagcgaagatattcctgccgctacccagctgtttactccgaactggattgtgcagtatctggtgcagaactcggtgggccgccagtggctgcaaacctatccggactccagcctgaaaggcaaaatgccgtactacattgagccagcggaacaaacgccggaagtgctggcacagctggcggctattaccccatcaagcattgaaccagaaagtattaaggtgctggacccggcctgcggctccgggcatatcctgaccgaagcctataaagtgctgaaagagatttacgaagaacgcggttaccgtacccgtgatattccgcagctgattctggaaaacaatattttcggcctggacattgacgaccgtgccgcacagctgtctggttttgcgatgctgatgctggcgcgtcaggatgaccgacgcattctgggccgtggtgtgcgtctgaatattgtttctctgcaggaaagtaagctggatatcgctgagctgtggaccaagctgaactttcatcagcaggcgcaacgcggcagcatgggagatatgtttacccaagggacgtcactggccaataccgacagcgcggaatataagctactgatgcgtactctggctttgttcactagtgcaaaaacgctgggatcactgattcaggtaccgcaggaagacgaagcggcgttgaaagcgtttctggatggattgtatcgtctggctgttgaaggtgatattcagcagaaagaggctgcggcagagctgatcccatatattcagcaggcgtggatactggcgcaacgttatgatgctgtggtcgcgaacccgccgtatatgggggggaaagggatgaatggtgagctgaaggaatttgctaaaaagcaatttcctgacagtaagtctgatttatttgcgatgtttatgcagcatgcattttctttgctcaaagagaacgcttttaatgcacaagtgaatatgcagtcatggatgttcctgtctagatatgaactccttcgtgaatttttgttagaaatgaacacctttatatcaatggctcatttaggtgcgagagcattcagtcagataaatggagaagtcgttcaaacaacggcttggattattaaaaatagacggttggaaaactataagccaacatttttccgattaatagatggaagtgaagatgataaatcaaaacgtttgcgtactggtgagtgttcctacagttcactcaaacaaacagattttaatgttattcctggctcacctattgcttattgggctaatgaaagtttaactaatttattcaagacaggtagaagaataactcagtgggtcgaatctaaagatggacttaccactggaaataatgagaattttattcgctactggtgggaagtagattcacatgatatatatactcaagcaaaaaaccatgatgaattttgggaaagcaaaaaaaaatgggctcctctgattaaaggggggagttatagaaaatggtatggaaatatcataaatattattaagtatgacaaggctacatatgaaatactttcagttgagggcaataaattaccctcgagagactattactttaaaccatgtttaaattggacaaggatttctagtccttcaggttcgtttagatattctgaaggtggtactgtatttgaaagcgctagtttgacagcatatgctgatgatactaacaatatcttcctggcaatggctgcagcgaattcaaaaatggtcgagccgcagttagatttggtcaacccaacagtgaatttcttgagtggctattttgatatgctaacattgcctagggatatttcgctgtatcaaaataaattaataaacaatgtagaaaagcttatcaatatttcaaaagtagattgggatagcaatgagttttcattgggttttaaatcactattcccctctgttgataaaaatgtaaaaatagagttattccttaaggagttatataaaaattgtagtgattgggtacgtttatctcaagaaatggaagaggaaaataacaatatattaatttcttcttccggcttggcagagtccatcaattatcatgtagataaagaaagaattacactttctaataattactctgaatgtgatgtatttacatctgaaaaaacagtcgagatgttaagctatataattggctgcatgatggggcgatattccgtcaatcgcgaaggtttggtctacgcccatgaaggtaacaaaggtttttccgaattggtcactgaaggtgcctacaaaaccttctccgccgatgaagacggtatcctgccattaatggattccgactggttcgacgacgatgtcaccgctcgtgtaaaagagtttgtccaaaccgtatggggtgaagagcacctacaggaaaacctcaatttcatcgccgaaagtctctgtttgtatgcaatcaagccgaaaaaaggcgagtcttcgctggataccatccgtcgctatctttccactcagttctggaaagaccatatgaagatgtacaagaaacgcccgatttactggctgttcagctccggtaaagagaaggcgtttgagtgtctggtgtatctgcaccgttataatgaaggtacgctgtcgcgtatgcgtaccgaatacgtcgttccactgctggcgcgctaccagggcaatatcgacctggtaaacgatcagcttaagagtgctgaatcgggagctgccaccacgcgcctgaaaaaagaactggatgggttgaccaaaaagttcaacgagctacgcaattttgacgatcgcttacgtcactatgctgatatgcgtatcactattgatctggatgacggcgttaaggttaactacggcaaatttggcgatctgctggcggatgtcaaggcgataaccggcagtgcgccacaggaggcataa

SEQ ID NO: 26886 - DNA, 1122 bp, Escherichia coli
atggatcaacatcccctgattattaaaggctacaagagcatcgcggagctttcccttgtggaaagcccaccatttatcacctttgctggagccaatggtgcgggcaaaagtaacattaccgatgcattggctttttttggtgccgtagtgaaaaccggggcgacacaagcaatccgtgattttggcggttttcagcagattcattgctacaagctgcgtaaggaaaatcggactacggcttcactgcaccttcaaattgagctgggaggaaaacagtttacctatgacttgacgatcaaaaacatggataaaaaaccaacgatcactgaaaagttggtcattgatggagatatttatattgatcgtaagcaccctgatactcttatgattcgcctgagcgatagtgatgaaatccctgcgactttaatccctaactactcgtcagatatgacggcactaatgctactggggaaaagtgaactgtacgcttttttgaccaatattgttgtttttcgcatcgatccgttacgtgctaaagagcccgatagcgccaaaactgactcgacatttctggacagtcatggtcgaaacattgcttctgtgcttgctgctctcgaatcgaatagcgaatttaaagagcaaatactggagtggatggaactcatcgttccggggatggaaaatgtatcgaccgagaaacaaaaattggatggctcaacggtattgacctttaaagaacagggaactcgtgcccgctttcctgcccatcttatctctgacggcaccatcttcacgctttgtattatgacggccatcttgagtcgagcacagcaaacggggatgaccattattgaagagcctgaacgcggtattcacccaaaagccattggggaacttgtgcaattgatgcgtgaaaatgcctctttgaatcatccaattgttattactacccatagtgaatctattgttcgcaatctggaaccagacgaactgtggtttgttagtaaaaaagaggggaaaactcagctgatgcatgcttcagatgcgggggttgataaaaaggaaatcccactggataccgcgtggctgatgaatatgtttgatggcggtttgccatggtaa

SEQ ID NO: 26887 - DNA, 570 bp, Escherichia coli
atggtaaaaataggttttatcgttgaaggtgatactgagtcaatcatcgtgaattcaccagcgttcattgcatttctgcgcacgaataattttgaattggtaactcccgttattgatgccaaaggtggtggtaacctgttaccgaagtatgttgataatttcgttgctaggctcagaaatgtaggtgctgaacggatctgtattctgaccgacctggaagatgcggcatctgttgctgatgtacgggcccgaattgcccatcaagatgtcgacatctcgtttatcgcagtcaaagcagttgaggcttggtttcttgccgattcagaggcaatgaaaaaatggcttaaagtagacacatttaatgaagagttacctgaagctacaactgaaatgccatgggatcgtttaaaagtaatttcacgcgagctaggaaaacagggaccgggaagttctaaaaccgcatttgccaggagaatggtaacgcatcacggttttgatattcagagttctgccagacaccctgcttgccctagcgctcatgaactggtcgaatggtttgagaatcaataa

SEQ ID NO: 26888 - DNA, 2598 bp, Escherichia coli
atgcaatttaaagaactggaatcagggcttcgtcagaagtttaccgacaaccgtatcgtcttctggcacgacccggaacaacgcttcactgattcaattaatgagctggatctcgacaatgtcacgctgctggatatgcgtggcgtttctgtgctcgcaacaaaaaaacgactcgaaatcgacgagcctgagcagaaatttttactctatttcacctgtgaggttcctgctcgcgagcaggactggttgctggatatccgcctctatagtaccgaattccacgctgattatgcggcgatcaccctgaattctctgggtatcccgcaactcggtttacgcgaacatattcagcttcgcaaagccttctttaccgttaagcgaactcagatcctgaagggatgggtcaccgagcgcgaaacggaaaactctctcgataagaaaatgctggcggtggtggtcggggccagtaccttcgaaaccaaagaaatactatttgctttggttcagcagtttgtcgcagcacggcagcaagatgatagcgcactcgagaacactttcgccgtactgacgaagcttggcctggatgaggtactttgggaaattcttcgccttgagttgggataccagtctgaatctccttcaatggaaaatctgcttctgaaactgttctgtaccgatctctgggcgcagggtgatgaagcacatcgtgactggttgagtaaaaatgtgctggctaccgcggctggtcgggcctcgtcactggcctttatgggggcgtggcgcaacgatcgtcgctataaagtagaatacgattactgtgcagaggatttgcagcagacgctccagccaaaagaacactacaactacagctcaccatatacactggcaaaatgtgaaaccttcgaggctattgagcaacttattatccgtggtctggtgacacagttgcaggaagagagcaccactctggacagagatgcgtttaaagcgttggtttcagagcgcagtgcgaaatactggagccaaacccgcccagagtatctttctatctggaatgctattcgtcaggcagaacgcttgctgaatttgcgtaaccgttacaccgacgggtttaatttccccgatacaggtgcgttctggaaggcctattgtgacgaaatttatcgcttcgatcagacctatcgtttgttcaatgaatatgctgcaccagtgcacagcaaaggggcgatgatcctgcatgaactggataaattcatcgaagagttatacagcaattggtatctgactgaactaagtcgcggctggaacaaactgctggaagcggaaaaccgtatgcaggcctggcagtttagcggcatacccctgcagcgcaatttctataaagagaatgttaaacgtcagtttgacacctcgcaggtcaaacgtgtttttgtcgtgatctcggatgcattgcgctacgaagtggcggaagagctgggcaggcatatcaactatgagaagcacttcagtgcagagctgcgctcccagaccggagtgctcccaagctatacccaactgggcatggccgcactgttgcctcatgagtcgttgagctatcttcctgataattctggtgtagtatacgccgatgggatgtccacttccgggtttgaaaaaagagccgctattcttgcgaaggtgaatggtgtagcgctgaaagcaaaggacttgcagaacgccaataaccaggaagtgaacgagcaaatccgcaacgcttccgtagtttatatctggcacgacactatagatgccatgggtgataaggctgcaacggaagataaaacgtttgaggcctgccgaagtgcaatcactgagctaaaagatctggtttcacgccttcgtagccgatttaatgccagccgaatttttgttaccgccgatcacgggttcctgttccaacaacaagcgctggtggagcaggataaaacgaagctggaaagtaaagccaaagacacgattgaagcgaataagcgttttattgtaggtcatcaactgcctgaaagtgaattttgctggcacggcaaactggctgatactgcaggcgcaagcgatgaaagtgaattcctgttacccaaaggagtacagcgtttccacttcatagggggggctcgtttcgttcatggcggagccatgctgcaggaagtgtgtgttcctgtgttgaagattcgcgcgcttgaaaagaaagcggctgagaagcaaccccagcggcagcccgtgtccgtcgttgcgcgggatcaggtgatcaaactggttaacagcattgataaaattggttttattcagacttcggcagtgaatgatttaaatgagccgcgcacgctgaatatctttatcgtcgatgaaaacaaccaggtcgtctccggcacggaaacagtatgcttcgacagtgataacgaagatatgggtaaacgcacccgcgatgtaaccatgaaactcatggggacggcattcaatcgtaaaaacaagtatgttcttatcctggagaatgcggacagcgcaacagagtatggtcgctacccgatcacgatcgacctggcatttcaggatgacttcttttaa

SEQ ID NO: 26889 - DNA, 372 bp, Escherichia coli
atgcatgatgcgctggcctgtggccgtcgttttcgcacgttcaatgttattgatgactttaatcgtgaggcgttatcgattgaaatcgatctgaatctgccatctctgcgggtggtccgtgtacttgacaggatcgcggcaaaccgcgcttatccggtcatgctgcgcatggataatggtccggaatttatctctctggcgctggctgaatgggcagagatacacgcagtaaaactggagttcatccagccgggtaagccgacgcagaacgctttcattgagcgttttaacaggatataccgtacagaaatactcgatttttatctgttcagaacgctgaatgaagtacgggaaattacggagaaatggtaa

SEQ ID NO: 26890 - DNA, 267 bp, Escherichia coli
atgcccggaggtgtctggctagagataacgactgagaaaaaaatcgctagatacctcgtagatcagataatccaacgaacagatctagcattcattgttgacacagacgaggcattctttcggtcagaagatgatgtccgtttaaatgcgaataaactggtaaatgattacgatatttactctatcgtcatgactacggacctctttcatgattacgcctgccaacaaataacacgcgcgcatcatgcccagagaaatttcgtctga

SEQ ID NO: 26891 - DNA, 273 bp, Escherichia coli
atgatggaagatcttaaaaaaacgatccgactgcgctgtgtattctgccgttcggaacagttcgccttaccttacgagggttactcccccccaagtcatagctttgtcgtttgtgccaactgcgggagggaatacgacgtcacatctctgctcatcgttgctaaatcgaaagggatggaaatagctgaagagtatgctgatgaactagttgaacagatgacgaaagatctgtttaaaaattttaaaaacagtaaattcataaagataaagtaa

SEQ ID NO: 26892 - DNA, 303 bp, Escherichia coli
ttgacagaagagggtcagagtcgtgctatatcaatcaaacacggaaaaaatcgctcttacgagttaggggccagcatgcaaatcgcaacgttaaatgttcatgggcctgcacaggttggtaacggtaatacgcaaaacattcacaatgtatttaatcaattacttcagcagatcgagaaatcttccgcttctgatgaagaaaaacaggaagccaaaaaacgcctggcgaaatttttggaacatcctttggttggttctattgtcggcggtcttgctggttcccttcctggtctaatgggatga

SEQ ID NO: 26893 - DNA, 1683 bp, Escherichia coli
atggccaaacagtttatgttaatggaaccaaaaaatgagaacttcaatgaattaattggagggtcaaataagtacattgttcctagattccagcgagactatgcttgggatgtagaacaatgggaggacctttggagtgatgttacagcacttgatgatgaaggttttcattatatgggatatatagttcttcaacaaaaagaacagtatcaacatgaggtcattgatggtcaacaacgattagtaaccttgtcgattatagttctagcagccatgaaagccattaaaaacttgatagataaaggagaggaggttgaacaaaacacagagcgacttgatgcaataacaaagacatttgtgggtaacaaaaacttcgtttcattaaaggtggttagcaagctagatttaaatagaaataataaaagatattttcaaagcatctgttcaaacttagaagctcctaatactcgtggaactacatctacaaataagctactcaagaaatgctttgattttttccagaagaaggagttcggtaataccggcgctgagatcgcacagtttattgccgatttttcttcgagtatggtttttacaaaaatagttgttcaagatgatttaaatgcatacaaagtatttgaaactttaaatgcgagaggagtccagttatccacgccagatctcttaaaaaactatttgttttcgatagtaactaaggatgagaaaatcggagatgaggaattagatgagttagatgagcaatggtcggagattatcgatcagttgggagaaagcaatgtttctgattacattaggtatcatcataattctcatagaaaaatggtcacaaaaaataatttatacacttcaatgagaaaagtaattacaacccctaaagaagcatacgattatttaagatcactgataaattccgcacctatttatgcatcattgattaacccgaatgattcatggtgggcagagcaagatactaaatacaagaaggccattcattatctgaacggcattaggctctttaatattagacagccattaacagtattgctatcagcttttaatcaattcaatccagatgagttcgtcagcctgactcgttatttatatattttatcaattagatacaatgttatttgtcatttatcgccaagtgaacaagaaagcatgtataatcaaattgcgattaagatctccaataaggaatacaagagagctagcaatgtgaaaaatggggaggagtttaagaggttatatcctgatgataacgtgttctttaatgcttttgaatttcatcgaatgccaagtagacaaacagccaaaaaaattagatttctcttggctgaaattgagcaatatcttggtaataattgcgatcatgaaaaagttacactcgaacatatttgtccatttaacccagagaaagggtggtgcaattcgtttggagagggggttaatgacgtaaaggataggttaggaaatatggttttgatggataaggataatctaaaaagagcttcatttgaagtaaagaaaaatgaatatggaaaatcaaagtataaattagcggctaagattacacagtatcctgaatggaatttagaggctgtcaatgattttcaaaaatggatgtcggaacaagcagtaaatgtatggaaagttggttaa

SEQ ID NO: 26894 - DNA, 1050 bp, Escherichia coli
atgggatttatttcacaactattcaatttgcttacctccaggataacttctgcaaaaacaatgacgccttcaagtttgcatgagttaacagctaacataactcctaaactcaagaaacaaaacggaaatatatcaatcgaaaacgattggcttactattgattctccttatttttttggacaggcgtatctgtctgcaaacaaacattgggttgtaggctgtagtgactttgatggcaatggaaggggggggcaccgggaaagtggatttggaacagttgttttagttaataaaccaacttttcgtatccttcataagctcagaactattgcccgaccatttaatgctgctgtcgctgacacaggtgattatattgttcatgacgctggatttggttctgcgctgcaagctgatttgattgctattgatgttgaaggaaatgaaaagtttagacgtcattatgaagcaaatatctataatatcggaatttctcattgtggtaaatacgcatcggttcagacagccgcagcgcccggtaaagatggaaatatccttgaggtaataaatctgtggtcaaaaacaacaatattttccattaaacctgagtatggatgggctgatagttatttcttcgatctcgatgaaaatggggggctaagatcgctgaaagtgaaatgcaaaaatattggatacttcagatacactgccatcggtattcccattgacgtggaagcgtataaagatgcttgtctatataaaggaaatttcaaccttaaagtagaggccgcgagagcgcttttaagagaacatcccagtgagaagaatgctcaaaaagcattgaaagcaattgaaatggctcttaatgaaggagcgaaagaccgaactgactgggctgcagccgcatttcgcatcaaaggtgaagcaaatgatttacttggtaactttagtgatgctcttgatgcctatgaaaaagctttgagctttaatccaaaaataggggttcagagacgagttaatgctctgcgtaaaaaattacagagattaaaataa

SEQ ID NO: 26895 - DNA, 153 bp, Escherichia coli; identical to SEQ ID NO: 6412

SEQ ID NO: 26896 - DNA, 153 bp, Escherichia coli; identical to SEQ ID NO: 6412

SEQ ID NO: 26897 - DNA, 744 bp, Escherichia coli
gtgaacgccttatccggcctacaaaaatcttgccaattcaatatattgcaggaccacgtaggcctgataagcgtagcgcatcaggcagttttgcgtttgtcatcattctctaatatggtcgacatgaaaactacgcatacctccctcccctttgtaggacatacgctgcattttgttgagtttgatccggcgagttttcgcgagcaggatttactctggctgccgcactacgcgcaactgcaacacgctggacgtaaacgtaaaacagagcatttagccggacggatcgctgcagtttatgcgctgcgggaatatggctataaatgtgtgcccgcaatcggcgagctacgccaacctgtgtggcctgcggaggtatacggcagtattagccactgtggggctacggcattagccgtggtatctcgtcaaccgattggcattgatatcgaagagattttctctgtacaaaccgcaagagaattgacagacaacattattacaccagcagaacacgagcgactcgcagaatgcggtttaaccttttctctggcgctgacactggcattttccgccaaagagagcgcatttaaggcaagcaagatacaggccgctcaaggttttctggattatcaaataattagctggaataaacagcagctcatcattcgactagaggatgagcagtttgctgtgcactggcagataaaagaaaaaatagtcataacgctgtgccaacacgattaa

SEQ ID NO: 26898 - DNA, 1203 bp, Escherichia coli
gtgacggcgttaaaagtaggaagtgagagctggtggcagtcgaaacatggcccggaatggcagcgtctgaatgacgaaatgtttgaggtcactttccggtggcgtgatccccagggttctgaagaatactcgacgataaagcgcgtatgggtctacatcactggtgtgaccgatcaccatcagaacagccagccccagtcgatgcagcgaattgcaggcaccaacgtctggcagtggacgacacaacttaatgccaactggcgcggcagctactgttttattcccaccgaacgcgatgacattttttctgcaccatcccccgatcgcctcgaattacgtgaaggctggcgaaaactattaccccaggcgatagccgatccgctgaatccacaaagctggaaaggcgggcgagggcacgctgtttctgcactcgaaatgccgcaagcgcccctacaaccgggatgggattgtccgcaagcgccagaaacacctgccaaagaaattatctggaaaagtgagcggttgaaaaattcacgccgtgtatggatttttaccactggcgatgcaacagcaggagaacgtccgctggcagttttgctcgatggcgaattttgggcgcagagtatgcctgtctggcctgtgctgacttcgttgacccatcgtcagcaacttcctccagccgtgtatgtgttgatcgacgctattgacaccacgcaccgcgcccacgaactgccgtgtaatgcggatttctggctggcagtacagcaagagttattacccctggtgaaagctattgccccttttagcgatcgcgccgatcgcaccgtggtcgccgggcagagttttggtgggctttccgcgctgtatgccggactgcactggcctgaacgctttggctgtgtattaagccagtcaggatcgtactggtggccgcatcggggcgggcagcaagaaggtgttttacttgagcaacttaaagctggtcaagttagtgccgaaggtctgcgcattgtgctggaagcgggtattcgcgagccgatgatcatgcaggccaatcaggcgctgtatgcgcaattacaccccataaaagaatccattttctggcgtcaggttgacggcggacatgatgcgctttgttggcgcggtggcttgatgcaggggctaatcgacctctggcaaccacttttccatgacaggagttga

SEQ ID NO: 26899 - DNA, 219 bp, Escherichia coli
atggcattcagtaatcccttcgatgatccgcagggagcgttttacattttgcgcaatgcgcaggggcaattcagtctgtggccgcaacaatgcgccttaccggcaggctgggacgttgtgtgtcagccgcagtcacaggcgtcctgccagcagtggctggaagcccactggcgtactctgacaccggcgaatttcacccagttgcaggaggcacaatga

SEQ ID NO: 26900 - DNA, 3882 bp, Escherichia coli
atgagccagcatttacctttggtcgccgcacagcccggcatctggatggcagaaaaactgtcggatttaccctccgcctggagcgtggcgcattacgttgagttaaccggagaggttgatgcgccattactggcccgcgcggtggttgccggattagcgcaagcagatacgctgcggatgcgttttacggaagataacggcgaagtctggcagtgggtcgatgatgcgctgacgttcgaactgccagaaactatcgacctgcgaaccaacattgatccgcacggtactgcgcagtcattaatgcaggcggatttgcaacaagatctgcgcgtcgatagcggtaaaccactggtctttcatcagttgatacaggtggcggataaccgctggtactggtatcagcgttatcaccatttgctggtcgatggcttcagtttcccggccattacccgccagatcgccaatatttactgcgcatggctgcgtggcgaaccaacgcctgcttcgccgtttacgcctttcgctgatgtagtggaagagtaccagcaataccgcgaaagcgaagcctggcagcgtgatgcggcattctgggcggaacagcgtcgtcaactgccaccgcccgcgtcactttctccggcacctttaccggggcgcagcgcttcggcagatattttgcgcctgaaactggaatttaccgacggggaattccgccagctggctacgcaactttcaggtgtgcagcgtaccgatttagcccttgcgctgacggctttgtggctggggcgattgtgcaaccgcatggactacgctgccggatttatctttatgcgtcgactgggctcggcggcgctgacggctaccggacccgtgctcaacgttttaccgttgggtattcacattgcggcgcaagaaacgctgccgcaactggcaacccgactggcagcacaactgaaaaaaatgcgccgccatcaacgctacgacgccgaacaaattgtccgtgacagtgggcgagcggcaggtgatgaaccgctgtttggtccggtactcaatatcaaggtatttgattaccaactggatattcctgatgttcaggcgcaaacccataccctggcaaccggtccggttaatgaccttgagctggccctgttcccggatgaacacggtgatttgagtattgagatcatcgccaataaacagcgttacgctgagccaacgttaatccagcatgctgaacgcctgaaaatgctgattgcccagttcgccgcggatccggtgctgttgtgcggcgatgttgatattatgctgccagaagagtatgcacagctggcgcagatcaacgccactcaggttgagattccagaaaccacgctgagcgcgctggtggcagaacaagcggcaaaaacaccgcatgctccggcgctggcagatgcgcgttacctgttcagctatcgggaaatgcgcgagcaggtggtggcgctggcgaatctgctgcgtgagcgcggcgttaaaccaggcgacagcgtggcggtggcgctaccgcgctcggtctttttgactctggcgctacatgcaattgttgaggctggtgcggcctggttaccgctggataccggctatccggacgaacgcctgaaaatgatgctggaagatgcgcgtccgtcgctgttaatcaccaccgacgatcaactgccgcgctttgccgatgttccagatttaaccagcctttgctataacgccccgcttacaccgcagggcagtgcgccgctgaaactttcacaaccgcaccacacggcttatatcatctttacctctggctccaccggcagaccgaaaggggtaatggtcgggcagacggctatcgttaaccgcctgctttggatgcaaaaccactacccgcttacaggcgaagatgtcgttgcccaaaaaacgccgtgcagttttgatgtctcggtgtgggagtttttctggccgtttatcgcaggggcaaaactggtgatggctgaaccggaagcgcaccgcgacccgctcgctatgcagcaattctttgccgaatatggtgtaacgaccacgcactttgtgccgtcgatgctggcagcatttgttgcatcgctgactccgcaaaccgctcgtcagaattgcgcgacgttgaaacaggttttctgtagtggtgaggccttacccgctgatttatgccgcgaatggcaacagttaaccagcgtgccgttgcataatctatatggcccgacggaagcggcggtagatgtcagctggtatccggcttttggcgaggaactggcacaggtgcgcggcagcagtgtgccgattggttatccggtgtggaatacaggcctacgtattcttgatgcgatgatgcatccggtgccgccgggtgtggcgggagatctctatctcaccggtattcaactggcgcaggggtatcttggacgacccgatctgaccgccagccgctttattgccgatccttttgcccctggcgaacggatgtaccgtaccggagacgttgcccgctggctggataacggcgcggtggagtacctcgggcgcagtgacgatcagctaaaaattcgcgggcagcgtatcgaactgggcgaaatcgatcgcgtgatgcaggcactgccggatgtcgaacaggccgtgacccacgcctgcgtcattaaccaggctgccgcaacgggaggcgatgcgcgtcagttggttgggtatctggtgtcgcaatcaggcctgccgctggataccactgcattgcaggcgcagttgcgcgaaacattgccaccgcatatggtgcccgtggttctgctgcaacttccgcagttgccgcttagcgccaacggcaagctggatcgcaaagccttaccgttgcctgaactgaaggcacaagcgccggggcgtgcgccgaaagcgggcagtgaaacgattatcgccgcggcattctcgtcgttgctgggttgtgacgtgcaggatgccgatgctgatttctttgcgcttggcggtcattcgctactggcaatgaaactggctgcgcagttaagtcggcagtttgcccgtcaggtgacgccggggcaggtgatggtcgcatcaaccgtcgccaaactggcaacgattattgatggtgacgaggacagctcccggcgcatgggattcgaaaccattctgccgttgcgtgaaggtaatggcccgacgctgttttgtttccatcctgcgtccggttttgcctggcagttcagcgtgctctcgcgttatctcgatccacaatggtcgattatcggcattcagtcgccgcgccccaatggtcccatgcagaccgcggcaaatctggatgaagtctgcgaagcgcatctggcaacgttacttgagcatcaaccgcacggcccttattacctgctgggttattcgctgggcggtacgctggcgcagggtattgcggcgcgactgcgtgcccgtggcgaacaggtggcatttcttggcttgctggatacctggccgccagaaacgcaaaactggcaggaaaaagaggctaatggcctggacccggaagtgctggcggagattaaccgcgagcgcgaggccttcctggcggcacaacagggaagtacttcaacggatttgtttaccaccattgaaggcaactacgctgatgctgtgcgcctgctgacgactgctcatagcgtaccgtttgaaggtaaagcgacgctgtttgttgctgaacgcacacttcaggaaggtatgaatcccgaacgcgcctggtcgccgtggattgcggagctggatatctatcgtcaggattgtgcgcatgtggatattatctctccaggagcgtttgaaaaaattgggccgattattcgcgctacgctaaacaggtaa

SEQ ID NO: 26901 - DNA, 1134 bp, Escherichia coli
atgtcatcactgaatattaaacagggaagtgacgctcattttcccgagtatcctctggcgtcgcccagtaataatgaagttgatttacttaatctaattgaagttttatggcgggccaaaaaaacggtcatggcggtcgtttttgcgtttgcctgcgcaggtttactgatctctttcatcctgccgcaaaaatggaccagcgcggcggttgtcacgcctccagaacctgttcagtggcaggcgcttgagaaaacattcactaagcttcgtgtgctggatctggatatcaaaattgatcgtacagaagcatttaacctgtttatcaagaagtttcagtcggttagcttgctggaagagtacctgcgctcaacaccttatgtgatggaccaattaaaagaggcgaaaatcgacgaactggatttgcatcgcgcaattgtcgcattgagcgaaaaaatgaaagcggttgatgacaatgccagtaagaaaaaagatgagtctgcattgtatacttcctggacgctaagtttcaccgcacccaccagtgaagaggcacagaaagtgttggccgggtatatcgattatatctctgcgttggtggtgaaagagtcgatagaaaacgtccgtaataaactggagatcaaaacccagtttgaaaaagaaaaactggctcaggatcgcattaaaacgaaaaatcaacttgatgcaaacattcagcgcctcaattattcactcgacattgccaacgcggcaggaattaaaaagcccgtatacagtaatggtcaggccgttaaagatgaccccgatttctctatttctctcggcgcagacggtattgaacgcaaactggaaattgaaaaagcagtcactgacgttgcggaattgaacggtgaattacgtaatcgtcagtatctagtcgagcaattaacaaaaacaaatgtcaacgatgtgaattttacaccgtttaaatatcagttgcgtccgtcattacccgtaaaaaaagacggtccgggtaaggcgattattgtgatcctttctgcgttgatcggcggtatagtggcttgtggtgacgtgctattgcgccatgcgatggcatccagaaaacaggatgccataatggcagaccacttagtttaa

SEQ ID NO: 26902 - DNA, 816 bp, Escherichia coli
atgaccgaatcagtagcccgtttgcgcggcgaacagttaaccctcggatatggcaaatataccgttgcggaaaatctgactgtagaaatacctgatggtcacttcacggcaattatcgggccaaatggctgcggtaaatccacgttgctgcgtaccttaagccgcctgatgacgcctgctcacgggcatgtctggctggatggcgagcacattcaacattacgccagtaaagaggttgcacgccggattggcctgttggcgcaaaacgccaccacgccgggagatatcaccgtgcaggagctggtggcgcgtgggcgttacccgcatcaaccgctgtttacccgctggcgcaaagaagatgaagacgcggtaacgaaagcgatgcaggccacgggaatcactcatctggcagatcaaagcgtggataccctttctggcggacaacgccagcgagcgtggatagcaatggtgctggcccaggaaacggcaattatgctgctcgatgaacccacgacctggctggatatcagtcatcagattgatttgctggaactgttaagcgaactgaaccgcgagaaaggctataccctggcggcggtgctgcacgatcttaatcaggcctgtcgttacgccagccatttgattgcattgcgggaagggaaaattgttgctcagggagcgccgaaggagattgtcactgctgaactgatcgagcgcatttatggtctgcgctgcatgattattgacgatccggttgccggaacgccgctcgtggtgccgctcggacgaacgacaccttcaaccgcgaagatttaa

SEQ ID NO: 26903 - DNA, 993 bp, Escherichia coli
atgatttacgtctctcgccgattaattatcacctgtttgctgctggtttccgcctgtgtggttgcaggtatctggggattacgcagcggtgccatcacgttggaaacctcgcaggtattcgccgcgctgatgggcgatgcgccgcgcagtatgacgatggtggtcaccgaatggcgtttaccacgcgtgctgatggcgctgttgattggcgcggcgctgggcgtcagcggcgcgatttttcagtcgctgatgcgtaacccgctcggcagccctgacgtaatgggctttaacaccggggcatggagcggcgtactggtggcgatggtgctgtttggtcaggatctgacggctatcgcgctggcagcaatggcggggggtattgtcacctcgctgttggtctggctgctcgcctggcgtaacggtatcgacacctttcggttgattattatcggtatcggtgttcgcgccatgctggtggcctttaatacctggctgttgctgaaagcgtctttagaaacggcgctaacagcgggtttgtggaatgccggatcgctcaacggcctgacgtgggcaaaaacctcaccttccgcgccaatcattatattgatgctcattgccgcctccttgctggtgcggcgaatgcgcttgctggaaatgggcgatgataccgcatgtgcgctgggcgtcagcgtcgaacgttcgcggctgttaatgatgctggtcgccgtagtgcttaccgctgcggcaacagcgcttgccgggccgatttcctttattgctttagtcgcgccgcacattgcccgccgcattagtggcaccgctcgctgggggctaacccaggcggcgctgtgcggggcgttgttactgctggtggccgatctctgcgcccaactactgtttatgccgtatcaacttccggttggcgtcgttaccgtcagcctcggtggtatttaccttatcgtcttgttaattcaggagtctcgcaaaaaatga

SEQ ID NO: 26904 - DNA, 1005 bp, Escherichia coli
atgtctggttctgttgccgtgacacgcgccattgccgtgcccggattgctgttattactgattatcgcgacggcattaagcctgctcattggggcaaaatcactccccgcttccgtagtgctggaggccctctccggcacctgccagagcgccgactgcaccatcgtgctcgacgcgcggctgccgcgcacccttgccggtttactggcaggcggcgcgcttgggcttgccggggcgttaatgcaaaccctcacccgaaacccacttgccgaccccggcttgcttggcgtaaacgccggagccagctttgccattgtgctgggtgcggcgctgtttggttactcatccgcgcaggaacaactggcgatggccttcgccggggcgctggtggcctcgttgattgttgcctttaccggcagccagggcggcgggcagttaagtccggtgcgtttaaccctggcgggcgtggcgctggcggcggtgctggaagggctgaccagcggcatcgccctgcttaatcctgacgtctacgatcaactgcgtttctggcaagccggttcgctggatattcgcaatctatataccttaaaagttgtgctgatcccggtgctgatcgccggagcaaccgcgctattactgagccgcgcgctgaacagtttaagcctcggcagtgacaccgcgacagcgctgggcagccgcgtggcgcgcacacagttgattggtctgctggcgattaccgtgctttgtggtagtgcgacggcggtagttggcccgattgcctttattggcctgatgatgccgcatatggcgcgttggttggttggagcagatcatcgctggtcgctgcccgtcacgctacttgccacccctgccctgctgctgtttgccgatatcatcgggcgggtgattgtgcccggcgaactgcgagtttccgtggtcagtgcgtttattggtgcaccggtgctgatcttcctcgtgcgacgtaaaacgcgaggtggcgcatga

SEQ ID NO: 26905 - DNA, 1251 bp, Escherichia coli
atgaataaacaatcctggctgcttaacctcagcctgttgaaaacgcacccggcgtttcgcgcagtattcctcgctcgttttatctcaattgtgtctctgggtttgctcggcgtcgcggtaccggtgcagatccagataatgacgcattctacctggcaggtggggctttcggtgacgctgaccggcggcgcgatgtttgttggcctgatggtcggcggtgtgctggcggatcgctatgagcgcaaaaaagtgattttgctggcgcgcggcacctgtggcattggcttcattggactgtgccttaatgcactgctgccggagccgtcattgctggcaatctatttacttggtttatgggatggttttttcgcatcacttggcgttacggcgctactggcggcgacacctgcactggtagggcgtgaaaacttaatgcaggccggggcgatcaccatgttgactgtgcgcctgggatcggtgatttcgcccatgattggcggtttactgctggcgaccggaggcgtagcctggaactacgggctggcggcggcgggcacgtttattaccttgctaccgttgttaagccttccggcgttaccaccaccaccgcagccgcgtgagcatccgttgaaatcattactggcaggatttcgttttctgctcgccagcccgctggtaggagggattgcgctgttgggtggtttattgacgatggcgagcgcggtgcgggtactgtatccggcgctggctgacaactggcagatgtcggcggcacagattggttttctctatgcggcgatcccgctcggcgcggctattggtgcgttaaccagcgggaagctggcacatagtgcgcgaccagggttattgatgctgctctccacgctgggatcgttcctcgccattggtctgtttggcctgatgccgatgtggattttaggcgtggtttgtctggcgctgttcggctggttgagtgcggtcagctcgttgctgcaatacacaatgctgcaaacgcaaaccccggaagcgatgttagggcggattaacggtttgtggacggcgcaaaacgtgacgggcgatgccataggcgcggcgctgttaggcggtctgggagcgatgatgacaccggttgcttccgcaagcgcgagcggttttggtttgttgattatcggcgtgttgttattgctggtgctggtggagttgcggcgttttcgccagacgccgccgcaggtgacagcgtccgacagttaa

SEQ ID NO: 26906 - DNA, 957 bp, Escherichia coli
gtgagactcgccccgctctaccgcaacgcccttctattaacaggacttttgctttcaggaatagccgcagttcaggctgccgactggccgcgtcagattactgacagccggggcactcataccctggaaagccagccgcagcgtattgtttccaccagcgtcaccctgaccggctcactgctggcgattgatgctccggtgatcgccagcggcgcgaccacgccgaataaccgcgtagcggatgaccagggctttttacgccagtggagcaaggtggcgaaagaacgcaaactgcaacggctctatatcggcgaaccgagcgccgaagccgttgccgcgcaaatgccggatctgattttaattagcgcaaccggcggtgattcggcgctggcgctgtatgatcagctttccaccatcgccccgacattaatcatcaattacgacgacaaaagctggcaggcgctgttaacgcaacttggcgaaattaccgggcatgagaaacaagcggcagagcggattgcgcagtttgataagcaactggcggcggcgaaagagcaaatcaaattaccgccgcagccggtcactgccattgtctatactgccgctgcacacagtgccaatctctggacgccggaatcagcacaagggcagatgctggaacaactcggctttacgctggcgaagttacccgcagggttaaatgccagccaaagccagggtaaacgccatgacatcattcagcttggtggggaaaatctggctgcagggttaaatggcgagtcactattcctgttcgccggtgatcagaaagatgccgatgcgatttatgccaatccgctgctcgcgcacctgcctgcagtacaaaacaagcaggtttatgcgctgggaaccgagacgttccgactggattactacagcgccatgcaagtgctggaacgacttaaggcgctgttttaa

SEQ ID NO: 26907 - DNA, 1176 bp, Escherichia coli
atggatacgtcactggctgaggaagtacagcagaccatggcaacacttgcgcccaatcgctttttctttatgtcgccgtaccgcagttttacgacgtcaggatgtttcgcccgcttcgatgaaccggctgtgaacggggattcacccgacagtcccttccagcaaaaactcgccgcgctgtttgccgatgccaaagcgcagggcatcaaaaatccggtgatggtcggggcgattcccttcgatccacgtcagccttcatcgctgtatattcccgagtcctggcagtcgttctcccgccaggaaaaacaatcttcagcccgccgttttacccgcagccagtcgctgaacgtggtggaacgccaggcaattccggaacaagccacgtttgaacagatggttgctcgcgccgccgcacttaccgccacgccgcaggtcgacaaagtggtgttgtcacggttgattgatatcaccactgacgccgccattgatagtggcgtattgctggaacggttgattgcgcaaaacccggttagttacaacttccatgtcccgctggctgatggtggcgttctgctgggggccagcccggaactgctgctacgtaaagacggcgagcgttttagctccattccgttagccggttccgcgcgtcgtcagccggatgaagtgctcgatcgcgaagcgggtaatcgtctgctggcgtcagaaaaagatcgccatgaacatgaactggtgactcaggcgatgaaagaggtactgcgcgaacgaagtagtgagttacacgtcccttcttctccacaactgatcaccacgccgacgctgtggcatctcgcaactccctttgaaggtaaagcgaattcgcatgagaacgcactgacgctggcctgtctgctgcatccgacccccgcgctgagcggtttcccgcatcaggccgcgacccaggttattgctgaactggagccgttcgaccgcgaactgtttggcggcattgtgggttggtgtgacagcgaaggtaacggcgagtgggtggtgaccatccgctgcgcgaagctgcgggaaaatcaggtgcgtctgtttgccggagcggggattgtgcctgcgtcgtcaccgttgggtgagtggcgcgaaacaggcgtcaaactttctaccatgttgaacgtttttggattgcattaa

SEQ ID NO: 26908 - DNA, 1611 bp, Escherichia coli
atgagcattccatttacccgctggccggaagagtttgcccgtcgctatcgggaaaaaggctactggcaggatttgccgctgaccgacattctgacgcgacatgctgcgagtgacagcatcgcggttatcgacggcgagcggcagttgagttaccgggagctgaatcaggcggcggataacctcgcgtgtagtttacgccgtcagggcattaaacctggtgaaaccgcgctggtacaactgggtaacgtcgctgaactttacattacctttttcgcgctgctgaaactgggcgttgcgccggtgctggcgctgttcagccatcagcgtagtgaactgaacgcctatgccagccagattgaaccggcgttactgattgccgatcgccaacatgcgctgtttagcggggatgattttctcaacacatttgttgcagagcattcttccattcgcgtggtgcagctgctcaacgacagcggtgagcataacttgcaggatgcgattaaccatccggctggggattttactgccacgccatctcctgctgatgaagtggcctatttccagctttccggcggcaccaccggcactccgaaactgatcccgcgcactcataacgactactactacagcgtgcgtcgtagcgtcgagatttgtcagttcacacaacagacgcgctacctgtgcgcgattccggcggctcataactacgccatgagttcgccgggatcgttgggggtatttctcgctggcggcactgtcgttctggctgccgaccccagcgccacgctttgcttcccattgattgaaaaacatcaggtcaacgttaccgcgctggtgccgcccgcagtcagcctgtggttgcaggcactggctgaaggcgaaagccgggcgcagcttgcctcgctgaaactgttacaggtcggtggtgcacgtctttctgccacgcttgcggcgcgtattcccgcagagattggctgccagttacagcaggtattcggcatggcggaaggactagtgaactacacccgacttgatgatagcgcggagaaaattatccatacccagggttacccaatgtgtccggacgatgaagtgtgggttgccgatgccgaaggaaatccactgccgcaaggggaagttggacgcctgatgacccgcggtccgtataccttccgtggctattacaaaagcccgcagcacaatgccagcgcctttgatgccaacggtttttactgttccggcgatctgatctctattgatccagagggttacatcactgtgcaggggcgcgagaaagatcagatcaaccgtggcggcgagaagatcgctgccgaagagatcgaaaacctgctgctgcgccatccggcggtgatctacgccgcactggtgagcatggaagatgagctgatgggcgaaaaaagctgtgcttatctggtggtaaaagagccgctgcgcgcggtgcaggtgcgtcgtttcctgcgtgaacagggtattgccgaatttaaattaccggatcgcgtggagtgtgtagattcacttccgctgacggcggtcgggaaagtcgataaaaaacaattacgtcagtggctggcgtcacgcgcatcagcctga

SEQ ID NO: 26909 - DNA, 858 bp, Escherichia coli
atggctattccaaaattacaggcttacgcactgccggagtctcacgatattccgcagaataaagtcgactgggcctttgaaccgcaacgtgccgcgttgttaatccatgatatgcaggactattttgtcagcttctggggcgagaactgcccgatgatggagcaggtgatcgcgaatattgcggcactacgcgactactgcaaacagcacaatatcccggtttattacaccgcccagccgaaagagcagagcgatgaagatcgggcgctgttgaatgatatgtgggggcctggcctgacccgttcgccggaacagcaaaaggtggtggatagcctgacgccagatgccgacgacacggtgctggtgaagtggcgctacagcgcgtttcatcgttccccgctggagcaaatgctgaaagagagtggacgtaaccagctgattattaccggggtatatgcccacattggctgtatgaccaccgcaaccgacgcatttatgcgcgatattaaaccgtttatggtggcagatgcgctggccgatttcagccgtgacgagcatttgatgtcgctgaaatatgtggccggacgttctggccgggtggtgatgaccgaagaattactgccagcacctatccccgccagcaaagcggcgctgcgtgaggtgatcctgccgttgctggacgagtccgatgaaccgttcgatgacgacaacctgatcgactacggtctggattcggtgcggatgatggcgctggcggcgcgctggcgcaaagtgcatggcgatatcgactttgtcatgctggcgaaaaacccgaccatcgacgcctggtggaagctactctcccgcgaggtgaaataa

SEQ ID NO: 26910 - DNA, 747 bp, Escherichia coli
atggatttcagcggtaaaaatgtctgggtaactggcgcggggaaaggtatcggctacgccacggcgctggcgtttgttgaggcgggagcgaaagttacaggttttgatcaagcgttcactcaggagcaatatccctttgcgaccgaagtgatggatgttgccgacgctgcgcaggtggcgcaggtatgtcagcgactgttagctgaaacggagcgactggacgtgctggtcaatgcggcgggaattttgcgcatgggcgcgaccgatcagctcagtaaggaggactggcagcagacttttgcggttaatgtcggcggtgcgtttaacctgttccagcagaccatgaaccagtttcgccgtcagcggggcggggcgattgttactgttgcgtccgacgccgcacacacgccgcgcattggtatgagtgcttatggcgcgtcgaaagcggcgctgaaaagcctggcgttgagcgttgggctggaactggcgggtagcggcgtgcgctgtaatgtggtttcgccaggctccaccgacaccgatatgcaacgcacgctgtgggtgagcgatgacgccgaagagcagcgtattcgcggctttggcgagcagtttaaacttggcattccgctggggaaaatcgcccgtccacaagagatcgccaacacgattttgttcctcgcctctgacctcgccagccatatcaccctacaggatattgtggtggatggcggctcgacgctgggggcataa

SEQ ID NO: 26911 - DNA, 414 bp, Escherichia coli
atgatctggaaacgccatttaacgctcgacgagctgaacgccaccagcgataacacaatggtggcgcatctgggaattgtgtatacccgtctgggcgatgatgtactcgaagccgaaatgccggttgatacccgtactcatcagccgtttggcctgctgcatggcggcgcgtcggcggcgctggcggaaaccctgggatcgatggccggatttatgatgacccgcgatggacagtgtgtggtgggcacggaacttaacgccacacatcatcgcccggtgtctgagggaaaggtgcgcggtgtctgccagccgctgcatcttggacgacaaaatcagagctgggaaatcgtcgttttcgatgaacaggggcggcgttgctgcacctgtcggctgggcacagcggttttgggatga

SEQ ID NO: 26912 - DNA, 2106 bp, Escherichia coli
atgaacaaatcagggaaatacctcgtctggacagtgctctctgtaatgggagcatttgctctgggatacattgctttaaatcgtggggaacagatcaacgcgctgtggattgtggtggcgtcggtctgtatctatctgatcgcttaccgtttttatgggctgtatatcgccaaaaatgtgctggcggttgacccgacgcgtatgacgccagcggtgcgccataacgacgggctggactatgtgccgacggacaaaaaagtgctgttcggtcaccattttgcggccattgccggagcaggtccgttggttgggccggtactggcggcgcaaatgggttacctgccagggatgatctggctgctcgctggggtggttctcgccggtgcggtgcaggatttcatggtgctgtttgtttctacgcgccgcgatggtcgctcgctgggtgagctggtcaaagaagagatggggccaaccgccggggtgatagcgctggtggcctgctttatgatcatggtcattatccttgccgtgctggcgatgatcgtggtgaaagctctgacccatagcccgtggggaacgtataccgttgcgttcactattccgctggcgctgtttatggggatctacctgcgctatctgcgtccggggcgtattggcgaagtgtcggtgattggcctggtgttcctgattttcgccattatctctggcggctgggtggcagaaagtccgacctgggcaccgtactttgactttaccggcgtgcagctgacctggatgctggtgggttacggttttgtggcggcggtgctgccggtgtggctgctgctggctccgcgtgactacctctcaaccttcctgaaaatcgggactatcgtcggtctggcggtgggcattttgattatgcgcccgacgctgaccatgccggcactgaccaaatttgttgatggcactggcccggtatggaccggtaacctgttcccgttcctgtttatcaccatcgcctgtggcgcggtgtctggcttccatgcactgatctcttccggcactacaccgaagatgctggcgaacgaagggcaggcgtgctttatcggctacggtgggatgttgatggaatccttcgtggcgattatggcgctggtttccgcctgtatcatcgatccgggtgtgtacttcgccatgaacagcccgatggcggtgctggctccggcagggacggcggatgtggttgcttctgccgcgcaggtggtgagtagctggggctttgcgattaccccggatacgctaaaccagattgccagcgaagtgggtgaacagtcgatcatttcccgtgcgggcggtgcgccgaccctggcggtggggatggcctacattctgcacggtgcgctgggcggcatgatggatgtggcgttctggtatcacttcgccattctgtttgaagcactgtttattctgacggcggtggatgcaggtacgcgtgctgcgcgctttatgttgcaggatctgctgggcgtggtgtctccgggcctgaaacggaccgattcactgcctgctaacctgctggcaacggcgctgtgcgtgctggcgtggggctacttcctgcatcagggcgtggtcgatccgctgggcggtattaacaccttgtggccgctgtttggtattgccaaccagatgctggcagggatggcgctgatgctctgtgctgtggtgctgttcaaaatgaaacgtcaacgttacgcctgggtggcgctggtaccaacggcctggctgctgatttgtaccctgaccgcaggctggcagaaagcgtttagcccggatgcgaaagtcggcttcctggcgattgctaacaagttccaggcaatgatcgacagcggcaatattccatcgcagtatactgagtcacagctggcgcaactggtgttcaacaaccgtcttgatgccgggttaaccatcttctttatggtggtcgtggtggttctggcactgttctcgattaagacggcactggcggcattgaaagagccgaagccaacggcgaaagaaacgccatatgagccaatgccggaaaatgtcgaggagatcgtggcgcaggcaaaaggcgcgcactaa

SEQ ID NO: 26913 - DNA, 198 bp, Escherichia coli
atgtttgattcactggcaaaagccggaaaatatttaggtcaggcggcgaagctgatgattggtatgcctgattacgacaactatgtcgaacatatgcgggttaaccatcccgatcaaacgccgatgacctacgaagagtttttccgtgagcggcaggacgcgcgctacggtggaaaaggcggcgcgcgctgctgctaa

SEQ ID NO: 26914 - DNA, 1089 bp, Escherichia coli
atgcctcacaatcctatccgcgtggtcgtcggcccggctaactacttttcacatctcggaagtttcaatcacctgcacgattttttcactgatgaacaactttctcgcgcggtgtggatctacggcgaacgcgccattgctgcggcgcaaacaaaacttccgccagcgtttgaactgccaggggcaaagcatattttgtttcgcggccattgcagcgaaagcgatgtacaacaactggcggctgagtccggtgacgatcgcagcgtggtgattggcgtcggcggcggcgcactgctcgacaccgcgaaagccctcgcccgccgtctcggtctgccgtttgttgccgttccgacgatcgccgccacctgcgccgcctggacaccgctctccgtctggtataacgatgccggacaggcgctgcattatgagattttcgacgacgccaattttatggtgctggtggagccagagattatcctcaatgcgccgcaagaatatctgctggcggggatcggtgacacgctggcgaaatggtatgaagcggtggtgctggctccgcaaccagaaacgttgccgctaaccgtgcggctggggatcaataatgcgcaggccattcgcgacgtcttgttaaacagtagcgaacaggcgctgagcgatcagcaaaaacaacagttaacgcaatcattttgcgatgtggtggatgctattattgctggtggtgggatggtcggtggtctgggcgatcgttttacgcgtgtggcggcggcccatgccgtgcataacggtctgaccgttttgccgcaaaccgagaagtttctccacggcaccaaagtcgcctacggaattctggtgcaaagcgccttgctgggtcaggatgatgtgctggcgcaattaacagaggcgtatcagcgttttcatctgccgactacgctggcggagctggaagtggatatcaataatcaggcggagatcgacaaagtgattgcccacaccttacgtccggtggaatccattcattacctgccggtcacgctgacaccagatacgttacgtgcagcgttcgaaaaagtggaatcgtttcaagcctga

SEQ ID NO: 26915 - DNA, 1161 bp, Escherichia coli
atgacaaataaccctctgattccacaaagcaaacttccacaacttggcaccactattttcacccggatgagcgcgctggcgcagcaacaccaggccattaacctgtcgcaaggctttcctgattttgatggtccgcgctatttgcaggagcggctggcgtaccatgttgaccagggggcaaaccaatacgcgcctatgactggcgtacaggccttgcgcgaggcgattgctcagaaaacggaacgtctgtatggctatcaaccggatgccgatagcgatatcaccgtaacggcaggggcgacggaagcgttatatgcagcgattaccgcattggtgcgcaatggtgatgaagtgatctgctttgatcccagctatgacagttacgcgcccgccatcgcgctttcggggggaatagtgaaacgtattgcactgcaaccaccgcattttcgcgtggactggcaggaatttgccgcattgttaagcgagcgcacccgactggtgatcctcaacaccccgcataaccccagtgcaactgtctggcagcaggctgatttcgccgctttgtggcaggcgatcgccgggcacgagatttttgtcattagcgatgaagtctacgagcacatcaatttttcacaacagggccatgccagcgtgctggcgcatccgcaattgcgtgagcgagcggtggcggtgtcatcgtttggcaagacctatcatatgaccggctggaaagtgggttattgcgttgcgcctgcgcccatcagcgccgagatccgcaaagtgcatcagtatctgaccttttcggtgaataccccggcacagttggcgcttgccgatatgctacgtgcagaacctgagcattatcttgcgttaccggacttttatcgccagaaacgcgatattctggtgaatgccttaagtgagagtcggctggagattttaccgtgcgaaggtacatactttttgctggtggattacagcgcggtttcttcgctagatgacgttaagttttgccagtggctgacgcgggagcacggtgtagcggcgatcccgctgtcggtattttgcgccgatcccttcccccataaactgattcgtctctgttttgccaagaaggaatcgacgttgctggcagcagctgaacgcctgcgccagctgtag

SEQ ID NO: 26916 - DNA, 630 bp, Escherichia coli
atgggggatactatgcaacaacgattaacgcaggatttaacccaatttctcgccagcttgccggaagatgatcgcatcaaagcgattaatgaaatccgcatggcgatccatcaggttagcccctttcgtgaagagccagtggattgcgttctgtgggttaaaaacagccaacttatgcctaatgattacaacccaaacaacgtggcaccacccgaaaaaaaactgctgaaaaaatccattgaaatagatggttttacccaacccattgtggtcacgcatacggataaaaatgccctggaaatcgtggatggttttcaccgccatgaaattggtaaaggctcatcatcgttaaaattacgcttaaaaggttatttgccggtgacctgtctggaaggtacgcgtaatcaacgcatcgccgcgactattcgtcataaccgcgctcgtggtcgccaccaaatcactgccatgtccgaaattgttcgtgaactcagccagttgggatgggacgataataaaattggcaaagagctgggaatggacagcgacgaagtgctgcgcctgaaacaaattaacggcctgcaagagttgtttgccgaccgtcaatattcccgtgcctggactgtcaaataa

SEQ ID NO: 26917 - DNA, 1221 bp, Escherichia coli
atgtctatttataaaatcccgcttccactgaatattctggaagctgcaaaagaacgtattacctggacacttaataccctaccccgtatctgtgtttctttttcgggtggtaaagattccggattaatgctgcatctgacagccgaaattgcccgacaaatgggcaaaaaaatctgcgttttgtttatcgactgggaagcgcagttctcatgcactattaactatgttcagtcattacgtgagttttacgccgatgtcatcgaagagttttactgggttgcgctcccgcttacgacgcaaaattccctttctcaataccaacccgaatggcagtgctgggaacctgatgtcgaatgggtgcgtcagcccccgcaagatgcgataaccgatcctgactttttctccttttaccagcctggcatgaccttcgaacaatttgtgcgtgagtttgctgaatggttttcacaaaaacgtccggcggcgatgatgatcggcatccgtgcagatgagtcctacaaccgttttgtcgccatcgccagtttaaataaacaacgttttgccgatgatatgccctggaccaccgccgcaccaggcggtcatagctggtacatttaccccatctacgactggaaagtggctgatatctggacctggtatgctaaccatcaacagctctgtaacccactgtataatataatgtatcaggcaggcgttcctctgcgtcatatgcgaatttgcgaaccttttggcccggagcaacggcaaggattatggctctatcacgttatcgaaccggatcgctgggctgctatgtgcgcacgagtcagcggggtaaaaagtggcggcatttacgccggacatgataatcatttttatggtcatcggaaaatcctcaagccagaacatttagactggcaagaatatgcattattgctgctcaatagcatgccggaaaaaacagctgagcattaccgcaataaaatcgccatttatttgcactggtatcagaaaaaaggcatcgaagttccacaaacccagcaaggggacattggcgcgaaagatatcccctcctggcggcgaatatgcaaagttttactcaataacgattactggtgccgggcattatcatttagtcctacgaaagcgaagaactatcagcgttataacgaacggataaaaggaaaacgtcaggaatgggggatactatgcaacaacgattaa

SEQ ID NO: 26918 - DNA, 903 bp, Escherichia coli
atggctaatctttatgatctaaaaaaatttgacctcaatttactggtcatatttgaatgtatttatcaacatctcagcattagtaaagcggcagaatcattatatataacgccctctgctgttagtcagtcattacaacgtttacgtgcgcaatttaatgacccgttattcattcgctcagggaaaggtatcgcgccgactacaacagggttaaacctgcatcaccatcttgagaaaaatctcagaggccttgaacaaacgatcaatatcgttaataagtctgaactaaagaaaaattttattatctacggtcctcagcttatttcttgtactaataacaacatgctaatccgctgtcttagacaagatacttcaatcgatatagaatgccatgacatcctgctttcagctgaaaatgccgaagaactgttggttcaacgcaaaactgacctggcaattacactgcaaccagtaattagtcgctctgtcatctgcatgccgttacacactattcgcaattcccttatatgtagcaacaaacatcctcgtattactgataccagtaactatgaacaaattatcgccgaagaattcaccctgttgatatctaaatcagcagggattgacgaaattcaaatggacatagatgaacgttttataaaccgtaaagtttcatttcgcagttcttctttgttgactataattaatagcatttctgttactgacttattaggcattgtgcccaccgaactgtacgatttacatcgtgattttttgaagttaaaagaaataaaactagaacaacctcttcctgcggttaaactttatatttcctataacaaggcttcgttgaacaaccttgtcttctcccgattcatagatcgtttaaatgatagtttctga

SEQ ID NO: 26919 - DNA, 747 bp, Escherichia coli
atgttaaaaaagatacttttactggctctgcttcctgcaatcgccttcgcagaggaacttcctgccccagtaaaagcgattgaaaaacagggtattacaatcatcaaaacgttcgatgcccctggaggaatgaaaggttatctcggtaagtatcaggatatgggcgtcaccatctacctgactccagatggtaagcacgctatctctggttacatgtacaacgaaaaaggtgaaaacctgagtaacacgcttatcgaaaaagaaatttacgcacccgccggacgtgaaatgtggcaacggatggaacaatcccactggctcctcgacggtaaaaaagatgcgccggtcattgtctacgtcttcgccgatccgttctgcccatattgtaaacaattctggcagcaggctcgtccgtgggtagattctggcaaagtgcaattaagaacattgttggttggggttatcaagccagaaagcccggcgacagcagcggcaattcttgcctccaaagatcccgcaaaaacctggcaacaatatgaagcctctggtggcaagcttaagctaagcgtgcctgcaaacgtaagcacagagcaaatgaaagtgttaagcgacaacgagaaactcatggacgatctgggggcaaatgtcacaccagctatctattacatgagtaaggaaaataccctgcaacaagccgtcggattacccgatcagaaaatgcttaatatcattatggggaataaataa

SEQ ID NO: 26920 - DNA, 564 bp, Escherichia coli
atgtccttgattaacaccaaaattaaaccttttaaaaaccaggcattcaaaaacggcgaattcatcgaaatcaccgaaaaagataccgaaggccgctggagcgtcttcttcttctacccggctgactttactttcgtatgcccgaccgaactgggtgacgttgctgaccattacgaagaattgcagaaactgggcgtagacgtatacgcagtatctaccgatactcacttcacccacaaagcatggcacagcagctctgaaaccatcgctaaaatcaaatatgcgatgatcggcgacccgactggcgccctgacccgtaacttcgacaacatgcgtgaagatgaaggtctggctgaccgtgcgaccttcgttgttgacccgcagggtatcatccaggcaatcgaagttaccgctgaaggcattggccgtgacgcgtctgacctgctgcgtaaaatcaaagcagcacagtacgtagcttctcacccaggtgaagtttgcccggctaaatggaaagaaggtgaagcaactctggctccgtctctggacctggttggtaaaatctaa

SEQ ID NO: 26921 - DNA, 1596 bp, Escherichia coli
atgatgatgtttaaagcccaggagataaacatgctcgacacaaatatgaaaactcaactcaaggcttaccttgagaaattgaccaagcctgttgagttaattgccacgctggatgacagcgctaaatcggcagaaatcaaggaactgttggctgaaatcgcagaactgtcagacaaagtcacctttaaagaagataacagcttgccggtgcgtaagccgtctttcctgatcaccaacccaggttctaaccaggggccacgttttgcaggctccccgctgggccacgagttcacctcgctggtactggcgttgctgtggaccggtggtcatccgtcgaaagaagcgcagtctctgctggagcagattcgccatattgacggtgattttgaattcgaaacctattactcgctctcttgccacaactgcccggatgtggtgcaggcgctgaacctgatgagcgtactgaacccgcgcatcaagcacactgcaattgacggcggcaccttccagaacgaaatcaccgatcgcaacgtgatgggcgttccggcagtgttcgtaaacgggaaagagtttggtcagggtcgcatgacgttgactgaaatcgtcgccaaaattgatactggcgcggaaaaacgtgcggcagaagagctgaacaagcgtgatgcttatgacgtattaatcgtcggttccggcccggcgggtgcagcggcagcaatttactccgcacgtaaaggtatccgtactggtttgatgggcgaacgttttggtggtcagatcctcgataccgttgatatcgaaaactacatttctgtaccgaagaccgaaggccagaaactggcaggagcgctgaaagttcacgttgatgaatacgacgttgatgtgatcgacagccagagcgccagcaaactgatcccggcagcggttgaaggtggcctgcatcagattgaaacagcttctggcgcggtactgaaagcacgcagcattatcgtggcgaccggtgcaaaatggcgcaacatgaacgttccgggcgaagatcagtatcgcaccaaaggcgtgacctactgcccgcactgcgacggcccgctgtttaaaggtaaacgcgtagcggttatcggcggcggtaactccggcgtggaagcggcaattgacctggcgggtatcgttgagcacgtaacgctgctggaatttgcgccagaaatgaaagccgaccaggttctgcaggacaaactgcgcagcctgaaaaacgtcgacattattctgaatgcgcaaaccacggaagtgaaaggcgacggtagcaaagtcgtaggtctggaatatcgagatcgtgtcagcggcgatattcacaacatcgaactggccggtattttcgtgcagattggtctgctgccgaacaccaactggctggaaggcgcagtcgaacgtaaccgcatgggcgagattatcattgatgcgaaatgcgaaaccaacgtgaaaggcgtgttcgcagcgggtgactgtacaacggttccgtacaagcagatcatcatcgccactggcgaaggtgccaaagcctctctgagtgcttttgactacctgattcgcaccaaaactgcataa

SEQ ID NO: 26922 - DNA, 429 bp, Escherichia coli; identical to SEQ ID NO: 277

SEQ ID NO: 26923 - DNA, 411 bp, Escherichia coli
atgtccagaccaactatcatcattaacgacctggatgccgaacgcatcgatattctgctggagcaacccgcctatgctggtttgccaatcgccgacgcgttaaacgcagagttggatcgcgcccaaatgtgttcgccagaagagatgccacacgacgtggtgacaatgaacagccgggttaaattccgcaatcttagcgatggcgaagtgcgtgtgcgcacgctggtgtatccggcaaaaatgaccgacagcaatactcagctttccgttatggctccggtaggtgccgcactgctggggctgcgcgttggcgattccattcactgggaacttccgggcggcgttgcaacccaccttgaagtgctggaactcgaataccagccagaagctgctggcgactacctgctttaa

SEQ ID NO: 26924 - DNA, 807 bp, Escherichia coli
atgaaagcattctggcgtaacgccgcgttgctcgcggtttctctgcttcccttctcttctgccaacgccgtggcgttgcaggcaaaacagtatggcgattttgatcgctatgtcctggccctctcctggcaaaccggattttgccagagtcaacacgatcgaaatcgtaacgaacgagatgaatgtcgcctgcaaaccgaaacgaccaacaaagctgattttctgaccgtacatggtctgtggccaggattgcctaaatcggttgctgcccgtggtgttgatgaacgccgctggatgcgcttcggttgcgctactcgcccaatcccgaatctaccagaagcgcgcgccagccgaatgtgttcatcgccggaaaccgggttatcactggaaacggccgctaaactaagtgaagtcatgccaggagctggcggacgttcctgcctggaacgctacgaatatgccaaacacggtgcctgctttggttttgatccagacgcatacttcggcacgatggtacgcctgaatcaagaaattaaagagagcgaagccggaaaattccttgcggataactacggtaaaacagtgagccgccgtgactttgatgccgcctttgccaaaagctggggaaaagagaacgtgaaagcagttaagctaacgtgccagggtaaccctgcgtatttgactgaaattcagatctcgatcaaagctgacgccatcaacgctccgctttctgccaactcattcttgccacaaccacacccaggcaactgtggcaaaacctttgtgattgataaagcaggttattaa

SEQ ID NO: 26925 - DNA, 1464 bp, Escherichia coli
atgtctttagcaaaagataatatatggaaattattggcgcccctggtggtgatgggtgtcatgtttcttatccctgtacctgacggtatgccgccgcaggcgtggcattactttgcagtgtttgtggcaatgattgtcggcatgatcctcgagccaattccggcaacggcgatcagttttattgcggttactatttgcgttattggcagtaattacctgctctttaatgccaaagaattagctgacccagcgtttaatgcgcaaaaacaggcgctgaaatggggtctggctggtttttccagcaccacggtatggctggtatttggcgcatttatttttgcattagggtatgaagtttccgggttaggccgtcgtattgcccttttcctggtgaaattcatgggcaaacgcacgctgacgttgggttatgcgattgtcattatcgacattctgctggcaccgtttacaccgtccaacaccgcgcgtaccgggggtacggtttttccggtcattaaaaacctgccgccgttgtttaaatcattcccgaacgatccgtccgcgcgtcgtattggcggctatttgatgtggatgatggtcattagtaccagtctgagttcgtccatgtttgtcaccggtgcggcaccaaacgtgctgggtctggagttcgtcagcaaaattgccggtatccagattagctggttgcagtggttcctctgcttcctgccggttggggttatcttgcttatcattgcgccgtggctttcctacgtgctgtacaaaccggaaatcacacacagtgaagaagtggcaacctgggcgggtgatgaactaaaaaccatgggtgcgctgacacgcagagagtggacgctgattggccttgtattgctcagcttaggtttgtgggtatttggcagtgaagtcattaatgctactgcggttggtctgctggcagtttcgctaatgctggccctgcacgttgtgccgtggaaagacattacccgctataacagcgcatggaacacgctggtcaacctggcaactctggttgtgatggctaacggcctgactcgttctggttttattgactggttcgccaataccatgagtacgcacctggaaggattctcaccaaacgcaacggtgattgtactggttctggtgttctactttgcacactacctgtttgccagcctgtctgcgcacaccgcaaccatgctgccggttattctggccgtcggtaaaggtattccgggcgtaccaatggaacaactgtgtatcctgctggtgctatctatcggtatcatgggctgtctgacgccgtatgcaaccggtcctggggtgattatttacggctgtggctatgtgaaatcaaaagattactggcgtcttggcgcaatcttcggggtgatttacatctctatgttgctgttggttggctggccgattctcgccatgtggaactaa

SEQ ID NO: 26926 - DNA, 879 bp, Escherichia coli
atgtcgatgcctgcaacgtcaactaaaaccacaaagcttgcgacgtcattaatcgatgagtacgccctgctgggctggcgcgccatgctgactgaagtcaacctgtcaccgaaaccaggcctcgtggatcgcattaactgcggtgcgcacaaagatatggcgctggaagatttccaccgcagcgcgctggcgattcagggctggttaccccgtttcattgaatttggtgcctgtagtgcagaaatggcaccggaagcggtactcaacggattacgcccaattggtatggcttgcgaaggtgatatgttccgcgccactgcgggcgtaaacacgcataaaggaagcattttttctttagggctactgtgtgcggcaattggtcgtttgcttcagctcaaccagccggtaacgccaacaaccgtttgttctacggcggcaagtttctgccgtggcctgaccgatcgcgaactgcgtaccaataattcacgactgacggcaggtcaacggttgtaccagcagcttggccttaccggcgcacgcggtgaagccgaagcgggttatccactggtgatcaaccacgccttgccgcattacctcactctgctggatcaggggttagatcctgagctggcattgctcgataccttgctcctactgatggctaccaacggcgataccaacgttgcatcgcgcggtggcgaggggggcctgcgctggctacagcgcgaggcgcaaacattattgcaaaaagggggcattcgaacccccgccgatctcgattatctccggcagttcgacagggagtgtatcgaacgaaatctcagtccaggcggcagtgccgacctgctgatccttacctggtttttagcacagatttaa

SEQ ID NO: 26927 - DNA, 552 bp, Escherichia coli
atgcacctgcttcctgaactcgccagccaccatgcggtgtcaattcccgagctgctcgtcagccgggatgaaaggcaagcacggcaacacgcctggctcaagcgccatcctgttccactggtctcctttaccgtggttgcgcctgggccgattaaagacagcgaggtcacacgccgaatttttaatcatggcgtgacagccttgcgtgccttagccgcaaaacagggctggcaaattcaggagcaggctgcactggtttccgccagcgggccggagggcatgttgagcattgccgccccggctcgcgacctcaagctcgccaccattgagcttgaacatagtcatcctctcgggcggttatgggatatcgatgtcctgacgcccgaaggcgacattctctcccgccgcgattattcactgccgcctcgccgctgcctgttgtgcgagcaaagcgcagctgtttgcgcgcgtggaaaaacccatcaactgaccgatttactcaaccgcatggaggcgctgctaaacgatgtcgatgcctgcaacgtcaactaa

SEQ ID NO: 26928 - DNA, 1533 bp, Escherichia coli
atgacgcagaaaattgaacaatctcaacgacaagaacgggtagcggcctggaatcgtcgcgctgaatgcgatcttgccgctttccagaactcgccaaagcaaacctaccaggctgaaaaagcgcgcgatcgcaaactgtgcgccaacctggaagaagcgattcgtcgttctggtttacaggacggcatgacggtttccttccatcacgctttccgtggcggtgacctgaccgtcaatatggtgatggacgtcatcgcgaagatgggctttaaaaacctgactctggcctccagctccctgagtgattgccatgcgccgctggtagaacacattcgccagggcgtggttacccgcatttatacctccggcctgcgcggtccgctggcggaagagatctcccgtggtctgctggcggaaccggtgcaaatccactctcacggcggacgtgtgcatctggtacagagcggcgaactgaatatcgacgtggctttcctcggcgtcccgtcctgtgatgaattcggtaatgccaacggctacaccggtaaagcctgctgcggctccctcggctatgcaatggttgatgccgacaacgcaaaacaggttgtgatgctcactgaagaactgctgccttatccgcataatccggcaagcattgagcaagatcaggttgatctgatcgtcaaagttgatcgcgttggcgatgctgcaaaaatcggcgctggtgctacccgtatgaccactaacccgcgcgaactgcttattgcccgtagcgctgcggatgtgattgttaactctggctacttcaaagaaggtttctccatgcagaccggcaccggcggcgcttcgctggcggtaacccgtttcctggaagacaaaatgcgtagccgcgatattcgcgccgacttcgccctcggcggtattaccgcaacgatggttgatctgcacgaaaaaggtctgatccgcaaactgctggatgtgcagagctttgacagccatgctgcgcaatcgctggcccgtaaccccaatcacatcgaaatcagcgccaaccagtacgctaactgggggtcgaaaggcgcatcggttgatcgtctcgacgtggtggtactgagtgcgctggaaattgacacccagttcaacgttaacgtgctgaccggctctgacggcgtactgcgtggtgcttccggtggtcactgcgataccgcgatttcttctgcgctttccatcatcgtcgcgccgctggtacgcggtcgtattccgacgctggtggataacgtgctgacctgcatcaccccgggctccagtgtcgatattctggtcacagaccacggtatcgcagttaacccggcacgtccggagctggcagaacgtctgcaggaagcggggatcaaagtggtttctattgagtggctgcgtgaacgtgcgcgtctgctgaccggtgaaccacagccgattgaattcaccgaccgcgtcgttgccgttgtgcgttaccgcgatggctcggtgatcgatgttgtgcatcaggtgaaggaataa

SEQ ID NO: 26929 - DNA, 909 bp, Escherichia coli
atgatttccgcttcgctgcaacaacgtaaaactcgcacccgccgcagcatgttgtttgtgcctggtgccaatgccgcgatggtcagcaactcattcatctacccggctgatgccctgatgtttgacctcgaagactccgtggcattgcgtgaaaaagacacagcccgccgcatggtttaccacgcgctgcaacatccgctgtatcgcgatattgaaaccattgtgcgtgtaaacgcgctggattccgaatggggtgttaacgacctggaagccgtcgttcgcggtggtgcggacgttgtgcgtctgccgaaaaccgataccgctcaggatgttctggatatcgaaaaagagatcctgcgcatcgaaaaagcctgtggtcgtgaacccggcagcaccggcctgctggcagcgattgaatctccgctgggcattacccgcgcggtggaaatcgctcacgcttccgagcgtttgatcggtatcgccctcggtgcagaagactatgtgcgcaacctgcgtacagaacgctccccggaaggaactgaactgctgttcgcacgctgttccattttgcaggccgcgcgctctgcgggtattcaggcgttcgataccgtctattccgacgctaataacgaagccggattcctgcaagaagccgcccacatcaaacagctgggctttgacggcaaatcgctgatcaacccgcgtcagattgatctgctgcacaacctctacgcaccgactcagaaagaagtggatcacgcccgccgcgtcgtagaagccgctgaggccgccgctcgcgaaggcctcggcgtggtttccctgaacggcaagatggtggacggtccggttatcgatcgcgcccgtctggtgctctcccgcgcagaactttccggcatccgcgaagaataa

SEQ ID NO: 26930 - DNA, 297 bp, Escherichia coli
atgaaaataaaccagcccgccgttgcaggcacccttgagtctggggatgtgatgatacgcatcgccccactcgatacgcaggatatcgacctgcaaatcaacagcagcgttgagaaacagtttggcgatgccattcgcaccaccattctggacgttctcgcccgctacaacgtgcgcggcgtacagctgaatgtcgatgacaaaggcgcactggactgcattttacgtgcacgactggaagccctgctggcacgcgccagcggtatcccggctctgccatgggaggattgccaatga

SEQ ID NO: 26931 - DNA, 1059 bp, Escherichia coli
atgttcggcaatgatattttcacccgtgtaaaacgttcagaaaataaaaaaatggcggaaatcgcccaattcctgcatgaaaatgatttgagcgttgacaccacagtcgaagtatttattaccgtaacccgcgatgaaaatcttatcgcgtgcggtggaattgccggaaatattattaaatgcgttgctatcagtgaatccgttcgcggtgaaggactggcgctgacattagccactgaattgataaacctcgcctatgaacggcacagcacgcatctgtttatttataccaaaaccgaatacgaggcgctgttccgccagtgcggtttttccacgctgaccagcgtacccggcgtgatggtgctgatggaaaacagcgccacgcgactgaaacgctatgccgaatcgctgaaaaaattttgtcatccagggaacaagattggctgcattgtgatgaacgccaatccctttacgaatggtcaccgttatctgattcaacaggctgcggcacagtgcgactggttgcatctgtttttagtcaaagaagattcttcacgcttcccctatgaagaccgactggatctggtgttaaaaggcaccgccgatattccacgcctgactgtgcatcgcggctccgaatacatcatatcccgcgctacgttcccttgctacttcattaaagaacagagcgtcattaaccattgttacaccgaaattgatctgaagattttccgtcagtacctcgctcccgcgctgggtgtaactcaccgctttgtcggtactgaacccttttgtcgcgttaccgcccagtacaaccaggatatgcgctactggctggaaacgccgactatctccgcaccgcccatcgaactggttgaaattgagcggctgcgttaccaggagatgccgatatccgcttcccgggtacgtcaactgctggcgaaaaacgatctcacggctatcgcgccgctggtccctgcagtcacgctgcattatttgcagaacctgcttgagcactcccgccaggacgcggcagctcgtcaaaagacccccgcatga

SEQ ID NO: 26932 - DNA, 1659 bp, Escherichia coli
atgttgcagcttaacgagaataaacagtttgcatttttccaaagactggcatttccgctgcgtatctttttgctgattctggtgttctcaatatttgtcattgcagccctggcgcaatattttacagccagttttgaggactatttaacgcttcatgtgcgcgacatggcaatgaatcaggcaaaaattattgcttctaatgacagtatcatcagtgcagtgaaaacgcgtgactacaagaggctggcgaccatcgctgacaaattacaaagagatactgatttcgattatgtggtgattggcgatcggcactcgattcgtctttaccatcctaatccggagaaaattggttatcctatgcagttcaccaaaccgggcgcgctggagaaaggggagagctacttcatcaccgggaaagggtcaattggcatggcgatgcgtgccaaaacgccaatctttgatgacgatggaaaagtcatcggcgtggtgtcgattggctacctggtgagtaaaatcgatagctggcgggctgagtttttattaccgatggctggcgtgtttgtcgtgctgttagggattctgatgttgctatcgtggttcctggccgcgcatatccgtcggcagatgatgggcatggagccaaagcaaatcgcacgcgtggtccgtcagcaagaggcgctgtttagttcggtttatgaagggctcattgcggtggatccgcatggttacattaccgccatcaatcgtaacgcaagaaagatgctgggtctgagttcccccggacggcaatggttgggtaaacccattgctgaagtggtcaggcccgccgatttctttaccgaacagattgatgaaaaacgtcaggatgtggtggcgaactttaacggtctgagcgttattgccaaccgggaagctattcgttctggtgatgatttgctgggggccattatcagctttcgtagtaaagacgaaatatccaccctcaatgcgcaactgacgcaaattaaacaatacgtcgagagcctgcgcacattgcgacacgagcatctcaattggatgtcgacgctcaatggtctgttgcagatgaaagagtatgatcgcgtgctggcgatggtgcagggggagtctcaggcccagcaacagcttattgacagcctgcgtgaggcgtttgccgatcgccaggtggcggggctgctttttggtaaagtgcagcgcgcccgggaactggggctaaaaatgatcattgtccccggtagccagctttcgcaactgccgccaggactggatagcaccgagtttgcagccattgtgggcaatttacttgataacgccttcgaagccagcctgcgtagcgatgaaggaaacaagatcgttgaattattcctcagcgatgaaggcgatgatgtggtgattgaagtcgccgatcagggctgcggcgttccagagtctctacgagacaaaatatttgagcagggggtcagtacgcgtgctgacgagcccggtgaacatggcattgggttgtacttgattgccagctacgtaacgcgctgcggtggtgttatcactctcgaagataatgatccctgcggtaccttgttttcaatctatattccgaaagtgaaacctaatgacagctccattaaccctattgatcgttga

SEQ ID NO: 26933 - DNA, 681 bp, Escherichia coli
atgacagctccattaaccctattgatcgttgaggacgaaacgccgctggcagagatgcatgcggaatatattcgtcacattcccggattcagtcagatattactggcgggaaacctggcgcaggcccgaatgatgatcgagcgttttaagccggggctaatcttgctcgataactatcttcctgacggcagagggattaatttattgcatgaactggtgcaggcgcattatcccggcgacgtggtgtttaccactgcagccagcgatatggaaacggtgtctgaagccgtacgttgtggtgtatttgattatctcattaagcccattgcctatgaacggctggggcaaacgctaacccgtttccgccagcgtaaacatatgctggaaagtattgatagcgccagccagaagcaaattgatgagatgtttaatgcctatgctcgcggtgaacctaaagacgaactgccgaccggcattgatcccttgacgctaaacgcagtgcgaaaactgtttaaagagcctggtgtgcaacatacggcagaaacggtggcgcaggcactgactatcagccgcaccactgccagacgttatcttgaatattgcgccagccgccatctgattattgctgaaattgttcacggcaaagttggcagaccgcaacgcatataccacagtgggtga

SEQ ID NO: 26934 - DNA, 1386 bp, Escherichia coli
atgctgacattcattgaactccttattggggttgtggttattgtgggtgtagctcgctacatcattaaagggtattccgccactggcgtgttatttgtcggtggcctgttattgctgattatcagtgccattatggggcacaaagtgttaccgtccagccaggcttcaacaggctacagcgccacggatatcgttgaatacgttaaaatattgctaatgagccgcggcggcgacctcggcatgatgattatgatgctgtgtggctttgccgcttacatgacccatatcggcgcgaatgatatggtggtcaagctggcgtcaaaaccattgcagtatattaactccccttacctgctgatgattgccgcctattttgtcgcctgtctgatgtctctggccgtctcttccgcgaccggtctgggtgttttgctgatggcaaccctgtttccggtgatggtaaacgttggtatcagccgtggtgcagctgctgctatttgtgcctccccggcggcgattattctcgcaccgacttcaggggatgtggtgctggcggcgcaggcttccgaaatgtcgctgattgacttcgccttcaaaacgacgctgcctatctcaattgctgcaattatcggcatggcgatcgcccacttcttctggcaacgttatctggataaaaaagagcacatctctcatgaaatgttagatgtcagtgaaatcaccaccactgctcctgcgttttatgccattttgccgttcacgccgatcatcggagtgctgatttttgacggcaaatggggtccgcaattacacatcatcactattctggtgatttgtatgctgattgcctccattctggagttcatccgcagctttaatacccagaaagttttctctggtctggaagtggcttatcgcgggatggccgatgcgtttgctaacgtggtgatgctgctggttgccgctggggtattcgctcaggggcttagcaccatcggctttattcaaagtctgatttctatcgccacctcgtttggttcggcgagtatcatcctgatgctggtattagtgatcctgacaatgctggcggcagtcacgaccggttcaggcaatgcgccgttttatgcgtttgttgagatgatcccgaaactggcgcactcttccggcattaacccggcgtatttgactatcccaatgctgcaggcgtcaaacctcggccgtaccctgtcacccgtttctggcgtagtcgttgcggttgccgggatggcgaagatctcaccatttgaagtcgtaaaacgcacctcggtgccggtgcttgttgggctggtgattgttatcgttgctacagagctgatggtgccaggaacggcagccgcggtcacaggcaagtaa

SEQ ID NO: 26935 - DNA, 561 bp, Escherichia coli
atgaacgtgagtaaatatgtcgctatcttttcctttgtttttgttcagttaatcagcgttggtaaagtttttgctaacgcagatgagtggatgacaacgtttagagaaaatattgcacaaacctggcaacagcctgaacattatgatttatatattcctgccatcacctggcatgcacgtttcgcttacgacaaagaaaaaaccgatcgctataacgagcgaccgtggggtggcggttttggtcagtcgcgttgggatgaaaaaggaaactggcatggcctgtatgccatggcatttaaggactcgtggaacaaatgggaaccgattgccggatacggatgggaaagtacctggcgaccgctggcagatgaaaattttcatttaggactgggattcaccgctggcgtaacggcacgcgataactggaattacatccctctcccggttctactgccattggcctctgtgggttatggtccagtgacttttcagatgacctacattccgggtacctataacaatggcaatgtgtactttgcctggatgcgctttcagttttga

SEQ ID NO: 26936 - DNA, 210 bp, Escherichia coli; identical to SEQ ID NO: 291

SEQ ID NO: 26937 - DNA, 384 bp, Escherichia coli
gtgttacaacttcttttagcagtttttattggcggtggtacgggaagcgtggcgagatggctgttaagtatgcgatttaacccgctgcatcaagcgattccgttggggacgctggctgcaaacctgattggggcattcatcataggaatgggattcgcctggtttagcaggatgacgaacattgatccagtgtggaaagtattaatcaccaccggattttgtggcggtctaacaaccttctcaacattttcggcagaagtggtgtttttgttacaagagggccgctttggctgggcgttactgaacgttttcgtcaaccttttggggtcttttgccatgaccgcactggctttctggctgttttccgcctcaaccgcacactaa

SEQ ID NO: 26938 - DNA, 789 bp, Escherichia coli
atgctggttgccgcaggacagtttgctgttacatctgtgtgggaaaagaacgctgagatttgtgcctcgttgatggcgcaggcggcggaaaacgacgtttcgctgtttgtcctgccggaagcattgttggcgcgcgatgatcatgatgcagatctatcggttaaatcagcacagctgctggaaggcgaattcctcggacgtttacggcgagaaagtaaacgtaacatgatgacgacaattctgacgattcatgttccttcaacgccggggcgcgcatggaatatgctggtggcgctacaggcaggaaacatcgtcgcccgttatgccaaactgcatctctatgatgcatttgccattcaggaatcacgccatgttgatgctggtaatgaaatagctccgttactggaggtggaagggatgaaggtcggtctgatgacctgttatgacttacgctttccagagctggcgctggcacaggcattacagggagctgaaatcctggtacttcctgccgcctgggttcgtgggccgctcaaagagcatcactggtcaacgttgcttgccgctcgtgcgctggataccacctgttatatggtggcggcgggggagtgcgggaacaaaaatatcgggcaaagccgaattatagatccctttggcgtcaccattgcggcagcgtcagaaatgcctgcactcattatggcggaagtgacgcccgaacgtgtgcgtcaggtgcgcgcgcaacttcccgttttaaacaaccgtcgctttgcgccgccgcaattattatga

SEQ ID NO: 26939 - DNA, 204 bp, Escherichia coli; identical to SEQ ID NO: 294

SEQ ID NO: 26940 - DNA, 966 bp, Escherichia coli
atgagtaaacccattgtgatggaacgcggtgttaaataccgcgatgccgataagatggcccttatcccggttaaaaacgtggcaacagagcgcgaagccctgctgcgcaagccggaatggatgaaaatcaagcttccagcggactctacacgtatccagggcatcaaagccgcaatgcgcaaaaatggcctgcattctgtctgcgaggaagcctcctgccctaacctggcggaatgcttcaaccacggcacagcaacgtttatgatcctcggcgctatttgtacccgccgttgtccgttctgtgacgttgcccacggtcgcccggtagctccggatgccaatgaaccagtgaaactggcgcagaccattgccgatatggcgctgcgttatgtggttatcacctccgttgaccgtgatgacctacgcgatggcggtgcccagcactttgcggattgcattactgccattcgggaaaaaagcccgcaaatcaaaattgaaactctggtgccggatttccgcggtcgtatggatcgtgctctggatattctgaccgccacaccaccagatgtgttcaaccataacctggaaaacgtaccgcgtatttaccgtcaggtacggcctggtgcagattacaactggtcgctgaagctgctggaacgctttaaagaagcgcatccggaaatcccgaccaagtctggtctgatggtgggtctgggtgaaaccaatgaagaaattattgaggtaatgcgcgacctgcgccgtcatggtgtgacgatgttaacgctggggcaatatttgcagccaagccgccatcacctgccggttcaacgttacgttagcccggatgagttcgacgaaatgaaagccgaagcgctggcgatgggctttacccatgctgcatgcggtccgtttgtccgctcgtcttaccacgccgatttgcaggcgaaagggatggaagttaagtaa

SEQ ID NO: 26941 - DNA, 954 bp, Escherichia coli
gtggatagtaataatcaaattgaaacctgtttaagcagaaagtcgtcagaaggtaaaccacaaatatttacaaccttacgaaatattgatcttaaccttctgactatttttgaagctgtatatgtacataaagggatcgttaatgcagcgaaagtgcttaatctgacaccctcggcaatcagtcagtctattcagaaactgcgcgttatattccctgacccattgtttattcgcaaaggccagggtgtcactcctaccgcatttgcgatgcatctacatgagtatatcagtcagggccttgagtccattcttggcgcgctggatatcgaaggaagctatgataagcaacgaacgataactattgcgaccaccccctcagtcggagccctggtccttcctgtcatctatcgggcgattaaaactcactatccgcagcttttactgcgcaacccgcccatcagcgacgcggaaaaccaactcagtcagtttcaaaccgatctcatcatcgataacatgttttgcaccaatcgtacggtgcaacatcatgttctgttcaccgacaatatggtgttaatttgccgtgagggaaatccactactctctttagaagatgacagggagactatcgacaacgctgcgcatatactcctgttaccggaagggcaaaatttcagcggtctgcggcagagagttcaagagatgtttccggaccggcaaatcagtttcaccagctacaacattttgacaatcgctgcactggttgccaacagtgacatgttagcgattattcccagccgtttttataacctgtttagccgttgttggccgctggaaaaactgccttttccgtccttaaatgaggagcaaatagatttctctatccactacaacaaattcagcctgcgtgatcccatcctgcacggggtaatagatgttatccgtaatgcattttga

SEQ ID NO: 26942 - DNA, 642 bp, Escherichia coli
ttgtatcaggataaaattcttgtccgccagctcggtcttcagccttacgagccaatatcccaggctatgcatgaattcaccgatacccgcgatgatagtacccttgatgaaatctggctggtcgagcactatccggtattcacccaagggcaggcaggaaaagcggagcacattttaatgccgggtgatattccggtgatccagagcgatcgcggtgggcaggtgacttatcacgggccggggcaacaggtgatgtatgtgttgcttaacctgaaacgccgtaaactcggtgtgcgtgaactggtgaccttgcttgagcaaacagtggtgaataccctgtctgaactgggtatagaagcgcatcctcgggctgacgcgcctggtgtctatgtcggggaaaagaaaatttgctcactgggtttacgtattcgacgcggttgttcattccacggtctggcattaaacgtcaatatggatctttcaccatttttacgtattaatccttgtgggtatgcaggaatggaaatggctaaaatatcacaatggaaacccgaagcgacgactaataatattgcaccacgtttactggaaaatattttagcgctactaaacaatcctgacttcgaatatattaccgcttaa

SEQ ID NO: 26943 - DNA, 264 bp, Escherichia coli
atgaaaaccaaacttaacgaactgcttgaattccctactccttttacttacaaagttatggggcaggcgttacctgagctggttgatcaggtggttgaagtggtacagcgccatgcgccaggtgactacaccccaacggtaaaaccaagcagcaaaggcaactaccactcggtatctatcactatcaacgctactcatatcgagcaggttgaaacactgtatgaagaactgggcaaaatcgatattgtccgcatggttctgtaa

SEQ ID NO: 26944 - DNA, 1212 bp, Escherichia coli
atgaataccattttttccgctcgtatcatgaagcgcctggcgctcaccacggctctttgcacagcctttatctctgctgcacatgccgatgacctgaatatcaaaactatgatcccgggtgtaccgcagatcgatgcggagtcctacatcctgattgactataactccggcaaagtgctcgccgaacagaacgcagatgtccgccgcgatcctgccagcctgaccaaaatgatgaccagttacgttatcggccaggcaatgaaagccggtaaatttaaagaaactgatttagtcaccatcggtaacgacgcatgggccaccggtaacccggtatttaaaggttcttcgctgatgttcctcaaaccgggcatgcaggttccggtttctcagctgatccgcggtattaacctgcaatcgggtaacgatgcttgtgtcgccatggccgattttgccgctggtagccaggacgcttttgttggcttgatgaacagctacgttaacgcactgggcctgaaaaatacccacttccagacggtacatggtctggatgctgatggtcagtacagctccgcgcgagatatggcgctgatcggccaggcgttgatccgtgacgtaccgaatgaatactcgatctataaagaaaaagaatttacgtttaacggtattcgccagctgaaccgtaacggtctgttatgggataacagcctgaatgtcgacggcatcaaaaccggacacactgacaaagcaggttacaaccttgttgcttctgcgactgaaggccagatgcgcttgatctctgcggtgatgggcggacgtacttttaaaggccgtgaagccgaaagtaaaaaactgctaacctggggcttccgtttcttcgaaaccgttaacccactgaaagtaggtaaagagttcgcctctgaaccggtttggtttggtgattctgatcgcgcttcgttaggggttgataaagacgtgtacctgaccattccgcgtggtcgcatgaaagatctgaaagccagctatgtgctgaacagcagtgaattgcatgcgccgctgcaaaagaatcaggtcgtcggaactatcaacttccagcttgatggcaaaacgatcgaacaacgcccgctggttgtgctgcaagaaataccggaaggtaacttcttcggcaaaatcattgattacattaaattaatgttccatcactggtttggttaa

SEQ ID NO: 26945 - DNA, 1089 bp, Escherichia coli
atgcgtaagcagtggctcgggatctgcatcgcggcaggaatgctcgcggcatgtacaagcgatgatggtcagcaacagacggtaagtgtaccgcagcctgcggtatgtaacggccccatagttgaaattagcggggcggacccgcgtttcgaaccactgaatgcgacggcaaatcaggattaccagcgcgacggtaaaagctacaaaatcgtgcaggatccgtctcgatttagccaggcgggactggcggcaatctatgatgccgaacccggcagtaacctgacggcctctggcgaagctttcgatccgacacagttgacggcggcccatccaacgcttccgatccccagctacgccagaatcactaacctggctaacgggcgaatgatcgtggtgcgcattaatgatcgcggtccttacggcaacgaccgcgttatttcgctttctcgcgcggcagctgaccgtcttaacacgtcaaacaacaccaaagttcgtatcgatccgattattgtcgcccaggatggttcgctttctggtcctggtatggcttgtaccacagttgccaaacagacttacgccctgcctgcacctcccgatttaagcggtggcgcgggaacaagttcagtgtctggcccgcagggtgacattcttccggtcagtaattcgacgctaaaaagcgaagatccgaccggcgcgccggtaaccagcagcggtttcctcggcgcaccaacgaccttagcgcctggtgtactggaaggcagcgaaccgacgcctgcgccacagcccgttgttacagctccgtcgacaacgcctgcaacctcacctgcaatggtgacaccgcaagccgcctcgcaaagcgccagcggcaactttatggtgcaagtcggggccgttagcgatcaggctcgtgcgcaacagtaccaacagcaactgggacagaagttcggcgtccccggtcgcgtaactcaaaatggcgcggtctggcggatccagcttggcccattcgccagcaaagccgaagccagtaccttgcagcaacgtttgcaaaccgaagcccaattacagtcatttattaccaccgcgcagtag

SEQ ID NO: 26946 - DNA, 1113 bp, Escherichia coli
atgacggataatccgaataaaaaaacattctgggataaagtccatctcgatcccacaatgctgctgatcttactggcattgctggtttacagcgccctggttatctggagcgccagcggtcaggatattggcatgatggagcgtaaaataggccaaatcgcgatgggcctggtcatcatggtggtgatggcgcaaattcctccacgcgtttatgaaggctgggccccctatctctatatcatctgtattattttgctggtggcggtagatgcttttggtgccatctctaaaggcgctcaacgctggctggacctcggtattgttcgttttcagccgtcggaaattgccaaaatagccgtaccactgatggttgcgcgctttatcaaccgcgacgtttgcccgccatcgttgaagaacactggcatcgcgctggtgctgatatttatgcccacgctgctggtggctgcacagcctgacctgggaacatcaatcctcgttgcgctttccggcctgtttgtactgttcctctctggccttagctggcgtctgattggcgtcgcagtagtgctggtagcggcgttcattccgattctgtggttcttcctgatgcatgattaccagcgccagcgcgtaatgatgctcctggacccggaatcagacccactcggcgcaggctatcacattattcagtctaaaattgctattggctccggcggattacgcggcaaaggctggctgcacggcactcagtcacagcttgaatttctccccgaacgccataccgactttatcttcgcggtactggcggaagagctgggattagtgggcattttgattctgctcgctctctacattctgctgatcatgcgcgggctgtggatagccgccagagcgcaaaccacctttggtcgcgtcatggctggcggcttaatgctgatattattcgtttatgtcttcgtaaatattggtatggtaagcggtattctgccggttgtaggggttccgctcccactggtcagttatggaggatcggcgctaattgtgctgatggctgggttcgggattgtaatgtcaatccacacccacaggaaaatgttgtcgaaaagcgtgtaa

SEQ ID NO: 26947 - DNA, 1902 bp, Escherichia coli
atgaaactacagaactcttttcgcgactatacggcagagtccgcgctgtttgtgcgccgggcgctggtcgcctttttggggattttgctgctgaccggcgtgcttatcgccaacctgtataatctgcaaattgttcgctttaccgattaccagacccgctctaatgaaaaccgcattaagctggtgcctatcgcgcccagccgcggcattatctacgaccgtaacggtatccctctggccctcaaccgcactatctaccagatagaaatgatgccggagaaagtcgataacgtgcagcaaacgctggacgctttgcgcagcgtggttgatctgaccgatgacgatattgctgcattccgaaaagagcgcgcacgttcacaccgtttcacctccattccggtgaaaactaacctgaccgaagtacaagtagctcgctttgccgtcaatcagtaccgttttccgggtgttgaagttaaaggctataaacgtcgttactatccttacggttcagcgttgacccacgtcatcggctatgtgtcgaaaatcaacgataaagacgtcgaacgcctgaataatgacggcaaattggccaactatgcggcaacgcatgatatcggtaagctgggcattgagcgttactatgaagacgtgctgcacggtcagaccggttatgaagaggttgaagttaacaaccgtgggcgtgttatccgccagttaaaagaagtgccaccgcaagccggacacgatatttacctgacgctggatctcaaactccagcaatatatcgaaacgctgctggcgggtagccgcgcagctgtggtagtcaccgatccgcgtacaggtggggtgctggcgctggtttccacgcctagttatgacccaaacctgtttgttgacggtatctccagcaaagattattccgccttgctgaacgacccgaatacaccgctggtgaaccgcgccacacagggggtttatcctcccgcgtctacagttaaaccctatgtggcggtttcggcattgagcgccggagtgatcacgcgcaatacgacgctgtttgaccctggctggtggcaactgccagggtcggaaaaacgttatcgtgactggaaaaaatggggccacgggcgtctgaatgtcacaagatcgctggaagaatctgcggataccttcttctatcaggtggcctacgatatgggaatcgatcgcctctccgaatggatgggtaaattcggttatggtcattacaccggtatcgacctggcggaagaacgttccggcaacatgcctacccgcgaatggaaacagaaacgctttaaaaaaccgtggtatcagggtgacaccattccggttggtatcggtcagggttactggacagcgaccccaatccagatgagtaaggcactgatgatcctgattaatgacggtatcgtgaaggttccgcatttgctgatgagcaccgccgaagacggcaaacaggtgccatgggtacaaccgcatgaaccgcccgtcggcgatattcattccggttactgggagctggcaaaagacggtatgtacggtgttgctaaccgccctaacggtactgcgcataaatactttgccagcgcaccgtacaaaattgcggcgaaatctggtacagctcaggtcttcggtctgaaagcgaacgaaacctataatgcgcacaaaattgccgagcgtttacgtgaccacaaactgatgaccgcctttgcgccatacaacaatccgcaagtcgctgtcgccatgattctggagaacggcggtgcgggtccggcggttggtacgctgatgcgccagatcctcgaccacattatgctgggtgataacaacaccgatctgcctgcggaaaatccagcggttgccgcagcggaggaccattaa

SEQ ID NO: 26948 - DNA, 468 bp, Escherichia coli
gtgaagctgcaacttgtcgccgtgggaacgaaaatgccggactgggtacaaaccggttttaccgagtacctgcgtcgttttccgaaagatatgcccttcgagctgattgaaattccggccggaaaacgcggcaagaatgcggacatcaagcgcatactcgacaaagagggtgagcagatgttggcggccgcaggcaaaaaccgcattgtcaccctcgatattccaggcaagccctgggatacgccgcagttagccgctgagctggaacgctggaagctggatggtcgcgacgtcagtctactgattggcgggcctgaagggttgtcgcctgcctgtaaagcggcggcggagcagagctggtcgctgtcggcgcttaccctcccccatccgctggttcgcgtgctggtcgcagagagtctgtaccgggcgtggagcatcaccaccaaccatccttatcaccgtgagtga

SEQ ID NO: 26949 - DNA, 318 bp, Escherichia coli
ttgcagggtaaagcactccaggattttgttatcgacaaaattgatgacctcaaaggtcaggacatcatcgccttagacgttcagggcaaatccagcatcaccgactgcatgatcatctgtacgggtacgtccagccgccatgttatgtccattgctgatcacgttgtgcaggagtctcgcgcagcgggcctgttaccgctcggcgtagaaggtgaaaacagcgccgactggattgtcgtggatttgggcgatgtgattgtccatgtcatgcaggaagagagccgtcgcctgtatgaactggaaaaactctggagttaa

SEQ ID NO: 26950 - DNA, 612 bp, Escherichia coli
atgcgactgtggttaattcgtcatggcgaaacgcaagcgaatgtcgatggtctgtacagcggtcatgcgcccactcccctgaccgcgcgcggtattgagcaagcgcaaaatctgcatacgctgctacatggtgtttcctttgacctggttttatgcagtgaactggaacgggcacagcataccgcgcgacgggttctcagtgatcgccagctccccgtgcaaatcatccctgaactcaacgaaatgttttttggcgactgggagatgcgacatcatcgcgacctcatgcaagaagatgccgaaaactatagcgcgtggtgcaatgactggcagcatgctatccccacgaacggtgaaggatttcaggcattttcacaacgtgtggaacggtttatcgcaaggcttagtgaatttcagcactatcagaatattttagtcgtcagccatcagggtgtactgagtctgttaatcgctcgtttaattggcatgcctgccgaggctatgtggcattttcgcgttgaccaggggtgttggagcgccattgatatcaaccaaaaattcgcgacgctacgcgtcctcaatagccgtgccatcggggtcgagaatgcatga

SEQ ID NO: 26951 - DNA, 642 bp, Escherichia coli
atgaaatctttacaggctctgtttggtggcacctttgatccggtgcactatggtcatcttaaacccgtggaaacgctggcgaatttgattggtctgacacgggtcacaatcatccctaataatgttcctccgcatcgtccccagccggaagcgaacagcgtacagcgtaaacacatgcttgaactggcgattgccgacaagccattatttactcttgatgaacgcgagctaaagcgcaatgccccctcttacactgcgcaaacactgaaagagtggcggcaggaacaagggccggacgtgccgctggcgtttattataggtcaggattcattgctgacctttccgacctggtacgaatacgaaacgatactcgacaatgcacatttgatcgtctgtcggcgtccaggttacccacttgaaatggcgcaaccgcaataccagcaatggctggaagatcatttgacacataacccggaagatcttcaccttcagcctgccggtaaaatttatctggctgaaacgccgtggtttaacatctcggcgaccatcatccgcgaacgtttgcaaaacggtgaatcgtgtgaggatttattgccggaaccggtactgacttacattaaccaacaaggcttgtatcgctga

SEQ ID NO: 26952 - DNA, 1032 bp, Escherichia coli
atgattcggttgtacccggaacaactccgcgcgcagctcaatgaagggctgcgcgcggcgtatcttttacttggtaacgatcctctgttattgcaggaaagccaggacgctattcgtcaggtagctgcggtacaaggattcgaagaacaccacactttttccattgatcccaacactgactggaatgcgatcttttcgttatgccaggccatgagtctgtttgccagtcgacaaacgctattgctgttgttaccagaaaacggaccgaatgcggcgatcaatgaacaacttctcacactcaccggacttctgcatgacgacctgctgttgatcgtccgcggcaataaattaagcaaagcgcaagaaaatgccgcctggtttactgctcttgcgaatcgcagcgtgcaggtgacctgtcagacaccggagcaggctcagcttccccgctgggttgctgtgcgcgcaaaacagctcaacttagagctggatgacgcggcgaatcaggtgctctgctactgttatgaaggtaacctgctggcgctggctcaggcactggagcgtttatcgctactctggccagacggcaaactgacattacctcgcgttgaacaggcggtgaatgatgccgcgcatttcaccccttttcattgggttgatgctttgttgatgggaaaaagtaagcgcgcgttgcatattcttcagcaactgcgtctggaaggcagcgaaccggttattttgttgcgcacattacaacgtgaactgttgttactggttaacctgaaacgccagtctgcccatatgccactgcgtgcgttgtttgataagcatcgggtatggcagaaccgccggggcatgatgggcgaggcgttaaatcgcttaagccagccgcagttacgtcaggccgtgcaactcctggcacgaacggaactcaccctcaaacaagattacggtcagtcagtgtgggcagagctggaagggttatctcttctgttgtgccataaacccctggcggacgtatttatcgacggttga

SEQ ID NO: 26953 - DNA, 582 bp, Escherichia coli
gtgcgatatctggcaacattgttgttatctctggcggtgttaatcaccgccgggtgtggctggcatctgcgtgataccacgcaggttccttccactatgaaggtcatgatcctggactcaggcgatccgaacgggccattaagccgtgcggtgcgtaaccagttacgtctaaatggtgtcgagttgcttgataaagaaaccacgcgtaaggacgttccatccctgcgtttgggtaaagtgagcatcgcgaaagataccgcatcggtattccgtaacggtcaaacagcagagtatcagatgatcatgacggtcaatgcgaccgtgttgatccccggccgtgacatctacccgattagcgccaaagtcttccgttcgttcttcgataacccgcaaatggcgttagcgaaagataacgaacaagacatgatcgtaaaagagatgtacgaccgtgctgccgaacagctgattcgtaagctgccaagcatccgtgctgcggatattcgttccgacgaagaacagacgtcgaccacaacggatactccggcaacgcctgcacgcgtctctaccacgctgggtaactga

SEQ ID NO: 26954 - DNA, 2583 bp, Escherichia coli
atgcaagagcaataccgcccggaagagatagaatccaaagtacagcttcattgggatgagaagcgcacatttgaagtaaccgaagacgagagcaaagagaagtattactgcctgtctatgcttccctatccttctggtcgactacacatgggccacgtacgtaactacaccatcggtgacgtgatcgcccgctaccagcgtatgctgggcaaaaacgtcctgcagccgatcggctgggacgcgtttggtctgcctgcggaaggcgcggcggtgaaaaacaacaccgcaccggcaccgtggacgtacgacaacatcgcgtacatgaaaaaccagctcaaaatgctgggttttggttatgactggagccgcgagctggcaacctgtacgccggaatactaccgttgggaacagaaattcttcaccgagctgtataaaaaaggcctggtatataagaagacttctgcagtcaactggtgcccgaacgaccagaccgtactggcgaacgaacaagttatcgacggctgctgctggcgctgcgataccaaagttgagcgtaaagagatcccgcaatggtttatcaaaatcaccgcttacgctgacgagctgctcaacgatctggataaactggatcactggccagacaccgttaaaaccatgcagcgtaactggatcggtcgttccgaaggcgtggaaatcaccttcaacgttaacgactatgacaacacgctgaccgtttacactacccgcccggacacctttatgggttgtacctacctggcggtggctgcgggtcatccgctggcacagaaagcggcggaaaataatcctgaactggccgcctttattgacgaatgccgtaacaccaaagttgccgaagctgaaatggcgacgatggagaaaaaaggcgtcgatactggctttaaagcggttcacccattaacgggcgaagaaattcccgtttgggcagcaaacttcgtattgatggaatacggcacgggcgcagttatggcggttccgggtcacgaccagcgcgactacgagtttgcctctaaatacggcctgaacatcaaaccggttatcctggcagctgacggctctgagccagatctttctcagcaagccctgactgaaaaaggcgtgctgttcaactctggcgagttcaacggtcttgaccatgaagcggccttcaacgccatcgccgataaactgactgcgatgggcgttggcgagcgtaaagtgaactaccgcctgcgcgactggggtgtttctcgtcagcgttactggggcgcgccgattccgatggtgacgctggaagacggtaccgtaatgccgaccccggacgaccagctgccggtgatcctgccggaagatgtggtgatggacggcattaccagcccgattaaagcagatccggagtgggcaaaaactaccgttaacggtatgccagcgctgcgtgaaaccgacactttcgacacctttatggagtcctcctggtactatgcgcgctacacttgcccggagtacaaagaaggtatgctggattccaaagcggctaactactggctgccggtggatatctacattggtggtatcgaacacgccattatgcacctgctctacttccgcttcttccacaaactgatgcgtgatgcaggcatggtgaactctgacgaaccagcaaaacagttgctgtgtcagggtatggtgctggcagatgccttctactatgttggcgaaaacggcgaacgtaactgggtttccccggttgatgctatcgttgaacgtgacgagaaaggccgtatcgtgaaagcgaaagatgcggcaggccatgaactggtttataccggcatgagcaaaatgtccaagtcgaagaacaacggtatcgacccgcaggtgatggttgaacgttacggcgcggacaccgttcgtctgtttatgatgtttgcttctccggctgatatgactctcgaatggcaggaatccggcgtggaaggggctaaccgcttcctgaaacgtgtctggaaactggtttacgagcacacagcgaaaggtgatgttgcggcactgaacgttgatgcgctgactgaagatcagaaagcgctgcgtcgcgatgtgcataaaacgatcgctaaagtgaccgatgatatcggccgtcgtcagaccttcaacaccgcaattgcggcgattatggagctgatgaacaaactggcgaaagcaccgaccgatggcgagcaggaccgcgccctgatgcaggaagcactgctggccgttgtccgtatgcttaacccgttcaccccgcacatctgcttcacgctgtggcaggaactgaaaggcgaaggcgatatcgacaacgcgccgtggccggttgctgacgaaaaagcgatggtggaagactccacgctggtcgtggtgcaggttaacggtaaagtccgtgcaaaaatcaccgttccggtggacgcaacggaagaacaggttcgcgaacgtgctggccaggaacatctggtagcaaaatatcttgatggcgttaccgtgcgtaaagtgatttacgtacccggtaaactcctcaatctggtcgttggctaa

SEQ ID NO: 26955 - DNA, 483 bp, Escherichia coli
atgaacaaggttgctcaatattaccgtgaactggtcgcgtcactgagcgaacgcctgcgcaatggcgaacgtgatatcgacgcactggtggaacaggcgcgcgagcgcgtaataaaaacaggggagttaacgcgaaccgaggtcgatgagctgacgcgagctgtcagacgtgacctggaagagttcgccatgagctatgaagagagcctgaaagaagaatctgacagcgtctttatgcgggtgattaaagaaagcttgtggcaggagctggcagacatcaccgataaaacgcagcttgaatggcgcgaagttttccaggacctcaatcatcacggggtttatcacagcggagaagtggtagggctgggaaatctggtctgcgagaaatgtcacttccatctcccgatctatacaccggaagtgctgacgctatgcccgaaatgtggtcatgatcagttccagagacgtccgttcgagccgtaa

SEQ ID NO: 26956 - DNA, 936 bp, Escherichia coli
atggcactgccaattctgttagattgcgacccaggtcatgacgacgctatcgcaatagttcttgccctcgcctcaccagagcttgatgtcaaagcaattacgtcttccgccggaaaccagacaccagaaaaaaccttacgcaatgttctgcgtatgctgaccttgcttaatcgcaccgatattccggtagcaggcggcgcggtaaaaccgttaatgcgtaatttgattattgcggacaatgtgcacggcgaaagcggtctcgacggcccggcattaccggaaccgacgttcgcaccgcaaaactgtacggcggtggagctgatggcgaaaacgctgtgtgaaagtgaggaacctatcaccattgtttcaaccggaccgcaaactaacgttgccttgctgctcaatagccacccggaactgcatagcaaaattgcccgtatcgtgattatgggcggcgcaatggggcttggtaactggacgcctgcggctgaatttaatatttacgttgacccggaagcggcagaaattgtcttccagtcaggaattccggtggtgatggccggtctggatgttactcacaaagcacaaatccacgttgaagacactgagcgtttccgcgcgattggcaaccctgtttcaaccattgttgccgaactgctggatttcttcctcgaatatcataaagacgaaaaatggggctttgtcggcgcaccactgcatgacccatgcaccatcgcctggctgttgaaaccggagttgtttaccactgttgagcgctgggttggcgtggaaacacaagggaaatatacccagggtatgacggttgttgattattattatctgactggcaataaaccgaatgccaccgtaatggtcgatgttgatcgtcagggctttgttgatttactggctgatcgtctgaaattttacgcttaa

SEQ ID NO: 26957 - DNA, 726 bp, Escherichia coli
atgattaccctgaaaaatgtttcaaaatggtatggtcactttcaggtgctgaccgactgctcaaccgaagtgaaaaaaggcgaagtggtggtggtttgcggcccgtctggttccggcaaatcaacgctgattaaaaccgtcaacggcctcgaaccggtgcagcaaggtgaaatcaccgtcgatggcatcgtggttaacgacaagaaaaccgatctggcaaagctgcgttcccgcgtcgggatggtattccagcatttcgagctgttccctcatctgtcgattatcgaaaacctgaccctggcgcaggtgaaagtgcttaaacgcgataaagcgccggctcgtgaaaaagcattgaaattgctggagcgcgtcgggctttccgcacatgccaataagtttccggcgcagctttccggcggtcagcagcagcgtgtggcgatcgctcgcgcattgtgtatggatcctattgccatgctgttcgacgaaccgacatcggcgctggatccggagatgatcaacgaagtgctggacgtgatggtggaactggcgaacgaaggaatgaccatgatggtggtgacccacgaaatgggctttgcccgtaaagtggcgaatcgggtgatctttatggacgagggtaaaattgtcgaagactcgccgaaagacgctttcttcgatgatccgaaatcggaccgcgcaaaagacttcctcgcgaaaatcctgcattaa

SEQ ID NO: 26958 - DNA, 675 bp, Escherichia coli
atgtacgagtttgactggagttccattgttccttccctgccatatctgctcgacgggctggtgatcacgctgaaaatcaccgtcacggcagtggtgattggtattttgtggggcaccatgctggcggtgatgcgcttgtccagctttgcgcctgttgcgtggtttgccaaagcctatgttaacgtattccgctcgattcctttagtcatggttttgctgtggttttacctgattgtgccgggatttctgcaaaacgtgctgggattatcgccaaaaaatgatatccgtttaatttcggcaatggtggcgttttcgatgtttgaagcggcctactattcagagattatccgtgccggtattcaaagtatttcccgtggtcagtcgagcgccgcgctggcgttggggatgactcactggcagtcgatgaaactgattattctgccgcaggctttccgcgcgatggtgccgctgctgctcactcagggcatcgtactgttccaggatacctcgctggtgtatgtgttatctctggccgatttcttccgtaccgcttcaaccattggtgagcgtgatggtacgcaggttgagatgatcctgtttgccggatttgtttatttcgttattagccttagcgcgtcgttgttggtcagctacttgaaaagaaggacagcataa

SEQ ID NO: 26959 - DNA, 741 bp, Escherichia coli
atgtctatagactggaactggggtatttttttacaacaagccccgttcggcaacaccacctatcttggttggatctggagtggttttcaggtgacgatcgctttgtcgatctgcgcctggattatcgctttcctcgtcggttcatttttcggcattttacgtaccgttccaaaccgttttctctccggtctgggtacgttgtatgtcgaactgttccgcaacgtgccgttgattgtgcaattctttacctggtacctggtgatcccggagctgctgccagagaaaatcggcatgtggtttaaggcagagctggatcccaatattcagtttttcctttcatccatgctctgcctggggctgtttaccgccgcccgtgtttgcgaacaggtacgcgccgctattcagtcgctgccgcgtgggcaaaaaaatgccgcgctggcgatgggtctgacgctaccgcaggcttaccgctacgtactgctgcctaatgcttatcgcgttatcgtcccgccgatgacctcagagatgatgaacctggtgaaaaactccgccatcgcctcgactatcggtctggtggatatggcggcgcaggcgggtaaattgctcgattactcggcccacgcctgggagtcgtttaccgccatcacgctggcgtatgtattgattaacgcttttatcatgctggtgatgacgctggttgaacgtaaagttcgtctgcccggcaacatggggggcaaataa

SEQ ID NO: 26960 - DNA, 909 bp, Escherichia coli
atgcaattacgtaaacctgccacagcaatcctggccctggcgctttccgcaggactggcacaggcagatgacgccgccccggcagcaggcagtacgctggacaaaatcgccaaaaacggcgtgattgtcgtcggtcaccgtgaatcttcagtacctttctcttattacgacaatcagcaaaaagtggtgggctactcgcaggattactccaacgccattgttgaagcagtgaaaaagaaactcaacaaaccagacttacaggtgaaattgattccgatcacctcacaaaaccgtattccactgctgcaaaacggcactttcgattttgaatgcggttctaccaccaacaatgccgaacgccaaaaacaggcggctttctctgacactattttcgtggtcggtacgcgcctgctgaccaaaaagggcggcgatatcaaagattttgccgacctgaaaggcaaagccgtagtcgtcacttccggcaccacctctgaagttttgctcaacaaactgaatgaagagcaaaaaatgaatatgcgcatcatcagcgccaaagatcacggtgactctttccgtaccctggaaagcggtcgtgccgttgcctttatgatggatgatgctctgctggccggtgaacgtgcgaaagcgaagaaaccagacaactgggaaatcgtcggcaagccgcagtctcaggaagcctatggttgcatgttgcgtaaagacgatccgcagttcaaaaagctgatggatgataccatcgctcaggtgcagacctccggtgaagcggaaaaatggtttgataagtggttcaaaaatccaattccgccgaaaaacctgaacatgaatttcgaactgtcagacgaaatgaaagcactgttcaaagaaccgaatgacaaggcactgaactaa

SEQ ID NO: 26961 - DNA, 1878 bp, Escherichia coli
atgtctgcatcttcggttaagccgttaaatgttcaattacccgcaataacccttatcctttttgcgctctgtgttgggatattttgttacctcgcacaatggatgagttatgaagaagtcgatcaatccgcacttatccatctcggtgctaacgttgcttctctcacgttgtcgggtgaatcctggcgcttattgagcagtgtctttctgcacagcagtgtttctcatttgctgatgaatatgtttgcactcctggtggtggggggagcggtggaacgtattctggggaaatggcgactcctgattatctggttattctccggcatctttggtgggctgatcagcgcctgttatgcgttacgcgaaagtgagcagatagtcatcagcgttggggcatccggggcaattatgggaatagcgggcgctgcgatagcaacacagctttcttcaggtgcgggtacacaccataaaaaccagcggcgagtattttctctgttgggtatggtggcgctgacactgttgtatggtgcccggcaagcaggaatagataacgcttgccacattggcggcctgattgcggggggcgcgttgggttggctgagtgcgcgtttagttgggcaaaatcggctcgttacggaaggcgggattattgttgcggtcactcttcttctgaccgggactatctggtttgtgcagcagcagattgatgaatcagttttacaggtcaggcaaagcctgcgtgaagcgttttatccgcaggagattgaacaagagcgacgacaaaaaaagcagcagttagtggaggagcgcaacgccctcagggaaacattatccgctccggtaagtcgtgagcaggccagtggtgatttactcgctgagattgccgatatccatgatatggcgatcagtcgggatggtaatacgttgtatgccgcaattgaaaacaccaacagcattgttgttttcgacctcggacaaaagaaaatcctgcatacctttacagcgcccatagcgaaagaaaagtcagtcaaacattgtggtggctgtaaagatcagggcgtcagatcgctggcattaagcctggatgaaaagttgatttatgcgacttcatttgaagcgaatgcagtatcggtcattaacgtggcgacgggggagattattcagtcgattaccaccggcgcccatcctgacagccttatcctctcgcgtgatggcacaaaagcctgggtgatgaatcgcaccagtaatagtgtgtcagccattgatctggtgacttatcagcatgtgacggatatcccgctggagaaatacgacgggacggggacgagcggtaaaccaggcgcctgggttatggcactttccccggatgaaaaaacattgttgatacccggtatggtcagaggcgacattgtacgcatcaataccatcacgcatcagaaagaagactttcccacaggtgatgcgcgtggtatcgtttctgcgatgggattccgaccaaaaaatggcgagattatttttgccgatagccaggggatttcacgtataagcgtaggggatcaacaagccagcattatgacgcaatggtgtagcaggagcgtttattccgttgagggtattagcccggacggtcaatatttagcgttggtgtcatatggcctgcaaggttatgtcatcctgctcaatattaatgccgggcagattattggcgtttatcctgccagctacgttaatcaccttcgtttttcagcggatggtagaaagatatttgttatggcgaagaacaggttaatccaaatggacaggacgcgctcgcttgatccgcaggcaattattcggcatccccaatatggcgatgtggcttgtatccctgaaccgtaa

SEQ ID NO: 26962 - DNA, 1539 bp, Escherichia coli
atggcttttgcctcattaattgaacgccagcgcattcgcctgctgctggcgttattattcggtgcctgcggaacgctggccttctctccttacgacgtctggcctgcggcgattatttcgctgatggggcttcaggcgttgacctttaaccgccgtccactccagtctgccgctattggcttttgctggggatttggcctctttggcagcggtattaactgggtctatgtcagcatcgcgacctttggcggaatgcctggcccggttaacatcttcctggtggtactgctggcggcgtatttgtcgctgtataccggactgtttgctggcgtgctgtcgcgtctgtggccgaaaaccacctggctgcgcgtggcgattgccgcccctgctctctggcaagtgaccgagtttctgcgcggttgggtactaacaggcttcccgtggttacagttcggctatagccagattgatggcccgttaaaagggctggcaccgataatgggcgtggaagccattaacttcctgctgatgatggttagcggcctgctggcactggcgttggtcaaacgcaactggcgtccgctggtggtggccgtcgtgctgtttgcccttcccttcccgctgcgttacatccagtggtttaccccgcaaccggaaaaaactattcaggtttcgatggttcagggcgatattccgcaatcgctgaaatgggacggagaccagctacttaatacgctgaagatatactacaacgcaacggcaccgctgatgggcaaatcatcgttgattatctggccggagtcggcgataaccgatctggaaattaatcagcaaccgttcctcaaagctctggacggtgagttgcgcgataaagggagctcgctggtcaccgggattgtcgacgcgcgtctcaataaacagaaccgctacgatacctacaacaccatcatcacactgggtaaaggcgcaccgtacagctatgaatcagccgatcgctataacaaaaaccatctggtgccgtttggcgagtttgtcccactggagtcgatactgcgtccgttagcaccgttctttgatttgccgatgtcttcattcagccgcggaccatatattcagccaccgctgtcgttgaatggcattcaacttactgcggccatttgctacgaaatcattctcggcgagcaagtgcgcgataacttccgcccggataccgactatctgctgactatctccaacgatgcgtggtttggtaagtctattggtccatggcagcacttccagatggcgcgaatgcgtgcgctggagctggcgcgcccactgttgcgcagcaccaacaacggcattacggcggtgattggcccgcagggtgagattcaggcgatgatcccgcagttcacccgcgaggtgttaaccactaacgtgacgccgactaccggactcacaccgtacgcacgtaccggcaactggccgctgtgggtgctgacggcactgtttggttttgcagctgtgctgatgagtctgcgagcacgtaaacattaa

SEQ ID NO: 26963 - DNA, 879 bp, Escherichia coli
atgagcgacgacaattcacacagtagtgacacgataagcaacaagaagggatttttctccctgttactcagccaacttttccacggtgaaccgaaaaaccgtgacgaactgctggcgctgatccgtgattccgggcagaacgaccttatcgacgaagatacgcgcgatatgctcgaaggggtgatggacatcgcagaccaacgcgttcgcgacatcatgatcccccgctcccagatgattaccctgaaacgcaaccagacgctggacgaatgccttgatgtcatcatcgagtccgcccactcacgtttcccggtgattagcgaagacaaagatcacattgaagggattctgatggcgaaagacttgctgccgtttatgcgcagcgatgctgaagccttcagcatggacaaagtgttacgtcaggcggttgtcgttcctgaaagtaagcgcgtagaccggatgctgaaagagtttcgctctcagcgttaccacatggcgatcgtcattgacgaattcggtggggtttccggtctggtgaccattgaagacatcctggaactgattgttggtgagattgaagacgagtatgacgaagaagatgatatcgacttccgtcagctgagtcgtcatacctggaccgtgcgcgcactggcttctattgaagacttcaacgaagcgttcggcacccactttagcgatgaagaggttgacactatcggtggtctggtgatgcaggcatttgggcatcttccggcgcgtggcgaaaccatcgacatcgacggttaccagttcaaagtggcgatggccgacagtcggcgtattattcaggttcatgtcaaaatcccggatgactcaccccagccgaagctggatgaataa

SEQ ID NO: 26964 - DNA, 468 bp, Escherichia coli; identical to SEQ ID NO: 320

SEQ ID NO: 26965 - DNA, 1080 bp, Escherichia coli
atgttcagcttccggcggcatacagataagaggaacggtttgaacatagacactcgcgaaatcaccctggagccagcagacaacgcgcgtctgttgagcctgtgcggcccgtttgatgacaacatcaaacaactcgaacgccgtctcggcatcgagatcaatcgccgcgataaccactttaaactgaccggccgtccgatttgcgtcaccgctgcggcagacattctgcgtagcctgtatgtcgataccgccccgatgcgcggtcagattcaggatatcgaaccggaacagatccaccttgcgattaaagaagcgcgggtactggagcaaagcgcggagagcgtgccggagtacggcaaagcggtcaatatcaaaaccaaacgcggcgtaattaagccgcgcacgccaaaccaggcgcagtacatcgccaatattctcgaccatgacattaccttcggcgttggcccggcgggtacgggtaaaacctacctggcagtggctgcggcagttgatgccctggagcgtcaggaaattcgccgtattctgctgactcgtccggcagtagaagccggtgagaaactgggcttcctgcctggcgatttaagccagaaagtagacccgtatctgcgcccgctgtacgacgcgctgtttgaaatgctgggctttgagaaagtcgagaaactgattgagcgcaacgttattgaagtcgcaccgctggcctatatgcgtggtcgtacgctgaacgacgcgtttatcattcttgatgagagccagaacaccaccatcgaacagatgaagatgttcctgacccgtatcggttttaactcaaaagcggttatcaccggcgacgtcacacagatcgacctgccgcgtaataccaagtctggtttgcgtcatgccatcgaagtactggctgatgtcgaagagatcagctttaacttcttccacagcgaagacgtggttcgtcacccggtggtggcgcgtatcgttaacgcctatgaagcctgggaagaagccgaacaaaaacgtaaagcggcgctggcagcagaacgcaagcgcgaagaacaggaacaaaaatga

SEQ ID NO: 26966 - DNA, 1425 bp, Escherichia coli
atgaccaaaaaactccatattaaaacctggggctgtcagatgaacgagtacgattcatcgaagatggccgatctgctggatgccacccacggctatcaactgaccgatgtggcggaagaagcggatgtgctgctgctgaacacctgctcaatccgcgagaaggctcaggaaaaagtcttccatcagttgggtcgctggaaactgttaaaagagaagaatccagacctgattatcggcgtcggcggctgcgtggcatcgcaagaaggcgagcacattcgccagcgcgcccactatgtcgatattatttttgggccgcaaacgctgcaccgtctgccggagatgatcaactccgtgcgcggcgaccgcagcccggttgtagatatcagcttcccggaaatcgagaagtttgaccgtctgccggaaccgcgcgccgaagggccgaccgcgtttgtctccatcatggaaggctgcaataaatattgcacctactgcgtagtgccttacacccgtggtgaagaggtaagccgtccgtccgacgatattctgtttgaaattgcccagcttgcggctcagggcgtgcgtgaagtcaacctgctcggtcagaacgtgaacgcctggcgtggtgagaactacgacggcaccaccggatcgtttgccgacctgctgcgtctggttgcggcgatcgacgggatcgatcgtattcgctttaccaccagccatccgatcgaattcaccgacgatatcatcgaagtgtaccgcgacacgccggagctggtgagtttcctgcatctgccggtacagagcggttccgatcgcattctgaacctgatgggacgtacccatacagcgctggagtacaaagcgatcatccgtaaactgcgtgcggcgcgtccggatattcagatcagttctgacttcatcgttggcttccctggcgaaaccaccgaagacttcgagaaaacgatgaagctgattgccgacgtcaatttcgacatgagctacagctttatcttctccgctcgtccaggtacaccagccgccgatatggttgatgatgttccggaagaagagaagaagcagcgcctgtatattctacaagaacgtatcaatcagcaagcaatggcatggagccgccggatgctcggtaccacccagcgtattctggtagaaggtacatcgcgtaagagcatcatggagctttccggccgtactgaaaataaccgcgtcgtcaacttcgaaggtacgccggatatgatcggtaaattcgtcgatgtagaaattaccgacgtctacccgaactctctgcgcggtaaagtggtgcgaactgaagatgaaatgggtctgcgcgtggcagaaacaccggaatcggtgattgcccgtacccgcaaagaaaacgaccttggcgtgggttattatcagccgtaa

SEQ ID NO: 26967 - DNA, 1176 bp, Escherichia coli
atgacaaatcaaccaacggaaattgccattgtcggcggaggaatggtcggcggcgcactggcgctgggactggctcagcacggattttcggtaatggttatcgaacatgcccaacctgcaccgtttgtcgctgacagccagccggacgtgcggatctcggcgattagtgcggcttcggtatcattgcttaaagggttaggggtctgggatgcagtacaggctatgcgttgccatccttaccgcagactggaaacgtgggagtgggaaacggcgcatgtggtgtttgacgccgctgaacttaagctaccgttgcttggctacatggtggaaaacactgtcctgcaacaggcgctgtggcaggcgctggaagcgcatccgaaagtaacgttacgtgtgccaggctcgctgattgcgctgcatcgccataatgatcttcaggagctggaactgaagggcggtgaaacgatccgcgcgaagctggtgattggtgccgatggcgcaaattcgcaggtgcggcagatagcgggaattggcgttcatgcctggcagtatgcgcagtcgtgcatgttgattagcgtccagtgcgagaacgatcccggcgatagcacctggcagcaatttactccggacggaccgcgtgcgtttctgccgttgtttgataactgggcatcgctggtgtggtatgactctccggcgcgtattcgccagttgcagaatatgaatatggcgcagctccagacggaaatcgcgaagcatttcccgtcgtgtctgggttacgtgacaccgcttgccgctggtgcgtttccgctgacgcgccgacatgcgttgcagtatgtgcagccggggcttgcgctggtgggcgatgccgcgcataccatccatccgctggcggggcagggggtgaatcttggttatcgtgatgtcgatgccctaattgatgttctggtcaacgcccgcagctacggcgaagcgtgggccagttatccgatcctcaagcgttaccagatgcggcgcatggcggataacttcattatgcaaagtggtatggatctgttttatgccggattcagtaataatctgccgccgctgcgttttgtgcgtaatcttggtttgatggcggcggagcgtgctggcgtgttgaaacgtcaggcgctgaagtatgcgttagggttgtag

SEQ ID NO: 26968 - DNA, 438 bp, Escherichia coli
atgctgcgttttatgacggcgctgatgggtgcgttattacttatgcaatctgcgtttgccgatacggtcaaaccggaaatcggtaaatatgtttttggctatcgtgggcaggaaggcgctgtggtgtggatgatgcggatagggccgaaagcctctaatgaagccctcattcaggtatcgcatgttgataatgacatcgatggccagatttttcgctgtaaagtgaaagcattacaggaaggtgaaaaatcctataccgccgtaattaagggcaaatcttttgagttattacgcctgaaagaggggaatggcagcctgcatattccgaatgagcaggcgacctggtcggtggcctacagtgatgagttgtcaaacagtgatgtggcaaacccggaacatttccttactgcatatcagaatcaacaagcacctcaataa

SEQ ID NO: 26969 - DNA, 1665 bp, Escherichia coli
atgtgttcaatttttggcgtattcgatatcaaaacagacgcagttgagctgcgcaagaaagcactcgagctgtcacgcctgatgcgtcatcgtggcccggactggtccggtatttatgccagcgataacgccattctcgcccacgaacgtctgtccattgttgacgttaacgcgggggcgcaacctctctacaaccaacaaaaaacccacgtgctggcagtaaacggtgaaatctacaaccaccaggcattgcgcgctgaatatggcgatcgttaccagttccagaccgggtctgactgtgaagtgatcctcgcgctgtatcaggaaaaagggccggaatttctcgacgacttgcagggcatgtttgcctttgccctgtacgacagcgaaaaagatgcctacctgattggtcgcgaccatctggggatcatcccactgtatatgggctatgacgaacatggtcagctgtatgtggcctcagaaatgaaagccctggtgccggtatgccgcacgattaaagagttcccggcggggagctatttgtggagtcaggacggcgagatccgttcttattatcaccgcgactggttcgactacgatgcggtgaaagataacgtgaccgacaaaaacgagctgcgtcaggcactggaagaatccgttaaaagccatctgatgtctgatgtgccttacggtgtgctgctatctggtggcctggattcctcaattatttccgctatcaccaagaaatacgcagcccgtcgcgtggaagatcaggaacgctctgaagcctggtggccgcagctgcactcctttgctgtaggtctgccgggttcaccggatctgaaggcagcccaggaagtggcaaaccatctgggcactgtgcatcatgaaattcacttcactgtacaggaaggtctggacgccatccgcgacgtgatttaccacatcgaaacctatgacgtgacgacaatccgcgcttcaacaccgatgtatttaatgtcgcgtaagatcaaggcgatgggcattaaaatggtgctgtccggtgaaggatctgatgaagtgtttggcggttatctatacttccacaaagcgccgaatgccaaagaactgcatgaagagacggtgcgtaaactgctggccctgcatatgtatgactgcgcgcgtgccaacaaagcgatgtcagcctggggcgtggaagcacgcgttccgttcctcgacaaaaaattcctcgacgtggcgatgcgcattaacccacaggataaaatgtgcggtaacggcaaaatggaaaaacacatcctgcgtgaatgttttgaagcgtatctgcccgcaagcgtggcctggcggcagaaagagcagttctccgatggcgtcggttacagttggatcgacaccctgaaagaagtggcggcgcagcaggtttctgatcaacagctggaaactgcccgcttccgcttcccgtacaacacgccgacgtccaaagaagcgtatctgtaccgcgagatctttgaagaactgttcccgcttccgagcgccgctgagtgcgtgccgggcggtccttccgtcgcgtgttcttccgctaaagcgatcgaatgggatgaagcgttcaaaaaaatggacgatccatctggtcgtgcggttggtgttcaccagtcggcgtataagtaa

SEQ ID NO: 26970 - DNA, 753 bp, Escherichia coli
atgaccattaaaaatgtaatttgcgatatcgacggcgtgctgatgcacgataacgtcgccgtaccgggtgcagcggaatttttgcacgggattatggataaaggcctgccgctggtgttgctgaccaactatccttcgcagaccgggcaagatctggcgaatcgctttgccactgccggtgtcgatgtaccggatagcgtgttttatacctccgcgatggcgaccgccgatttcctgcgtcgccaggaaggcaagaaagcatatgtggtgggcgaaggcgcactgattcatgaactgtacaaagccggtttcactattaccgatgtgaaccctgattttgtgattgttggcgaaacgcgttcctacaactgggacatgatgcataaagcagcctatttcgtcgctaacggtgcacgctttatcgccaccaacccggacacccacgggcgcggtttttatccggcctgtggcgcgttgtgtgcagggatcgagaaaatctccgggcgcaaaccgttctatgttggaaagccgagtccgtggatcatccgcgcggcattaaacaaaatgcaggcgcattcggaagaaacggtgattgtcggcgataacttgcgtaccgatattctggcgggcttccaggccggtctggagacgattctggtgctttctggtgtttcgtcactcgacgatatcgacagtatgccgttccgcccaagctggatttacccgtcggtcgctgaaatcgacgttatctga

SEQ ID NO: 26971 - DNA, 1221 bp, Escherichia coli
atgacaccaggcggacaagctcagataggtaatgttgatctcgtaaaacagcttaacagcgcggcggtttatcgcctgattgaccagtacgggccaatctcgcggattcagattgccgagcaaagccagcttgcccccgccagcgtaaccaaaattacgcgtcagcttatcgaacgcgggttgatcaaagaagttgatcagcaggcctccaccgggggccgccgcgctatctctattgtcaccgaaacccgcaatttccacgcaatcggcgtacggcttggtcgtcacgacgccaccatcactttgtttgatctcagtagcaaagtgctggcagaagaacattacccgctgccggaacgtacccagcagacgctggaacatgccctgctgaatgccattgctcagtttattgatagctaccagcgcaagctgcgcgagctgatcgccatttccgtgatcctgccagggcttgttgacccggacagcggcaaaattcattacatgccgcatattcaggtagaaaactgggggctggtagaagcactggaagaacgttttaaagtgacctgtttcgtcggtcacgatatccgtagtctggcgctagcggagcactacttcggtgcaagtcaggattgcgaagactccattctggtgcgtgtacatcgcggaaccggggccgggattatctctaacgggcgcatttttattggccgcaacggtaacgtcggtgaaattggccatattcaggtcgaaccgctgggtgaacgctgccactgtggcaactttggctgcctggaaactatcgctgccaacgctgccattgaacaacgggtgttgaatctgttaaagcagggctaccagagccgcgtgccgctggacgactgcaccataaaaactatctgcaaagctgcgaacaaaggcgatagcctggcgtcggaagtgattgagtatgtcggtcgtcatctgggcaaaaccatcgccattgccatcaacctgtttaacccgcaaaaaattgttattgccggagaaatcaccgaagccgataaagtgctgctccctgctattgaaagctgcattaatacccaggcgctgaaggcgtttcgcactaatctgccggtggtacgttctgagctggatcaccgctcggcaatcggcgcttttgcgctggtaaaacgcgccatgctcaacggtattttgctccagcatttgctggaaaattaa

SEQ ID NO: 26972 - DNA, 1149 bp, Escherichia coli
atgtatgcattaacccagggccggatctttaccggccacgaatttcttgatgaccacgcggttgttatcgctgatggcctgattaaaagcgtctgtccggtagcggaactgccgccagagatcgaacaacgttcactgaacggggccattctctcccccggttttatcgatgtgcagttaaacggctgcggcggcgtgcagtttaacgatactgctgaagcagtcagcgtagaaacgctggaaatcatgcagaaagccaatgagaaatcaggctgtactaactatttgccgacgcttatcaccaccagcgacgagctgatgaaacagggcgtgcgcgttatgcgcgagtacctggcaaaacatccgaatcaggcgttaggtctgcatctggaaggtccgtggctgaatctggtaaaaaaaggcacccataatccgaattttgtgcgtaagcctgatgccgcgctggtcgatttcctgtgcgaaaatgccgatgtcattaccaaagtgaccctggcaccggaaatggttcctgcggaagtgatcagtaaactggcaaatgccgggattgtggtttctgctggtcactccaacgcgacgttgaaagaagcaaaagccggtttccgcgcggggattacctttgccacccatctgtacaacgcgatgccgtatattaccggtcgtgaaccgggcctggcgggcgcgatcctcgacgaagctgacatttattgcggtattatcgctgatggcctgcatgttgattacgccaacattcgcaacgctaaacgtctgaaaggcgacaaactgtgtctggttactgacgccaccgcgccagcaggtgccaacattgaacagttcatttttgcgggtaaaacaatatactaccgtaatggactttgtgtggatgagaacggtacgttaagcggttcatccttaaccatgattgaaggcgtgcgtaatctggtcgaacattgcggtatcgcactggatgaagtgctgcgtatggcgacgctctatccggcgcgtgcgattggcgttgagaaacgtctcggtacactcgccgcaggtaaagtagccaacctgactgcattcacacctgattttaaaatcaccaggaccatcgttaacggtaacgaggtcgtaactcaataa

SEQ ID NO: 26973 - DNA, 801 bp, Escherichia coli
atgagactgatccccctgactaccgctgaacaggtcggcaaatgggctgctcgccatatcgtcaatcgtatcaatgcgttcaaaccgactgctgatcgcccgtttgttctgggcctgccgactggcggcacgccgatgaccacctataaagcgttagtcgaaatgcataaagcaggccaggtcagctttaagcacgttgtcaccttcaacatggacgaatatgtcggtctgccgaaagagcatccggaaagctactacagctttatgcaccgtaatttcttcgatcacgttgatattccagcagaaaacatcaaccttctcaacggcaacgccccggatatcgacgccgagtgccgccagtatgaagaaaaaatccgttcttacggaaaaattcatctgtttatgggcggtgtaggtaacgacggccatattgcatttaacgaaccggcgtcttctctggcttctcgtactcgtatcaaaaccctgactcatgacactcgcgtcgcgaactctcgtttctttgataacgatgtcaatcaggtgccaaaatatgccctgactgtcggtgttggtacattgctggatgccgaagaagtgatgattctggtgctgggtagccagaaagcactggcactgcaggccgccgttgaaggttgcgtgaaccacatgtggaccatcagctgtctgcaactgcatccaaaagcgatcatggtgtgcgatgaaccttccaccatggagctgaaagttaagactttaagatatttcaatgaattagaagcagaaaatatcaaaggtctgtaa

SEQ ID NO: 26974 - DNA, 1947 bp, Escherichia coli
atgaatattttaggttttttccagcgactcggtagggcgttacagctccctatcgcggtgctgccggtggcggcgctgttgctgcgattcggtcagccagatttacttaacgttgcgtttattgcccaggcgggcggtgcgatttttgataacctcgcattaatcttcgccatcggcgtggcatccagctggtcgaaagacagcgcaggtgcggcggcactggcgggtgcggtaggttactttgtgttaaccaaagcgatggtgaccatcaacccggaaattaacatgggtgtactggcgggtatcattaccggtctggtcggtggtgcagcctataaccgttggtccgatattaaactgccggacttcctgagcttcttcggcggcaaacgctttgtgccgattgccaccggcttcttctgcctggtgctggcggccatttttggttacgtctggccgccggtacagcacgctatccatgcaggcggcgagtggatcgtttctgcgggcgcgctgggttccggtatctttggtttcatcaaccgtctgctgatcccaaccggtctgcatcaggtactgaacaccatcgcctggttccagattggtgaattcaccaacgcggcgggtacggttttccacggcgacattaaccgcttctatgccggtgacggcaccgcggggatgttcatgtccggcttcttcccgatcatgatgttcggtctgccgggtgcggcgctggcgatgtactttgcagcaccgaaagagcgtcgtccgatggttggcggtatgctgctttctgttgctgttactgcgttcctgaccggtgtgactgagccgctggaattcctgttcatgttccttgcgccgctgctgtacctcctgcacgcactgctgaccggtatcagcctgtttgtggcaacgctgctgggtatccacgcgggcttctccttctctgcgggggctatcgactacgcgttgatgtataacctgccggccgccagccagaacgtctggatgctgctggtgatgggtgttgtcttcttcgctatctacttcgtggtgttcagtttggttatccgcatgttcaacctgaaaacgccgggccgtgaagataaagaagacgagatcgttactgaagaagccaacagcaacacggaagaaggtctcaatcaactggcaaccaactatattgctgcggttggcggtactgacaacctgaaagccattgacgcctgtattactcgtctgcgccttaccgtggttgactcagctcgcgtcaacgatgtgatgtgtaaacgtctgggggcttctggggtagtaaaactgaacaaacagactattcaggtgattgtgggcgcgaaagcagaatccatcggcgatgcgatgaagaaagtcgttgcccgtggtccggtagccgctgcgtcagctgaaactgcgcctgcaactgccgcgcctgtagcaaaaccgcaggctgtaccaaacgcggtgtctatcgcggagctggtatcgccgattaccggtgatgttgtggcactggatcaggttcctgacgaagcattcgccagcaaagcggtgggtgacggtgtggcggtgaaaccgacagataaaatcgtcgtatcaccagccgcagggacaatcgtgaaaatcttcaacaccaaccacgcgttctgtctggaaaccgaaaaaggcgcggagatcgtcgtccatatgggtatcgacaccgtagcgctggaaggtaaaggctttaaacgtctggtggaagagggcgcgcaggtaagcgcaggacaaccgattctggaaatggatctggattacctgaacgctaacgcccgctcgatgattagcccggtggtttgcagcaatatcgacgatttcagcggcctgatcattaaagctcagggccatgttgtggcgggtcaaacaccgctgtatgaaatcaaaaagtaa

SEQ ID NO: 26975 - DNA, 1665 bp, Escherichia coli
atgagtgaggcagaagcccgcccgactaactttattcgtcagatcatcgatgaagatctggccagtggtaagcacaccacagtacacacccgtttcccgccggagccgaatggctatctgcatattggccatgcgaaatctatctgcctgaacttcgggatcgcccaggactataaaggccagtgcaacctgcgtttcgacgacactaacccggtaaaagaagatatcgagtatgttgagtcgatcaaaaacgacgttgagtggttaggttttcactggtctggtaacgtccgttactcctccgattattttgatcagctccacgcctatgcgatcgaactgatcaataaaggcctggcgtacgttgatgaactgacaccggaacagatccgcgaataccgcggcaccctgacgcagccgggtaaaaacagcccgtaccgcgaccgcagcgttgaagagaacctggcgctgttcgaaaaaatgcgtaccggtagttttgaagaaggtaaagcctgcctgcgtgcgaaaatcgacatggcgtcgccatttatcgtaatgcgcgatccggtgctgtaccgcattaaatttgctgaacaccaccagactggcaacaagtggtgcatctacccgatgtacgacttcacccattgcatcagcgatgcgctggaaggtattacgcactctctgtgtacgcttgagttccaggacaaccgtcgcctgtacgactgggtgctggacaacatcaccattcctgttcacccgcgccagtacgaattctcgcgcctgaatctggaatacactgtgatgtccaagcgtaagctgaacctgctggtgaccgacaagcacgttgaaggctgggatgacccgcgtatgccgaccatttccggtctgcgtcgtcgtggttacactgcggcttctattcgtgagttctgcaaacgcatcggcgtgaccaagcaggacaacaccattgaaatggcgtcgctggaatcctgcatccgtgaagatctcaacgaaaacgctccgcgcgcaatggcggttatcgatccggtgaaactggttatcgaaaactatcagggcgaaggcgaaatggtcaccatgccgaaccatccgaacaaaccggaaatggggagccgtcaggtgccgtttagcggtgagatttggatcgatcgcgccgatttccgcgaagaagctaacaagcagtacaaacgtctggtgctgggtaaagaagtgcgtctgcgtaatgcttacgtcattaaggctgaacgcgtggagaaagatgccgaaggcaatatcaccaccatcttctgtacttatgacgccgacaccttaagcaaagatccggcagatggtcgtaaagtgaaaggtgttattcactgggtgagcgcggcacatgcgctgccggttgaaatccgtttgtatgaccgtctgttcagcgtgcctaacccaggtgctgcggatgatttcctgtcggtgattaacccggaatcgctggtgatcaaacagggtttcgctgaaccgtcgctgaaagacgcggtagcgggtaaagcattccagtttgagcgtgaaggttacttctgcctcgacagccgccattctacggcggaaaaaccggtatttaaccgcaccgttgggctgcgtgatacctgggcgaaagtaggcgagtaa

SEQ ID NO: 26976 - DNA, 1407 bp, Escherichia coli
atgcgtacgtttagtggcaaacgtagtacgctggcgctggctatcgccggtgttacagctatgtcgggctttatggcaattccggaggctcgcgccgaaggattcatcgacgattcaaccttaaccggcggtatctattactggcagcgtgaacgcgaccgtaaagatgttaccgacggcgataaatacaaaaccaacctttctcactccacctggaacgccaacctcgattttcagtctggttatgctgctgatatgttcggccttgatattgccgtgtttacggcgattgaaatggcggaaaacggcgacagctctcacccgaacgaaatcgcgttttcaaaaagtaataaagcctatgacgaagactggtccggcgataaaagcggtataagcctgtataaagcagcggccaaatttaaatacggtccggtttgggcgagggcaggttatattcagccaaccggtcagacgctgttagcgccacactggagctttatgccgggtacttatcagggggcggaggccggggcgaattttgattacggcgatgctggtgcgttgagtttctcctacatgtggaccaacgaatacaaagcaccgtggcatctggaaatggatgagttttatcagaacgataaaaccaccaaagttgattatctacactcccttggggcgaagtacgacttcaaaaataacttcgtactggaagcggcgtttggtcaggccgaagggtatatcgatcaatattttgccaaagccagctacaaatttgatatcgccggtagcccgttaaccaccagctaccagttctatggtacgcgcgataaagttgacgatcgcagcatcaacgatctttatgacggcaccgcctggctgcaggcgttgacctttggttaccgggcggctgacgtagtggatttgcgcctcgaaggtacctgggttaaggctgacggtcagcaaggatacttcctgcaacgtatgactccaacctacgcttcctcgaacggtcgcctggatatctggtgggataaccgttccgacttcaacgccaacggcgaaaaagcggtcttcttcggtgcgatgtatgacctgaaaaactggaatcttccaggcttcgccatcggcgcttcctacgtttacgcatgggatgctaaacctgcgacctggcagagcaatccggatgcgtactacgacaagaaccggactattgaagagtctgcctacagcctggatgcggtttacaccattcaggacggtcgtgccaagggcacgatgttcaaactgcatttcaccgaatatgacaaccactccgacatcccaagctggggcggtggttacggcaacattttccaggatgagcgcgacgtgaaattcatggtaatcgcaccattcaccatcttctga

SEQ ID NO: 26977 - DNA, 327 bp, Escherichia coli
atgaaaaaactgattctcatcgccatgatggcatcggggctggtagcttgtgcgcaatcaaccgcaccgcaggaagacagtcgtctgaaagaggcttacagcgcctgtatcaacaccgcgcaaggttcgccggaaaaaattgaagcctgccagagcgtgttaaacgtgctgaagaaagagaaacaacatcagcagtttgccgagcaggaaagtgtccgcgtactggattatcagcagtgtattcaggcaacgcaaaccggaaatgatcaggcggtgaaagccgattgtgataaggtctggcaggaaattcgcagtaataacaaataa

SEQ ID NO: 26978 - DNA, 447 bp, Escherichia coli
atgactgataacaataccgccctaaagaaagctggcctgaaagtaacgcttcctcgtttaaaaatcctggaagttcttcaggagccggacaaccatcacgtcagtgcggaagatttatacaaacgtctgatcgatatgggtgaagaaattggtctggctacggtatatcgcgtactgaaccagtttgacgatgctggtatcgtcacccgccacaattttgaaggcggtaaatccgtatttgaactgacacagcaacatcaccacgatcacctgatctgcctcgactgcggcaaggttatcgaatttagtgatgattccatcgaagcgcgtcagcgtgaaatcgccgcaaaacatggcattcgcctgactaaccacagtctctatctttacggtcactgcgccgaaggcgattgccgcgaagatgagcacgcgcacgaaggcaaataa

SEQ ID NO: 26979 - DNA, 531 bp, Escherichia coli
atggctatcactggcatctttttcggcagcgacaccggtaataccgaaaatatcgcaaaaatgattcaaaaacagcttggtaaagacgttgccgatgtccatgacattgcaaaaagcagcaaagaagatctggaagcttatgacattctgctgctgggcatcccaacctggtattacggcgaagcgcagtgtgactgggatgacttcttcccgactctcgaagagattgatttcaatggcaaactggttgcgctgtttggttgtggtgaccaggaagattacgccgaatatttctgcgacgcattgggcaccatccgcgacattattgaaccgcgcggtgcaaccatcgttggtcactggccaactgcgggctaccatttcgaagcgtcaaaaggtctggcagatgacgaccactttgtcggtctggctatcgacgaagaccgtcagccggaactgaccgctgaacgtgtagaaaaatgggttaaacagatttctgaagagttgcatctcgacgaaattctcaatgcctga

SEQ ID NO: 26980 - DNA, 363 bp, Escherichia coli
atgtattatggcgcgctatccatccgggcagaggcctggctgattgtttcccccgaagtcaccaagatcatggccaaagaacaaacggaccgtacgacattagatctgttcgcgcacgagcgtcgaccgggacgaccgaaaactaatccgctttcgcgcgatgaacagctgcgtattaataaacgcaaccagctaaaacgcgacaaagtacgtggccttaagcgtgtcgaactgaagctgaacgcggaagctgtcgaggcgctgaacgagctggcggaatcgcgcaatatgagccgtagcgaactgatcgaagagatgttaatgcagcaactggcggcgctgcgtagtcagggcatcgtttaa

SEQ ID NO: 26981 - DNA, 765 bp, Escherichia coli
atgaaattgaatatccgcgcgcaaactgcacaaaaccagcacaataattctcccatcgttcttgtccacggtctgtttggcagcctcgacaaccttggcgtactggctcgcgatctggtaaacgatcacaatatcatccaggttgatatgcgtaaccacggtctttcaccgagagatccggtaatgaattacccggcgatggcgcaggatcttgttgataccctggatgcactgcagatcgacaaagcaacatttatcggtcactccatgggcggtaaagcggtaatggcacttactgcactggcccccgatcggattgacaagctggtggcaattgatattgcgccggtcgattatcacgttcgccggcatgatgagattttcgcggccatcaacgcagtcagtgaatcggacgcacaaactcgccagcaagcagcagcaataatgcgccagcatcttaatgaagaaggggtgattcagtttctgctgaaatcttttgttgacggggagtggcgctttaacgtgccggtattgtgggatcagtatccgcatattgtgggttgggagaaaatcccggcatgggatcaccctgccctgtttatccctggcggcaattctccgtatgttagcgagcagtaccgtgatgatttactggcgcaatttccacaggcgcgggcgcatgtgattgctggcgcgggtcactgggtccatgctgaaaaaccggatgcggtattacgcgctatccgtcgctatctcaatgattaa

SEQ ID NO: 26982 - DNA, 546 bp, Escherichia coli
atgaaaacgattgaagttgatgatgaactctacagctatattgccagccacactaagcatatcggcgagagcgcatccgacattttacggcgtatgttgaaattttccgccgcatcacagcctgctgctccggtgacgaaagaggttcgcgttgcgtcacctgctatcgtcgaagcgaagccggtcaaaacgattaaagacaaggttcgcgcaatgcgtgaacttctgctttcggatgaatacgcagagcaaaagcgagcggtcaatcgctttatgctgctgttgtctacactatattctcttgacgcccaggcgtttgccgaggcaacggaatcgttgcacggtcgtacacgcgtttactttgcggcagatgaacaaacgctgctgaaaaatggtaatcagaccaagccgaaacatgtgcctggcacgccgtattgggtgatcaccaacaccaacaccggccgtaaatgcagcatgatcgaacacatcatgcagtcgatgcaattcccggcggaattgattgagaaggtttgcggaactatctaa

SEQ ID NO: 26983 - DNA, 1641 bp, Escherichia coli
atggcaatccacaatcgtgcaggccaacctgcacaacagagtgatttgattaacgtcgcccaactgacggcgcaatattatgtactgaaaccagaagcagggaatgcggagcacgcggtgaaattcggtacttccggtcaccgtggcagtgcagcgcgccacagctttaacgagccgcacattctggcgatcgctcaggcaattgctgaagaacgtgcgaaaaacggcatcactggcccttgctatgtgggtaaagatactcacgccctgtccgagcctgcgttcatttccgtactggaagtgctggcagcgaacggtgttgatatcattgtgcaggaaaacaatggcttcactccgacacctgccatttccaatgccattctggttcacaataaaaaaggtggcccgctggcagacggtatcgtgattacaccgtctcataacccgccggaagatggtggtatcaagtacaatccgccaaatggtggcccggctgataccaacgtcactaaagtggtggaagacagggccaacgcactgatggctgatggcctgaaaggcgtgaagcgtatctccctcgacgaagcgatggcatccggtcatgtgaaagagcaggatctggtgcagccgttcgtggaagggctggccgatatcgttgatatggcagcgattcagaaagcgggcctgacgctgggtgtcgatccgctgggcggttctggtatcgaatactggaagcgtattggcgagtattacaacctcaacctgaccatcgttaacgatcaggtcgatcaaaccttccgctttatgcacctagataaagacggtgcgatccgtatggactgctcctccgagtgtgcgatggcgggcctgctggcactgcgtgataagttcgatctggcgtttgctaacgacccggattatgaccgtcacggtatcgtcactccggcaggtttgatgaatccgaaccactacctggcggtggcgatcaactacctgttccagcaccgtccgcagtggggcaaagatgttgctgtcggtaaaacgctggtttcatctgcgatgatcgaccgtgtggtcaatgacttgggccgtaagctggtagaagtcccggtaggtttcaaatggtttgttgatggtctgttcgacggcagcttcggctttggcggcgaagagagcgcaggggcttccttcctgcgtttcgacggcacgccgtggtccaccgataaagacggcatcattatgtgtctgctggcggcggaaatcaccgctgttaccggtaagaatccgcaggaacactacaacgaactggcaaaacgctttggtgcgccgagctacaaccgtttgcaggcagccgcgacttccgcacaaaaagcggcgctgtctaaactgtctccggaaatggtgagcgccagcaccctggcaggtgacccgatcaccgcacgcctgactgctgctccgggcaacggtgcttctattggcggtctgaaagtgatgactgacaacggctggttcgccgcgcgtccgtcaggcacggaagacgcgtacaagatttattgcgaaagcttcctcggggaagaacatcgcaagcaaattgagaaagaagcggttgagattgttagcgaagttctgaaaaacgcgtaa

SEQ ID NO: 26984 - DNA, 1191 bp, Escherichia coli
atgaagtatattacatgtttttttatgatgttgtttagtatttcttgtttttctgctactgagctagaaataaaaaaacttgctttgcctgaggctatttccttaatttattcagaagtttttaaggtgccttatatggtttctcctgatttggctaatgatcaacgtcttgtttcatttaaaataactaaggatgttaatgaacgagattttattgagcgttatttttctaacatgaatattaaaatccatacaaaaaaaggggttgattatataacaccttttaaacctcaagaaaaagctcctgctttaaaggtttttgtatattctcctttaaatcgttcagttggctatttatctgatattctttctggttttgtatctggtcaatttggaaattcaggaaatataagctctaacatatccagtacatcatcttctggagcctctaataatttcaataggttaggggattcacttgtgtattatggcactcaaaaagatattgatattatcaaaagtatattgccaactattgatacggtccctgatgaggttgttgtttcaggatatgtttttgaggttcaaacaggtcaaaatgatggttctggatttttacttgctgctaaagttatatctgaaaagtttaatatttctcttggctctaatattagtacttctggtgattttttaagtttaaagacaggttcaattgatgcaatttatactttactttcaaccgataacagattttcggttgtttcttccccgagattacgtgtgaagaataatacagaggcttcgttttctgtaggtgctgatgttcctattttaggtagtgttacagttaatggtaacaattcaacacagtctgttgagtatcgtagttcaggggttttgttcagagtgaaaccatcaatcaaaatcaacgctattgatttgaacattcaacagcagctttctaattttgttgcaacggatactggtgttaataactctcctacgcttttaaaacgggatgtaacgacagatgttgttatgaatgatggtgatattattttgataggtggtcttgctgagcagaaggactctaaatcttcgtctgggtggtctatttttggctcacgttcaacagaaaattcaaagacggatattgttgttatgcttcaggttcgtaaggtgccaagatga

SEQ ID NO: 26985 - DNA, 1032 bp, Escherichia coli
atgcctatttctgcttatgttggttctttaggtagtggtaaatcatacgaggtcgtttctagtgttattgtgcctgcttgtgcatctggtcgtcgtgttgtcactaatatttatggtattaatagagataaaattcatgagtattgcataaaaaaatcaaagtctggaaaggatacacgtttaggtgatatcgtttatgtttctaatgatgatgtaaaatctgaaaacttttttccatataaagattctcttcctgaggatactctttgccaatatggtgatttgattgttgttgatgagtcttggcgtatttgggatagtgataaatctatttgtgagaatcatcgctcatttattgccgaacatcgtcattttactaatattgaaactggcgtttgctgtgacttggttgttataaaccaagaggtttcttctttgcctcgctttattaaagcaaggttagatactacttttcgaatgcaaaagcacattgctattggcatgaagagtcgttatcgtgttgatgtttttaatggttctaaactttataaatcaaataagattacaagttatcagcgtaaatacaaccctgatatattccctttgtataaatcatatgaaaatggagatggaaaagaacttactgttgatagtcgagccagtattttaggtaaaaaaagtttgtattttgtcgttgttgctatgatttttatttttgtgtttagtgttggttatttatatagattttttaatggtgccgctgtaaaaactgatgtttctgattcgccgtctcatgattctaatttgcgttcttttaatttagttcctgatagtcaaaacatacctaagctatcttcaacttggcgtattgtcggaaaacttgaaagagaagggcgtagttatgtgattattacaaataattctggccttgttcgtatggttcctgcatccacttttaattatcaaggtattttacttacaggcattgttgatggtgagcttgttactttttattcaggtggtgacaaatga

SEQ ID NO: 26986 - DNA, 294 bp, Escherichia coli
atggctttatttggattgttgtttagtatagttaatgttcttttaggtttcatttttagaaccgttattattaggttcgttttgttttttggacttctttttgttgtccatgagtttatttatgtgttgtcatcatggataccattcaattttaacatacctgcattatttcgggctttacctgctcctatgtggtacttttttgatttatttaaatttagtgaaggttttcagttagtatttaacgcttatattactcgttttattattcgtagaattccgattattggttag

SEQ ID NO: 26987 - DNA, 1473 bp, Escherichia coli
atgcgcttgggcagtaatcaaaggattatcgctttaacatctctttttatattttttttctctatatttattccggtgcaaaaagtttattctaatccattacttgtaaccagggcggttcttccaactgtccttggcagggtgatttcatctagagctcttcaggtaacgacaacggaatcagcttattcattaatggttaggaatacatctacagcaatatctaaaactgttttgtctaagtcaccatctattgccagtaagggtttttttcgcagtgcttcaggtgcattaacatgggctggagttggttactctgttggttctcttactgctgaaaatttttctgataacgggcgttatctaattgcaacatcaggtaaagctttaggtaacggtaaatgggaggttaattttggtgataaaactttcactgtagattttgaacctacacctgataatccgtttgttattagtgctgactcccttaatatgaatagttatgatactgttgataaggtaagcgctggttatcgttggtggcaatgtacttatggtacaagttgtaagggaccatttattgtaggttctgttactggtgttgctcagggatattttaattcagttgcatcaggtggaggtttaacctgtcgagcaccagataaatcttgtagctataagcttaatattttgtctgtaaatgaagggcaagagggtggctcttcttctgttaaatacagctatacttcttcttatacaaattcagatggtgagttaatttctagtacttacactcctattcaaggtatacaggtattttataataaggattttgataaagcctttgaggttcttttttctgattataagatggcaactgatgacgatggtttttctgttatggatggattaaagaaagttcctatggatttggatactcttgctaagatgataaataatttattaatggatgctgcatctcagccagattatcagggagtacctgtgtcttcaacaaaccccgttacatcaaatgaaataaaggttgcttatcctaattatggggctttgacaaaatttgattatatgtatccatctcaaaattcaccatctgctgatgtgaatattagtgcgcctggattttcccctggtgggtcaggtggcggttctgataatggctctactaaccctgattttagtcatccagatgtaccggaaccgactctagatacaccaccctctgcagaggagatacttcgcccaattaaagaactttttggtcagtatcgagatttggaagtgcgtccatcagggctttctgcttcatgtcctgtggctaaatttaatgtgtttgatagagattatgtgatcgatatgcattgcgtatttttagaggaatatcgttcttttatcggcataatttcttctttgatatgggcgttaatttcattacgtattttactctctacgtga

SEQ ID NO: 26988 - DNA, 273 bp, Escherichia coli
atgattaaaattgaaattaaaccttctcaagctgtcgctgatactcgcagtggcgtatctaagagtactggtaaaccgtatactatatctgagcagtccggttatatatttcttggtggggattatcctcaactatttaagatacctttagaacaagggcaagctccttatcctgctggtttttatgatttgcatccatctagtatttttgttggtgattttcagaaattacgtattggtaaaattgttttaactccttcttctgataagtga

SEQ ID NO: 26989 - DNA, 1125 bp, Escherichia coli
atggatgctatgttttttgattggttgagtattgagcaagattttggttatcagctgcccattttgggggacgttgcgtatcaacgtgttcacctccagagcggtgaggctagctctttgtctcagcctgtttttcagcacaaaggctcattttgtgatgttgttagtattttaatacgtggatctcttcttcgtatgactggtaatccttctcgttggggaagggttgataatttgtttggattaacaagtgtagatgcttgtgtttgtgtttttaactcaattcttttggatttgggtttaccattatttactaagtgcactagaatttttccttctcaaaccaaagagaatgagcgcgttcgtttgatatctgatggcgcgatagtaaaagaacttcatattactactaacaagtctgttggtaatggaaatgaagatgattatatatctgcattatctactcagccttaccgtaatagtttgcctcgtttgcattctaatggtaaatctgttgattggctttctaaaaaaggtaatgtaaaccttatctatccgtgtgtttacaataaagcttccgaattagagcttcatagtctctctaaaattaaaaacaagtttggtattgattcttctgaatataaatatttattgaatgttattgattattgtcgtgaatctggcattgtgcgctttgagcaaaaattgaaatctagatttttacagcgtaaaggtttgtgttattgggggctttctgattattcatcgttaaagcttttgcaggatgagtttgttgaacttgataaaaagatttcggtgacatctatggattttgaaactattagtgaacatttgatttctcaaggtgttgttgattccttgcgttctgctaatacaacagctatgtatgctattcaatggatgcatggtcattcttttgatttgaataaaaagcaagttcaaactcatcgcgcacgtttacgtaaaataggcattgatattgctcaaaaatgtaacatttctaaatttagtcctgtagttgttaaacatacaagggagataactgtatctgattgtgtgattccttcttggtatataaagtcttctcatttacgtgtcgcttaa

SEQ ID NO: 26990 - DNA, 234 bp, Escherichia coli
atggacccaaaacacacaaagactagatttatggctgagaaaaaatacacgtccctacgagtaccggaagaacgtaaaatggagctagagaaagccgctattgaagtcagctatgctaccggacgcatggtgaaatggactgacatggcgttctatctcatggatgagtatctaaaagaagctgtcagagacatgaagtcatcaacaaagacaccaagcctagggaaaaaataa

SEQ ID NO: 26991 - DNA, 402 bp, Escherichia coli
atggaatttaaaccaaaaaaaaccatcaaaaaaatagtaaaaacctatgaagtactcacagaagaagagctaccagaagaaattatctttgatattgaaataagagaaaacgaagttgggggaccaatatcagaagaagaatttcaaagcataataatggacaaagcaatcgcgtatgctattcacgatagagaaaatgatagatatatcaaagggatgcgtttaagtgaagacgggaaatgtataagatttgaatggacaagaaatataagaaatgcatttatatttaataatgagagtaaagcttcaattttatctttatacataaacggaaaacctagaggatgtaatatagttcctctaatctatcaagtagatccatttttcaaatatcaagaataa

SEQ ID NO: 26992 - DNA, 1191 bp, Escherichia coli; identical to SEQ ID NO: 26984

SEQ ID NO: 26993 - DNA, 1032 bp, Escherichia coli; identical to SEQ ID NO: 26985

SEQ ID NO: 26994 - DNA, 294 bp, Escherichia coli; identical to SEQ ID NO: 26986

SEQ ID NO: 26995 - DNA, 1473 bp, Escherichia coli; identical to SEQ ID NO: 26987

SEQ ID NO: 26996 - DNA, 273 bp, Escherichia coli; identical to SEQ ID NO: 26988

SEQ ID NO: 26997 - DNA, 1125 bp, Escherichia coli; identical to SEQ ID NO: 26989

SEQ ID NO: 26998 - DNA, 234 bp, Escherichia coli; identical to SEQ ID NO: 26990

SEQ ID NO: 26999 - DNA, 402 bp, Escherichia coli; identical to SEQ ID NO: 26991

SEQ ID NO: 27000 - DNA, 276 bp, Escherichia coli
atgcgcgctttactgtgtctgcaccggcttaacaaaattcaacagggtttgaaaaggaacatgtgttcccgtaaagatcagaccattttcaacagcccatgtcttaagttctgtcagtatggctacagcctgtttgctgagtggcacaaggtgtggtgttcgaatcttggttccccaatgagggttcaggcggtgtgggcaaataaaaaagaaaacataaataaaaccatccggccgttgtggctggatggttattcattatttctatgtcactga

SEQ ID NO: 27001 - DNA, 261 bp, Escherichia coli
ttgtgttttggatatgaccgcagcggcttgctgaccagccgcacgggtcagatgtacgaccatgaccattattattacgacaaagcgggcaacctgctgacggacgagtatcagggagcggtgatcagggaaagatcacgtaacgctgctcagggaaagatcatcagaagtacactttttgtactaagtaattcgcattttatgtttaaaaatttagatattcctcattacctgaagctgttttttattgcgtatacatga

SEQ ID NO: 27002 - DNA, 672 bp, Escherichia coli
atgccatttgctcgttatttctgcattttcataaacgttggtttgggagaaggctcatttggattcagaaatctggttgccttcacaacggctggagtaacaagctggactgttcctgaagagttgcgcaaaggaagaaaatgttacgtcaaagttattggtggcggtgcgtcaggagggataggttcaataaccgcttcagccgttacatgtggcggaggaggtggtgggggcggagttgctgagggactggtagatttaactggtataaacagtgtttcgattacggttggtgccggtggtgcgcctgtgtctggtatttctgtaaacggtaaaaatggtggctcgagcagtttcgggacttacatgtcagcttccggaggctatagcggaggccagccttccggagggttaggcgcagttggtgtcgggggaacaattaatacatcgcttgggccaggttctccaggttccattgcttctgccgcatcgggggctggtaatggtggttctggtggtggccccggaggagcaggttcattcagagatacagctaacggaaaagcggtatcagcagttgggcctggaggtggcggtgctggattatgtcctaattcatcaacgggtcagtcgggtgccggagcagatggcgcagtttatatttactggtga

SEQ ID NO: 27003 - DNA, 636 bp, Escherichia coli
atgactgagcaggctacaacctgtaaaggtgcgtccttacttaacggtgactcctggcacagtatcaactggcgtcagtgctatcgggaagtgcggagactgcaagcgcgtatcgtaaaggcaacacgagaaggtaaacatggcaaggtcaaatccttgcaatggatactgactcactcgtttagtggcagagcagttgctgtcagacgagttacagagaatagcgggaaacgtactcctggggttgatggtcagacatggtcttccccggaggttaaatttcttgctattaacctgctgaaacggcgtggttacaaaccacagccacttaagcgggtttatatacctaagtcaaatgggaagtctcgtccccttgggatacccactatgaaggatcgggcgatgcaggcgttgtatttgctggctcttgagcccgttgctgaagtcactgctgaccagagatccttcggctttcggactggaaggtctactgcagatgcgatagcacagtgcttctgtgttcttgcgcagaaaacatccgctgaatgggtgcttgagggggatatacggggatgctttgacaatatatctcatcaatggctaatcgataacacctcaacagcagacaaatcctga

SEQ ID NO: 27004 - DNA, 450 bp, Escherichia coli
atgcagcacctgccggcaccgatccaccatgcccgggatgctgctcagcttcctgttgccatcgattatccggcagcgctggcactccgccagatgtcgatggttcatgatgaactgccaaaatacctgctggcccctgaagtgagcgccctgctccattacgtgccggatctgcgccgcaaaatgctgctggccacactgtggaacaccggtgcgcgcattaatgaagcactggcgctgacgcggggggatttttcgctcacgcccccgtatctatccgtttgtgcagctggccactctgaagcagcggacagaaaaagccgccaggacggcaggaagaatgcccgccggtcagcagactcaccggctggttccgctctccgactcctggtacgtcagccagctgcagacgatggtagccacactgaaaatccccatggaacggcgtaa

SEQ ID NO: 27005 - DNA, 198 bp, Escherichia coli
gtgttgactacaacaagccacgacagcgtatttctgcgtgccgataattccctgatcgacatgaactttatcaccagtttcaccggtatgactgacaaatggttttacaagttgatcagtgaaggccatttccctaaacccatcaaactggggcgcagcagccgctggtacaaaagtgaagtggagcagtggaagtga

SEQ ID NO: 27006 - DNA, 567 bp, Escherichia coli
atgtatacagaatcaaacgttaagctttcctgtaatgccctctggcaaaagtgtgtccttgcaactctgtatcgggctgcagctacacatcctaaaattaaattattacaatttaaattaataccagggcagggtattaataaggccattccctctctgatggctgattttactggtgaactgcatagactcatttctgaatatttgcagtgtaagcgacgtaaagatcaatctgttgagcccacccctttatattatctctggagtagggaagctgtggctaacgataccactccttatcttatggtgctgctacttaataacgatgtctggagtaagagtcgtgaggtggtggttctcagaaatctgattgagcaggcgtggggaaaagtattgggtgaagataactccattacacatctggttgtgtatcctgaagtgctgtcgttggtatttgatgcagctaacacatacaacgctgagcctggtgtactggaacagacggcccgagcttacattgaatcacatggtgccattgaacgtcatcttgggtgtagtgacttttaa

SEQ ID NO: 27007 - DNA, 924 bp, Escherichia coli; identical to SEQ ID NO: 7625

SEQ ID NO: 27008 - DNA, 243 bp, Escherichia coli
gtgccgaccattctcaaccgcggcggcttcgccaataagctgcgtgccgactggcagtgggtgatcggcatcggcggcctcggccatatcgccattaagctgctgcgggcgatgggcgccgatcgcgtagtcaatagccgcgatcctgaagccttaaaagtgctggccgggcagtttgacctgagcatcaacaccgtggcggtggatcttgactggcagccgtacttcgaagccctgtcctag

SEQ ID NO: 27009 - DNA, 999 bp, Escherichia coli
atggatagcgtccaccatatttggtgtccactattctctcaggaatttcaggatctgccagacggtgctgagacgacgcttacagtggagctgagccgtgccacactggggcgctggacaggtgctgttgctgaactgctggagccgctgtatgacgtcctgcgccagtatgtgctgatgcccggtaaagtccatgctgatgatatccccgtcccggtccaggagccgggcagcggtaaaacccggacagcccggctgtgggtctacgtccgtgatgaccgcaacgccggttcacagatgcccccggcggtctggttcgcgtacagtccggaccggaaaggtatccatccacaaaatcacctggccggttacagcggtgtgcttcaggccgatgcttacggtggttaccgggcgttatacgaatccggcagaataacggaagccgcgtgtatggctcatgcccggagaaaaatccacgatgtgcatgcaagagcgcccaccgacatcaccacggaagccctgcagcgtatcggtgaactgtatgctatcgaggcagaggtccggggctgttcagcagaacagcgtctggcggcaagaaaagccagagccgcgccactgatgcagtcactgtatgactggatacagcaacagatgaaaacactgtcgcgtcactcagatacggcaaaagcgttcgcatacctgctgaaacagtgggaggccctgaacgtgtactgcagtaatggctgggtggaaatcgacaacaacatcgcagagaacgccttacggggtgtggccgtgggccggaaaaactggctgttcgcaggttccgacagcggtggcgaacatgcggcggtgttgtactcgctgatcggcacatgccgtctgaacaatgtggagccagaaaaatggctgcgctacgtcattgaacatatccaggactggccggcaaaccgggtacgcgatctgttgccctggaaagttgatctgagctctcagtaa

SEQ ID NO: 27010 - DNA, 483 bp, Escherichia coli
atgaaaaaattagcgatcatggctgcggccagcatggtgttcgccgtgagctccgcgcatgctgggttcaccccgagtggcaccaccggcaccaccaaactcacagttaccgaagagtgccaggtacgggttggtgacctgaccgtggctaagactcgtggccaactgacggacgcagcaccaatagggccggtcaccgtgcaagcgctgggatgcgacgcccgccaggtcgcgttgcaggcaggcaccgataacttcgaacagggcaagttcttcctgatcagcgacaacaatagggataagctctatgtcaatatacggcctacggataactccgcctggacgaccgacaatggtgtcttctacaaaaacgatgtcgggagctggggtggaactatcgggatctacgtggatgggcaacaaacgaacacaccgcccggcaactacacactgaccctgaccgggggttactgggtaaaatga

SEQ ID NO: 27011 - DNA, 1011 bp, Escherichia coli
gtgttcacgaaaacagcgcagctctggcataacgccacgccgcatccgcactggtgcggcctgaccctgctggccatcgatggtgtgttctggcgcacaccggatacaccagagaacgatgcagccttcccccgccagacacatgccgggaacccggcgctctacccgcaggtcaaaatggtctgccagatggaactgaccagccatctgctgacggctgcagccttcggcacgatgaagaacagcgaaaatgagcttgctgagcaacttatagaacaaaccggcgataacactctgacgttaatggataaaggttattactcactgggactgttaaatgcctggagcctggcgggagaacaccgccactggatgatacctctcagaaagggagcgcaatatgaagagatcagaaaactgggtaaaggcgatcatctggtgaagctgaaaaccagcccgcaggcacgaaaaaagtggccgggactgggaaatgaagtgacagcccgcctgctgaccgtgacgcgcaaaggaaaagtctgccatctgctgacgtcgatgacggacgccatgcgcttccccggaggagaaatggcggatctgtacagtcatcgctgggaaatcgaactgggatacagggagataaaacagacgatgcaactgagcaggctgacgctgagaagtaaaaagccggagcttgtggagcaagagctgtggggtgtcttactggcttataatctggtgagatatcagatgattaaaatggcggaacatctgaaaggttactggccgaatcaactgagtttctcagaatcatgcggaatggtgatgagaatgctgatgacattgcagggcgcttcaccgggacgtataccggagctgatgcgcgatcttgcaagtatgggacaacttgtgaaattaccgacaagaagggaaagggccttcccgagagtggtaaaggagaggccctggaaataccccacagccccgaaaaagagccagtcagttgcttaa

SEQ ID NO: 27012 - DNA, 306 bp, Escherichia coli; identical to SEQ ID NO: 25887

SEQ ID NO: 27013 - DNA, 432 bp, Escherichia coli
atgactacacaaccggggcgacctgtgcgtttgctgtcatgccatcgccccagtttcgccagtttcagacaggcccatttcagtgtcggcgtcagtgatggaagcggttttccttccagcttaacccacagcagtttccactttgtcggcgacagtattttctggggtcagtttggatatcgaaaattattgtactataagggcttccccgacatgtcaacgccggttttttcggtttctgtctgctcgtcagtaaaaataaaggggagagactgcggtactataaacggtcatgaggaatcgttatcgattcggaccctgatgaaagacgctcgtgagattcttgttcgtttaacggatacgtatatcctgtacaatagtcagatatgtctcacggagtctaaccctttatcatcaacgagttgcagttaa

SEQ ID NO: 27014 - DNA, 144 bp, Escherichia coli
atgaatgcaccgagtaccacaccgcatgatgcggtgtttaaacaatttttaatgcatgcggaaacggctcatgactttctggatatccatttgccagcggagctacgcgaactgtgtggatttagctcgctaggagcgaggtaa

SEQ ID NO: 27015 - DNA, 636 bp, Escherichia coli
ttgtatgccttgcatacggcggtacgtaccgcgccggatggtcgagctgccccccttaaatacgccgccgccatcgagaatgcgctgcgtaaaaaattgggcgcagatgcggggtattcagggctaatttgcaagaatccgaaccacctgcactggcagatcaccgtctggcagccagagctctatacccttgactggttagccgattacctcgaccttggcgcagccaatgaccgcgaaatcctgccggactacggtttaggccgtaactgcaccctcttcgataaaacccgcaagtgggcttaccgcgctatccgccaaggctggccgcagtatgaccaatggctacaagcctgcattgaacgcgctaaagcctacaacctgcagttctccgcacctttagacgagaacgaagtcatgggaattgctaaaagtgtggctaagtggacaagtaagaaccttacagagcttggctttgaagagtatgttaaacaaacacatacttctgaaattcagcgtcaacgtggaaaaaaaagctctggtggtggaaggccgaaagttagagatggagaatggatttctttaggaataagtagatcaacgtggtacaggaaattttacaaaaatgaaaattag

SEQ ID NO: 27016 - DNA, 648 bp, Escherichia coli
atgaaaattagaatgtatctcttatcaatgttgtttttatttataccgataacaatatatttttctggtattgataacgtatggtctgttttagataaggccatgtcttcgtgttctggcgcggatggaaaatttcaatgcgtactcgactattcaaatagcagattaacattttctgtattgaggtcagtgatctgcggggctttgattttaacttgttcttatacatacatttggtatcgatgggttttgaaaaacttagactccggtgcggtgtcaagaaagttaaaggtcgtttcatgtaaaaaagaatccggtgagtatctttcttttttatcaacgtacataatgccgttggtctttactgatttaagcaaaccatcaaatatagttaattttttgtttgttttgattatcgtcggttttttgcacatcaaaacaaaaagaattcactgcaacccaacattgtcattatttaatgtttctgcctataagattacttacagtgtggtagctaatggaagggaaaaaacgcaagacggtgagttgatagttttatctaaagatttaataaaagaaaatgattttatcagagttataaatcatgatgattatttaacgttcgcgaaaaaaatcatagaggaatga

SEQ ID NO: 27017 - DNA, 1143 bp, Escherichia coli
atgagtgacgatgccttagatcttgatgctttggagcataatgaagaaaaagcacaagagcttttagaactgtataagcattttgattgtgatattaacgatgttacattgcacacttactttaattttaaaaataaaggtaaagcgggtgctaaggactcttttagctataaaattgccatccttaaaaatgacagtgagctaaaacagtccattattgataatgtgataaagaaaactatatctgatttagaaaatcgggttgtgatagtatcagatgttaatacactaagtgaccgcaccaacaccatttcatttttaaatgatgctgagcagtatgataatgagcaaatgaagtttctgactggcattgtgtttgatgctgggtttggtggtgatggcaatgaaaatatcccaattgttgattttgacagtgtggatctaatatcaaaagttgactcaatcattttcgttttgagtaagaataatgacgacaattgtataaccatatacaagaagcaatatccagttcaaaacttatcaagaaagaaaaataatttttatgggtttagcaaaaaagaactatctcgagtagatcaagatatgatttctattgatggtaaggcatctcttgtttttgctggcgatacggtatttatctacgaccaaaatgttttcgagcgtttttttggctataaagcatggataaaaaatgctgccactgattttgttaacaatatgtccactcgttttaagggatttgttgacttaagcaaatttattgagcgagtaaataaagatagtcatgatgcggatgctttttctcggaagctagctaaggcgtatgctcgaagcgaaacaaagcaaacgctacaaacaataacaaatgaacatcttaagagtgttctagatgaaaatggatatttagcaggtgttttaaagtataaaaaaggtgatgctacgatttgcatcgcaagccataaccagcaagatacgtttatcgctatggtatccgaaggcgtattgagatcgttgattacaggcattgattatttaagccttgggtcaaagcggaaaatatcgtcagcagcatccaatactactaccagtaccacttcggattcctcttccgctgccgtgtga

SEQ ID NO: 27018 - DNA, 327 bp, Escherichia coli
atggaaaagcgcaccaaagagatcaaaatcagactcaccgaagcggagcatcagcggctacttgaacgctgtgaccgtaagcatttggccgagtggttacgagccgttggcttaggcgaatcgcgtacagctcggcgtcgtccgctacctaccgtagacccgaccttgttacgtcaggtcagcgggatcggtaataacctcaatcaaatagcctgttacttgaatcagcatggcttaccgccgcaagaacgggtgtcgttgttagcggtgctcaatagcattgaccaacatcttgccgaactgctggagcaacatcgtgatcgttaa

SEQ ID NO: 27019 - DNA, 1518 bp, Escherichia coli
gtgatcgttaagattcatggtcgtggtgccggtggcgggagtggtcctgtcgattaccttctgggccctgatcgtcagcgcgaacaagcaacggtgttacggggtaaccctgagcacgtcaaagagctgattgatggctgcgaatttgcccgaacttatacctctggcgtgctctcttttcaggagagtgatttacccgaaggcgaaaagcagcgattgatggatgaatgggagcagacattgatgaccggtctagataaagaccagtatgcctgcctctgggttcaacatcaggacaaagggcgtcttgaattgaattttgttatcccgaacatcgaattgcagagcggaaaacggctacaaccttactttgatcgggctgaccggcctcgtgttaacgcatggcaaaccctcactaatgaccggcttgggttacgcgacccgaatgaccctgctaatcgccgagcattaaccccctctaatgaccttcctcgcaacaaacagcaggcagcggaagccattaccaaagggctaatcagcttgattgagcagggagaaattacggatcgtaaaggggtgatttcccaccttaccgatgccggattgtcggtcgtacgggaaaccaaatccagtatcagtattgctgatccggcaggtggcccgaatattcgcttaaaaggagtgctgtatgagcgagattttaaatttagcgcgggagttcgagagcaaatcgaagcagcaagccaagactaccgcaacgagcgtcgcgaacgcattcgagaagcacgagaaacgtatcaccgaggccttgaaattaagctcagggaacatacagaccgctatccaagaagagaacgacagccagctaaaacagatacaccgcttagtcggaatgacatggctgtacagcctggcattaagtgggatcctgtttgcgatattgattggagtagcttggtatctcgggactatcgtggtcgaacgccagaacgaaatcagcgagcagagccagatcctgcaggacttaaagagccagaccggagccggcgtatcgataattcacgattccaagaacaagagcgtgtattacctgatccttccgcagggggcgaagaagatcgacgagtacaagaacgctcaacatcgtcaggtcatcaagtacagcgccaaataacctcatcagacgccacagaatcgattttgggcggttttatctatcagggtgaagagattcatgaccgaaatggagcagcagcttctgagcgcattagagagcttacagaggcactacgaacaacagcagcaagcgtggcaggacagctacgccaacttacagcgcatgttcgaggttacctcgcaggagttggcgaaaaacgacagggtttgtcaggccttgagcatgcaagtcaccggcttggcgcagcaagtcgagagcttaaacagaacagtgcgccgcttgagcaattagccaagcggcacgaacagcggtattctcgcggtcacggcatgagtttataa

SEQ ID NO: 27020 - DNA, 285 bp, Escherichia coli
atgagctataaccttgaatttgatccccgagccctgaaggaatggcgcaagctcggggatgatgtccgtctgcagttcaagaaaaaactcgagcaggttctacaacacccgcggatcgataaaaatcgcctgcgagagctgcatgactgctacaaaatcaagctccgtgcatccggttatcgcttggtctatcaggttcgcgatcaaaccattacggtattcgtggtggcggtcggtaagcgcgagcgttctgccgcttacgatgcggccgataaacgcttataa

SEQ ID NO: 27021 - DNA, 243 bp, Escherichia coli
atggccacgattaatattcggatcgatgacgagctgaaaagccgctcttatgccgcactggaaaagctgggcgtaacgccgtccgaggttctgcgccaaacactggaatatgtggcccaaagcggacgtttgccgttccagcaggttttgctgaccgaggatgatgccgatttgatggctatcgttcgggatcgtctggaaaacccacaggcgggcgtaaaggtgtcactggatgagctataa

SEQ ID NO: 27022 - DNA, 1038 bp, Escherichia coli
atgagcaaaacagtaaacgtaacaatggggcaaatcgccaccagggccggtgtctctcaggctaccgtttctctcgttctgaataatgtacaaacaattaaactggcacattcaactcgtgaaaaagtgttacgtatagccagagaaatgggatacgttcaaaaaaacacaattctcccgccacgacaagaaaaaattgcgctgatagttaatgggctgattaaccatgatccctttattgaggccattaatgctgcccgtcataaggcatgggaacataatctgttattaacaatttttgatcatgagaatgaaagcaagcataaaatagcactcgaaaatgagttacgttccgggggatatcggggagtaatttatgcatcctgtatgaccggaagcatcatgtctgactttttgaaattatcacttcctgcagtgctactgaatggttattgctcagacaaaccagaagtaccgtcagttcttcctgctgatgaaacaggtgcttataaagccacaatacatttactggagcagggctttaaacaaattgcaatactgacaggtgagctctggatggatgcaaccattgcccgcttacagggataccggaaagcattgaagcaatataacataaaacctgatgacaaataccaacaaataacaaactggtcactggctgaagcatacaagaaaacggaatatctgcttaaaacaacgccccgaccagaagcaattttttgttgcagtgattatattgcgctgggatgttatcaggctattctggcccgggggctacaaattccccgggatattgccgttatagggtacgataatcagaacatttccgcggatttgttcccgtctttaagtaccgtcgaattgccctacactcagatgggagcaatggctgtcaatatcctgataaaacaaataaatcatcccaattcattgcctctgaaactcagggttgaaggcgaattaattgtccggaactcctcagtcaaatccaaatcagaagtctctggaacgatgtaa

SEQ ID NO: 27023 - DNA, 1068 bp, Escherichia coli
gtgaacagatggtctgaggagaaagcgcacaactggctggaaaaacagggatggctatgtggctttaattacttgccagggacagctgtaaactggacggaaatgtggcagcgtgaaacatttgatctggacagaatctgccaggaacttgagtgggctgcccgagccgggtataacactctcagaacgaacctgccgtttattgtctggctgtatgatcgggatggactgtttgaacgtattaatgcctttttatctgtttgtcagcaaaaaggtattaaagtgatgatgacattaatggatgattgcggattttcaggtgagcatccttttattggtcgacaaaaagaacctgtgcgtgatttacataacagccaggcagcagccagtccggggagaaatatcgtgatgcttccttcggtgtggggaaatgtagaaaaatatattcgcgatattattggacagtttgcaaaagatgagcgcattattgtttgggatctttataatgaacctacaaaccggatgatttttacactggagggggaaaaggcttttgatccagacatggagtcatacagtattcaattgatggaaaaagcttttttatgggcacgaaatataaatccatctcagccattaactgtgggggcatggcatattgcaaatattttggctccggacgctccggtttatacgcatccggcagatcaacgggcaatggaactgtctgatgttatcagttttcatgcttatgttcccttggagttgatgagcaaagcaattgaattgttgaaacagtatggcagaccactgatttgtacggaatggcttgcccgccatgcaggttctgtgatggctgagcaattacccgttttcagggagaataatattggatgttaccagtggggacttgtcagggggcgaacacaaacgcacataccatggcctgaaataaagaaaatagatccggattatcatgacagatggtttcatgatgtttttgatgaaaatggaaatgcttatgactcatcagaaatggagttattaaaaaggttaacttctgcttga

SEQ ID NO: 27024 - DNA, 1365 bp, Escherichia coli
atgaatccggataataaaataccgttaaaagaacttatctcatatttcgggtatgggatgggtcagtgctttagtttcggtctggttggaagctttatcctctacttttatacagatgttatgggcatttctccagtaacggccagtatgatttttttgatagccagagtatgggatgcagttcacgatccccttatcgctggcgtgatggataccctgaatctcaggggtggaaaatatcgcccatttttgctgtttacgccgtttcttatttttttggctacagtggcttcattctggaacatagatatcagtattgcacataaagcaatttatgcgggaataacgtatgtgctttggggaacgttgtatgcgctatcagatattccattctggtctatgacttcagtgatgacggataatccacaggaacgaaccaaagcggcaacctgtgccatgctgggggtgaatgctggtattgggggagctttgttgttatttcctctcatcagtagtcgtctggctggttacagtaacgacaaaggctatctggccggtgtggcactcctgatgattgttggtgtggggctaatgctaaatggcttctttaatatgaaagaacgggtgaaatctcatacacaggagaaaataacattaaaacagacatttgtttcagtatggaaaaacaaacctttgttttttgttctggccgctttttttatgaatgtcttttctaatattgttaatggtctgtatatttatttttttacatacaatatgaatgatgccaccttggtgtcggtaattggcacaattacattaatcagcgcactggcatgcttgtgtacaccagttctgactcgttattttaggaaacgagatctttttattatattgtgcactctggaagttattgcgcgagtggtattctggtttattggctaccagagtgtaattacggtgttggtttgttttaccataattacggcgatatttatgatgacgaatcccctgatatcggcaatgattgctgatacagtggagtattcgtggtatcacacgggaaaacgttgcgcggccattactttttcaggtcagacgtttaccgggaaattatcggtagccattgccggtgctgcctccggattgatcctagcactcattggttatcaatctaatgtagtgcagacagcagaaacgcttaatggactttttctctgtgtttccttgctgccagccgtgggggctgtgatcaggattgttatcatgagtaaatatacctttacagaagaaaaacatgctgagatttgcgaaaaactgaagcgtggagaatttcatcattctgtactcatttcgaagaaatga

SEQ ID NO: 27025 - DNA, 579 bp, Escherichia coli
atggcgaagctaccactgccaccactgccactaccaatagcgccaccgtcaacagtaaaaaatagtggttcagaaagagcgaagaagtcaggaaggagaactcttgctgcaaaaaggaaaactttgttagaagagctatggggagacgagcttgaacaactcaaggtatggaatcgccatgaacatgacgggtatacaacagtgccaagaacgctgacatatatcagtcggatcctcgattacctcggaggtacgggccagccattgtctcaaacatatctggctctttggtgcagagtatttgatgaaggatttgtggaaataaaggataaagatggatttgcttatgaggctggttttagcggacagcgagctgtaaccacatggacagggaggatgaggaaactaagagatttaggtttcataactacaaaaccaggcacatcaggtgagtttcaatatgtaattttgcttaacccgctgactgtcattaaagagttatacgaaggtaaagaaaaagatgaaaggtataacgcattggtgggacgtatgcaggaggttggcgctaaatgggagtaa

SEQ ID NO: 27026 - DNA, 546 bp, Escherichia coli
atggctagctatttcccaacgttagaaatatcaggaaaagagttcgatttcacgcaccttgagccattcattatgcacgtaaatagtgacatggctaaaaaggtattaaaagtacatgtgagattcacaaatcattgtttcacaaaaggttatgagcctttttatcatccggaaggagaaccgataatttacgaccatagcgagaataagagaacgttttgcccaattagatatagattatctttggcgttacctgagattatcaaacgtctatgtgatccagcagaaaaagtgtatcaaacatcggcaaagagaaactggacctactccattacaattgatgatccggaagggccatatcacttattttttgaaataagacgcgcctcacgtgatgagagacatctgcaagatttgaatgttgttatcgagagtgcctatcctgaagatcgggggtacgggcctccgtcattactaggtcgaattggttttgtaggcttatgcggtagggtattttgtgggaaaccacttgcgactaaaagatga

SEQ ID NO: 27027 - DNA, 432 bp, Escherichia coli
atggccagggtatctattagcgaagcggcacgccttgcttgtgtcagtcgtccgactatttacaagttaattaaatctggtgagttaagttacacctctgttgtaaagcatgggaaagctgtaaaagttattgatactacagagcttattcgtgtttttggttctctttcttttgacaatgaacgtgaccatgctgttgtaaaatttgacgaccgctcgacaggtgttaacagtgattttttacagaatttacagcatcaggtagcacttttgcaggcagaaaacgccgggctgaaagatgcagtgaatgcccgggacgaacatatcaattcacttcgtcaggccatgcagctactggagcataagcagggcactgctgatccgcagcatgtccgagcaaagttctggtggcagttttggaaattccgttga

SEQ ID NO: 27028 - DNA, 195 bp, Escherichia coli
gtgatgacgaaaccacagaaaactgcgcttaatatggcgaagtttattaaggggcagaccctgcttttgctggaaaaacttaatgaactcgagctcgatgctgaggcggacctttgcgaaaagctccatgaggatgcggaactactctgtcgcactctgactattcgtctggatggtcatcagggggatctataa

SEQ ID NO: 27029 - DNA, 516 bp, Escherichia coli
atgaaattttacacaatatcaagcagttacataaaatacctgaaggactttgatgacaaagttcccaatagcgaagatcctacatacaacaatcctaaggctttcattggcatagtactagagattgaaggacataaatatttagcacctttaacgtcgccaaaagcatggcatgctaatgtaaaagagtcatcacccgccttcttcaaacttcatgaaaacggtgtccctgacaatcagcttggattgattaatctgaaatttatgattccaataatcgaagctgaagtgtctttacttgatctggatagcatgcctgatacgccttacaaaagaatgctatataaacagttacaatttattcgtgtaaatgaagataaaatatctgaaaaatcaaaactattaagaaaccttgccttgcaaggcagaatgcaaggaacatgcgactttgccgtattagaagaaaaatatcaacatttcggtaaaaaacctgaagacatggaaatagacgattaa

SEQ ID NO: 27030 - DNA, 711 bp, Escherichia coli
atgctgtactggaaaagaatgccttcactatggataggtatcaaaatatctgaattcaacgatcttgatacagcaaaagccatcgccgcgttaaagatttatttaacattttgccttttctgcaaagagtcagattcaggacagagaactgttgagctaacttttagtaacctatgtgagatagcatcattaagccgatcgttagttaacgaagggcttaaaattctttatgcaaaagagttgataaaaaatttatcaacgacagtacgtaaaaaaatttataccgtagatgtattagagaagcatgatgatggttggtgtaagcttccctttaaaggaattgtaggtgaagatggaaaaataagtgcatttcaatccatgcacaacagatatccatttgagttgctagctttacaaacctacatgtaccttctttatgctcgtgataatagaaatgagtatactcttgctaggaaaaaaacaatatgtaaaaaactgaaatgcaaactacctgaactaaataaagccattacctatcttattcatattggtttacttgataggattgttaaaaaatcaatagaaaacaagccgttggaaatgtttcatgattcatgttacttctactttagagcgggaagtaacagcgctctcacttacaaaaggaaatcagaggtgcttaatctttcagaggaggacttgcctttttga

SEQ ID NO: 27031 - DNA, 129 bp, Escherichia coli
atgtttgagaaaggtgtgtttttggctgaaaggcttgcgaaggtcgcagtggtgctaactaatctggtgctatctctgtctgtattggggttggtctatttcatttttcaaattctgggaatgaggtga

SEQ ID NO: 27032 - DNA, 258 bp, Escherichia coli
atgcctaaaaaaacatcaaaaccaaacgatttaagcaacactatcaacaacataaagaaagaaattaactccggttttactgagttacttaatcgcgtagaagccttagaggctagtgacgcacaacacagcatggcgatacgtgatttacaaattcaggctagagccgctcgcggagacaaacgtatggatatagcaagagactttgacctcagcgagggacgaattagccagatcgttaatgcgggtcgtaactaa

SEQ ID NO: 27033 - DNA, 156 bp, Escherichia coli
gtgcgggttaaagctgcaatcgagggtgtgcagtcaatacagccaatcattgatgtacaacagtcacaaattgagcaacagcaagttcaaatagcaatgctgactcaatctttgtctcaggcaatcaatgagctaacaaaaagcaggaataaatag

SEQ ID NO: 27034 - DNA, 252 bp, Escherichia coli
atgtctcttgggctccctgtaataaacacaaaccttaatactggcgttccttttgtcagtttaaatggagttacggggataacagtaactgcaggtaatcctgatgatttagctaatgcaatgctgtctttgttgcgcgatgatgaaaaatatgaatcgttcaagacaaattgtaaagttagggtttctgagttgtttgaggaaaatgttgtgaaaaataaactattcaaagtaattgaagaattaaactga

SEQ ID NO: 27035 - DNA, 1437 bp, Escherichia coli
atgtcaaataatattatctgtcctgtgattatggctggtggttctggtagccgtctatggcctctttctcgtcttttttatccaaagcaatttctaaaattagtagatgattcaagtatgctacaagaaacaattagtcgccttggagatcttccttgtagcctacctattgttatatgtaatgaacagcatagatttattgttgctgaacagcttcgaatgattaataagttaacgaataacattatattagaacctgtagggcgcaatacagccccagcaatagctttagcagcaatgatctctgagtctttttcttctttagaagatcccttacttttagtattagctgctgatcatgatattaaaaatcataaatcatttcgtgatgctgtaaggaaagctattccttttgcagaacaaggtaaattagttacttttggtattgttccaagtatggctgaaacaggatatggctatattaagcgtggacatgaaatttctttggaaaatgatgaagtcgcgtatactgtttcgaagttttatgaaaaacctaatataagtgatgcccaaaaattcctcgcttctggaaaattttattggaatagtggtatgtttttatttagagcttctcgttatttgagtgagttaaataaatttagaccagatatatacttagcatgcgcatcttctactaaaaatctaaataccgatcttgattttattcgtgttgatgaacattcattttctaactgcccagatgaatccatagactatgcagtcatggaacaaacttctgatgcagtggttgttcctatgaatgcaggttggagtgatgttggatcatggtcttccctatgggagattagtaaaaaaaatgaacaagggaatgttaatcatggtgatgttattaatcacaatactgagaatagttatgtctatgccgagtctggtttggtgactaccattggggtaaaagacttggttgttgtacaaaccaaagatgccgttcttgttgcagatcgcaattcggtgcaggatgtgaaaaaagtagtggagcagattaaagcccatggtcgttccgaacatcagatgcatagagaagtttatcgtccatggggtaaatatgactctatcgacgcaggcgagcgctaccaggtgaaacgcataaccgtgaaaccgggcgaggggttgtcagtacagatgcattaccaccgttcggaacactgggtagtggtagcgggaacggcaaaagtcactattgatggggttatcaaacttcttggcgaaaacgagtccctctatattccgcaaggggcgaagcattgcctggaaaatccggggaaaataccgcttgagttaatagaagttcgctccgggtcttatctcgaagaggatgatgtggtgcgttttgcagatcgctatggaagagtctag

SEQ ID NO: 27036 - DNA, 990 bp, Escherichia coli
gtgaattatatttctttagaaaccttgatgaatgatattagagactcaataaatctattgagtaaacataattttgatttagttgtaggcattccaagaagtggtatgataccagcctatctgatcagtctttatttgaatattgacgtaaccgatgttaattcttttatcctaaatacaccaattcaaagaggatcgactagaacatcaggaaaacgcatatataacccacatgatgcacaaaggattctcttagtcgatgatagcttttcaacaggtaaatcgatgaggaatattttagattctataccagtggatttaaaaaaaaatattaaaacaatggttgcctatacatctgatgtaaatggcgctggattagatatttatatacgtcatgtttcgcaccccagattgtttgaatggaatatactcaatcacagcatcattagcaatagctgtttcgatattgatggtgttttatgtgtcgatcctaatgagcttcagaatgacgatggtgaaaactatataaaatttatatgcgaggcagaacctaagtttatacctaagtttaagataaaatatttggttacaaaccgtcttgaaaaatacagagacataactgaagcatggttgttaaaaaataacatacaatatgagaaattaatcatgttaaatatggcgacaaaagaagaaaggcaatctgcaggaattcattccagacataaagccgaattttataaacgttccggttgtgatttatttgttgaaagtgatattaatcaggcgattgaaattatgaaatataccgggaagtatgtatattgtatagataataatagaatgtactcccctagcgccatacaatttttatctaaaaggccgcttgactttatgaatgatataattctttatttgccacgaattttatatcgtagattacccttagaactgtctcttatacacatctccgagcccacgagaccgtactag

SEQ ID NO: 27037 - DNA, 192 bp, Escherichia coli
atgaacaacattaagattattacgctctttcatacaaataaaaaaataccatttatgacttgtattgttaaagatgttgaagagaatgaacaagtaataaaactcactttgcaaaatggtgataatattcatgtcaaagattatgactatttcttcttatcagaatcagcacatgagtgtgatcaggaatga

SEQ ID NO: 27038 - DNA, 153 bp, Escherichia coli
atgattgaatattgcgagtattgcggttgtgataccgaacacaccatagaccatacagatagagtcaacgacaaggggcaggagtatgtgtacatatcctgtcttgattgtcgttctggttactttgagttaaacgccgatgaagaactataa

SEQ ID NO: 27039 - DNA, 351 bp, Escherichia coli
atgaagaactataaagatagataccaaagaaagcacagtattacactgtgcttcaatgacgaggaatttgcacaggttgaagaactggcttctatgttgaaaaaacccagagcaacagccgttagagatcttattctcaataaagagtttaaactcaaaaaagaaatatcaaaaaataaaactggcgatgtatattttgaactccataaaataggagtaaacattaaccagattgcaagagcaataaatactgatattgataaatttattaaccaagatttcgctgaagattttataaatttgtttgaagaaataacaaatgatatagaaaaaataaaaggaaaaatataa

SEQ ID NO: 27040 - DNA, 312 bp, Escherichia coli
atgaagagggaagaaattacagcgattatagaaaacaattcaattcaacaattgaaagagatccaagaattgttagatctgaaatcgatagaaacaaagcagagtttgctgaaagaattgaaaaaagaaaaagcagaaatagatcaaagtttaaaaactcacagagcaaaaataaaccagagaatacaaaaaacattaaaggaaaaaatagcaatattgaatatagatctattaacaataatattgattttactgtcaacaacaacggttttacagatattaacgataatatatttgatatggagaaaataa

SEQ ID NO: 27041 - DNA, 426 bp, Escherichia coli
atgagtcaattaatacagaatataaagcaaaaacagcaacagaagaagaaagaagaattgcaagaaaaagagatcttgaacaaattaatcaacaacaacaactcattaaacgaagaattgaggaggttagacgaacggacagccagctctcaaaatctgttgaaacaacaggcgaaagacttagaagagatcgaagatcgttacaatcaattatatataatgctcgaagacacattagaacgctttcaatctattttagaaaaaacgaacacaaaagatactttgaagaaaaaaaacgacttgaagaagaaaaacaatttaatcaaagaagaagaaaaaaatttatatattgaggatataaaatcaatgcttaatttccttctggaacaatacgaaaaacaaaatactataaccgtgaacaaataa

SEQ ID NO: 27042 - DNA, 1410 bp, Escherichia coli
atgtttaaacctgaaaacgtaggatctataccaaatgaagaaatagtaaaatttgtatctatgcttgaagaaaatgatgatattgaaaaagtatcaaccgatataaacaatgcacataaagcttatatttacaataaggcactggaggttataaacgaggaaaatatatttgaaataatgtcattaataccacaaccatttttaacaagaaaaagcgaaaaagaggctgatatattatcagtaatatataataagtttttagaaaatacggaaatacccggagcactaccggtattttcattttttagctttttaagtgctttttgtgtgaaaaataatatcacatattcgatcccattatctgaagataaaaacccattggatacgtggatcacggttcttgcgccgtcaggttctgcgaaaaccttttctaatgctcaaataaataaaatgatacctaaaacaccagatggcaaaaaagttattgagcagaattttacaagaccgaacggagccgcaaaatttattcaagaactgtcagatcttccactgacaaaagatggtgagtcacagtatgggttttggatagaagacgaagcggctcaaatgtttaagcagattgaaaaaattggctctccattgtcagaaataaaagaatatttattaaaagcatatgatcacgatattttgaccagaaaaacaaaaacagaaacagtagaaacaaaaaatattattctaactttattttttataaatacttttgaaagttatgtaaataatatatctcaagagtcaatgactgatggtttaatgcgaagatttaaccttgtatacagtgaaaaagacggtagagattttacagattactcaatatataatgtaaataaaattagagatgaagtactcacagataaaatgcttgagtttttcttctcaataaatcctgatcaacattttacattttcagtagaatgtttagagctttatcagaaatattttaaaatatattggcataggaaatacaaaactattttgccgggtaaagaaaatttttatagaacttatatgatgcaatcttggaagtttgctatattctatcatttcattctcggcaaaaaaggaaatgtaatagacgaagaatgcttggtgtatggtatgaaaatttcattattgtttgctgaaagtatgaaaaagtttttcgactttaaaactaaaccacagcatattgaaaaagcaaaaacagattttgataaatatgtaaactatttaaatgctaatgcagaaataaaaatgcgagattttactcgtaaatttacagtaaaaaaagcagaagcattaacaattctaaaagcaattaaacaagcaagattagtttctaaccatattttatttaaagaattaaaagaataa

SEQ ID NO: 27043 - DNA, 249 bp, Escherichia coli
atggaaatagaaaaactgatagatagatattttttagcattagaaaagaaaataattgctgagatttataataaacaaacaagagaagaattagaaaagtttatatttaagtgcgatcaagagcaaatagagtttgaacgacgatttaatataatatgctctactgaatattatgagaaacagaaacttatattttctattaattatatatcagcagaatttgagcagcgggaaaaaataaattattaa

SEQ ID NO: 27044 - DNA, 702 bp, Escherichia coli
atgacaatagcaaagaaaaatatagcgatattagatagatttaaagagtattccagcaataaaaatatattcgatgttttagatcttggttatgaaatattaaaaatatattatgatttcaaattaaaaagcgatatgaatgagcaagaaagaaagtcgcaagattcaagaagaaaagcacatttaacagcattgaaaaaaagaattaaaagagaaatcgtttcaaaaatagttattgatttagtgaaatattacaatatagaaaaaacgacttttcattttttttctcatatatgcactgagattttagaaagaaatgttgataatagatatatattaaataacttctcaaatatgattatagacgaaaataaagagctaaaaaaattaactgagagaagaaatgcttcaaacaaaatgattttagaaaacacatataatgaacttgttttaatgtctcatataaaagaaaagtcatttaagaaagttaattttaaacaagcatatttagattgttatgcttgcgcaaatgagattttttcgagttgtaaagtgttagcactgcctgatttttatgagtctttagatcgtttatatgaagaagcaagagtaaagaaagaagaaagagatttatctaaaataatgattgaacaagttgaagaagaacaaaaaacacagcaacaaaagaagagaagattataa

SEQ ID NO: 27045 - DNA, 1131 bp, Escherichia coli
atggattttaaaataaaaaaaataactgtgaaagattcaagagaaatgaaaaatgaagttgaacagttagcaaaaaaagcaaatgctcaaagccagaacctcggcgtgattcttgatcgagaaatcaaagaagggttgaaagaaattaatttaaatgtgaaaaaagaaacagcagaacaatatagaaaactttttagttacaagttgagtttaaacaataatgatattgtttcacatttattagaatgcaacacaagaaacagttttgacaaaacaagatctgcttttcgtttttgtatagcagaaaaaatacaagagttaagaaatgcttctgaaaaagcaagaagagaaaaagattttgatttaatgcagaaaaaaacaattgaagcatatcaaatgtttttcttttttgagcgagattttttgagtgaaaacagagtgacctggaatgatatttcttacagaaaaatagactctaaaagcaaaaaaaagactatgaatagtgtttccagtattaaagcaatttttgaagatttgaagcaaaagccagatcttttcgataaatattcaatgattttagcaatttcaagtttaacaggttgtagacctgctgagatccagaaagggattagcctggaagtaagccaccaactattaaatatatgtattagcggggcgaaatttggcgaggatcgaggtcaggaaaaaagaatattgaaattcaatataaatgaatttgcagaaaatgagcagttcaaattgattatgtcaaaaataaagcaaaataataaattagaatataaatgctcaaagcaagagtatgattcattgagacaatatttatatattaatcacaaaggcttttctttatatacattaagacatagagcagcaagtgaattaaaaaaagacggattttcagaagaaatgattgcagcttttcttggtcatcgggtgactagatccttggaaaattacgggtatgccagatctgggaaaggtggtccaaaagttgacagtgttgagcactcaaacgcgattaaaagcaatacaaagcgatatgagaagaaaaccacccctggtgggggaaacccttccagtactcgtaaacgagccttaaaacgattttag

SEQ ID NO: 27046 - DNA, 513 bp, Escherichia coli
gtggagcagaacctgcgctaccagggacagtacctcgacagggaaacagggctgcattacaatctgcacaggtactatgatccggatgtcgggcggttcattgtaacggatccgatagggctggcgggtgggctgaacttatatgcttatgcgcctaatccgctgaaatatattgatccactcggattaaaaaaagagctctgtaatggaactactcgtgtgcggcattatactaatcgtaaaggttcaaatgcgattgctgaaagtgggataattaaggcgcatgataacggtcgtgtatatttggaacctgcgaataaaaaaccactcagtcaagtagacatagaggcgaaatatcaaataggtcgtgggaaaggtagagattatgtggaaacagatgtacctaacgagcaattagagtgggtaacaaaccctcgataccatatagatgaattgactgtgaaaggtgatattgttctttctgataatgcaaaaataactcggcgtaaataa

SEQ ID NO: 27047 - DNA, 330 bp, Escherichia coli; identical to SEQ ID NO: 20292

SEQ ID NO: 27048 - DNA, 852 bp, Escherichia coli
gtgacgcgtgcatgtctgttcctgggacacagcagacaggcatggtatcaggacaacacaaggcgcagaaaacggcaggaacatcatgctcaggttcttgattttgttgcccgtgtcagatgtcgtcagccccgaatcggtgcgcgtaagctgcactatctgctgaacactcaggccgataaaaggctgaatatcgggcgagaccgcctgtttaacctgctcgatgaataccgactcctggtgccagtaaaacgggcatatcacaaaactaccaacagtcatcatcgcttctaccgacatccaaacctgcttaaaccaggccctgaacaggttaccgctcttgaaccagaacaggtctgggtcgccgatattacttaccttccactgcgcaatggtacggcctatctgagtctggtcaccgatgcctgctccagaaaaattatgggctaccatgttggggaaaacctgcagacagaaaatgtggtaaaagcgttcagacaggcgctgaggctgagaaaaacgacgagtcccctggtgcatcattctgacagggggctgcaatactgttcagcgctctatcagtcagttcatgaaagaaatggaataacctgttcaatgacggatggttatgactgctaccagaacgcactggctgagcgaataaacggtatcctgaaagatgagtttttactctcgcgtcctgcagacctggcgcaggcccgggaaatggtcaaagagtccgtggcaatttataaccatgagcggccacatctggctctgaaatacaaaacgcccgatgacgttcatcaggcgttttacagacagaaaagtgtcaacgtatatcaggactag

SEQ ID NO: 27049 - DNA, 900 bp, Escherichia coli
atgcaggacggcgcattcagcctgacggcaccgccggtacagggaatgccggtgcaggcccccctgcgcaccctgcacggcgtcattaccggctttaaacatctgtcatcgtcacaggacgaagcccgttacgaagtacggctggagccgcgtatggcgctgctggcccgcagccgccagaatgccatctaccagaatctgacggtgccgcaaatcgtcgaaaaaatcctgcgcgagcggcaccagatgcgcggtcaggacttcgtgtttaacctcaaaagcgaatacccggcccgcgaacaggtgatgcagtatggcgaggacgacctgacgtttatttcacgcctgctgtcggaagtgggcatctggttccgcttcgccaccgacgcccggctgaaaattgaggttgtcgagttttatgacgaccagagcggctatgagcgcgggctgacgctgccgcttcgtcatccttcagggctgtttgatggtgaaacggaagccgtatgggggctgaacaccgcgtacagcgtggtggaaaaaagcgtcaccacgcgggactacaactaccgcaccgccacagcggagatgatgacagagcagcatgacgccaccgggggcgataacaccacctacggcgaagcctatcactacgccgacaacttcctgcaaaaaggcgataaagaggcagcggaaagcggcgcgttttatgcccgtatccgccacgaacgctacctgaatgaacaggccattctcaaaggccagagcaccagttcactgctgatgccggggctggaaatcagggttcagggcgacgatgcgccagcggtgtttcgcaagggcgtgctgattaccggcgtgacggccagcgcggcgcgtgaccgcaccgcagctatgaactga

SEQ ID NO: 27050 - DNA, 576 bp, Escherichia coli
gtgcatgtcgatgtcgataccggtgtcggcctggaatttatccagcgcatcgtgcagcggctgcgggaactcatagttaccggtgtaggtcacgccgaaagtcggcaccacgccgatggtattttcgtcgcaggcttcaatcatgcgtttcgggtccataaacaactgaccggggcgcatagggatctcacgcaactccacatcccagtagcgggcgaatttatgccagcagatttgtaccggaccgcacaccaggtttggtttatccgttggtttgcctgcggcttccatacgcttgcgccaacgccatttcatcgccatcccgccgagcatacaggcctcggaagaaccaatggtgttggtgccaacggcctgaccatttttcggtgcaggcgcatgccacagatctgcaaccatgtttacgcaacgcaggtcgattgcagcggattgcggatattcttctttgtcgatccagtttttattgatcgacaaatccatcaatttatggacgttttcgtcgtcccaggtctggcagaaagtggccaggttctgacgagcgttgccatcaagatataa

SEQ ID NO: 27051 - DNA, 594 bp, Escherichia coli
atgtaccgtctggtcgccgccggcataaaccaccgtggtgtttgccactccggtggctaccacaatctgacgaccatttttattgatggtggtacgtacggcatctccgcgaacaaactgtccggtatcagcattttccgcatccggtcctccttctgcgccggtattcacaacggtgtctgttgccactgcgccgggtttgacgacctgccagcccttctcattaatgacggttcctgtggctatcgcaccttcatgcatccactgctcgccaccattcagcgtggtgttcagtgccagtcccttcagactttgtccacctccttcattgattattgtgtctgtagcctttcccccggcacctacaaactggagcccgccgctgctgatggtggtattactggctgtgccgccatcctgtacccattgcccgccggtattggcctcgttatccggcccatactccagcccggtactgatggttattccgttggtcgtaccgaagacaatctggttgtcatgatttaccagtgtcccgccgttcacgattttccctgcctgtacaacactgtcagcagccagggccgggactga

SEQ ID NO: 27052 - DNA, 843 bp, Escherichia coli
atgaccttctcgttgcaggatgggagcaaacatcaagggcaatcttatcgttttctttattccaaatcgttagttcagacaggaacagcattccatattattggctatcgttattcaacccagggcttttacactttaagtgatacgacataccaacaaatgtcagggactgttgttgatccaaaaacgttagatgataaagattacgtttataactggaatgatttttataacttgcgttatagcaaacgtggaaaatttcaggctagtgtatcgcaacctttcggtaactacgggtctatgtatttatcggctagtcagcaaacatactggaatactgataaaaaagattctttataccaagttggttataacaccagtattaagggtatctatctaaatgttgcgtggaattacagtaaatcaccagggacaaatgcggataaaattgtctcgctaaatgtctcattacctataagtaattggttatcttccacgaatgatgggcgctcatcatcgaatgccatgactgcaacgtatggttatagtcaggataaccacggacaggtaaaccaatatacgggggtatctggttctctgttggagcagcataatctcagttataacatacaacatggttttgctaatcaggataatagcagtagtggttctgttggtgttaattatcgtggggcatatggttccttgaattccgcctacagttacgataatgaaggtaatcaacagataaactatggcatcagtggtgctcttgttgtacatgaaaatggtcttacgttgagtcaacttcgttcagctcaccgtggttctgccagaagttag

SEQ ID NO: 27053 - DNA, 516 bp, Escherichia coli
atgaagatattcattagtttatttttgtttataatatcaacaaattcttttgctgatgatatcactcatgccggagtggttcgtattgaagggctaattaccgaaaaaacctgcattatttctgatgagtcaaaaaattttacagttaatatgccagacgtacccagtagttcggtaaggagtgcaggggatgttactgaaaaggtttatttttccataacgttaacccgctgtggtagtgatgttggcaacgcgtatataaagtttaccggcaatacagtttctgaagatgccagtttatataagctggaagatggctcggtagatgggcttgcactcacgatttttgataagaacaaaggcagtattagtaatgatgttaaaagcatcggtttttcacttacatcatcagttgataatatattgcatttttttgcggcttacaaagcattaaaaaataatgtccaaccaggggatgccaatgcgtcagtatcgtttattgtcacctatgattaa

SEQ ID NO: 27054 - DNA, 381 bp, Escherichia coli
atgattcgcacgatgctgcagggcaaactccaccgcgtgaaagtgactcatgcggacctgcactatgaaggttcttgcgccattgaccaggattttcttgacgcagccggtattctcgaaaacgaagccattgatatctggaatgtgaccaacggcaagcgtttctccacctatgccatcgcggcagaacgcggttcgagaattatttccgttaacggtgcggcggcccactgcgccagcgtcggcgatattgtcatcatcgccagcttcgttactatgccagatgaagaagctcgcacctggcgacccaacgtcgcctattttgaaggcgacaatgaaatgaaacgtaccgcgaaagccattccggtacaggttgcttga

SEQ ID NO: 27055 - DNA, 354 bp, Escherichia coli
atgaatatgcatactgaactggatatcacttccactgaagttattccgggaaaaggtgcgttagttcgtgcagagtttgctgctcatatcggtattcgtggtttgttcacagttcgttatcgtaataaatcagtcccattcggtgctacagccagcgcacagattaaaaatagtagtcaaattaccgggattgtcggcgataatggacaactttatctctcaggattgcctttagaaggtgttattaatatccagtggggagatggtgttcagcaaaaatgtcaggctaattacaagctccctgaaacagaactgaataatcctgttagctatgctactctggagtgccgctaa

SEQ ID NO: 27056 - DNA, 261 bp, Escherichia coli
gtgaagcttcccggttggtttaaaattccgacgccactgggaacctacaatcctgactgggccttagttattgaagacaatggtgaagaacatatttactttgttgtagaaacaaaaagtaaacacattggtcttggtaatgaagaagatgcgaaaattacttgtggaacagctcatttcagtgctttaaaagaagaaaacactaatgcagcaaaatatatcagagcgacaaatcttacagaagtaataagcagcatttga

SEQ ID NO: 27057 - DNA, 1224 bp, Escherichia coli
atggctggtggaacgaacaaattaagcgatacatcgcttcgtaaaatgctgggaagggagagccccggagacagcttctatgctgatggcgatgggctaagtgtgaaggtgtccagatcgggcgtgttgacttggtatttcactttccgcataggtggccgggaatcaacatctcagcgtataaagctgggtaattatccagacctttcactcaaagcagctcgtgagaaacgagagcagtgtcgcgcatggctcgcagagggaaagaatccaaagcaccagttgagcgttacgactcaggaaacgttaaagccggtgacagtcagggatgcccttgaatactggatcagggaatatgccacccataaccgcgctaatgttgaaaagcacattgagcagctcaataagcatatctttccttatataggtacttatccgctttctatgtgtgaaactcgccactggctggaatgtttcgccagggtaaggaacgaagcgcctgtagcggctggctatcttttgcagatgtgtaagcaagcactcaagttctgccgggttcatcggtatgcggtgagtaacgtcctggacgatctgaccattgacgatgttggacgtaaacagaataagcgggacagggagcatacccggcaagaacttgctgatatatggcgagaatgctcaggcctgaaatttaagccctactactcagctctattacgtctgctggtggtgtttggctgccgaactcaggagctgagattatctcgcgtaaccgaatgggatctaaatgattgggtttggacggtacctaaagagcacagcaaaggtggtgagaaaatactacggcctattcccgtagatattcgcccatttatcaaacagcttttagagcagcaccaaagcacagggctattgctgggagagataaagaaaccggaagctgtcagtcagtggggaaggatgttgtataagcgtctgggccactctgaaccgtggacgcttcacgatttacgccgtacattttccacgactctgaacaacatgggaattgctccgcatgttgtcgagcagcttctgggccatgcgctgggcggtgtcatgtccgtatataaccgcagtcagtatttacctgaaaagctggatgcactgaataaatggatgcagagattagatattattacctctgatatctcaaatgttactattcttgaggtcgcaagatga

SEQ ID NO: 27058 - DNA, 843 bp, Escherichia coli
atgataaaaaaaattaacagtaaaagagacttaccaaagtcattcagcttagaaaaatatgatgaccttgaaaatatgtctgataaggatttgtttcgtcagctttattggcgatgcgatgatttaacaataaaaaatacagactgccctgactatggtttgcaatatggtgctaaatacccgcttaacaataattttggtgatccattcggggaactcaaagcagaagaatggtttcttgaaaagcaaaaggaatacgagtacaagactcagcctgatttgctgaaattaagttacggcgatggtataaaaccattaatgcgatttgagttggcatttttaaataaaatcaatgctgataaaggtcactggaaaggaaagccaatagtagttgacgatgatttggtgggggatttgtttacagcagataacggtatgttttgggctgtcatgcgtgagccagtaaacttactttctgatgttgtggaaaacgtgatgattactgttgacttaaacaacagagatgatcttttgattgaagcattcacgaacctcctcccaaaatggcgcgaagaactcggaatacctgaaccagataagccagtctcaggggactgggagagcgtcagacggaagataattgactacagaataattccacttattgatttgatgtcatgggaaagcgctaccgacagcaaaatatcccttggcgtactcgcagtatccctgttcccggatggggaaaaggagtcctttgccatagctcaaacggtgaaacctttcttggataaaattatgagaagtgattctttagataaaatcaggaaagaattatcttga

SEQ ID NO: 27059 - DNA, 210 bp, Escherichia coli
atgaacaatattaaacaatcccagcagccagcagaaagagttatccgtgaggctgagtgccggcagctaaccggtatttgtcgaaccactcgatacatgatggaaaaagaggggagctttcccgcccgccgcaagctgggaggtcgtgctgttggttggcttctgtctgaggtcacagcatggcagcagagccgcagcaaagcagcgtga

SEQ ID NO: 27060 - DNA, 1137 bp, Escherichia coli
atgtcacataaaacaaaagcggccatgcagggccgccaatgtcactaccaaaaacttaagcaaagtcaggataccagggttaatgctagtggtcaaagccagagcgctgctgggattaaaggaactgcggcattggcgcacaccctatttccccaaatctggggagaactggatcatcatgcggggtgtgctgcaatgcagcataccccggagaaatcccgtagtttcgacaaatacccagatattgggtgttatggcctgcataaaatcacacctgcggttcttattcctgtccccggctcttctttagctcatttgcaatggcggatatttaatcacgtggtaaccagcctttcgcattccttttggggattggaaggttcttttccttcaaaatacgtaaaatggcaggttctgaatgtggtccccaaccatcccaattaccttcccaacagtcgttacagcagaaagccctaccgtataattgcagtacacgtccttggtaaaggtctgggccaaatcgtgtttctgatccacagacttcacatgtgcaataaaaatgccctttctcatctatgcgcatcatcttcttcctcaaatcaaccttttggttctattccttgccgacgcaattccgcgcgagctaattcttttatccaattaccaagacttacgccttcgcgctccgctgcatcgttcagttgctggcgtagatcagggttgattctgatctggaaagtaggtgaccagccatcacctttaggggttttgtctcgtttaattgttgacacgtacgtacataacctcatagcatgtattttgttatgtacgtacgttatcacgtctggcatagaaaagacaacgccccaaactgttggagcagtattggggcgtctaaccaaaccgttagttgaggtaacagttatggctgaattacagcatacccaaactcgcccggaatttacatggagatttatctctgcttctgagcgctaccctaccgccaaaccattggtgatctacgtcaacgcatccagcgaacaggaggcccgcgacactatgccgggtgtaaacctcattttcgcagcacgtctcccattccatgcctttcaggcaatggaggtacgccatgcgtga

SEQ ID NO: 27061 - DNA, 186 bp, Escherichia coli
atgcgtgaattaaccaataaaagtgcgtcaatagcctgtgaactggctgcgttgttgatggttgtcgaagagtgcgacgttgatcaggttgagcgtgaaaaccttatcagtctggccagacgagtatcggatcaactggcggcaagcatggtcgagcagaattcaacgggggggctcaatggataa

SEQ ID NO: 27062 - DNA, 228 bp, Escherichia coli
atggataacttttacacctaccgcagcaaaaaagatttgctgttactggcgcaagaggttgccgcgcttctgtcatgtgctgcttaccttgcgactaccagaggcgaggaagagcgtatccatgtaatgagtttgacgcacctggctcaacggctttctgacgagctggcaaactcactggatatttctactttttcagaccctgaatcgcgggaggcaaaatcatga

SEQ ID NO: 27063 - DNA, 369 bp, Escherichia coli
atgatcagcaatgtgaagttttacgagctggctaagcgcgttgatctgctggttgaaaaggttttgcatcttgaggcacaggttaagtcactcactgatagtcaggggggggaaatccctccgggtatgacgccagtagcaacactggccgctgaatacggtatctcaaccaataaggctgaggaactggcgaaaaacacaggggtgatgctggttaagctgaaatctggcgggttcgttgcacctgatgaaaagttcagggaagcggcgcgtctggtgctgcgcagcgctaagcgcaaatatggctctgcgtactggttccatcctctgatcggcaaattccagatgagcgggggcattccaaaatga

SEQ ID NO: 27064 - DNA, 1365 bp, Escherichia coli
atgacggtacaactgacagctgtagaaaccgtttctgatgccctgttcacctgttcgtatctgtgggcgcacggcaagcaatacagtcgcagcgatttggataaagcgctccaccagcataaggaccccactacccgttacggaaagctggtggctcgcctcaaccagatagcagcaatgccgtatgaggaactctgtgatgccggatatctcgatacggaccgcaaacaaatgattacagcgcggcgttctgtgctggtggaagagataggcgaaggggaaatgaatgccatgctgtctgacgtgcagcgcattcaccgggtcttccctgatgctggtgcaaagttcaggacaaagctgcctctctctcgcggttctgagggctttgatatccgtcaggactatgtccttaaacactttctgccagcgcaatcactgtgcagcatttacggtcccagcggttcgtataagagttttctcgctgtatcgtgggcctgtcacattgctgcgggtctgccatgggctgggaagaaggtcacttccggcgcggtgctgtatgtggttggtgaggggggcgtaggcgttccccggcgtataaaggcttgggagcaggtgcacggcatacaggcggacaacctctggctggtcaatcgtccggtgtttcctgtgcgcgagtcagaggtaacggaagtgcttctggctgccagacagattgaagctgaatgtggtgtgccggttcgcatggtggtgatcgatacgctggcccgttgttttggcggtaacgacgagaacgatgctcgtgatatgggggcatttattgaagggtgtgacgttatcaaacagaaaacgggtgcaacggtgctgatagttcaccactccggcaaagatgaagggaaaggcgctcgcggttccagtgctttccgcgctgcgcttgatactgaatttaacgttaagcgtgaaggggatggaaaggcgcttattctgacctgtaccaagatgaaagacgcggaggagccagagcgtaaagcgtatgacctgagaacggcagagctttacaccgatgaagatggtgagcttgtttgctctctggttgtgcacgatcagccgagagaggctaaagaggttgatcctgaactggccaatgtctcccgtcttagcgataaccaccatgcattatggcaggcagtacgcagccgcacagctaagggggagccatgcactatctccgtcattaaagatgatctgcgtgcaacactggggacagataaagtgagaaagtcattctcgcgctggctggacaagctggagagtgagcaaattattcgcatcgagggtgagaacctttacccggtaacagtcgagtaa

SEQ ID NO: 27065 - DNA, 240 bp, Escherichia coli
atgcctattacgattcatgaaataaaggaacattacgattattacgggcttcatgatatggtctccatgtcaacgaaagaataccaacagattttagctaatggtgctttgttctggatggatcatcatgattttgttcgcagcactctttccgatgaaatcttggcaacaaacaaggagcaactagatgcaataattgagcatctacaacaatacagagacagaatgccttctgcctag

SEQ ID NO: 27066 - DNA, 1245 bp, Escherichia coli
atggaaaaagaaacaatctttaataacacctttggtttgggcaatggtcgatttgattggctgaatgcttgcgtcggaacgaatggtttccctgactcattaacttatgctgaaggttaccttagaaccccagagatacttactgactatatatacaaaaataacaagagaggagaagttgatttacttgtttatccgattgcctactctgccaggcacggaattgagctttctctaaagactatcctcattgacatggcagatctccgaggattggcgatatcagttcctgatgtgacaaaaatccacagcatcaagaaactatgggatgccacgattgatgtcgctgagaggacagatatacgactatttcacattacaaaaaaaatcgagccttatatattagactttgtggctatagacgacacagcacaaacttttagataccctgagtccaatgtcggagcgacacatttggaaaaaacaccgatcattaaccttgtaagatttgttgtttatttcaaaaagctcacggaaggtttgcgagaaataattaagctcactctaaatctgaaagatgagtataaaacaggtacgtataccgataaattttcacgccgtgatctaatcaagctttcaaaagctctaggtaataaaaatgaatgggtaactacacttacagtgaaaaaaaaggaattcatcaagaaaaaatttaatctcaatagcaacaaacaacttataaaagcaatcgacaaaattgttgtaaatagatacctatcatctttaattggcgttgaatttccacttaaacatagcgggaaaaatacactattgcgttttaaaaaagcttggtacgcactacatataaaagacgtaatgaaaaaaaataacgtatttctggacccactacaggattcaggaattagtttatccgatatcagagcagaagattttttagactacctacggttaaaaatgcgcatcaccactacttacctacctctcttttcagaggaagaattagcagatttaaccacattgattattatgggccgacaatccaatcaatattacgcagaagattatgaaagagaatttgaaagaaatttaagagatgcacaacaagataaaaatgaagccttccgctacattatcgacaataccgctgctttatattacattcgaaaagctttaaaattattgggctgcaaacaactttcagttgaaagtcactttaattattga

SEQ ID NO: 27067 - DNA, 303 bp, Escherichia coli
atgagtgaatccagaattacgcttaatgaagtaatggcccatcttcgccttgatgatgatttttatggtgaggttgaacttctgcaaatatataccgatgcggcgctggaagcctgccagaagcatatcgggaaacgttttgaagacggcctggaatttaccccggcaatacgtgttggttgcctgatgtacatcgcttttctgtacgagaaccgggaagcggtttcaccagttgagcactcggaactgcctatggctatttctgcgctctggtcggtttatcgtgatgtgggggtgtactga

SEQ ID NO: 27068 - DNA, 528 bp, Escherichia coli
atgctacaaaacaaccctgaccttcaaagcgcgatcaaacgcctctgggataaattctggagtagcggcattagcaatccgctcacagccattgaacagattacctacctgttgtttatgaaacggctagatgaactcgatcataaaaggcaagacgaaggtgaaacgagtggtgagaaatacatttctaagtttgctggtacttggattccaccagaggaaagaaaccgccctgttgcggaacaacaccctatagataaacgcacgcttcgctggagcgagttcaagacattgcagcccgaagagatgctgcaacatgtgcgagacaaagtttttccttttctgaaagatctgaatggtgctgaatctaacttcactcatcacatgaaaaacgcagtattcattatcccaaagtcagcattgttggtggaggcagtgaaggccattgacgaaatcttcgagatgatgaaaagggattctcaagaaaaaaggccaagcttttcaagacattcaaggagatgtatatga

SEQ ID NO: 27069 - DNA, 1074 bp, Escherichia coli
atggcagatctggtccagccgcaactgggacaacgtattgccgaccctgcctgcggtacgggggggtttctgttaggtgcctaccagtacatccttactcagttgtctttatctcaaaacttaaaaagagataattcaaaaggatctactcatgatgaagatgggttctttcgcacttctgtgactgccgctctgaccaaaaaggcccggattcttttgcaagagagtctgtatggttatgacattgacgctactatggtgcgtttaggcctaatgaacttaatgatgcatggaattgatgagccgcatattgattatcaggacacactaagcaagagctatagtgaagaaaccaaatatgacatagtgctagcaaacccgccttttactggcagtatagacaggggggatattaatgagaatttgaaactctcaaccactaaaaccgaacttttgtttgttgagaacatctatcgtttgctgaaaaagggcggtaccgcctgtgtgattgtgcctcaaggagtattgtttggctcgggcaaggcattcaaagaactacggcaaactttagttgagcgctgcgacctcaaggctgtcattactctgcccagtggggtgtttaaaccctacgctggagtaagtactgccattttattgttctccaaagttttcgggccgggggataaaatttccaaacctgctaccgattatgtctggttttatgagatgtcttccgatggttactcattggatgacaaacgaaataagcttgaaggctacggcgacctgcaagacatcattcaaaaataccattcccgtgatgaggcgtctgacacagatcgtacagctaagtgttttatggtgccaagaatagatattgaagcggagaattacgatctttcgctgtctcgctataaggaagaaatatttgaagaagtgcagtacgaacagcctgaagctattctggaacgactaattcaagcagaagtggggaatgtggataagaaagtgcttaataaagtacaaagtggcatcttgtacgagctactagagttaaaggggatgatagtatga

SEQ ID NO: 27070 - DNA, 1566 bp, Escherichia coli
atgaatagaatgactattccccttggtgacatattaactcaatccggtcaccaccgtgcaggcaatcgagagcttccggtcctatcaataaccatgaaaaatggtttggttgaccaatcagacaaattcaagaagcggattgccagttcagacacgtctaaatatcgtattgtatacaagaatgaacttgttgttgggtttcctattgacgagggagttcttggattccagacaaaatatccggtaggaatcgttagcccagcttatggtatctggaaactcaaggatgaatcggtatgccatatcccttaccttgagcgttatctgcgctcctccgaggcaaggcgactctatgcatctcgtatgcaaggggttgttgcacgtagacgtagcttgacgaagtctgattttcttagtttggaagtaccttttcctcccatcaatgatcaggctcgtatagctaatttattggccaaggtagaagggctaattgaacagcgtaaacaacttttgcaatacctggatgacctactaaagagcgtattcgtcgatatgtttagtgatccggtaaaaaatgcaaaaggatgggaactaacaacaataggtgagttagctgtcgatgtaagatacgggacaagtgtatcagcgcaaggtggaaaatataaatacatacggatgaataacattactccggatggttactgggattttgagaatcttaaatatatcgatgtagataataaggatctggataaatattctcttcagaaaggagatctcgttttcaaccggaccaattcaaaagaattggttggtaaaacggcggtttacgatcgagatgaaactgttattattgctggctatctcattcgtgttaggttcgatcaacaaactaacccttggtttgtatgggggcacctgaactcaaagtttggaaaagcaaaattatttaatctttgtcgtaatattattggtatggctaacattaatgcccaagagttaagggccatccctattcttaagcctccactggagttacaaaataaattcgctactattgtagagaaagcgcatgctattaaatttcgctatcagcaaagtcttgctgatcttgagaccctgtatgatgttgttagccaaaaggctttcaagggggaattagaactttcgcgtgtgcctattccgacacagatatttttcccggtatcaggtgaagaacctgaacacggggatgccgtacaacatatagcagtgggtaattatctgcccgtaactaatagcttaccatccgcgttggataatgcagaggctcgcaagtcactgatcgaggaatggctagaggcctatatagcgcaattgggcaactcatcgttttcagtacatgagttcatgatgacggcgcaggcacggctggcggaattatatccggacgttgattctaagtttggtgaaagtgactatgagcatatcaaagcttgggtgttcaaagctctggctattggtacactgaagcaggtattcaatgacgctgacaattgcattgaacttaaggcggttttggtatga

SEQ ID NO: 27071 - DNA, 567 bp, Escherichia coli
  misc_feature (506)..(515): n is a, c, g, or t
atgaagctattacgcctaaaaatctctgatccgtccggcttccgtagtctgccctgtggttttgaacactattttagaaccgaatgggatttacaggaagaattgaatcaacatgaaggctttgcgccttttgtgtgtgctggtcccaacggcagtggtaaatccaatctgcttgaagcattagcagctatcttctttcagttggaaattttgcgggtccgtcgaagttttttgcctgaggtattgcaaagtaccgatcatgatttatcaccaatctcatttgagctggattatctaattcgagtaccagaagagtttcgaatctctggcggacaagaatgggcaaaagtctccgtgtggaaaaacaacggggaatctgtgcgtttccattgggtaaatcagagtgactttgacacaaatgctgatgaagttttcaagggaagccatgccgatattctattgcctcagtatgtgttgggctactcgtctggcgagaatgaaattcnnnnnnnnnnccgtttttcaaaatgcgctttgtacagttcgacgagtactggaatgccttga

SEQ ID NO: 27072 - DNA, 1260 bp, Escherichia coli
atgcgctttgtacagttcgacgagtactggaatgccttgactcgacaactgagctactctggccatccggagtcgaggttggcctatcttgacagtggtttcagccaagctattttactttgtaatctgctttttcaaaacgaaactgcgcttcaacctttccgtgaggatgttggtatagaggcgttgcgggagtttcgtattattatccgtcgcagtattcctcttgcgccggagcagttgacctcgtttgccagcgaggataaaaaccagcaccaatcacttgatgacattttgaatagtaaccctgctcttcatgtggatatggatgaagaaagtggtcaaagttaccatttaaacctgatgcagctgctggaaggggatgacaaatcctccttggtagtcagcgcgcttaaacgctgcgctagcttgtattacgaggacgagtgtaacgacactctaattctggactactgggttaatgatgctactcgacaggcttttcgcgagaattttaatggttcggcactggctctattccaggcgttccaagtattgctgacactcaatttgtataaggtgagtgataatctcaaaactgatctgtatcgctcaacaagtcactatgtcagtgaaacggtaccaacgttggcgtccgacgaacgaattatgcgcttcaagtttgtgcgttttactaaacaaggagtggaagagccaatgatgctcaaggaactctcggacggtgaacaccaattgcttcatagcctaggtctatgtttactgtttagagaaaccaacagcctgtttctgttagacgaaccggagactcatttcaacccacattggcgtgccagttttatcactcggatgcgccaatgtttatgtaacactgagaatgtggagcaggaaatgttgatcactactcatacacctttccttatctcagatagtaaacccgaaaaagtactggttttttctaaggataaatatagcggtgcggtcacaataagcatacctaaatacaacacacttggtgcatcaatcaataaaattactatgaataccttcggcaaacgtgaaactatcggtggccatgcgcaagcagtactggatgatttacgcagacgttttaacgaaggcattgaagacaaggaaactctgatcacagaaattgatgaacaattgggtgactcggtggaaaaagtattactcctcaaggctatttttgatagcgacaatccaacgaatgacgaggtttag

SEQ ID NO: 27073 - DNA, 1059 bp, Escherichia coli
atgctgttttcatatacctatgtgccacacaaaatggaaaagatgcaggcattcattgattttattttttatgaggtatggtgcaaagcgcgggtaagagggcctttttgtcttaaactgtttgaagctaacgcagaattgtatgaagtgatggaggatttttcttcctcggatacacaaggtgctgttttcttttataaccatgtagagaaaatttatggcttgttttcgtcactgactgaggtacaaatcgatcagtttaaacagtggtatcaagggaataatgatctggaaaaaatatgtgctaatgacccttcaatacaagttgtccgttattccgatattgccattcaccacaaagatatagcagaacaacttgctgttttctttaagggcttatactcacagtcactgcttgatctcgctgtactgcgtgccaagatcggtgatatacacgatcactatcaatcttttgcagcagtgaacaaggcgggtaaatgtcctttttgtggtattggagatataaagggtgggaaccatagcaagcgcgaggcctatgaccattatttgcccaaagctttatatccatttaattcgataaatttccataatcttgctccggcctgtcatgagtgcaatagcacatataagttatccaaagatcctattcagagcggcgctcttcgtcgtaaggccttcaatccatttgcctcagtggatcatgtaattcaattacagattactctacaacatgcaaatatcgatgcgcttgagcctgctgatattattatacagttcggtcccgatacgctggaggaggaactagaaacatggaaagacttgtacggtatagaagaacgttataaagccaaagtttgtgcagaaaatgacggtaaatactggcttactcaggtgctagatgagtggaaggaggaggggttgagtcctaccgaattcatgagaacattagcacgtcaagcgaaaaagaagccttatgctgaatgcaatttccttaaagaaccttttcttaaagcttgccatcgaataggtgttttttga

SEQ ID NO: 27074 - DNA, 264 bp, Escherichia coli
atgaagaagcgtttttccgacgaacagatcatcagtatcctccgcgaagctgaatctggagtttttgcccgggagctttgccgcaagcacgctatctctgatgctgcgtactacacttggcgcaagaagtttgatggcatggaaatgcctgaggtgaaacgtcttaagtcatttgaagaagagaacgcccacctcaaggagttgcttgcagaagtcatgatggataaagaagcgttgcaggtggccctgaaccgaaagttctga

SEQ ID NO: 27075 - DNA, 306 bp, Escherichia coli
atgttagcatgctttcctgccggacgaggtgatactgctaaccaggggcgttttgttcttaaaatgcctcgttccggcatcaatcactaccgagtccctgccgtccccttattgagcgccgcgtacagtttattcactaccacccaatttagtgaaacaggccacagcgccgtaaccgcgggcatcatatgccgtagtggcgatctgtcttattctcagtgcccctctatcagtatgcgcccatgcaaactgacattccccctgtattatgttgacagggagagacctgccagcctactggcgtga

SEQ ID NO: 27076 - DNA, 306 bp, Escherichia coli
atgataaacgaagatttattcattaagaatatacactcaaaaaatcaggacagaatatctgtagccatggtatatgacacgttatcaaaagaagcccacagaggttgtgggctgtattacgaaatatacgaaagctgttttatcggtcttttgcgcgatcatctttcagaacttaatgaagctgacgcaaatagattaagacgctatgccgagagtaaaggtacgaaaattgatgatgcgtcctacagtgaagcactggaagctgaaagggagtgcagggctgaaatataccgcgagcaaatgtaa

SEQ ID NO: 27077 - DNA, 306 bp, Escherichia coli
atgaaaaaaaccgttatcgcggcgacggtattatgcctgaccgcaggaacgccgatttattcctttgccgctgacccgtgcgaagttgttctttgcatgtacggaaaagctacaggtaatagtggtgggagtgaatgcagttcagcagaacgcgcattttttaaaatcaacgcatttaaaaaacaccatcgtttcaatccgggtaaaacattcgatatgcgaaaagaatttttaggggagtgcaaagccgcagaccctgaatcaataagtaaaatcctttcaaaatttggcagagtgaaaggataa

SEQ ID NO: 27078 - DNA, 708 bp, Escherichia coli
atgaaaactcgctttcgtactcttattctggcttgcgtcattgcaagcccactggctcatgctggtattcccgtcgctgttgatgctgaccctatgcgggacgtgcagtgggcgcaggagttaaaacgctggatggaaacggccagacactaccagtcacaaatacaggcatataaagaccaactggcgacggccactggcgttcgtgatattgctgattttgttgaccaggccaaaggcctgaaagctgaccttgaaaagctgcgtaagcccggacaggcactgaatgacctgcttctctccggcggttcctccgggcagttcgatgcgttgtacgagaagtataaaattttcgacacctgcaacactgcgcaatcggggagttatgccaacgtatgcaagcagcaggtcatcaacaaggctatccagcttgagcaaaccgacgaggttcagaaccaggtaagccagaccctgggggaaataaacagtctctccaacagggtagcgttagccaaagattcgaaagaatctcaagaccttgcaaacagtattcagctaaaatctgtcatgctgaacacgcttaccacccaatgggaaatgagcgtgaaagcagcagagaagcgcgaaaatgcgctagaagcggagcgtgttaagcagtggaatcagcagcagttaaacgcgccaactgctgaccttaataatttatga

SEQ ID NO: 27079 - DNA, 255 bp, Escherichia coli
  misc_feature (223)..(232): n is a, c, g, or t
atggcagtagaaaatcgagaaagacttaacgaaatccttcgtgaactaaaagacggtatgtcctcaaacccagtatcagtgcgagaattcataagctggtttggcgcagagcgtcgaggctacatggttgcgtacaaaattcgcaaagcattagaaagcttaggagttaaaaccgaacctgattttgatagtgtgccgctggatgcaaaaattactatctatnnnnnnnnnnatctatgcacctccggggaatga

SEQ ID NO: 27080 - DNA, 603 bp, Escherichia coli; identical to SEQ ID NO: 25268

SEQ ID NO: 27081 - DNA, 753 bp, Escherichia coli; identical to SEQ ID NO: 14663

SEQ ID NO: 27082 - DNA, 540 bp, Escherichia coli
atgaaaggcttcccaattgcacatatttttcacccttcaatcccgccaatgcacgcagtggttaacaatcacaacagaaatattgattattggacggtaaaaagaaagtttgcagaaattgtctccaccaatgacgttaataaaatatacagtataagtaatgaactgcggagagtattatctgcaattactgcattgaatttctatcaaggcgatgttccttctgtcatgattcgaatccaaccggaaaatatgagtccattcatcatagatatttctacaggagaacatgacgattatatcatacaaacattagatgtaggcacttttgcaccttttggcgaacaatgtacttgctcagccgtcaataaaaaagagctggagtgtattaaggagacgatttctaagtattgtgcaaaattcacccgaaaagaagccatcttaaccccccctacgtactttaataaaacctccattccttcagattgttggcaaattctctttttttcacccgatcattttaataatgatttttattga

SEQ ID NO: 27083 - DNA, 357 bp, Escherichia coli; identical to SEQ ID NO: 6160

SEQ ID NO: 27084 - DNA, 252 bp, Escherichia coli
atgatgaacatcgaagaactgcgtaaaattttttgtgaagatggcctctatgctgtgtgcgttgaaaatggaaatattgttagccattaccgcattgtgtgtttgcaaaaaaatggggctgcgttaattaattttgtggatgcccgagtgacggacggatttatcttgcacgacggtgagtttgtcacttcattacaggcattgaaagagatcggaataaaagctggcttttctgcttttgcagaagaataa

SEQ ID NO: 27085 - DNA, 459 bp, Escherichia coli
atggggaacgaaaagagcttagcgcacacccgatggaactgtaaatatcacatagtttttgcgccaaaataccgaagacaggtgttctacagagagaagcgtagagcaataggcagtattttgagaaagctgtgtgagtggaaaagcgtacggattctggaagctgaatgctgtgcagatcatatccatatgcttgtggagatcccgcctaaaatgagcgtatccgggtttatgggatatctgaaagggaaaagcagtctgatgctttacgagcagtttggtgatttgaaattcaaatacaggaacagggagttctggtgcagagggtactacgtcgatacagtgggtaagaacacggcgaagatacaggattacataaagcaccagcttgaagaggataaaatgggagagcagttatcgattccctatccgggcagcccgtttacgggccgtaagtaa

SEQ ID NO: 27086 - DNA, 372 bp, Escherichia coli
atgccatttgctcgttatttctgcattttcataaacgttggtttgggagaagcggcaaaacggaatgtgggaacaggggaaaatcagatacctgatatgtcatcatatgcatcaggttcaggctggcgaaaaatgccagatggttcaattgaacagtggggacgaattagttttcctggtgaacacgggcctgtatccgccaatgtttcattcccgattccatttacacagacaccgggcattgtaattgtgtgcgatggtggtttcgggggcgggaatatgtggggggcgaccaactggagcactaccggcttcatagctcactgcaattatggtcttgaaggtggtgcgtttttcgctaagggctggtaa

SEQ ID NO: 27087 - DNA, 174 bp, Escherichia coli
atgtcctgtccagaagaccaaaatgaaccacaacctaaaccaagtgagcctgaggtctctttcctagataactatgagcaagagattattgctagagtacctttcggggatatcgaaattatgacggaaagctatcacgacaagccttcaacttttcccaagaaagatagttag

SEQ ID NO: 27088 - DNA, 531 bp, Escherichia coli
atgtgcaatcaaaggaatgaggctgttggccttgaagtagatacgattttgtcgtactcgagagacaggtatgaagaagttaagacaacatacaggcggttagaggacaaagctaattttcttcttgctgtgcttggtgttgagatttctgcattattagccgtttttgggtcctttgagctgggacaacagttaaagactagtctatccgcaagattgtctctattgtgtctatgttcatgttttgtatgtttggttttttgtttttattatttatggaaatgttgggaacttagaaatattcccaaaatgcctgtgcatcgaacacctgaacaacatgaatttcttctgaggggtagtagagatgacacagtcagatttcatttgataatgtatggtagggctattgatagaatcgagaaaatccataaagaaaaatcagcgtttgtaaatgagttgtttcgatggatggttatgtcatttgtattttttattatttctgtaacgtgcatgttaataagtaaggtttga

SEQ ID NO: 27089 - DNA, 354 bp, Escherichia coli
gtgaaaaagtggattgttattggactctgtttccttccggggttcgcatttgctgcgaatcctggcggtgtcacgcttcagtgtggtggctacaaattagagttgattcctgattcattgttcaggattaatggtgagacagttacctcccagaaaatcaaaacgctcggcaacggtaatggaatgaaggcggatatggggcttatgccagccaaagacggtaacaattacggtttcgagttcattcgccgtccgggtaccgaaacgcgtttcttgaatgtccaactactgcagaacagcatggatgcgccgagaatcataggttcgtttccttgtaagaaggttgacgattaa

SEQ ID NO: 27090 - DNA, 126 bp, Escherichia coli
atggcaaaaccggactgggaggccatcgaaacggcgtaccagtggcgggtgaagtatagggcatctatttattcatcatttgaaaaaagagttgtccggataggtttcaataacggttatgtttga

SEQ ID NO: 27091 - DNA, 213 bp, Escherichia coli
atgtctcacaaatgtaggttagcctcttacgtgccgaaaggcaaggagaagcaggctatgaagcagcaaaaggcgatgttagtcgccctgattgtcatctgtttaaccgtcatagtgacggcactggtaacgaggaaggacctctgcgaggtacgaatccgaaccggccagacggaggtcgctgtcttcacagcttacgaacctgaggagtaa

SEQ ID NO: 27092 - DNA, 477 bp, Escherichia coli
atgcaagaaatcaaagaaaatatcaggcaacagctttacgggttttatattgcttatgatttgtggctgaagaacggggcaaaacccggcggagtgttttctcaaaattatggtttatgcgccaatcttttcgattatctcacattaattggtaccccctgtgaggcagcgctggagcaattacacgctgatttcagaagtgccgggctgaatgaggcgttgccgtttaacgagggtaaagagcattaccatgaagaaagagggcacaacatgtgccatatgaatccggcacgagtggcgtgggtcagggcgcagacagggcacccagcgccggaaggactggttaaagcggtgcgcttctatgaacaggttaagcgtgaaaatccgccagtcgaaaccggagcatggaaagacgctgttgactgggttctcgaagaggcttgtcaggctgtaaacattcgcatcaaaggagagtga

SEQ ID NO: 27093 - DNA, 5736 bp, Escherichia coli
atgtcgactgtagatacctctacagcagaggaactcaatcaaggaggctcagattttattctgacttccctcgaggctatgcgtaagaagttattggaccttacgtctcgaaatcgacttttgaatttccctatcactcaaaaagggtcttcactacgtattgttgatgaattaccagaacagctttatgaaaccctttgctcggaaatcccgatggaatttgctcctgtgcccgatccaactagagcgcagctgttagagcatggctatctcaaagttgggccagatggtaaagatatacagttaagagctcatcctagcgctaaggattgggcgcacgtcttaggaatccgtacagattttgatttaccagatagccataaaacggttgtttctgattcagatagagagttgctggaaaaagcccatcagtttatcttgcaatatgcccaaggccagaatggaaaattaacagggattcgttctgaatacgttaatcaaggtatagctttgtcagcgttgaaggaggcgtgctgcttagcaggctatgaagggcttgaggattttgaacgacaggcaaaggctgggaatgagattagtatatcttcttccaatccctctcatgacgataatcggatacaggctctgctttatccaaatgaactggaagcttgtttgcgcgccatctatggtaaggctcaaactgctttggaggagagtggcgccaacatcttgtatttggcgttagggttccttgagtggtatgaaagcgattcctctgaaaaggcacgttatgcaccgttatttacaattccggtgagatgtgaacgaggaaaattagatccgaaggatggtctttacaagtttcaactttattacacgggtgaagatattttgcccaatctctctttgaaggaaaaacttcaggctgactttggcctcgctcttcctttgttcaatgaagaggaaactccagagtcttattttgcttcggtgaagaaggttgtagagcagcacaaacctaaatggtctgtgaaacgttatggtgcacttagcttgctcaattttggcaagatgatgatgtatcttgacctcgatcctgcccgctggccttgtgacaagcgcaatatattgtctcatgaagtaattcgtcgctttttcaccagtcagagctgtggtcaagagaattccggcttacctggtggcttcggtcagcatgagtactgcatcgatagttaccctgatattcatgacaaggttccactaatcgatgatgcggatagctcgcagcacagtgcgttgatcgatgctatccgtggtcaaaacttagtcattgagggccctcctggtagtggcaaatcacaaacgatcaccaacttgattgcagcagctctgctcaacggtaagaaagtcctgtttgtggcagagaagatggctgcactggaggtcgtcaaacgtcgcttggatcgtgcggggctaggtcaattttgcttagagttgcacagtcataaaactcataagcgcaaggtgctggatgatattaatgctcgcttggtgagtcaggcgaccatgcctactatggaagagattgatgctcagattttgcgttatgaagatcttaagcagcagctcaatgaatatgccgcattgatcaataaccaatgggcgcaaacaggcaaaacgatccatcagattttgagtggtgcaacccgttatcgtcacaaattagatattgatgcaacagcacttcatatcgaaaacctttccgggaagcagttggataaagtgacccaattacggctgcgtgaccaaatagtagagtttagccgcatctacaaagaggttcgtgagcaggtgggggctaatgcagaaatatatgagcacccttggagcggtgtgaataacacacaaattcaattgtttgacagcgctcgtatagtcgatttgctacaaacttggcagacatcaattatcgactttcaacatagctatcaagaatatgtagataagtgggcgttagaaggcgaaagccttaatacgcttcaatatattgagcaattggtagaagatcagtcgaatcttccagtgttgtgtggttcagagcatttcccagcacttagtgagctagattcactcgatgccattgcacgggtgcgtcactatttagataggttcgagttgctacaaggtcattatgtggccttgagccaggttatcgagcctcaaaagctacgacttttagaacaaggacaatcgtgtgactttcctcgtgaagagctggaaaaatatggtgcagcagaggatttcactttacgtgatttggtcaggtggcttgaatccatccaatcaattcatgatgagttatcatctatttatgcgcaattaaacgatttcaaaaatgctttgccagatggtattgcttcgtatatcgatgattcgcaagctggattgctattctgctctgagttgttgtcgattctgggtgctttaccgactgagcttattagagttcgagatcctctttttgatgatgatgatatcgatgcagtattgcgcgacttaatgtgtcaaatcgaaacattgcgtcctttaagagatggtctatctactttgtatcaattggaccagttgccttcccaagagatgctcgcgcatgccgttgctgttatccagcaagggggattatttgcatggtttaagagtgattggcgtagtgccaaggcactgctcatggcgcaatctcgtaagcctgacactaagtttgctgagttaaaacgctgctcagctgatttgctcaagtattcggagctgttacaacggtttgaacaaagtgactttggtaatcaacttggtaatgcattccgagggttggacaccgactgtgaacaactcatgttattgcgtgattggtacaagaaggtccgagcttgttacgggataggttttggaaagcgagttgcgataggctctggattatttaacctagatggtgagattatcaaaggtgtgcatttaatcgagaaatcgcagattagctcaagattaatgactttggttaaacgggtcgagcacgaggctaagttattaccgcgtatttctagcttgttggaagaacatgcatcttggttaggtgagcaaggtgtattgatgcaatcttaccgacaggtgcggaatactctcattgccttgcagggatggtttatcaatccagatatatcattagagcagatgactcattcctccgagattttgcaaaacataaacgatcttcagatatcccttgaaaatgactcgttacagttaggggcgtttttacaattaaccccattggcttgcggtgcgtataaaaataatcaactgacgttagacactattaacgacacgctgaattttgccgagcaactggttgataagataaattgcgtatccttggctacccagatcagacatttggctagtggtagtgattacgatttactatgtcgtgatggtggggaaatagtttcgaaatggaatgaacagattaaaaatgctgagttatatgcgctagaaacaaagttagagcggagtcagtggctcaagtcgactgatggttctcttaatacattaatcgagcgcaacgaaagagcaatacagcaaccccgttggttgaacgggtgggttaactttattcgttgttacgagcagatgcatgaaaatggattgcagcgaatctggagtgctgtacttgcgggctcgctcccgattgaaaaagttgaattgggtttagcattagcaattcatgaccagctggcgcgggaggttattcacatccaccctgaattgatgagagtttccggctcacagcgcaatgctttgcagaagtcatttaaagattacgacaaaaaactgattgaattacaacgtcagcggattgcagcaaaaattgcttgccgaaatataccagaagggaattctggtggtaagaaaagtgaatatacagaactagctttgatcaaaaatgagttgggtaaaaaaaccagacatattccaattaggcaattggttaaccgtgcatgtaatgcgctggttgcaattaaaccttgtttcatgatggggccaatgtcagcagctcattacctagaacctggacgaatggaatttgatctggtggtgatggacgaagcgtctcaggtgaagccagaggatgcattgggtgtcatcgcgaggggcaagcaactagtggtcgttggtgacccgaaacagctaccaccaaccagtttctttgatcgaagtgccgacggagaagatgacgatgatgccgcggctttaagtgatactgacagcattttggatgctgctttgccactgtttcctatgagacgtttgcgttggcactatcgttcacgacatgaaaagttgattgcatactctaaccgccatttttataacagtgatttggtgatattcccttccccaaatgctgagtctccagagtatgggattaaatttacctatgtgtcaaaaggtcggttctccaatcaacacaatattgaagaagcccaagcagttgctgaggccgtacttcatcatgcgcaacaccggccgggtgagtcactcggggtagtggccatgagttccaagcaacgcgatcaaattgagcgcgctatcgatgaattgcgccgaaatcgccctgaatttaacgatgcaatcgatggcttatatgccatggaagagccactttttgtgaaaaaccttgagaacgttcaaggggatgagcgtgatgtaatctttatttcctttacctatggaccttctgagcatggtggaaaggtttatcaacgctttggacctatcaattccgatgttggctggcgtcgcttgaatgtgcttttcactcgatcaaaaaaacggatgcatgtgtttagttcaatgcgttctgaagatgtattgacgagtgaaaccagtaaacttggtgttatttcgttgaaaggttttttacagtttgccgaaagtggcaaactagattccctcacaacgcataccggcagggctccagatagtgactttgaggttgctgtaatggaagcactcaatcacgctgggtttgagtgtgaacctcaggtaggggttgcaggattctttattgatctagctgtgaaagatccaggttgtcctggccgttacttaatgggcatagagtgtgatggtgcggcttatcactcagctaaatctgctcgtgatcgtgaccgtttgcgtcaagaggttctggagcgtttgggttggagaattagccgcatttggtccactgattggttcagtaatcctgatgaggttctatctccgattatccgtaaactccatgagcttaaaacattggctccagacgttgttgtaccttcctatgaatatgtcgaaacgattgagtcaagcgctgaagtggcgtctgactcaattgattctcttatgcccaatttggggcttaaggagcaacttaagtattttgccacacatgtcattgaggttgagcttcctaatgttgatgctgatcgtcgtttgttgcggcccgcaatgcttgaggctttgctggaacatcagcctttatcacgttccgagtttgttgaacgaatacctcattatctgcggcaagcaacagatgtatacgaagcgcaacgctttcttgaccgagtcttggcattaattgatggcgcagaggctgaagcgaatgatgcagcgtttgagtctgaattggcataa

SEQ ID NO: 27094 - DNA, 2043 bp, Escherichia coli
atgaatgatgcaggcgttcgccccttttccattcgtgcactgcttgaagatcgcgcccgctatctggtgcccatgtaccagcgcaactatgcctggggtgagggagagatcacccagctgctgcaggatgtgctggattatcagcaaaaattggtcagtggtaaggggccgcaaacctactatatcggcaccctggtggtgtttgcccgggacgatggcagtttcgaggtaatcgatggccagcagcgctttactaccctctctctgctggccaattggctcaaacatcacgcgatagattcggtggatatgagctggtatcagaccatcaacctcgcttttgagagtcgcccgatatcgagccataccttcgagcgcttatggcagggtgttgccccctacgatttgcgggggagtaccttcaatgaaggtttggtgaacggttttgagctgattggcaaggcaatggcggatcttggtttggtaggggctaaactgacggccttttgcgactacctcttcaagcatgtgcagatctctcgtatcgaagtacccaaggataccgatctcaatcacttcttcgaggcgatgaacaatcgcggcgagcagttggaaaagcatgaagtgatcaaggcgcggctgatggagacgctgaaccagatacccgaggaagagcatcgtcgccaaagtattcatatcctgacccgggtatgggatgcctgcgccaatatggagcgctatatccagtacggctttaccccgcaagagcgccaccgtctgtttggtgagagcgactggggtcagtttgtgccccgtgattttgcccatctgcttgatctgctaggatccccaaacacggccgacgctgccgataaaagccgtgcagctgccggtagccaagggcgcaccttgttggccattttgcaggatgacaagcttgatggtgagcagacggtggaggaggagagcgcaggctccgagcgctttaacagcgtcatcaacttctccaacttcttgctccatgtgctgcgactcgtgagccgcgacccgggtgatacggagggggtgccgcttgatgataaacaactggtcgatcagtttgagctgcgagtgataaggcaaccggatccagtagcggcagttcagcgttttatctatggcctgttaaagagcaagtatctgtttgatcagttcatcatcaagcgcgagtttgccgatggcaaggatagttggagtctgaagcggctgcactggtattcggaaaagagcgtcagttacatcaatacctttgacaaggatgaaaatgagaatggtttctctggtgttaaccggcgggtcctgatgttgctgtcggcgtttcatgtgtcgaccccgaccctggtttacaaacattggctgaatggtgcactgagatatctgttcgacaattgtcaccctgatcaaccggtggatgccggggcttatctgtcctatctggagagtcaggctcgccgctttgtcttccagcgctttttggcgcctggtgaaggggcttcctattaccagatgctctaccttgataacgccctgttgcccgccatcaatgtggatgagagttggcacaaggtgattacatccaaacttcgcttcggtcatatcgagaacaactttgtcttcaacttcctcgactatctgctgtgggtacgagatcggaatagcgacaaagttgctggctcctttgagttcactttccgcagctcggtggagcacttctcaccccagcatccgatggatggctataaaccggttgagcagagtgcactccattcgtttggcaacctttgccttatcagccacagcaagaactcgcgcttgagtaacttccagccgcaacagaagcaggagcactttgaagcaagccttgccaataaccagactgatagtcttaaattgcttgctatgattcggctgatgaaagataaaggtcgttggctggaagatgagatagctgagcatcaacaagatatgttgcaggtcttactatccaatcaaattcagcaataa

SEQ ID NO: 27095 - DNA, 1452 bp, Escherichia coli
atggagagcattaataatcaagtgcagtcggtacgccagttgctggccattccccaactggccatcccaagctatcagcgaccttaccgctggggctccaagaatatctcggatctctttaccgatttggcaacccatcaggacaagagcgcctaccggctgggctcggtggtgtttcatcagcacaccgatagtgagcagggcgagatgcttgatatcgtcgatggtcagcaacgcaccctgaccctgatgttgaccgtcaaggcgctgatcgaggtgctggataacgaaaatcgcagtggcaaagagaagagtatccggtttcaacgtcaggatctgcgtgagcaattgcaggtcttgcgtggacctatcgatgcgtttatgcagcgccagcgcttccccagccgggattcggagttcaacctcagacgcaactatctggagttgcgtcggctggtggcccgccctgagtttgacgagcagcaaattgactttctgctcaaccgctgtcaggtggtctgctttgtactgcaggatatctcggaggcgttccagttcttcgattcgcaaaatgcccgggggcgcgatctggctcctcacgatctgctcaaggcatttcacctgcgcgagtttgccggtcatgaggccaatctcaaggccgaggcggtcgcccattgggagcgccagccaagcgacgagctggccaatctgttcgccctctatctctatcgggtacgccagtgggccgagggcaagtcggcccgctactttggcaagggggaggtggatctcttcaagggggtcaacctagatcgggcagggcattatccttacgtggagtcgctgcgcatcgcccaccactttgtcgatgagtacaacagccagtaccagcgcaagattgacggccagtacatgacgtttccctttcatctcgaccagatgatcatcaatggtcggcgctttttcgagatggccgagtactaccagacgcgggtggccgccatcgtggccgaggagtctgattccggcaaggcgcaatctgccaccctgctcggcgaaacgctgacaccgatggccagcaaggtgctatcgaccctgggcagctacgagcgtcgccaccgcaccggggatcgttatgtgcgggccatgttcgactgcgccctgatcttctatatcgacaagttcggcagccaagggctgtcactggccatcgagaagtgctttatctgggcctatcgctgccgcatccgccagcaggtagtgcagttggcaaccatggataactatgtgctggagcacaatctgatccgtgccattcgtgatgctcgtctgccgggagatctgcacggcttccctttgcctagcatgagcagtcgagagaacaagaacaatcgcaatggtgccgaagatgagctggtcgggctgtttcgggagatgaaatattatgaatga

SEQ ID NO: 27096 - DNA, 3285 bp, Escherichia coli
atgaaccagacgtacacgccaaaattccaggaagaatacagcgccaaaattccggcactgacgttactgaccagcctcggctggacgtttttatctccgaaacagattatggattaccggggctataaacaggatgaggtggtgctgcgtccggttctgcgtgaagagctgtcgaagcgttcctttatggcgggtggcaaaacctgccagttatcggaaaaagcactggataacctgatatcacaggtctgttctccggcgctgaatgaagggctgctcaaagccaatgaacggatgtataaccatctgctctacggtatcgccgtcacggagtttgtcgatggcaagaaggtcaaccccaccattgcgctgatcgactgggaacatccggaaaataaccagttccactttactgaagaatttacggtattgcggtcaggtggtgttgaaacccggaggccagatattgtctgctttgttaatggtatcccgctggctgttattgaagcgaaaagcccggctggtcatggcaagaaagggccaaccattgacgaggggatatcccagagtatccgcaaccagttcaacgatgaaatcccgcagctgtttgtctacagccagttattactttcgattaacggtcatgacgggcgctacggtacatgccatacgccaatgaaattctgggcggcatggcgcgaagaagatattaccgatgcgcagatgtatgctctgcgcaaccatcctttatcgactgaacaaattcatgcgttgtttgatcatcgtccatcagccgatctcaactggtaccaacggttaatcgccgccggtgaactggctgtcagtggacaggacaaactgctcatcagcctgctttcgccggaacgtctgctggagatgacccgcttcttcactctgtttgataaaaagaccgggaaaattgtcgcccgctatcagcaggtgttcggtattaaaagactgctggagcgcatcagtacccgcagacccgatgggggcagggaaggtggtgttatctggcataccaccggctctggcaaatcgtacaccatggtgttcctcagcaaggcgctgattcttcatgacagcctgaagcggtgtcgtatcgtggtggtgacggaccgtatcgatcttgaagaacagctcagcagtacctttgcatccggcggcgagttggccgggaaaaaagacaaagccaatgcaatggcgacatccgggcagatgctggcgaaacagattggctccggtaaagaacgcatcattttcaccctaatccagaaatttaattcagcgacaaaacttcctgaatgcgtcaataccagccccgatatcatcgttctgattgatgaaggacaccgtagccagggtggtgagaaccatgtgcgaatgaaactggcactgccgaacgccgcctttgtggcatttactggtacgccattgctaaaagaagataagaccaccaataaattcggaccgattgtccacgcttataccatgcagcgagcggtagaagataaagccgttacacctttgctgtatgaagaacgtattcccgaccttgaggttaacgatcgggcaatagatgcctggtttgatcgtattaccgatgggttaagcgaagcgcaaaaagccgaccttaagcgtaaatatgcccgtaaaggtgaggtttatagtgcagatgatcgcatccgtctgatcgcactcgatatcgccacgcacttctcgaagaatattgatgagggactgaaaggccagcttgcctgcgacagcaagatttccgccatcaaatataaaaagtatcttgatgaagccgggttgtttgagtcagctgtagttatcagcccgccggatacccgggaagggaatactgaggtggatgaaagcaaactgccggaagtgacgaaatggtggaaagataacgtcggcacgcaggatgagtctgtgtatacccgcaatatcatcagtcgtttcgataccgatgagaagctcaaattgctgatagtcgttgataaactgctcaccgggtttgatgagccgaagaataccgtgctgtatatcgacaagccgcttaagtcccacaaccttatccaggcgattgcgcgggtgaaccgactgcatccactgaaaaagttcggtctgctgattgattatcgcggtattctggctgagctggacacgactatcggcaaatatcaggacctcgcctcccgaactcagggcggatacgatatcaaagatattgacgggctgtacagcgccatgagctctgaatacaagcgtctaccgcatctgtataaccagctgtgggccatatttgccggtgttaaaaacaaaaatgatactgagcagttacgtgcggtactggtgcctaaaatggaagaacgtgacggagagatggtcgatatccatcagaaaacccgtgatgatttcttcgaggcgttaacggccttcgccggatgcctgaaagtggcactgcagtccgccaccttcttcaccgacaagagctttacggaacaagaccgaaacctctataaagaaaccgtaaaacagatgtccagcctgcgccagtgggcgatgcaggtcagtggagagcaggtcaattatgacgactacgcggagcaggtgaaaaaactgctggataagcatgtcaccggcgttgaggttcgtgaaccggatggcgtgtatgaagtcggtaaaatgggtaagagcgaaaagcccgaagagtgggacaacaataaaacccgcaatgaaaccgacatcattaaaacccgtgtgacgaagatgattgagcaggagctgcgtgatgatccgtatgctcaggaggccttttccagactcctgcgtatggcaatcgaagaggctgaaaaactgttcgaccatccacttaagcagtacctcttattccgtgagtttgaagaacaggttgaagcccgtaagctcagcgatatcccggatgcactggcggtaaacaagcatgctcaggcgtattacggtgtatttaaaaaagagctacctgaggtttttgtggtaaaagacgttcaggtgcaggataagtggacgaagctggcttttgaagtggacagcattatcgttagagcggtggcagaaaactccctgaacccccaggacattgagaaagtcgttaagacaagtctgctaccactgctgtttacggcctgccgggaaattggtgccggaatgaatcaggttaaccgtattgtggaaaccatcatccagatactgcgcgttggtttgatgaaatcatga

SEQ ID NO: 27097 - DNA, 684 bp, Escherichia coli
atgaaactgacgaaaagcggtccactgactgaccgggaaatcgactggctggaagaaatattaatgaagtatggaatggatgattctgtactctgtttctctgagctggatggattgctgacggcgattttatcaggtccaaatatggtttcacccaatatctggctgagtgctatttggggaggaggcgattatcatccgaaatggtcatctgagagagagatggagcgttttgtcagtctgtgttttcagcatatgaacgatatcgctggttgcctttatgacgcccctgaactgtttgagccgattttcaatgagcgtgaggtaaagggggaaaaatataccattgtggaagagtggtgttttggttatatgaaaggaaagtcactggatgactggtctggtcttcccggtgagttacggccttctctggaagtgatcgctcttcatggcgtggagaagaattttcctgtacttgagaaaatgaccggagagcagtttgagaaaagtatttcccttattcagcctgctgcactggcactttatcagtactggttgtcagtgagaatgtcagaggcatcatcccggcctgttccagtgaagggggcagaaaacatgcccgggcgaaatgacccgtgtccgtgtggcagcggtaaaaaatttaagaagtgctgtctgcattga

SEQ ID NO: 27098 - DNA, 1248 bp, Escherichia coli
atggtgcctaaggggtggaaacgagtaccgattaaggatgtgtgcgagtctataatcgattgcgtaaataaaacagctccagttgttgattatgaaactccctttaagatgattcgtaccacgaatgtacgtaatggaagggttaatactgaagacgtcagatatgtgactgaagacacttacctgcaatgggttcgacgcggaaaaccgcaagtaggtgatatcatctttacacgtgaagcacctgtaggagaagctggtgtcctgcaagatgctgaaggtattttcctcgggcaaagaacgatgatgtatcgagctgatacctgcctttcagataactatttcttgttctactcgttatcaagtcccttctgccagaaacaaattgaagattttagcaatggcggtactgtagctcatatgagagttccagattgcggtgagatattgatcaatctaccgcctttcctcgaacaaaagaaaatcgcccaaatcctgtcaacctgggataaggcgatttcggtgacggaaaagcttctcaccaacagccagcagcagaaaaaagccctgatgcagcaattgcttactgggaagaaacgcttgctggatgagaatgggacaaggttttctgaaacttggaaattatatgccttatcgaaattatttcagagagttacgactaaaaacaatggaaaaagcaacaatgttgtaaccatttctggacaacatggtttgattaaacaggaagactttttcaagaaaacagtcgcatcagatacccttgatggttatttcttattaaaaaaagggcagtttgcttacaataaaagttactctaatggttatccgatgggtgcaataaaaagattaaatcgatatccagagggagtagtaacaactctgtatatatgttttgaacttactacacccaaaaaatcatgtggtgactattgggagcattattttgagtcagggcttttgaataacagtttgtctcaaattgctcatgaaggtggacgggctcatggcttgctaaatgtaaaaccttcggacttcttttcattaaaagttgcggttcctggctttgaagagcaacaaaaaatcgcatcagttctgtccgctgccgacaccgaaatctccacactggagaaaaaactcgcctgcctgaaagacgagaagaaagccttgatgcagcaactgctgaccgggaaacgtcgggtgaaagtggatgaggcggttgccgtatga

SEQ ID NO: 27099 - DNA, 1092 bp, Escherichia coli
atgagtattgccaactgcgctatcggcccactttatgatgagcaaataaaaaaaacacttatgtatgctgaccataaattcaagcggctaatgaatacacgaatgtcgttactcgaacatttatcaccccactatgacttatcttccatgttcagctatgagttggagggaagagtttttcggattaaattgatcaagcctgagattaaattatctcgccagcagttgatcttctcctcactctttttagagcaagattttctaaaagaatataaaaaacacatctcaaatactctacaaaaaacaatcaaacagtgcattaaaaaatacaaacaaaaaatcaaaatcgagccttctattttagattacatatcagcgtcaccccgcaatacgtcgagttatgtattacatgagatagtttctcaatgtgaacattgcgatgaaattcgcaatattaaaaatgatatattgcttgatgaactaacgttgaatggccggatcactaacatttcaaaatacattaaaaatagtcaagataaaatcgtcgaacatatagagttctgcactcataaatttgtcaatataagtcgtaagaatcggcacattttcaacagcgccacaatctctggcagaaaacccaacatcactggtgttttactttgcctttcagaattgataagcaacctgcatatttacccaactgaaattaataaaaccaaaacctctccagcactggattttatccccaccatcatcgcacctcatgttttctacctggcgaaacgcgaaaaatcctctcaatataaatacattgaaaaagaatatcttctcggccagttacttatatttttgatgtataaaacagtttactactcgattcataacatcagggtaagccataagcacttctataacgatataaaaccaaaattaatggcattaaaaaaagaaagcttattaagcaccaacttcatgaaaaatagaagtgagattagaggtgaagtctttggtgatgttggtagtattgaggctgatttgagggaaatcagcacactgattcatcggcggaaggcattatttatttccttttaa

SEQ ID NO: 27100 - DNA, 1131 bp, Escherichia coli
atgttcgagaaaatgaaaaacaatgtaacccgtataccggggaatttaaccaaacttaatcaataccaaaaagacattgatcacctgtctaaactattttctgaacagcaattactggaactaatgacgactaccgaatccgatcaaatattgcaaatgaagcctgctgtagatattcttcatgtactatctccatcagcatctactgctaagcatatcaatttttttcagcacgtcccagtgctcgaacaatggttaaaaaaggagtgcactgcctttaatttactggcagtacatttctattcacagcaatcccgtaaaaatgtaattccgaaagaaatctgtatgctactggatgcatttattgaaactgaactttcatctgcggttaatggtaataataatgccgaactcctttcttgttttcaaaacacgctggataaaatgtgcaatacactaacatttatagaccacacagttacggaacaatcaggtcaagtagcaatgcttgatttcagcgcaaaaatgcatgaatatactgttgaaatcaggacctttttgaagtctgaatactggctaaacaaactacctaaggatattaacattccagccattgacctatcctggcttgtgttttgttacttttgctctgaatatctttttgtatttattcaaacaacgctcaatacaatgaaggcaggaaaaatcattcgtgataactacctttatcatcctaaaatgattgcattgatcattttatctatgctgccttatgaagtcattcataacgatggatcactgaataagtttaaaacgcctttaaccagccctgatgagttcataatcaaatctatttgcattaaaggtaagcaaaacactacagggcataaaaaagatatcgaacaattgcttcgtaagacatatatctatattgcattactcttaaaccctgagtgggcaccatcttccaaggagttgatttcctttttatcaggaaagtccacagtgataagtggttcactcaacttccagtcaacctccagtggtctgggtgttcaaacaaacaatataactcttcttaagaatgaggtttatttcgaaaaaatagcgaacaagatcatgaaactgtag

SEQ ID NO: 27101 - DNA, 1137 bp, Escherichia coli
atgcctattctggatctgcgtttcagcaacaaatcaattcaccaacttccacatcccctcacgggttgtcaggaataccgtgatattcactgccaaaacctgcgtgctctggtgtatcccaatcggatcacgctggcctttcgtgccactataaacaatcagcgtatatatgaaaccctgggtcagttccctcagctctgcgttgaggatgcccgtcagcatgtgatgaaactgcttgctgataaaaatcgtcttgcggttcagtcccgtcgattcactgtggaacaggccatcaatgacctgtggctaccggatttgcagttgtataaaaagagtcctcagtcagagttgtcaaaactcaacctctacgttcgcccgttctggggcaagcggcaacttcgcgacatcacggcaggagaactagaacaatatgctgctggcttacgggaaaaattacgtccgtcaacagtaaaccgtatcctcgcaatattgtccaaaatatgctctctggcagtacgtgctggatggatcacgcattccccgatgacacatgtccgctatctgaaagaaaataacattcgctatcgcacactgtcagcgacagaaatcccgcgctttattgacgcggcaacagcgctgcaaacaccggcagctgattctatattgcttgctctttatacggggatgcgtattggtgaggtatgtaccctgaaatgggagtactggcacccggatatgcatcaactcatactgcctgatacaaagtccggacaccctttcacctgcccacttgcacctccagccattgcagttgtccagtgccagcaggacctgatgctcagcaaaacttacatttttccacaactaaccgacaatgcccgccctctggcatatccgcgtgcaacctttgcccgtatttgtcgggatgccaacattgataacctgcggatgcatgacctgcgccgtacctttgccacccgggtactacaggcgaccggggatattgcaatcgcttcccatctgctaaatcaccattcactcacggcgacccgtcgctacgcttttcacaatgcagcgacatcacacgcagtggtttctcaggtcatagaaagttatgacacaaaaatgaacctatga

SEQ ID NO: 27102 - DNA, 201 bp, Escherichia coli
atgtatttaaccattaagcagttcgcagaaagatttaatctttctgcatccacggttgcgtcagatatatctcgcaatcccggaaaactcccgcccttcatcagaattgggcgggctatacgattctctcttgacgatattgttgagtgggaaaatgcacatcgtcaaaacaaacttaaaggtgatataaatggttactaa

SEQ ID NO: 27103 - DNA, 639 bp, Escherichia coli
atggttactaagaacacggaaaataacgctaataatgcactgaacattcttcccgaatcagcaagcacagctgtagacaacgatgaaaaatatctgtcctttgcattagttctcgctatcacgattatggacaacttagtaaagctcatcggcacagatggcttcgttctttatacctacaccctgcaggacacggctactgctcgtgctgtttttaatgaattagccaggcgtctcaaaaatttcaatcgtcaggaggaggtctacaccaccgattccctcacctttcgaatgaaatacatttacggtgttaccctgttcgaacatgatagtaaatctatccttaacctttttgataagaagggttatccggtattgagtgaatcaggagaacccggttctcttgatgatatgtatcttgacattcaagcccgattacatggcggctacgcctcaaaaaagtttcttcatttacatgaacattgtctgttatctgcacacgttaccccgtctgtggaaaagacgcaacgtggtatcctgattaaagcaggcaggaaactcgtttcctttatctatgcagataatgaatctcgcaaaaatgatattttcaaagctgtagtagacgtcattaaatcctga

SEQ ID NO: 27104 - DNA, 2601 bp, Escherichia coli
atgaacaataatttgcaggacatcctcgctgccgcatcggggtatcagtccgtgacttcagagccagcgctcaatcgtaaaagacctaaaacgcttgatgattatcctgtgataccacctgcatcaaaaaaagtatctgttatttcaagtgacctgacactccatatcggttttgataccgaatatgttttcaatcctgaaacacaacagaatgatattctgtcatatcagagttatgttgtcttacccgataatacaggtatatcgaacattatctatccacctgactcacagaaaaaatcccggctgtcttttaaggactttctctttcaaacgattacaccgcttcttgaaacgggtgtgattgcaaaatggcccggtattattaatatatatgcgcatttcattcgtgcggatatcgcctcctttgccaatttctggtcagactacaaaattcttctgaaaggaatacgcggtactgtcagcagcttcaaaaatcgttacggtatcgattttgatgaacagcaggaacgtcgcgtaaagactgaacagataatgtttgacaaacgaacttcccctccgcgttgcagtaacgtagctttcatcgatacactgcttatcactcccgggggtatgggtctggctgaatgtggtgaattactgggtcttcccaaactcaccattcctgcaccttattccataaccaatatgcgtgaatatcttctgggcgacagagcagggtttgaagcctatgctctgcgggatgccgagattgcggttcgttatgctttacaggttcgcaatttttgcgcccgggagctgatgattgatcgtgtccccgccaccatcggggcgatggcagtttcacggttcaccaaaacacttaaagaaaacaatatgtctcctgaagtctgccttgggacacacattaaaacccgtgaactctggctcacggagaaacaggcattccggacgattaaaaaccccgccagtgttccttcaagagagttgtttgaaacgttcccgatcaactgttaccacggcggacgcaatgagtgttttatgatgggggttacaccgtctgatcactggtatgactacgatctggctggagcgtataccaccgggctattagatatcctcacacccgattacgggaacatccgcctcagtaaaaatccggacgattactgtgggcatgtaatgggatttgcgcttgtcacatttcggttcccggaatcagttccctatcccagcctgccggttcggaccgatcaatatgggttattctttccattaagtggcgaatcatgggcaacggcacctgaaatcgaacttgctctgtcgctcggggcagagatgacgatccatagtgggatcatcgtcccctggatctgtgacacctccccacataacagcgaatcaacatcggtgtttcttccctttgttcaacaggtccgtgagaaccgtaatcgccatattaaaggttctctggaggagaaattctggaaagaaattggcaactcgctttatggcaaacttgctcagggccttcgcgccaaaaccgcctttgatactgcccgtggattaaacagatccctcccaccatcatcggttactcagccattctttgctgcgcatgtgacgggatttatccgcgccgttgtcggggaactcatgaatgctttgccttctgattcatcggttgtcagcgtcacaaccgatggctttttgacaaattgcccacttgacaagataaacatgagcggtccactgtcttcccgcttccagtcgctgtgcgatattgttgatccgggttcatcaatgttgacatgtaagcatgaggtcagccagcttatcgccatgaaaacccgggggcagttaacctatagagctattcagggaaaacctgttgttcatgccagggctggcgtcaaacctcctgccgatattccacgcagtgactataacgactatatggtagatctttaccttaatcgtttacccggtcagacgttatcccgaagtacgttgatatcaacgcgtgagatgtggcggtcggaaagcgatctggtatcccgggaacaggatatccgtcttaatctggaattcgatttcaaacgccagcccgtacagcccgccatgaatgaagggcatttactgatgtcttcccgcccatgggataatatggaagaggctctgcagcaacgctctcttttcgacgactggcggcaaacgcatacactgaagaccctggctgactgggatgactggtgtgattttctctattgccggacggtgttttctgatatgaaactaaaagtcggaagcaaacgtagtgatgatattttagtcagactatttctccgggcgctgactcagtgccaatgggggcttatgctgaaagataaaaaaagttattcctgtaaagaggttgctgaatggctgacgtcagaaggctattcagtaacggtgactgatgtaaaaaatgcggtaagagcaaaaataccccaaatgaaatttagttctgtaacaccgcgaatgaagtcactgatggatatcatagcccgtaaatatccgacattctgtcttccagtctga

SEQ ID NO: 27105 - DNA, 327 bp, Escherichia coli
atgtatttacatatcagaaagtatcaactcgtaaatgcgagatggcgtgatgtcattgatctgacagattatgaagaaacaatcaggcaggttgtcggtacattatttggaaatgattttattgaggtcagcgttgaaacaaattgttttactctgacagtaaacagtacaagcagtaaaataccacacggcatactggtgaatatggggaaaaggctggcggctaatctccagagtatcacctgtcatgccatgcggatctatcatgtaaatggccatcctgacgcgcggcagttatttcactgttttgatgccgattgcctgtga

SEQ ID NO: 27106 - DNA, 363 bp, Escherichia coli
atgagggtatctacatttccccaatcgtctttttttgacgatctgcactatctcacactattgcatcacctgtcaggtgatctcaatatggttcttgcttttgtccgtctggatattggcgagtgtatggatgaagataattttccgccaaacttctggataatcagtgccgttgcagagcaactgggcgtgttatctgtggaggctgattttacccgtccacatcttgagaaaagggtccgcgcagtctgggaatcggcagagcaaacgccttatgcgtctgactttcgtcgtatctacaacgacgcggccaaaaatgcacagtttgaagatccggttgaagcgctgatgtttagtgcttaa

SEQ ID NO: 27107 - DNA, 357 bp, Escherichia coli
atgtctgttttactgcctgaaaacaaaccgttttcatttctgacactgatcatgcagtggctgtaccgtttttatgaccgtataccatttatctcgtcagggatacccgatgaattgccgtggataagtaaccggaccggccggcgcgcttaccgtgcgacggtggtgaaagtgaatccccggcagttcaggatccgcattaccgtacgtctgggatcgtattcgagagaataccgctttcattcgttgatgacctcgctggacagcaggacatttcgttccgcaaaagcggcatgccgtgccggctttggactgacataccagctggcgcaggtgcgttatgcctggtgtcgctga

SEQ ID NO: 27108 - DNA, 261 bp, Escherichia coli
atggccagggcctgtacgatacgggaactgatagcggatttatcccgctgtaatccggaggcattcgtgttgtgcgagatgtggttccccgatgatgttaccaatgttgatgaaacggcttgtccggctgaaacgcgggcaacattaacgcatgttgcacattattttgatgcggagctggggataaactgggacacgctggcgtgtgcgttatcgtgtgtcagagacgctgagcagaatatgcccggcatgaacggatag

SEQ ID NO: 27109 - DNA, 147 bp, Escherichia coli
atgagatataaatcagggcaacgtgtgtgggcgtgtgtgggcgtgggtaacgttttggatgtttccgttagtggtgagtccggggtttttatgtgctgtcggttatttcagctggccatatctgagtcagttcatggcccggaatga

SEQ ID NO: 27110 - DNA, 204 bp, Escherichia coli
atggcccggaatgaacagaatctggctgaacggggaggttattacctgacagaatgtcagttagtggaaagaaacagagatgcgggcttctggtcagggcgggaaaatattctgcaatgcggggtgacccgggagcatgtgagtgcggatgcgtatgaaaaggcaatccgtacctggcagcagaaacagacagagacagaataa

SEQ ID NO: 27111 - DNA, 1689 bp, Escherichia coli
atgttaccgtggtttcgtaaatcgctttcccggaaagcggaagagaaaatattacctgtttccccgggaaacacgcaggaaaaagcattatttatccgtgacagtgacggtttttatttaccgcagtcggctgacatattgctggccacaccacagcgacaaaactggttacagcaaatcagccgggtggtggcgttaccggataaccagtaccgggcactttgcctgtctcctttgcagacgctggcagaacgacttcagtgtgtgccggcatcaaaaaccgggaaatatgccggcgaagggggcttgctggatttaacgctgaatacaacggcttggtgtatgcggatgtcccagaaagagatgctgccccgggggcttccgtcggaagagcagagccggcagttcagtgcctggaatgtgtgcgtgttttataccgggctgttttactggttgccgttaaccgctcagtttgaggggcaactgaacagtctgtcatcgtggcagccggggatcagtccgccatcagagccgtatcgttttcgctttcatgagccggtgccggatatcacgcattttcgccggacaacaggggccatgatggctttccggctattaccggagaaggtgatccactggttgtcgggtacaccaaaggcgcttcaggcgttgtctgacgtggtgaccgggcaggtaaacggtgataatgatttacagcgtgtgctgaatgaggcactggctgcgtttgaagttgatactttgcctgatatttcgggttcaacaataaagaaagtgtttcccggggaaacaacagcggccacacagctcaaagagaatatacaggatatttcttcttcgggtttgatgagttcaacatctttgcatgatgacaaggtattttcgtcctcgttatcggtgccggctgcggtagatagctatgcttctgagtcttttaattcggatacagacaatcagagttgtgtgcaatcagccgtgcctgttgtacagcctgatactttagttaaaccggatgacgatcttcagtatgcgctggctttatccgggattctgtcttcagaaaataatgacagtgcagataataaggatgaagtgaatatggttgagaacactgcgctatcagaagttgcaaattgtgaaaacaagcatgatccccagatacaaagagatatcattcagaatcccattgagtcagttacagaaatcacagaaaagaaaactgtacccgggaatatcgtgaataccggtaaggttaataaagaggaagtagttgctgataatgtgtcgccggctattttagccgaagattttattacctggcttcatcattctttgtcggaaaagacattaccggtaaatattcccgggggattggttcattccattgcagggtatttatttttacgttcgccacagatttttaccttatatctgagtcggagtccgtataaatttgagcgatatactccggttcagcgtgcattcgagtctttacgtctgcacaggagaaacggaaaacaatcaggtggactggttcattgttgggttcagagtactgcatcatcagaggaaaaaacgagttggaaaaaaactgccggttatttggtaaaaagtcagaagttgttaccgggtgaggatcgggacgacagtttgtatattaagtttgaataa

SEQ ID NO: 27112 - DNA, 1050 bp, Escherichia coli
atgcaaaaagcaggtgaattaaacaatgtcaatgcacaatggatccatttactggagcgttatttttacgaaaagcgacttaaacccgatacggaacaaacctatcagaaaatagtcaggttattactggtatatttcagggaaaaagaaaagcggatgattcatccggatgagctgacccgtgatgatttattgcgttggcgacgacatgaactgaatgtaaaaaatgtcagtgaacgaacctggaacacgaaagttcgtcatcttcaggcattatataatgtatggattaaaaaaggctgggtgaatcaatctgaaaacccctgttttgagtgtcaggtgatccccggaacgaagcggaagaagtgtctctctgagtctcagttacgtacaatttaccggatgatggagcaattcaagcaactggaggagacaatgcctccggaattggcaagatacagtcattgtgcattgtaccctgtccgtttttggttaactgtgctggaaactctccggttgactggtatgcgactgaatcaacttattcatgttcggataaaggatattgattttgaacgttcagaaataaatctcatcagagagggcagtaaatcgcaccgggaatatccggtagtactgatggaaggattaaagcctcttctgaaatcactgattaaagagatgcagatacgaggtatgcctgatgatgtgccgttatttaatgtttattttttatctgatcgagctgatgagcgtaaaaaaccgatcagtcatagtacgatccgtgcttttttccgccggttgtcagtggaatgtggttttgcggtatccccacatcgtttcagacatacattgggaaccacgttgatgcgctgtccggagcgtaatatggagttgacgaaaaatatcctggggcaccgaagtttgtcttctacgatggaatatatcggacaggatacagtgcagaccaaagcaatactggagtatgaactgcgtaattaccttaaaatggggttaggtggagaacatgatcgcttgttaacaaagtaa

SEQ ID NO: 27113 - DNA, 1548 bp, Escherichia coli
atgaaaattaaaatacttgctgcgggtatcgcattaacactgccgttctgggcttgcgctaaagatgtcactatcatttataccaacgacctccatgcgcatgtagaaccttataaagtgccgtggatcgctgacggtaaacgggatattggcggctgggcaaatatcactacgctggttaagcaagaaaaagcaaaaaataaagcgacatggttttttgatgcgggcgactattttaccgggccatatatcagcagcctgaccaaaggtgaagctattattgatatcatgaacactatgccctttgatgcggtgtctgttggtaatcacgagttcgatcacggtgtgcccaatatggtgtctcagttatcaaaagcaaaattccccattctgctgggaaatatctactacaccgatacgaataaaccagtttgggatcatccgtggaccattatcgaaaaagatggtttaaagattggtgtgattggattgcatggcgcattcgctttctatgatacagtcgcggcaaaagcacgtgaaggcgtagaagccagagacgaaattaaatatttaaataaagcacttgcagaattaaaaggtaaagtcgacattaccgttttgctaattcacgaaggtgtcccggcgcgtcaatcaagctttggtagtaaagatgtggagcggctactacaggcagatattgagacagctaaaaaagtgaatggtgttgatgtcttaattaccggtcacgcacatgtcggaacaccgcaaccaataaaagttaataacacattaattgtatctaccgatgcatacggcaccaacatcggaaaacttgtgcttgattacaatccgaaaacgaagaaaattgatagttataatggtgagttaatcaccatctttgcagatcaatttaaacctgacaccatcgttcaaaatactattgataaatggagtgcacagcttaacaaaataacacaggaagttgtcggccattctcccatagttttaacacgtgagtatggtagttcctcttctaccggcaaccttattcttgatgcaatgatggaaaaaacacctgatgccgttgccggatttcaaaatagcggtgggatgcgagctgattttcctaaaggcgatatcacactgggagatgttattagcacattcccctttaataatgacctcatcgagatggatttgacgggccgcgatctcaaatcattgatgacgcatgcaaccaatctaactaacggtgtgttacaggtttcaaaaagcgttgcggttgtctatgacagcaaaaaaccactcaaccaacggttaatctctttcaccattaacggcaaacccgtggaagataatcaaacatatcgtattaccacgcactccttttgtgccagtggtggtgacggttttgaagcatttttgaatggaaaaaatgtgaagacgataccgggaacaacctcggcggaatctatcatcgattatttcaaaaatcataaacctgtcaccccagacttaactaaacgagtcatggacgtcgccaaataa

SEQ ID NO: 27114 - DNA, 504 bp, Escherichia coli
atggataatactatcttaggcgcattgataggtgcagttattgctatagtttctacttacataagtgcaaggcaaggatacaaaaacagcataaaattagagcgcgaaaaaatattaagagataaacgtgagcaattattcacaaattgcatacttactgaaaaagtcatagcttcaagcgaagtggctattctcaattttgttaacaatgccagttaccactctggtagtaaatttgacacatcaaaagtcaatccgttgcaaacgatggaaatgctaataaacatataccttcctgagtataaaaaagacttacaagaactcaataatttgtataacaagtttcacaattactactctcaatatacatgtgcacataccttcaaaaatatgcctgataatgagaagtcgaagtttattgaggaagctgattcttatgcaaaaaagatatatggcaaacttaatgatattaaggacaagatatcatttaattcaatagtataa

SEQ ID NO: 27115 - DNA, 291 bp, Escherichia coli
atggatgaagaaacactggtgcctcaaaaatttggcagccttgatgctctcctcatggaattaaaccgggctggccatcctgatgatcagatatggttttattgtaatgaccttggcatcccggaagcacttcaggctgcggactcaagattaatagcggaacgccatgctaatggttcatggtggaccgttgagggttaccacgaagctaatgaccctcgtatgccagaaccagaggacgcattgaatgtggatgaggcgcgtggtcagttggaaattttttttaaatag

SEQ ID NO: 27116 - DNA, 606 bp, Escherichia coli
atgaattatcaaataaatcaatattctaccttactttcatgcctttatgacgaacagcatcccatcggcaatctggggcgcggaacccattattcaatattcagaactgtagaatggctcgatgttacccgtacacctgttgacttaccccaattgcatgatttttcagtcatctgggatgaagatcatgatgagcgaatcattaacgtaatcgaaaacatttacatggctggattactttcacctgtacaatttattggtgagagaaaggggacccttacagtaattgtcgcggcgaaattctatttcggtggaatccccgatataaaagattacgaaaaacaattacaaaagatttgcgatcaatccacttatggagatttttggccagtagaggtagggatgtttgatcgctcaccaggatttcctcctgatgccccacatcagacagaggttctcggattgataaatgataaacatcacagagtagttacttatttaagaaacatcgattcactttgggcgctgggtacaaagccttttatgccaaaaggaaaagaaagtgtctctattttttcgtctgccccccctattccaaaacagtaa

SEQ ID NO: 27117 - DNA, 816 bp, Escherichia coli
atgatttatcactatacagatttgaatgccgcaacatcgatagcaaataatgctcagatgtggctgaccgattatcgattcctgaatgataaggaagaatttaaacaaggatttgaggtattgcttgaggcgcttgagtcataccaagataattctggtaaatataatccagaatttttctatactctttcaagagcgatagggtttatacgtgatgataacttctcaaattttgaagggaataatatatttgtatcatcatttagtaaaacccccgatttattgagtcagtggcgaagttatggaatgtattgtctggagcttgacgccgattttttcagggatgaaggagtatctgtactcgaatgcatctatttacatgaccgaagagaggctcttgataaagcaaatgaaattatttgcaatgaatttattccagtgctatttgatacttggaaggaaaatagaccgtatttgattgatattgtacttagttcattgcttgagattcatgctctatcattcaaacatgcggctttcgccgatgaggatgaagtcaggtttgtactgagttgtgcacctgatgatgaaaaaattaaattccgggtgaaagggcaattattgataccgtatgtatcctttgattttgatcctgaattattgaaaacgataatagtgggtcctgttgataatcaggaattggcctatgaatctttatctatgttcgctaggaaagttaaacgtaaagtacaagaaagtaatatagaatatgatttagttattgaaaaatcagagattccttttaggagtatttaa

SEQ ID NO: 27118 - DNA, 867 bp, Escherichia coli
atgactctgaaaattggacctgtcggcaaacttatcgttgtatgtagccagaagggcggcatcgttaaatcgcaatcatctagtgaaattgcacatgaccttcgtaaagcgggtttccgtgtgcttgaaattgatatggactggacaaccggtctgacggagagagcttttcccgatgacttaccttatgagatagagcgtgaacctttaagtaacagtttcacacctggtgaggcgaatacatatcagcttttctttcctgacacagaggttcgaccgattgagcttccgggtgagcgcttctttattggtgctaccagtgaacttaatgaaattaactaccgcaacagcgactgcatgttcgacttcagggaccgcattgaagaactgaagaaacagtttgattttattattgctgattcagcaccatcatattcaaatgttatgatcgcagctcatatgtcagctgattaccttctgatccctaccctgctagagaagcaggcccgtaatgctgttggtaaacagcttacttatatgcagaaaattaagcggaactataacccttcgctacagttcatggggacttatgtgacccagacgcaggtgaaaaattataaaaaaccccttaaagaaggatatttgggccctattgatacactgaacctgaatcttctcatcgagatccttcagggaaaaggatattccgaagaatacattctcgcctatatatcatttgtacctgcagcagcaaaagaggcgatcgagcttggcctctcctttgatgaatatgaccctaagtgtcttcctgcaatccagtataaagagcttactcagaaaattattctgctcgcaggaggtaagtaa

SEQ ID NO: 27119 - DNA, 1032 bp, Escherichia coli
atggccaagaaaccgtttatgaaacgactccaggctcagttggaaatgaaaaaaaatgctgcagttgtttctgatattgaacaggttattgctaataaacagcccgatgagcaaagccatgatatagctgctcaccagattatggcggatatagcccgcccggatatcgaacctgatggacagataatccgtgtcgatataaatctggtttatgctgaagaacaagtgcgacctgaagaagacttcgaggaagaggtcatcgatggcatgtctgataccttcgaaactatagggatgcttaccccgcctcgttgttatcctcgcgacagacgtggctatcagatatggttaggcgaaacgcgtgttcgaactgctcgcaaacgtggtgatacccacattgatatttatgttggcaaaccaccacgggaaagaaaagaacgcatcatcgggcagctcattgaaaacctgcagcagtctggtttgaaaccattagcgacggcaaaatcgttctatgagctcaagcatcagttcaatatgacgggtgagcagatcgcaaaaacaatgggtaaacctacctcatttgttagtaaacaccttcgtctcattgatgcaccggataatgttaccgcccttctcagggataaagttacatccgatatcgatttggcttacacactgattcaggtaaatgaaaggtctcccgaagaggccgagaagcttatcgcagctgcacgggtatctggtatttcacgtgcgcaggttaaagcggttctagataaagttaagaacaaaagcaaaggtgagatttcgcatgcgaaatctaaggctcagaaaaaaaagccaactaagactttggatagtaactcagatgtaaaaatctggcaggtcgttgtcgagatagacggtcagcaaggggtaataatgaatgaccgcgcgccagaagaagaagggtatgtgtgggttaaactggaaattggtgagatttcagttgaggcatctgaactacgcgtcaaaggaatgcgagctctgtga

SEQ ID NO: 27120 - DNA, 438 bp, Escherichia coli
atgaaatcaaccccgttcactgaaatggccacggcatttcgtggccaaattatccgcctctgggcgcttcaatatcccgggacgcaatccgaagctgccgctgcactaacagaagcggctatcaatcttggatacgttacaaggagcaggcccgtacccggagcggcattactatcatggtcttctaatccagctgaaactccgttgtgggcggctcagacggcgttaacattgatgctctgcatcggctggcagccagaaagtaacctggactggtgtgggatgtcggcgctgctattcagatctaatcgtacgctttcacttgagcagctagtcgattccttgccagacagtatcgacaggcaaactgctactggatggtttgtagctgcaatcgaagaggatgcccactaccgctacaacaggaaatccagatga

SEQ ID NO: 27121 - DNA, 324 bp, Escherichia coli
atgacctttcaagagcttgatgcttgtatcgcaggctctggcagacgttctatcgcttcagcgttaatcgcttttattcttgatgcgcttgatgacggacaggacggagttgatcttgatactttccaaagccacacgcgtttcgttcgcaataatgtaaccacggtagccagctatctgcagctacatgggattatccatatattgtattaccgtgatggtgccgtagaacgtcagtatgagtccgttaataatcacgggcggtgggctaagcagcactaccgtccttctcaggctcttattcagctgcatcgacgtgattaa

SEQ ID NO: 27122 - DNA, 1374 bp, Escherichia coli
gtgccgggttcaaagagaatttgcaggcagtgtctgaaagatgacatttatctgaacaacatcattgcaagcgatcctgatgcctcagaatcatgcgattattgtgactccgaagagatgacgatgtcgatggaaacactggctgaaaaggtcgactggttgattgaaaactattatcggggcggagaatataaccattatctggaagagtatgaaggtgaacctctcttctctattctggagcaagaggtcacagttaatgatcatatcatcaatgacttatcggaactgctcgacgagttatggtttgactggagctcacatgaaagaaaatatggtgatgagccgcattttgttgaagctgtaaccatctcaggaaacctgtccagaaaatggaattcaatggaaaggaaacttcgggagagtaatcggttctttaatatggatgcgatggcaacttttgaagaggtttttggctatcttcatgaaaatcatccctcagcatttatcgattttgagccaaacacttcaattttccgtggccgaatttttcagtcagaagaggcacttgaagctgcattaagaatgcccgagtcgagttttggtcctcctccctctgaactgacaccttctggtagaatgaatgcaagaggtatttctgtcttctatggcgctacatccaaaaaaaatgctatagccgaagtgcgaccacctgtagggagttatgtagcagttgcagagttcgctttgctgcggacagtcagattactcgatctgtccagtctcagagggctggctgttaacgggtttagccgttttgaccctgagtatcttcttcgatatgaacgcagtagttttattaagaacctctccagaaagcttgttatgccggttgttcctgaacttgaagaagcaaattacctgctgacacaagctatcgctgattatctttcaacttctgaacgctacgatctcgatgggatactgttcagttcagcacaaaagccaaaggaaaacaccgacccatctgtcaggaatattatcctatttcataaatcatctggggtactgaatgcagaccgaaggtaccgggaagctgtagtaaatatgtatcagcacgatgaggatatctcatactttgacccagagataacgacgactaccgatgatttccgtcgtgaatttaaggtgctctcaagtaagaaaaaaagggaagatatacttgagttaaaactcgatggtatagaaattcataaaatagaaggtgttgattactccacatcagaaacaacagtcacgcactatttcacggaaggccgcacaaaagaagtgatttcgcatgcgaaatctggctattcgggtgacgatttctga

SEQ ID NO: 27123 - DNA, 861 bp, Escherichia coli
atgaatcaatatcttatatctgatgttctatatgctgacgttgaaagtaaaacaaaagaattaacagtcaacacgaataacacggttcagccggtagctctaatgcgtctgggcgtttttgtaccaaaaccaacaaaaaatcagccagagaacaaagagatagatgcttccgtgatattttcacaacttgagattgctcaggctgaagggtatgacaatattaaaatcaccggcccgaggctggatatggatactgattttaaagtctggatcggtgtcatctactctttcagcaaatatggattatcttccaatactattcagctttcatttcaggaatttgcaaaagcatgtggtttcccttccaagcgccttgatggaaaactaagaaacactatccatgagtctcttggacgtttacgtaacaaaggcatttcgttcagacgaggtaagaatgcaaaagggagctataacacgggccttttgaagaccggatattttaatgctgaacaggatattgttgagttagaggctgattccaaattgtgggagatttttcagctggattatcgagtgttgctgcagcagcatgctctcagagctttgccaaagaaagaagcggcacaagctatctatacgttcatcgaaagtcttcctgctcgtcccattccaatatcatttgcccgaatcagagaacgtttggctttgatgtcgtctgtaagtgaacagaacagaaccattaaaaaagctatagaacaactaaaatcaatcggttacctggactgcactatcgaaaaacagggacgtgaaaactacatcattgttcatggccgcaatccgaaattaaaactcccggcttga

SEQ ID NO: 27124 - DNA, 1701 bp, Escherichia coli
atgaccgcgaaaaaaataaacgcgggtgcacccaccgacatcgtgactcactggcacaatatcaactgggccaggtgccgtcgcgaggtcagaaggctgcaggcgcgtatcgtgaaggcaatacaggaggagaaagcgggcaaggtaaaagccttgcaatggctactcacccactcgttcagcgccagagcaatggcagttaaacgagtgacagataacagagggaagagaacgccgggtgttgatggaaaaacatggtcaaaacccggcagcaagatgaaggctatatacacactgaaaagaaggggttacaaacctcttccgctacggcgtatatatatcccaaaatctaacggcaaaaagcgaccattggggatcccgacaatgaaagacagagccatgcaggcactccatctgatggcgctggaacctgttgcagaaacaacggctgacccaaattcgtttgggttcaggccctgtcgctcaacagccgatgccattgagcaatgtttcacaacgttgcacagggctgatcgggcacaatggattctggaagccgacattcgcagttgttttgatgagatttcacatgaatggctaatcgccaatatcccaacggatacggcgatcctgaaacgatggctgaaagccggatatattgatttggggaaattatacccaaccagtgcaggaactccacagggcggaataatatctccaacgctggcaaacatggttctggatggtctgcagcctctgttgaagaaaaccttctatcgaggcggactgaatccagaaaagatcaacataatccgttatgcggacgattttgtgatcacggggataagccacgacactctgtcagaaaaggttcttcccttgttagaaaactttctggcagaaagagggcttaccctctcaccagaaaagacacgaatcacacacatcagtgatggattcgactttctgggtacgaacatccgtaaatataacgggaaactgttgattaaaccttcaccccaaaaggtaaaggaattcctgaaaagggtccgccagacgataaaagacaatccgacagtcagccagagcacactgatatggcatctcaacccagtcctcaaaggctgggccagatactatcgtcatgttgtttcaaaaaagatctttcagaaagtcagtcatgaaatatggaaagcactatggcgctgggcatgtcgacgacacccaaagaaaggtacaggctggataagaaagaaatactttcgttcagttaacttccgacactgggtattcggcacagaaacagggaagatcctgccatcaggcaaacgtgagttactggcgctatatgaaatctcggatatgccagtcaaaagacacagacaaataaaaagcactgctaacccttttgatcccagctacgaatcgtactttgaagcacgactaaaagctacgatgctggaatccatacaaggttactctcgcctaagaaatctgtggctccgacagggaggccagtgccccgtctgccacctgccagtgaacgccacaacaggctggcaacttcgacacattgtgccgaaatccgaagggggactggataacataggtaatctggccatgttacatccggcatgtcatcacactgcaaaacatcagggaatatctgttatgaagccggctctaatgtggagttattga

SEQ ID NO: 27125 - DNA, 342 bp, Escherichia coli
atgaatactcctgtgtcggaaagggggctcgcaccgctcaaaacaggcttcgcccgtatcggtgttgttgtcaaaaaggacaatgtaatcaatgtcggacggcagttgattttttgtattcataaatgttcctttaaatgtgttatggataaaaataggctgcctgtacgttcagatcggggtcgccaaacttaccagtccgaaaatagttgggcagtcacagggagtttatttctgacgactgttcgtccgacaccaacaattcatattccaaaaaaaataatttatttacacggtgggaattgggcatttcgggttaacggagggcttttcaatgcataa

SEQ ID NO: 27126 - DNA, 1650 bp, Escherichia coli
atgaaaacagatttacagcataaactcagtcaggcgcttctcagaggaaatcctgtcagttccccgttatccggcaatgctcacgtcaatccggtgtctgaaatgccgatgatattaacacttgagcaacttcagccaaatccggataaccctcgtcagggtagaaatccgcgttatgaggaaatcaagagttccattcgggcacgtggactggacagtgttcccaaagtcaccaaagcaccgggaagtgagatttatatcttcagtgacggcggaaatacgcgctatcagattctctctgagttatggcaggagacacaggatgagcgttttttccgtatccatgtgttatttaaaccctggccggggcgtttgcagtgtctgattggtcatctggcggagaacgaagtcagaggggagttaacgtttctggaaaaagcacaagggatttgtgtggcgcgttctctgtatgaggaagcgctggggaaaaaattatcactccgggcattagcacaacgcatgacggcggacggattgcctgtcagtatttcgcacattagtaagatggaagagacggtttctgttttattaccttatatgccacggttactggaagacgggctggggcggcatcagatagaagcgctgttatccctgcgttcaacattgaaaaaaatcacactacttttttctgaacatccatctgagcatcctgatgcagaacagctggttggttgttttaatgatacctgccgttatattgatgagcagaattactttgttttggaagattttattgatgaacttattggtcagttattacgtgaatgcccgttatccggatttgactacgaccgatggctgtttgaactgaaagtgaataaaggaaaattattatctcagtctgaaacctcatctgagattaattctttatcagaaatggatggcgatcaagagggaaaagatgctttttcgtcacttttaacagaaacaataccagaaaataagggcaataaattatctgaaaaaacatctgataatacagatgagtcagactcgttatttatcccggagcctgtgaatccgattgttgaaattcaggatgatctgtatggcggagagccggtttttagtggtgatattccggtatatggcagtcataccgaaaaggatatatcggatgagggtgtgaatgcgtcggagatatccgtggtttcgcctgccgatattataacaaccgattcattaagttgtgccggaatttggccgatggttgccggtatggaagatattgaacatcttcaggtacaggcttaccggacattatttgaattgagccgtgaactgaattcagactctgattttatggcttcttcgggtgtaaattcaccgggttttatgacgacagcgggaagttcagtactcagtttagtaatgcgtatatttacggaagagagtgcccactcagatactgtttcctctgcattaaagcagttacttaccggcggtactcagacagataatatccctgttctggatgatgctcagttcatgttatggatgaagttaatgtatacacttcgttgtttgttttctttgcaacgaactattagaccggatatcactgatgatgattcagaattcgaataa

SEQ ID NO: 27127 - DNA, 621 bp, Escherichia coli
atgatgattcagaattcgaataattcaatggattcactgacaacattcaatttgttatctcaggaagctctggcaggttatttgcccgtgagactctctgaccagaggaaacgctttcatcagaaagaagttgaattccggcttatcaggatattacgtcgcttcgggatggttgcatcggaacagcagaatagagcggaaagttcactgattctgccatttcctgatgattatgatgaggattggcgatggttattgttgctgtgttcgcaaatttgtctttgtcagtattcattggagaaaaatcccgaattcagtgatagcaaagaacagaaaaaggccggtcataaactgactgtgtatatctggggtcaggggagacaaccaatattgtgccgggcattactgatttttttatggccgcgtttttgccagtttcgttatagtgcctggcttcggtatacaagatatttacgcagaaaaacgaggggagagaggcggatcgcccccgttgtccgtgaaaattggcgacgtaaattttgtcttcagtggatatctgcactctggagtgaaatacagacgtcgtgtactactctcattgcgtcgggggaggatgtttaa

SEQ ID NO: 27128 - DNA, 591 bp, Escherichia coli
atggcaacacaattaacgcaggcaggtaatcagttactgaccgaattggtgatggaggttaagagtggcaatctgcgacgctgtgaagcatttggtctgaccgatgaagagatacggttactgaataatctgaccattgaggatttgtactttttatctcagagtccggtatcgattattacctgccagattcaccgggagaatcttcggttattactgacccgggctaaggaggaacagcgtcaaaatattgttattgaacgctgtctggctctgggggcttcgattgaattactcaattattattttgggctgatcccttctcaggtttctgcccgccggcgcttatccggcatccgtatcggagtggggcgttcacagagtctgaatgatgagcagaaagctgaattatggcatcgctggcaacagggcggtgagcctgatttggatcgtgattcagggttgccattaatgatgttatgtgctgagaaaatgaatatttctctgactacggtctggaatttgttgcaggagtggaacagagaagggttgttgccggtgaaaacagaaggaaatgcgcatgtcaaatga

SEQ ID NO: 27129 - DNA, 282 bp, Escherichia coli
atgtcaaatgaaattatttgtcaacaaaatagatcaatattgctggagtgttcccccgatattcctgacaaaattcagagaaaggcccggggggttttgttacgttatttttcaggggaacgtctttgtaaaaaagtgaaatgcagtggtaaaaaaggcggaatttatcctgcactgaaaattgatattggcgcattctggcgtttactcagtgctgacaacggtgaaagctggatattggtgactcatgaacgttataacaacattattcgtcggttgtaa

SEQ ID NO: 27130 - DNA, 1266 bp, Escherichia coli
atgcccacagctccggaaagtatacttcagtatactttgcagaaaatgcgccagcgattgcaaaatgagcaatcgcaaagttcgtcatattctgttcataataagctggtttttgccggtaatattcatgatgcaatcccccggcagttattgctggaaccccgcctttcaccgtttgataaaatggcctggatgatgatccggcttcatgcactgcaaaatgaaggtgccgtatttccgacctatgatgacttacagcttcagttagcctcgcctcatagtcataaagcctcccgggaaaccgtcagcagggcattgttaatgttgaggctgacgggctggctcagtttatgccaccgggtcagggataaacggggacgcatccgaggaaatatttatatgttacatgatgaaccggtgaatgcgtttgatgctgaaacattagatccgcgctggatggatgtactggaaaaaagctgttgtcatccaaataaaagtgtacgaactgtggcgctgtctatgttgaaagctctgaaaacagatccatcaatgcaacatcagcatacccggatgacacttatcgggcagcggctggaaagtattcaaacgccggaagcgctggcaaacaggcaacaattgatactcaatgcccaacaggataaacataaaaaaaatcgaactcagtataaaacatcgggttcaaaaatcgaactcagtacaaaaaagggcgaaaaaagaccgggttcgaaaatcgaactgagtacacaaacccagtctgattcaggggttcgaaaatcgaactgttacgtacgtaattcttttacacagagtgtaaaaaatacgtacgtaaatcaggatatgcaatattcagcgtattgtcaggttccattggaacaagtgatggatgatgacgacagaattatgctggaaaagcagttacaggcgttaccgaaagagactgcgatatccattgtacaacagctgggacaggggctgagtaccgggagtgtgcgtaatccggttgggtacatgttgcaattgttaaaagctgcccgtgaaggtcgctataattcgatttctttcagtgatgtcgggctgaaaggcaccggctcacagaaaacagaatgctgtcagaaagtctctgaaaattcacaggtaataagcaaaaacagagtcgtttctcagaggctaaaaacgacaccagaagttgctcacaatcatcttaagcgtatcagacgacagcttgccggtataacagatgaataa

SEQ ID NO: 27131 - DNA, 714 bp, Escherichia coli
atgattgatgcaaaaaaaaataatgaaacagaagattcaacctcattgaaagcgggaccattaaagtctcaattgtcactcaccattcataccgatgtcgctattcagctatggaatgggcgtaagcgaaataataaaagtgactctgataacgaaaaacgctggttaacacccagtgttcctttgttcctgactactgctgcccgggtgactgatgatgctctgaaagggttattgtttgcagaaatgtggttatacaggctggaacaatatctgaatacaagaagggagcgcatttattcattaatgcagaagatggaagatacactgaaaattattcctaaaaatatgaatatttctgagattgaatccactgctccggttaatttagatgtatacagccgaacacctgttggatatcgctgtgtctggcttttaattggtgttgatcaattagctttaaaagttcttcaggcttatcactatgggttagttagtcgtcagttgagggataaaacactggatgatgcgtgtcatcaggtgcgtagtattttaggaatggcttttcgttatcggcaagttctgattaatcgtcataatcttgatattcataatgatatatatcagcaggctgttaaggtttttggtgaattagatgctgatattatcagcggaaaaaaacgttctgcttttttacctttgctcaaacactaa

SEQ ID NO: 27132 - DNA, 528 bp, Escherichia coli
atgatgaataaattaagtttcgttccttgttttttcttatttctgttggcagggtgttcaacacaggaaatcgctgagtggaatcagaaaatcagtgacctgggtcatcaggtcagtaataccatgaccggaggaaaacaggaacgaagtaaaaaagcgactgatatgacgatcccggtggatattgataccgtcgcatcccgcctgcgacgctattatggctttacggatgtgaatgccaaagttgcggctcttcagcgtggtactgagaatgattcgtgggtagctcaggcgattttggctgaaggacatacatttgaagcaacaccgggcagttattataaattcgggcataagttgggtgacaccaatccccgggatgaagtgattctggaactggaaaagaatggtgccgggacacgggtatatgtggtttatcattcctcgttcagcgggcatttaacggaggagtatgtagatccgttatttaagcagataagggatgttgcttccggcaacatcagataa

SEQ ID NO: 27133 - DNA, 720 bp, Escherichia coli
atgagtgctcctgctaaatcttacgctgtccggaccgtgattatcggaggccaggtattgtttgccagtctgtgcgtggcagctgtgctggcgttgctgaatattgctgatacgcaggagaaacagttgtcactgcttgaccagcgattacaggcggttgagatgacgatggctgatcctgtcacgcatgacgggatgaatgcgcaactggatgtgattcgtcaggagctggcgacgctgaaacaggacgcggcatcacagagcgacaccctcagaacggtaacagagaagctggccgttgccagcaaatcggatgagcagattacgctgttatcggacgggctggaaaaacggctggcgcaactggaaacccgacaggcacagtgggcactggcgttacatcagttgcaggaacagcgtcagccggtgcaaaaaacggtcaatcctccggttgtcagagtaaaaaacaccacgccggagacttcccgtcccggggcttctgtccgtgcatcccggaccgtgccgtttcagttaaccgccattgaacagcggggcggtcgtcgtctggcagctctggcacctgtggatatccgtcaactggggcaggtgcaattagtgccggtcggtgggcggtatcagggctgggaaatgaccgacattcagactgaccgtgtgacattacgttatcaggggcgcacggtgacattgcgcctgccataa

SEQ ID NO: 27134 - DNA, 198 bp, Escherichia coli
atgttaccgccgatatggccctcagacggaattgattccccggtattctggctggcggtgctgatgtggtgtgtgttctttgttgtgatggggatcctggggaaaagaaaacgcactgcccaccgtcatcgtcactgtcacgggaaaaaaacgcctgtgccggaaaaagaaaatccgtcagagcctcctcatggttaa

SEQ ID NO: 27135 - DNA, 759 bp, Escherichia coli
atggcaacagctgaagcccgtcaggaaaccccgcgccatccggcaaaagaacccggtttgccggcgaaactgatgtggcactggccctgggctgttatcggggtattactggcctcctgggtatgcagtctggtgattgaatgggtcgggattgcattcttctggccggacgaaggagcagaccacagccggcaggtgatgttaaccgagagcggatatctgtcggaagggtttacccgcagtctgctgatgtccagtccggcgcagtggctggcgcataccattgagcaggcataccggtggttgtttgtggagtccggcctgatggacagctggcagaacgtatacccagtgtcatcggtcaatgggaatgcggtcgcccgtgaactggataactggcggagcgggttggtgtctgaactgagggattatctgctggcgacagtgtatgtgacgctgacgttttttatccgggtgaccattctggtgctctctgtgccgctgttcgtactggttctgcttgtggctgtggtggaaggtttggggcgacgtgatttgcggcgttatggcgccggatatgaatccagttttgtgtaccatcacgcaaaaaaatggataaagcccttatttgttattccctgtttgttatatttatcctggccttcggccatcaatccgacgcttttactgttgcctgcggcagtgttactgggtatcgcagtcactgtcactacggcttcgtttaagaaatatttataa

SEQ ID NO: 27136 - DNA, 549 bp, Escherichia coli
atgaaaaaacttgcattatttgttgttgctgtcagtagtttgttaggaagtagttgtgcgctggcagataaccataccttatctctcggttatgcacaggcgaaagttcaggattttaaaaatatccggggtctgaatatgcaataccgttatgagtgggactctccggtcagtattgtcgggtcagccacttatatgaaaggggatgaagattattctgattatggatatgacagcggatataacggaaaaacagaactgaaatattattcattattagtgggacccgcttatcgcattaatgattatgtcagtttttatgctgttgccggatttgcacacacaaaagcagaagataaaaccacgtatctgacgcagtacacggaagaaatgagtcagagtaaaacatcttttgcttatggtgccgggattcagtttaatccgcttgaaaatatgtcagtgggactggggtatgagggaacccgggtaaaatataacgataatgtctccattaacggattcaatgttaccgttgggtatcgcttctga

SEQ ID NO: 27137 - DNA, 606 bp, Escherichia coli
atgacactgacaatcactcaaaaatccgggcattttgcctggtgcgcactgattgcgctgcatctggcagaacaggacggacaggtcaaatccgagatgcaaaaaaacttgtttttaatccgctggctggcaacggctaaaaaacaacaccgttttgaccgggcagtcacggcagatattgactggttactgcgacagggacggacactgggtgcccgcgccaaactaccacaaagactggattatctgtaccgctcctgcaccggtacgttaaatgaccagagtgatctgttccgcctcacttatgcgtttgaatccgccaaagaagccggtttttcctaccagatattaaataataaagcctggcacggacggcatgccctgataccggataacacccgcaatgccctttatctgttcaatgtcgcgctggatgccgcttttgatagtaacggtaaacagatagcccagttgccggtaaaaatcagcggagatatcgccggatttactgcattactcaaatcctgtggctggcaactcaaccctgcacaggaaacagcgatgccctttttatattcgctgacggcgaacaacgaaaatgactga

SEQ ID NO: 27138 - DNA, 327 bp, Escherichia coli
atgcgattattttctcctcttcctcccctgtgtgcactgatggtcagtgcctgtctggtgtgcccggcacaggccggggaaaaagatgaactggcgctgaccttaaaacagcttgaacacatccaggccagcctggagcgtgcccgtattcaggcaaatcaggacaatcccgcccgtttttattttgattattcccgcgcctccagagaggtggagattatccggcaggggattgcccgctatctggagccgtcccgtgcccagcccatggtgccggtgaatgtggcggagcctctgcgcggggattaccgccgggagcagcgatga

SEQ ID NO: 27139 - DNA, 369 bp, Escherichia coli
atgaagatgaacacgttttgggtacgtggtgcccgccgtatgggggcgtcagtgatgacgttatggacgttattcagtctgatgccggcgtatgccgcgctgccacaggtggagcccccctcttccggcggtggtggcgggctgatggatacgattaaagggtatctcaatgacggcattgtgattggcgggctggttgtggcggcggtggcttttatagtggtggccattgcggcagtttccaccttcaatgaagtccgggacgaaaaagccggctggggtaaattcggcgcgattgttgtggtcggtgtggtcctgattgtggcggtcgtctggctggccggaaaatctgccaccattattttttaa

SEQ ID NO: 27140 - DNA, 906 bp, Escherichia coli
atgagtatcaaacatcatctgaccgcctgtgcgctcggggtttcagcggtgctttctgcggtttcactgccgctgccggtgcaggcggtggagctggtccgctgggagcgtattccgctgccggtgtccctgcatgtgggggaagaacgcattgtgtttgtggaaaaaaatgtgcgtgtcgggtttccgccgtccctgaatgagaaactgcggatacagagtaccggcggggcggtttatttgcgggcggaaagtgcgttcccgcagacccgccttcagttacaggatgtggaaagcggggaaattctgttgctggatgtgacggccacggccggcaaaggggcgctggagccggtacgggtggtgtacagcggggaggtcagtactcagcgtgacagtcaaaccgtcagacgcagcgggcagagcggcgggaacgccggcaatacggtcccgccggcagccggaaccggggaacgcaccgcgaaaccccgttatccggcgccgttacccgttttactgacccgctatgccgcccagaatctgtatgcgccgttaagaacggtggagccggtccccggcgtacagtcgttgtcactgaccttaccgaaaacgctgacagcactctacccgtcagcgcccttgaccgctcagccactggccggctggcaggcggcagagtaccgggtggtggccgtgaaactgaccaaccagtccgcccggaaagtggtgctggatccccgtcagttacaggggcagtttgtcagcgccacgttccagcatcagtggctggacgcgaagggcacgccggaggataccaccacggtgtatctggtgatgaaaggtaaaccggataaggcatttccggcggagccgactgtccggaggacgggagggaaagcccgatga

SEQ ID NO: 27141 - DNA, 486 bp, Escherichia coli
gtgacatattttgcgaagccgggatcgccggccgtgatgccggtgacgtttccgctggtgtttgtgttcagtgccggaaaggccgattgcaccggaagtcatttttgcctgacggtggccggtcatcaggtgtttgatgatgagcaacagcagctgattgccggcatgtcaccggcgatgatacagctggcgtggcaggttgccgccggtggggcggccggggcggtgctgtctgtcggccgtcaccgggtggcgctgtgtgacaacgacattaccgtttaccggtttgccccggggaataaggcgtacccgcaggaccgtgactgggatcgtctgctgtacacggtgtttaaaggagagacgccggataaagccggctggcaatgcgtgcctttttcattatcggaactgaactgtcacggtgagtttgcccggctgaactgccggggggcggttctgaagggagcgggagggatcatactatga

SEQ ID NO: 27142 - DNA, 423 bp, Escherichia coli
atgagactgatgaaaggcagtgtgctgtgcgcactggtgtttttactggccggctgtgctacctccaaagaggaactgctgccggcgggaaacagcgacatgatggctatctggtcaggcagacaggctgacccggacagtacggacagccggacggtgacggaagccgcccgcagtacgctgcgtcgcgggctgacgaacgaggaagcggcgcgacgtcagcaggcgaacacggcgtatacccggacacaaagcagtgagatccatcagcagtttccgcgtctgccgaacccggacatggtgatgtatgtgttcccgcatctctcggccggcaatctgccggtgccgggatacagtacggtgtttccgttttatcaccaggtgcagtatgccctgccgggtgagcgtgtggagggcttgtga

SEQ ID NO: 27143 - DNA, 2292 bp, Escherichia coli
atgaaaactgcggaatacaaattagcgggtttagtcgtggttgtcagcctttctttattctctggaatgggggttgccggggatggtaatgaacgaaatacccatcaccggtttgacccttcaaaaaatattaactgcggtagtaatggatattatgaaacgggttcatggcgatgtgtgaatgaggggttgaattatttaaacaacaaaacaaaagccttttcggctgaaaagctcactgaaattaaagaagaagcgattaagtctgggttagatgcggcgaataaagctatacaagacgcgaatgattttaccggtaaaaaagtatcagagagcaatgcacggactgacagcttaatcagcaaagagcagaaagcacggacagacgcattgaatacagagaaaactgttcgcgaacaggcggatattaacaccctcaaaaatgcaaaccaatataccgacttaaaaatccaggaaaataacgagttactttcagcggatattgagcaagccagaagtgactttgatgacaatcttaaaacaacaaaagcagcgttagaaaacaacatttctgatgttaatcggtcattaacaaacagtgttaatcgggcgaaaaaatatttatccgataatctggataaaacccgtcatgacctgagtgccagtattattgccagtcagaatgacagtcatcttcgcactgacagattgatcagcagagagcagaaagcacgtattgacgcattaaatgcagaaaaactggctcgggaacaaggtgatgccaataccctgacatcagctaatcaatatactgataaaaaagtatcagagagcaatacacggactgacagcttaatcagcaaagagcagaaagcacggacagacgtattgaatgcagagaaactggctcgggaacaaggtgatgccaataccctgacatcagctaatcaatacactgataaaaaagtatcagagagcaatacacggactgacagcttaatcagcaaagagcagaaagcacggacagacgcattgaatacagagaaaactgttcgcgaacaggcggatattaacaccctcaaaaatgcaaaccaatataccgacttaaaaatccaggaaaataacgagttactttcagcggatattgagcaagccagaagtgactttgatgacaatcttaaaacaacaaaagcagcgttagaaaacaacatttctgatgttaatcggtcattaacaaacagtgttaatcgggcgaaaaaatatttatccgataatctggataaaacccgtcatgacctgagtgccagtattattgccagtcagaatgacagtcatcttcgcactgacagattgatcagcagagagcagaaagcacgtattgacgcattaaatgcagaaaaactggctcgggaacaaggtgatgccaataccctgacatcagctaatcaatacactgataaaaaagtatcagagagcaatacacggactgacagcttaatcagcaaagagcagaaagcacggacagacgcattgaatacagagaaaactgttcgcgaacaggcggatattaacaccctcaaaaatgcaaaccaatataccgacttaaaaatccaggaaaataacgagttactttcagcggatattgagcaagccagaagtgactttgatgacaatcttaaaacaacaaaagcagcgttagaaaacaacatttctgatgttaatcggtcattaacaaacagtgttaatcgggcgaaaaaatatttatccgataatctggataaaacccgtcatgacctgagtgccagtattattgccagtcagaatgacagtcatcttcgcactgacagattgatcagcagagagcagaaagcacgtattgacgcattaaatgcagaaaaaactgcccgtgaacagggggatgttaccacgctcaataatgcaaacaaatacaccgatcatcgtattcgctcattaggtttaaatgtttctgatgcgttaaatgattttcaacaaaaaacagatcagaaatttgctcatctcgataacaaaattggccgtgtggaaaaacgggccaatgccgggattgccggggtgaccgcgatttccaccattccgtatgtgaacagtgagcgtttttcgttcgggatggcgatggggcattaccgcgatgcacaggcgattgccaccgggatgcagtataagccaacggccagtacgaatgtccgcctgaatgcgtcatggaataccggtggcgataccagtattggtgccgggtttgcggtgggctggtag

SEQ ID NO: 27144 - DNA, 684 bp, Escherichia coli
atgtggttacgtgcccgagctgcgatgaagctgattaataaagactcgaaagagtttgaggaggccatcgtccgccggctggtgagtccggctaacctggatgtctccggtggtcaggtataccggggctacggggggaatgcggatatgacggtgatgaatgatctggcccggatgggcggtgtagtcggtacttcagtggcttcactgggggcattccctgcctttgatacgatgcgccagtccttaccgatggtgcaggggctgatgttaatggcggtgtatattatgatcccgatggtgctgatgttttcggcgtatgaatttaagacggcgataacggtgacgtttgtgatatttgcgctgaattttctgacgttctggtgggagctggcacgctggatagacagctggatgatggaggcactgtataattccgatacgcacagccagtggaatatgaacgggatccagaacacgtctgatgatgtcattatgaacctggtgatgggaacgatgtttttggtgttgccggcgttgtggatggctggattgggttgggctggttcaaaagctggggtaggtatatcgagtatgatcaattcaggtgggcaatctgcatatgattctggaggtaagggagggaaaatggttgagcaagcagtaaccaaaaaaattacataa

SEQ ID NO: 27145 - DNA, 399 bp, Escherichia coli
atgagtgataaaataactatttcccgggggggacactggggtgtaaaagcggcacataaaacaaaatggctaatcaaaaaattaaaggcattcgataagagctgcgtggcaagagccaaaagcaaaaatacgccgggttggctgggacatatcccactggtatccataactcttgcggtcatcgcattactggcttatttcagtttgtacatcttatttgcctttggagcgttggtaattttattttctataatagcaaactttagttattcctcctccgaacatatcgatatcaactccgatgctttttttgcaaatacaagtttcaatgatgatggatatagagatggtattgagggtacaggaacatatgttgatggatatcgaatcgatgattag

SEQ ID NO: 27146 - DNA, 285 bp, Escherichia coli
atggctaaaccaaaatctgaaattgatgctattcgagcattaacagaagtaacaattaaaggttttgagcaggttgctcaggcattagttgatatgagagaagctcagggaaaagtcgcacgagcaacatataatggattaacctcctcaggaaaatctcgctatgttgcatcgctagtagaggaagtaggatcacaagctgaagtaagccgcatgttaaatatcacacctgggcgcgttagccagcttatgaagtccgaaaaaaaccgcaaaaatggtaagtaa

SEQ ID NO: 27147 - DNA, 219 bp, Escherichia coli
atggtattagattcaatgactgaagcatctgtatcaactcttgaagaactcggatcaaacctaaaagacatcgacgccgttttggatctggttagcgttgctctggcttctcccgaagctagcttgcatcttggcgagatttcacggcttgttagtatgtcgcgggagattgctcagaattgccaacaagcgattgctgtggagtgtttacatcattga

SEQ ID NO: 27148 - DNA, 192 bp, Escherichia coli
atgggtaatgagtggatattatctttgtgtctcttgctttgtgtgttccagcaatggttttggttcatagaccgaaagtctcacaaggaaaacatgaaggccaggaaggcgatgtttcgtggtgaacaatttgcgcagacttatcgtatgtggaaacgtttctatcgtgaattttcggtgaacggggagtaa

SEQ ID NO: 27149 - DNA, 234 bp, Escherichia coli
atgaatcaggtaaaaatgaacactgttggcctgctggaatcgttggatgaacgtctggctcaggtctatgcgctcgtatcatcagcccatcggacaatctccagttgtgaggcgtcgatttatctctcagaagcagggaaactccttcaaattgcgtgtgagctaacacacgaagcacagggttattcagcatcgctctcgtcgcaattgctgcacgataaggaggctgaatga

SEQ ID NO: 27150 - DNA, 165 bp, Escherichia coli; identical to SEQ ID NO: 14505

SEQ ID NO: 27151 - DNA, 288 bp, Escherichia coli
gtgaagagttttatttttgttttatgttttgccttttctgctgcggtttatgcccaggaagatagcatttctgttattaactcatcagcggaccttgcatgtaaaaataatcccgatgctgcatcaaaagagtcatgcaaagagctgctcctttcgacggctgcttttgcttctgaaaatgcaaaattttattcagccttttgtcgcggctatgttaaggacgaagataaagaaaaatgtgatgatgccggtaagttagttaggtatttccaatctcttaatcaataa

SEQ ID NO: 27152 - DNA, 396 bp, Escherichia coli
atggctgttcaatcatacaaatacgaatcccctttggataagggatacattcgtatcaagttaagtcgttatcagcataaggctatttttaaggtaaggaaaattcgcatattggatgcgtatgcgtattactacaacggtgaaaatgttgttgttgaacactttcttgcacgatggtttgtagctctgatttttgtccctctcctgttaattggtacttttgtggatggttttcctagtacatggcgggagataaagaaaggcctattcccgcgtaagtacggcagattttcgcaagatagctggcgagttatacctggtaaacattctgtagatgagcaaccgattgttgatttctggttgaatcgtatggctgatgctaaaaaagttgattga

SEQ ID NO: 27153 - DNA, 327 bp, Escherichia coli
atgtctactactgcatttttggacaaacttgattaccgtcagctgcagttctgccgggatgaatgcgaacgacgcattagggctatccaggaggaagaaaaaaaggtcgcctgggctgtaacagatcgtggccttatctttggctggttccgtacggaggattatctgaaagcagtggaattattggcgcgtaaggctgctgagcgttgggaacgagccgacaaggaaaacccggagacgaagtatgaactgaatctctacatcgagggcaaccgtctaccattgtcagagtataacgctttgtttgctgatggtgagtggggttaa

SEQ ID NO: 27154 - DNA, 192 bp, Escherichia coli; identical to SEQ ID NO: 27148

SEQ ID NO: 27155 - DNA, 3996 bp, Escherichia coli
atgacattaaacgatttctatgcggatcgctttggcagcgatccgttctcgctaattgaagcagcacgggatgaactaaccgagctggcacagatggctggtatcaactggcctgcctgttccgacaacatccaactcaaccctcgcggaggggttgagcgttactcttcatacaataaaacatctccagaagctctcgaaaagagcctgaaaggacgcgtagaaatttactccaggctggaacacagcaaagggattgattacccgttcattaacttcgtccataaaggcagcgatgctggctcatggagcggtttctccttcctgttttctgaatatcgccgtgagcaacaacggaataatgcgaccgtggtcgcacaaccagaagaagaacgggaaagaatagaacgtcaggccgaagcacgtcgtcgccgtgaagaacaaaaacgaattaatgatctgaaaaacaaccaaatggaccatgaacgtttgctgggatggctggcattccacagcgcgtgggaacatgctcaggctgaagacggctcatggccatatgcgattaaaaaaggtattcgtgacgtttttagttcatgtgatgtgcgtcgcgtgaccagtcacgacagtgcgaaatggagccgggggccaaccacatatatggctatccctctggctcacctggacggtcgttatgatggtcgtattgtgggttggcagcgaatcgacaaacaaggtgggaaataccagaccagcgcagtaaccagcggtgatttcgtcggtgcctgctttgttatcggtgagctgaaaggggcgcaaaacatcgctgttacagaaggttttgctactggtgcatccatctggcttgccacgaaaaaagataaacgctttgacgctgtggttgtcgctgtatccgctaacaacatggttcatgttgtggaacaactggtaaacatgtacccggcggcaaaaatcacctgcgcactggataatgaccggaaatctgccacagaaggaaaagggaataccggcctgcggactggctatgaaatcttatcgaaattcaacgatgtccgctgcgtctatccaacttttgaagacgatccgcaaatggagtgcagtgacttcaacgacctgcacaaactacgtggacttcgtgaaacagcacgtcaactatttgcaacagcaaaccgcctgaaaaccggtactgatttgctatctctgacgctcaaccgcctgaagacaattaagcgggataaccgtcgtacttttgccaaagagctgctgagagcggtggatattggcatgctaacctgtccggttcctaacagtccgtcagatttatttaacatgttctgcatcgttctgcgtgaaatgggactggaaaatatctatcgcgctacggtaaaagaccacattgcccgtcgcctgaataaaaagtgccgtattgcccaggctccgcgctctttcagcgaacgcataactgatcccaataaacgccctcaacatatcacctataagcgttttgaaacttcggtaatgaccgatgatgtcctgaagtacgtgcaatcactacaggggatagtcatcgtccgtgctggtatgggttccggcaaatctactggattgttacgaccgttaatgcatagctcagaacgtggtatctctgttgctcaccgtgtctcccttattggtggcctgtgggaaatgatgacagaaggaaaaggtgtaaaagccgatatcctgcactatcaggaccctggctatcaggaaatggctccatacgccagtaaactgaccatctgcataaactcgattgttaaaaactgctggcaaccgttgatgcgccagcacgactattttggctttgacgaggccacacaagggctacgtgccgttctttccggtcgggctatggaaaacccggttgctgtattcaatacgctaattgacgcgctggccagaacggaacaacacccaatcatggtggatgctgatgcgaacgatctactggttgacctggctgaactggctatgaaacgccgtgaagaactaggtttaccggcatggctgcagatccacgtaattgaattacctgttgatgttcgcaaccgcgaaacaggtgagccaatccgggttttttatacagaaaaagatcgcatcatgaccgaggtggtgaaagctgtatcggatggcgaaaaaatcatgttggccaccgacagctccacctttgcagaagatgtgacagccaccctgagaatgcattttcctggtaagaaatttctgtgtgtaaaccagaaaaacaaaccagagccagaagttgaagcatttaccaatcaaccgaaaaagatggtcaaaaaatacgacggcctgatttatagcccgtctatttcatccggcgtgtcgattgagcaaaaacattttgaccgtcatttcggcatgttctgtggtgaagttgtacccagcgacgcagtgcaaatgctacgccgcgaccgtacagcaaaagaatttattatcggctttgataaagctcgtgcaaaacgtgaaactgacccgcaaaaaatagaacgagcattcgcccaggcattgcttgctaccgcaggtatgaacggtgaacttacggatgtcgttttcgatggcgaccgtatatcaatgggggtggccaataccgactttaccaggatgaaaattaaagcagccgcaattgaagcgactgcgcgtaacgactacgccagcaacatgatctgcatcatgcacagcgacggttataaggtatcaccgctggccaccgattatgctgcgaatgatatcggtaaagatctgcgtaaagaagcgcgggatattgtgtgggaacagacactggatctgcacctcaatacagaaactccacaagaatcagagcgtgaagaactgctaaaaaaacgcgcgctgacgcttgaagaacaggcaaaacttgtccgctgggatattgaaaacgaactgaaactaccggttgaagaaggcacgctgaaattctatttcgatggtgctcgagacaaagttcgccgctatgaaacaatgcttttagatgaggtaacagctcgtcgttacgaccgggaagaagcagccatcaattttacctacgcataccgtcaggcgggacagtggcaatattttgtagtgaccgcgatgactcgcgagcaggctgatgatgtctttaaaactaaattccctggaataatcgatcacaaggtaaaagctactcctactgttgaagtcggggcgcgcggtttctatgcgcttaaatcagcaactctccggcagtactttatcgactgcggtatcaaccctgagactatgaccggcgaggcgactcaggagcgtctcaaattcgctcgagataacctcatgacagccgaacgccgtgacctgttgaataacgttctgcacattggtggttttatgacgccaaaagggaagcctaaagtgccggaagcgttgtttaaaaacatttgcgactctcttggccttaaaacaggtaaacgtcgcggcagagacggcgataagcgtccaaccttgcgttttgttgagcctgaatcagcggcatttatgctggatattcttgttcagcgtcagaaagatggcctaaccctaaaaacgcgtaaagccgagaagacagccatcgaaatggatcgcgatttggatctcaatatatatatggatgataaaacgcgatccacaaacgagcaggttcaaaacgcccctcattcagtaatttctgaggctttggccgtgttgccagtggctgtacctgagtcctgggcgatgagtgcgctttccagtgaggagttggccactatgtcatcatggtcatcagccagcatagctatgacgtttgcatccctgtacctcacagagttcatggatcacctttccagcaatgagctgcggcggttacgtgaatacattacggggaatagctcatgcagctacgaagagcagggcgctttctatgggtaa

SEQ ID NO: 27156 - DNA, 597 bp, Escherichia coli; identical to SEQ ID NO: 14500

SEQ ID NO: 27157 - DNA, 291 bp, Escherichia coli; identical to SEQ ID NO: 14496

SEQ ID NO: 27158 - DNA, 327 bp, Escherichia coli
atggcgctgacagctgcagaacggcaaaggagacgcagggaacggttgaagaaggaaggcacatcaagacgggactggattctggaacctgacgagctacgtatgttgggggaaatttgtgtattgcgtagaccgggacgagttccatattcagagaatgaagtcatcggtctgctgatcaggaaaaactataaggagctgcagaagcagctatctactacttgcccgcgatgtggtcagaaaatgcctgtttcagaatgtatttttgatggtgaaggctcatgtcaccttacaactacgaggctgaaacttgtgctcaaagtgtga

SEQ ID NO: 27159 - DNA, 219 bp, Escherichia coli; identical to SEQ ID NO: 27147

SEQ ID NO: 27160 - DNA, 450 bp, Escherichia coli
atgcaagaagaagcaaagaaaattcttgttgatttattgaacaatgccagcgatggaattgattccgccattgcattcagtcaggctcagattccggatgttgttcatcagttgctggtatggaatatagttgatagcctgattaaaacattaatagccatttcaacaatcccgctggttatttggtttatgaagaaacagtgcaaaaaagttgaaattggtaagttcgataatgacggacgctcatgtgataatggacagcctaaatacaaaccgactatgatttgggaaagtgacggtaggttaagtgcttttgtcttaccattagtagcagtttttattctatggttaagttttattatttctatagtagccaatatgacatggttaaaaatctggctggcacctaagttatatctaatcgaatacgcagcatcactaattaaatag

SEQ ID NO: 27161 - DNA, 444 bp, Escherichia coli
ttgaagagtgctacagtttacacggcaatgagagttaagcaatatggcggcgtaccttcggtagaagtaaggtgtgatgataaaagaaccaaagttgttactgattgccttctgctttttaaaagcatagacgaggtaatttttattggagctgaaaatcttcaccctttgataaaagcagagatgaagcaatgtgcaatcgatgcattgggagttgggcaaggcaagtctcagatcgaagcaaagcaaatgcttacagagcttgaaagcagcagacgtagacaagcaagcagggcaagacaatttcacgatgcgatcgcaggatggagcagagagcttatgtctttaaatgtagacatacagagaggaattgatgttccaacaataaggtcaagaataggtacgatcgcagagaacatggaaaagctaaatccaaagaaataa

SEQ ID NO: 27162 - DNA, 171 bp, Escherichia coli
atgcaacagttcgctattgcaggggcggcatcggttcgccctttcaacccaattttatcggtgcagcattcacgaaaaaatattttaaccggagcagactttaaacaacctcgcgttaagagcttgctggatcgtcttgttgagtttctgaatcaaaaggtacatccatga

SEQ ID NO: 27163 - DNA, 165 bp, Escherichia coli
atgaaaaaaccaacttacgaggaactggaagaagccctgaaagagcttagaagaatggctttcgccagacgcactaactctcacaactgcggcccatttcagtactctgatttatgcgaggacatcattgaggtaactcaactgattaaggtcgttaagcaatga

SEQ ID NO: 27164 - DNA, 5271 bp, Escherichia coli
atgatgagtattgcgcaggtcagatcggccggaagtgccgggaactattataccgacaaggataattactatgtgctgggcagcatgggagaacgctgggccggccagggggctgaacaactggggctgcagggcagtgtcgataaggatgtctttacccgccttctggagggcaggttgccagacggggcggatttaagccgcatgcaggatggccgtaacaggcatcgtcccggctacgacctgaccttttccgctcccaaaagtgtctccatgatggccatgctcgggggggacaaacgtcttattgaagcacataaccaggccgtggattttgctgtccgtcaggtggaggcgctggcctccacacgggtgatgacggacggacagtcagaaacggtgctgaccggtaatctggtgatggcactgtttaaccacgacaccagtcgcgatcaggaaccacagttacacacgcatgcggtggtggctaatgtcacgcagcataacggcgaatggaagacactgagcagtgacaaagtggggaaaacggggttcattgagaatgtgtacgctaatcagattgcctttggcaggctctaccgggaaaaactgaaagagcaggttgaggcgctgggctatgaaactgaagtggtcggtaagcacggtatgtgggaaatgccgggcgtaccggtggcggccttttccggacgctcgcagactatccgggaggccgtcggggaggacgcctcgttgaaatcccgggatgtggcggcactggatacgcgaaaatccaaacagcacgtcgatcctgaagtcagaatggctgaatggatgcagacgctgaaggaaaccgggttcgacatccgggcatatcgtgacgcggcggatcagcgtgcggagacccgcacgcaggcgcccggggctgtttcacaggaggggccggatgtgcagcaggcggtgacacaggcgattgccggattaagtgaacgaaaagtgcagtttacgtacacggacgtgctggccagaacggtcggtatactgccgccggaaaatggtgtgattgaacgggcacgcgccggtatcgatgaggccatcagtcgtgagcagcttatccccctcgaccgtgagaaggggctgttcacatcaggaattcatgtgctcgatgagctgtccgtccgggcactcagtcgtgacatcatgaaacagaaccgggtgaccgtacatccggagaaaagtgtcccccggacggctggttacagcgatgcggtcagtgttctggcacaggaccgtccgtcgctggccattgtgtccgggcagggcggtgcagccgggcagcgtgagcgggtggctgaactggtcatgatggcccgggagcaggggcgggaagtgcagattatcgctgctgaccgtcgctcgcagatgaacctgaagcaggatgaacggctgtccggtgagctgataaccggacgtcgtcagttgctggaaggcatggccttcacgccgggcagtactgttatcgttgaccagggcgaaaaactctccctgaaagagacgttaaccctgctggacggtgccgcacgtcataacgtacaggtcctgataaccgacagcgggcagcgaaccggtacaggcagtgcgctgatggccatgaaggatgccggggtgaacacatatcgctggcaggggggagaacagcgaccggccaccatcatcagtgaaccggaccgtaatgtccgctatgcccggctggcaggagattttgcggccagcgtgaaagccggagaagagagcgtggcacaggtcagcggggtacgggaacaggccatactgacacaggccattcgcagtgagctgaaaacacagggcgtgctcggacatcaggaggtgaccatgacggcactgtcaccggtctggctggacagccggagccgttatctgcgggatatgtaccgcccgggaatggtgatggagcagtggaacccggagacacgcagtcatgaccgctatgtgatagaccgggtgacggcgcagagtcacagcctgaccctgcgggatgcgcagggtgaaacgcaggtggtgcgtatttcttctctggacagcagctggtcgctgttccggccggaaaaaatgccggtggcagacggcgagcgtctgagggtgacagggaaaattcccggactccgcgtctccggcggtgaccgcctgcaggtggcgtccgtcagtgaagatgcgatgacggttgttgtgccggggcgggctgaaccggccaccctgcctgtggctgattcaccgttcacggcactgaagctggagaacggctgggtggaaacgcccgggcattccgtcagcgacagtgcgaaggtttttgcctccgtcacacagatggcaatggacaacgccaccctgaacggtctggcccgcagcggtcgtgatgtccggctgtattcctcactggatgaaacccgtactgcggaaaaacttgcccgccatccctcctttacggtggtttctgagcagataaaggcgcgtgccggtgagacattgctggaaaccgctatcagtctgctgaaagccgggcttcacacgccggcacagcaggctattcatctggcgcttcctgtggtggaaagtaaaaacctggccttcagcatggtggacctgctgacagaggcgaagtcgtttgctgcagaaggaaccagttttactgaactgggaggggaaatcaatgcgcagataaaacgcggtgatttactgtatgtggatgtggcaaaaggctatggcacaggcctgctggtttcccgtgcgtcgtatgaggcagaaaagagcattcttcgccatattctcgaaggtaaggaggcggtcacgccgctgatggagagagtacctggcgaactcatggagaaactgacatcaggacagcgtgccgctacccgcatgatactggaaacgtccgaccgtttcacggtggtgcagggctatgccggtgtgggtaagaccacacagttccgggcggtgatgtcagccgtgaacatgctgccggagagtgaacgtccccgtgtcgtggggctggggcccacgcaccgtgcggtcggtgagatgcgcagcgccggcgtggatgcacagacgctggcgtcctttctgcatgacacgcagctgctgcagcgcagcggagaaacgccgaatttcagcaacacgctgttcctgctcgatgagagctctatggtgggcaataccgacatggcacgggcatacgccctgattgcggccagtggcggtcgtgccgtggccagtggtgacacggaccagttgcaggccatcgcgcccggtcagcctttccgtctccagcagacgcgcagtgctgccgatgtggccatcatgaaggagattgtgcgccagacgccggagctgcgggaggcggtatacagcctgattaaccgggatgtggaaagggcactgtccgggcttgagagtgtgaaaccgtctcaggtgccacgtcaggagggcgcatgggtaccggagcactccgtgacggagttcagtcacagccaggaagcgaaactggcagaagcgcagcagaaggcgatgctgaaaggtgaggcttttccggatattcccatgacactgtatgaagccattgtccgcgattataccggcaggacgccggaagcacgggagcagacgctgattgtcacgcatctgaatgaggaccggcgcgtactgaacagcatgattcatgatgcacgggaaaaggccggtgagctgggaaaagagcaggtcatggtgcctgtcctgaacacagcgaatatacgcgacggggagttgcgtcgtctctccacctgggagacacatcgggacgcacttgccctggtggataatgtgtatcaccggattgccggtatcagcaaggatgacgggctgataaccctgcaggatgcggaaggtaacacgcggctgatttcgccccgggaggcggtggctgaaggcgtcacactgtacactccggacaccatccgggtgggaaccggtgaccggatgcgcttcacgaagagtgaccgggagcgcggttatgtggccaacagcgtctggacggtgacagcggtttccggtgacagtgtcacgctgtcggacggacagcagacccgggtgattcgccccggtcaggagcgggcagagcaacatattgacctagcctatgccatcaccgcccacggtgcgcagggggcaagtgaaacctttgccattgcgcttgaaggcacggaaggtaaccggaaacagatggccggctttgagtcagcctacgtggccctgtcgcgtatgaagcagcatgtgcaggtgtataccgataaccgtcagggctggacggatgccattaacaatgccgtacagaaaggaactgcccacgatgtgcttgagccgaaatcggaccgggaggtcatgaatgcagagcggctgttcagtacggcgcgggagctgcgggacgtggcggccggccgtgccgttctccgtcaggcagggctggccgggggagacagtcctgcacggtttattgcacccgggcgaaaatatccgcagccgtatgtggcactgccggcttttgaccgtaacggcaagtcagctggtatctggctgaacccgctgaccacggatgacggaaacggactgcggggcttcagtggtgaaggccgggtgaaaggcagcggggatgcgcagttcgtggccctgcagggcagccgtaacggagagagcctgctgactgataatatgcaggatggtgtccggattgcccgtgataatcctgacagcggtgtggtggtaagaatcgccggtgaaggtcgtccgtggaatcccggtaccatcaccggtggtcgcgtgtggggggatatcccggacaacagcgttcagccgggagccggaaatggcgaaccggtcacggcagaggtactggcacagcggcaggctgaagaggccatccgccgtgaaacggaacgccgtgcggatgaaattgtccgtaaagtggcagagaacaaacctgacctgccggacggcaaaacagagcaggctgtcagggatattgccgggctggagcgtgaccggtctgccatatctggacgggaagccgcgctgccggagagtgtactgcgtgaaccacaacgggtgcgggaagctgtccgggaggttgcccgggaaaatctgctgcaggagcgactgcagcagatggagcgggatatggttcgtgacctgcagaaagagaaaaccctgggcggagactga

SEQ ID NO: 27165 - DNA, 879 bp, Escherichia coli
atgaaaagtatagcaaaggcacaaaacgatttcaccatcttcaaattcggcgacagtgaaatccgcgtcatcaacaagtgcggtgagccgtggtttgtagctaaagatgtttgtgatgctttagctttgactaactcacgcaaggcgcttactgcacttgatgacgatgaaaagggagtaactttaagttacacccttggtggtgagcagaatctaagcattgttagcgaatcaggtatgtatacattggttctgcgctgccgcgatgctgtcaataaaggttcggtcccgcacaaattccgcaagtgggtaacagcagaagttctaccttcaattcgcaaacatggcgagtatgtgaaaggcaagaaaaccactgttgaggaaagaacgccgctacgcgatgcagtaaacatgctggtaggaaagaaaggacttcgctatgacgatgcatacaatatggttcatcagcgttttggtattgacagcattgatgaactttcaattgaacaaatcccgcttgccgtagagtacatccacagggtagtgcttgaaggtgagttcattggcaaacaagagaagaagaccaacgagctttctgcaaaagaagcaaacagtcttgtatggttatgggattatgccaaccgttcacaggcattattccgcgaactgtatccggtattaaaacaaattcaatcgaactattccggcagatgctacgactacggtcatgaattctcgtatgttatcggaatggcgagagacgttttaataaaccacacacgagatgttgatattaatgagccagacggaccagcgaatctttccgcatggatgagacttaagaataaagaattacctccttcagtacataactactga

SEQ ID NO: 27166 - DNA, 174 bp, Escherichia coli
atgatagtcaagtcagacgcaccaaagtaccctttgcgcatcccattagaggttaagttagcaatcgagaagtcagcgaaagaaaatggtcgctcaataaataccgagatggtaatgcggttagtggatagtttaaggcgggatagttctaaaggtaatctagcaaaaagttga

SEQ ID NO: 27167 - DNA, 237 bp, Escherichia coli
atgtcacgcgaagagccgcaaataaatatcaggatttccaaagagttaaaggcaaaggttaaagccagggcgcaacataacaagcgttccatgaatgctgaaataatacagattatcgaagatgctgtttgtggtagatcgcttaatagcaatgaatttgctcagaaagaggctgacaaattcagggatgcgctgattgaaacactgaaaaccatgtatggtaaggatgcaaaatga

SEQ ID NO: 27168 - DNA, 183 bp, Escherichia coli
atgaaaaatatattaattggtttcgtttttggtgcagcctgcgccgccagcattagcgtcatcgccgctcagattgttggtggtaactcatatctaatgggctatgacgtcatgataaatggagaggttgtttgctcatacccttatgtatggacgtcgacaaaagaaatagaatgtgactaa

SEQ ID NO: 27169 - DNA, 513 bp, Escherichia coli
atgaaagaaataaaattaacgccagaaatggtgctttctgttgttgattacaatccatcatcaggcgactttcactggagatggaggcggggaagagagaggaccactttgacatggaactctcgttttgctttcaagaaatgctcatcaataaattctgatgggtatttaatgattatgattaatggtaaagcataccctgctcacagactggcatggttgattgtttatggcaccatgcccgatggttttattgatcacatcaacagggtaagaacagataaccggatatcaaatcttcgtcttgtcactcattccgaaaatatgcagaacaggaaaattcagaagaataataaatctggataccgtggcgtgtcttgggatgctaagtacgggaaatggagagcaagaattaatgcgtctggaaagtgtattaaccttggataccatgatactgccgaacttgccgctgcggcttttgaggccgccagaatgaaatatcataccgtttaa

SEQ ID NO: 27170 - DNA, 291 bp, Escherichia coli
atggctaacctacgcaaagaagcacgcggcagagaatgccaggtacgtatttacggcgtatgcaatggtaatcctgaaactacagttctggcacattaccggatggctggaatttgcggaacgggaatgaagcctgacgacctgatcggcgcatgggcttgtagcgcgtgtcacgatgaaatcgaccgacgcacccataacctcgacaacaaagacgccagactttaccacctcgaaggcgtgatcaggacgcaggcgatactgctgaaggaggggaagattaagtcatga

SEQ ID NO: 27171 - DNA, 252 bp, Escherichia coli
atgccgttaaaatgtcctaagtgtggtagccgaaatacagtgacagaaactgccggaaagatagcagaagtgacttgcgatgaccggttcctgacatcgacatccggttatattagcccggatcaattaccagaattgcttaaagaaatcatcagggcgatacaacgtctctttagattccttgaacagcgtgaaaggaataatgcgccagtgctgatctgcaaggattgtggatattatgaaagaatatag

SEQ ID NO: 27172 - DNA, 372 bp, Escherichia coli
atgaaatttgtctcgaactggcaagacctgccgtcgctccttcttccggagtcagtaatgagtctgttgaaaacagagctggtactcccatttgaagatgaatactctgcaatgagtttctgggatgaagtcggggtgacattaatatatgtcgagcccgatgatgtacctgaagatattaaagcgcaggtattaaatgtgattcatcagttaattgcaaatccagaatttgtagtccgtctgacagatgactattacctgatgctttctgttacggaagataacgggaacggtatttatctgttatttcaccccgattgccctctgaagggtattgatttattaatttctatggccgaatcacgctattaa

SEQ ID NO: 27173 - DNA, 576 bp, Escherichia coli
atggattttagaatgactgaacaaccacggaccataaaaatttataatctgctggccggaactaatgaatttattggtgaaggtgatgcatacattccacctcatacaggtctacctgcaaacagtaccgatattgcaccgccagatattccggcaggcttcgtggctgttttcaacggtgatgatgcatcgtggcatctcgttgaagatcatcggggtaaaacggtttatgacgtggcatcaggggacgcgttatttatttctgaactcggtccgttaccggaaaatgttacttggttgtcgccggaaggggaatatcagaagtggaacggtacagcctgggtgaaagatgcagaagcagaaaaactattccggatccgggaggcggaagaaacaaaaaacagcctgatgcaggtagccagtgagcatattgcgccgcttcaggatgctgcagatctggaaatcgcaacggaggaagaaacctcgttgctggaagcctggaaaaagtatcgggtgttgctgaaccgtgttgatacatcactatctccagatatcgagtggccaagtcaaccataa

SEQ ID NO: 27174 - DNA, 966 bp, Escherichia coli
atgaaacagcgctctcttctaaaaaatgctccagatattaatcgcattatgagtaataatcatcatgcccctgaacatcagcccgtatcacctatggttggtgatttaaaacgtcaactgagttcattaaccggtaacagcataactttgccagtatgcggacgtaatgttaactttaagttagagacaattcccgcagataaagttgaaatggcaacaatggtatggctaggtaatgaacgcgatcaagatttattaaatgaatcctctctagccgatttaatcccatcttttctaacgtctggacaacaaaatccagctttcgccagaaaagtatctggaatcgttgaagtcgctgacggctcacgtagaagaaaagcagcgatattaacaggatgtgactatcgcgtcttaattggtgatctcgacgatgaacagatgcattggttatcccaaattggtaacgattataggcctattagtgcatacgaaagaggaaagagatacttacgcaagctaaatgactttgatggtaacgttaaagcattagccgaggctgaaaatatagatagaaatattatcactcgctgtattaatacagctggtctaccaaaagatatattagctatcttcaatcatccaggagaactgtcagctcgtgctggagattctttgtttaaggtttacaaaaaaaacatggctgccatgagcaatgctgctcatcatcttctggcaattaaaaaaaacggcgaggatttagaagcttcacggattatacaaatattatctgactctgttctggttggcggcgaggaaaaaacaaaagacgagaaaaaatatggggaagggatcacggccagatataaaggtaattttgtaactataaaaattgatagccgcaaaatatctaaagaaatactaagcagaattgagttgttactagaggaacaatctactgataattaa

SEQ ID NO: 27175 - DNA, 576 bp, Escherichia coli; identical to SEQ ID NO: 27173

SEQ ID NO: 27176 - DNA, 891 bp, Escherichia coli
atgattacgctcattctttctgcaccagtaacagaaatggctgaagcatttaagcgggtatttgcaaacgcagataatgtgaatattgtcggaaagccatttgaaacaatcagagaatttgactgcatggtaagtgcggcaaatagtttcggcctgatggatggcggcgttgatgccgccattaccgcattcttcggtactcagttacagtcccgcgttcagaatcatattcttcgtgaatatctaggcgaacagcctgtaggttctgcatttgtaattgaaacggggcataatcatcacccctggctggtacatgcgccaacaatgcgtgttccgctgacaattgacggaacagacgctgtatataatgcaacctgggccgctctgcttgccatctttcagcacaataaaaacgcaacgacagacaggaaaataaagacggtggtattccctgcaatgggggccggatgtggtcaggttccgtttgaaagcgttgcccggcaaatgaagcaggcatgggataactttaataagaaaacagaatcaattaactgggaatacgcacactcccgccagtcggcagtatttggcacatatgcatactgtccgggtaattctgtttgccgttatgcggatactaaatatattggatgcggcgattatcggacgtattgctcacgttccgggcagttctgtattagccatgtgcatcaggccgatgacgtgctgactaataatcgctctcgccctgattcgcatacacaccggtttaatccagaaaatcccgtaggcaatctcacctctggcgcacatagccacggaagtagcatcgttattggtgctcccacccatacgctcaataaacaatattctgtctctgatattaagtag

SEQ ID NO: 27177 - DNA, 2961 bp, Escherichia coli
atggcagtaaagatttcaggtgtactgaaagacggcacaggaaaaccggtacagaactgcacaatccagctgaaagcaaaacgtaacagcaccacggtggtggtgaacacgctggcctcagaaaatccggatgaagccgggcgttacagcatggacgttgagtacggtcagtacagcgttattctgttggtggagggattcccgccgtcacatgccgggaccatcaccgtgtatgaagattctcaacccggtacgctgaatgattttctcggtgccatgacggaggatgatgcccgtccggaggcactgcgacgttttgaactgatggtggaagaggtggcgcgtaacgcgtccgcggtggcacagaacacagcagaagcgaagaagtcagccagcgatgccagcacatcagcccgtgaggcggcaacccatgcgactgatgctgcaggctcagcacgcgcagccagcacgtcagccggacaggccgcttcgtcggctcagtcagcgtcttccagcgcaggaacggcatcaacaaaggccactgaagcggaaaaaagtgctgccgctgcagagtcctcaaaaagcgcggcagctaccagtgccggtgccgcgaaaacgtcagaaacgaatgctgcagcgtcacaacaatcagcagccacttctgcatccaccgcgaccacgaaagcgtcagaagctgccacctcagcccgggatgcgtcggcttcaaaagaggcggcaaaatcatcagaaacgaacgcatcctcgagcgccagtagcgcagcttcctcggcaacggcggcagcaaattccgcgaaggcggcaaaaacgtccgagacgaacgccaggtcttctgagacggcagcgggacagagcgcctcagctgcggcaggctcaaaaacagcggctgcgtcgtctgccagtgccgcgtcaacaagtgccgggcaggcctcagccagtgccatcgccgccggaaaatcggcagaaagcgccgcatcgtccgcttcaacagccacaacgaaggctggcgaagccactgaacaggccactgcagctgcgaggtctgcttccgcagcgaagacatccgagataaacgcgaaagcgtcggaaaccagcgcagaatcctcaaaaacggctgccgcatcgtccgccagttcggcggcgtcatcggcatcatctgcgtctgcttcaaaagatgaggcgaccagacaggcgtccgcagcgaagggcagcgccacgacagcatccacgaaggcgacagaggcagctggcagtgcgacggcggcagcacagagcaaaagtacggcggaatccgcggcaacgcgcgccgagacagcggcaaaacgggcagaggatattgcatccgccgtggcgcttgaggatgcgagcacgacgaaaaaggggatagtacagctcagcagtgcgactaacagcacttccgagtcactggcggcaacgccaaaagccgttaaggccgcgtatgagctggctaacgggaaatacaccgcacaggatgcaacgacagcacagaaagggatagttcagcttagcaacgcgaccaacagcacatctgaaatgctggcggcaacgccaaagtcggtaaaggcagcctatgaccttgctaacgggaaatatactgctcaggacgctacgacagcacaaaaaggaattgtccagctcagtagtgcaaccaacagcgcatctgaaacgcttgccgcgacaccgaaagcagtgaaagcagctaatgataatgcgaatggtcgggtaccttctgcccgtaaggtgaatggtaaggcgctttcagcggatataacactgacgccgaaagatattggtacgcttaactcaacaacaatgtcattcagcggtggtgctggttggttcaaattagcaacggtaaccatgccacaggcgagttctgttgtttcaattacgttgattggtggcgcgggatttaacgtggggtcacctcaacaggcaggtatatctgaacttgttttgcgtgcaggtaatggtaatccgaaggggattactggtgctttatggcagcgcacatcgacagggtttacaaattttgcctgggtcaatacatctggtgatacttacgatatttacgttgcaatcggaaattatgcgactggtgtaaatattcaatgggattataccagtaatgccagcgtgacgattcatacgtcaccagcatattctgctaataagccggaagggttaacggacggtacagtttattcactctatacgccatcagagcagttttatccgcctggcgcaccaatcccgtggccatcagataccgttccgtctggttatgccctgatgcaggggcagacttttgacaaatctgcctacccgaaacttgcagccgcttatccgtcaggcgtgatccctgatatgcgtggctggacgattaagggcaaacctgccagtggtcgggccgtattgtctcaggaacaggacggcattaaatcgcacacccacagcgccagcgcatccagtacggatttggggacgaaaaccacatcgtcgtttgattacggcactaaatccacgaataacactggtgcgcatacccatagtttaagtggtagcacgaatgcagctggtaatcacagccatagagatggccgtcgatttaaccccagtgtttttaaagatacttatcaatatggttatacaagctcaggtcaaaatacctggggtgtacaaggctcagtaggtatgtctacggggtggttagctaataccagtacagatggtaatcatagccactcactgtccggcacagcagcatctgcaggtgcacacgcacatactgtcggtattggtgcacacacgcactccgttgcgattggttcacatggacataccatcaccgttaacgctgctggtaacgcggaaaacaccgtcaaaaacatcgcatttaactatattgtgaggcttgcatga

SEQ ID NO: 27178 - DNA, 600 bp, Escherichia coli
atgcgtaaagtttgtgcagcaattttgtccgcagccatttgtctggtcgtatccggtgcgcctgcatgggcgtctgaacatcagtccacgctgagcgcggggtatcttcatgcctcgacgaacgttcccggcagtgatgatctgaacgggattaacgtgaaataccgttatgagtttacggacacactggggctggtgacgtcattcagctatgcaggagacaagaatcgccagctgacccgttacagcgatacccgctggcatgaagattccgttcgtaaccgctggttcagcgtaatggcggggccgtctgtgcgcgtgaatgaatggttcagcgcgtatgcgatggcgggtgtggcttacagccgtgtgtcgactttctccggggattatcttcgcgtaactgacaacaaggggaaaacgcacgatgtgctgaccggaagtgatgaaggtcgccacagcaacacgtctctggcgtggggagctggcgtgcagtttaacccgaccgaatccgtggccattgatattgcttatgaaggctccggcagtggcgactggcgcactgacggtttcatcgtgggtgtcggttataagttctga

SEQ ID NO: 27179 - DNA, 2031 bp, Escherichia coli
gtggacttcagcgtgggcgcagaagggcttcgccatgtgccgggcgatgtcattgaaatctgtgatgatgactatgccggtatcagcaccggcgggcgcgtgctggcggtaaacagccagatccggacgctgacgcttgaccgtgaaatcactctgccatcctccggtaccacgctgataagcctggttgacggaagtggtaatccggtcagcgtggaggttcagtccgtcaccgaccgcgtgaaggtgaaagtgagccgtattcctgacggcgttgctgaatacagcgtgtgggggctgaagctgccgacgctgcgccagcgcctgttccgctgcgtgagtatccgtgagaacgacgacggcacgtatgccatcaccgccgtgcagcatgtaccggaaaaagaggccatcgtggataacggggcgcactttgacggcgaccagagcggcacggtgaatggtgtcacgccgccagcggtgcagcacctgaccgccgaagtcaccgcagacagcggggaatatcaggtgctggcgcgctgggacacgccgaaggtggtgaagggcgtgagcttcctgctccgtctgaccgtaacagcggatgacggcagtgagcggctggtcagcacggcccggacgacggaaaccacataccgcttcaggcaactggcgctggggcgttacacgctgacggtccgggcggtaaatgcgtggggacagcagggcgatccggcatcggtatcgttccggattgccgcaccggcagcgccgtcgcggattgagctgacgccgggctattttcagataaccgccacgccgcatcttgcggtttatgatccgacggtacagtttgagttctggttctcggaaaagcggattgcggatatcaggcaggttgaaaccacagcccgctatcttggcacggcgctgtactggatagccgccagtatcaatatcaaaccgggccatgattattacttttatatccgcagtgtgaacaccgttggcaaatcggcattcgtggaggccgtcggtcgggcgagcgatgatgcggaaggttacctggattttttcaaaggcaagataaccgaatctcatctcggcaaggagctgctggaaaaagtcgatctgacggaggataacgccagcagactggatgagttttcgaaagagtggaaggacgctaacgataaatggaatgccatgtggggcgtcaaaattgagcagaccaaagacggcaaacattatgtcgcgggtattggcctcagcatggaggacacggaggaaggcaagctgagccagtttctggttgccgctaaccgtatcgcgtttattgacccggcaaacgggaatgaaacgccgatgtttgtggcgcagggcaaccagatattcatgaacgacgtgttcctgaagcgcctgacggcccccaccattaccagcggtggcagtcctccggtattttccctgacatcagacggaaagctgaccgctaaaaatgcggatatcagtggcagtgtgaatgcgaactcaggaacgctcaacaatgtcacgattaaccagaactgtacgattaagggcatgctggaggcgacccaggtcagaggggatttcgttaaagctgtatcaaaagccttcccgaaaaaagtcggtacgtggggtaacacggaaacaccaaacggtacggttacagtcaccatcagcgatgatcataactttgaccgccagattattattccgcccattatttttaacggtatagcgtatgacgatccggggagcggaaataacccaggaggcacgcgatacacgggttatggttttgaagttcgcaaaaacggcgtattaatcgcatccagagaaactaaaggggccattcccggtagttacagtgcagttattgatatgcctagtggtggtggtagcgtcactctggagtttaagattttccagaaaggcaatcagggggcaggcaatatcaccgactgtacggtgattgtgaccaaaaaagctgcttccggcatcagtattcgttga

SEQ ID NO: 27180 - DNA, 1584 bp, Escherichia coli
atggatatctcgcttctcagtaccacccgtgaccctgaacagcttcgcgctctggcaattgccatggtgcaaaaagccatggctgagagtcagaatcttgcaaatgtggtgcaggaaaaagaccggaatattgcagaacttcagaaccgtatccgcatcctggaagagcagatgaagctcgcacgccagcagcgttttggtaaaaaatgcgaatcgctggccgggatgcagcgttccctgttcgaagaggatgttgacgcggatatcgcagaaatctcggcgcatctggacaaactgcttcctcagaccggggacgaagaaaaaacaacaacacgtcctgttcgtaagcccttgccttcacattttccccgtgctgaaaaggttatcccgccagctgaggaacgttgtcctgactgtgatgcccccctgcacttcattcgcgatgaagtcagtgagaagctggaatatatccccgcacaggtcgtggtcaaccgctatatccgtccgcagtacagctgtccctgctgtgagaaagtgttctgcggaaaaatgccggcacatatctttccgaaaagtgccgttgagccgtcggtaattgcacaggttgtcatcagcaaatataccgaccatctgcccctgtatcgccagcagcacattttctcccgaatgggtgtggagctccccgtcagtacaatggcggatatggtcggtgtcgccggagctgcactggccccgctggcaaaactgttacgccacgagcttctgacacgggatgttattcatgctgatgaaacgtccctgaggctcctggatacccggaaaggcggtaaatcctgttccggctggctgtgggcttacgtcagcggtgaaagaagcggtccgccggtcgtctgttttgactcgcagaccggacgggccctcagatatcctgaggcctggctgcagggctggtgtggcggtacgctggtgagtgacggatacagcgtgtataaatctctggcggataatcactccggtattacatctgcctgttgctggagccacgcaaggcgcggtttcgcaaatctgtataaggccagcagggagccccgtgcagccatggcgctgagaaaaatcgcgggtctttatcgcattgagaagttcatccgtgaacgtcctgtggaaaaaatacggcagtggcgccagcggtattcccggccgatagtgaatgacctgtttgcctggcttgaagagcaggagccgtgctgtccgcccgacggaccactaaataaagcgattaactatatcctgaaccggcgcgatgaactgagctgcttcctgggtgacggagccgtgcccctggacaataatatctgcgagcgtgccattcgcccggtggtcatggggcggaaagcatggttattcgcaggttcactgatggccgggaaccgcgcggcacagataatgagccttctggaaacggcaaaacgtaatggtctggagccacatgcctggctgacagacgtcctggcgcgtctgccggaatggccagaggagcgactggcagagttgctgccccttgagggatttaccttctccgggtga

SEQ ID NO: 27181 - DNA, 1557 bp, Escherichia coli
atggcagataacatcacggcctcttttatcgagctccccccgcagctattcggcaaaatcattgccgccgtccgtgagcatttatgcgctgacttatttcaattggcggaaatggagcgcagcgagaaagcgcaggagttggggattaacctccctgcaatagcttactgcctttcccggtctctctggttcccggagaaaaagcaatacatccacctggacaaggccgcacatattaagcgctttggagcgtccgatttccgcctgattgaatccagctgtggcggcttcttccatgacaccgaaaagggcaaagaggcagcagggcaggccgtagcattagcgctgaccaagaaaaccgcctctgaacgactgacagacctgcgaaaagctatctctggcattgttggtgactgcatccgcacatatcggcagttcgttgcccttcatgttgcggttgatatgttcaccgatagcgcatctgtcacactggacgaggaaggaaaagcacgcatcactctggcgcatgtcccttacccggtcacaaaattggacaaggccatcaatgacgactggcgcgagcatttcccgcagttccctgagcttatcgacctgatcgccgcagcccgtttcgcaccagaccgtaaaaacgcttacctgtttttgcaggcggtctctgacttcggtaaggggctgctgttcggtaagaatggggcgttctcaaagctgggtttggtcgtggaagttaacgagcaggagttggactccatcgtgaaggggtcagccagtggcaggacggcaagcgagtttgtccgggcgctgattctggcgattaacgagccggagcgcatcacgaaaaaatcctttgttctggagagtgcgatcaccgtatcaaccaagcaccagatagcccagacagtcccgctttacaccaagatttacacctcagctgatcctattcctggtcttatcagtgaatccggtattgatgagcagatcgcccgccgattctcacatatccagccccagtctggcccggttaatgaccgtccgttgtttcaggccgatcccggttactatgcctcacgggtacaggatgccattgcaaagggtctgaatagccgcattgaggcttaccagcaggctggccccgcgctggcttcaaagcaggctgctgagtatctgaatgaatttcacaaaaagtatggccttgccaagtcatccggcgttatcaccgaccattacggcgaaatttgtgatgagttctacagctttgcgcattccgatattgcgcagaagcgccacggattgccgtatgaatcggctgaaaagggcattgtgcttaaatgtgtcgctcaatggtggcgtgagttcgtcagtgcctatacagggaaaacgaacgggcatgagttcaatacgctgattcgtgaccgtacagccattatcggtaagcctgccactcaccgaactaagacagggtttgtgaagggtacgcttatccctccgctgccggaaacggtagcaagccgcatgacgatgcgagccgccaacgattaa

SEQ ID NO: 27182 - DNA, 456 bp, Escherichia coli
atgaaaccaacaccacaacagaaagccgccgcacgccagatgcggagagatcaccccgatatgagcgtgcgccagatcgccgcaaagctcggcatcaacagcggaaccgtcagcaaatggctccgccagcctgaggcagaaacaccgctcagcatcgagggcctgatcgcccagacgcagcagaactttgagaacctgccacccagcgaggccgaaaagctcagccagctgcgcgatgagctccgggcaaggcagcaagccatcattaagcggcagatcagcctactggagggactacaagcggagggaatgaccgcgctcaaaaagaaagacctacccaccgcccgcgcagcagccagtctaatctctgcattcacaaaggcattcagccatgaggccatggtctaccagatcattgaccccgccgctgtcatgaaatcagcgctcaaagagtaa

SEQ ID NO: 27183 - DNA, 357 bp, Escherichia coli
atgaaaatcaatatacccgcagcgctcgcgctactactgaccgccgcgccgctatacgctaaaccgctctccctgctccactggtgcagcgacggcaccgcgatccacctcagagaggacaacgggcggctaacgataacttggcgcggcgcttccttcccggttgataagatacagaccggaaatctgacagtggacatgaccggaagcacgccaaaccagagcacggtcatgctcctggctgcttttaacgacactcccaccccaacaacgaccatcaccgcaaacgtggtaggccggggaatgatgagcgccacctgccgccccgacacgggcgcaaagcatatcgacctgtaa

SEQ ID NO: 27184 - DNA, 198 bp, Escherichia coli
atgatcgtagcatcacagcgtcacactgcacaaacctttcccggcctcactattgagcacgggcagatctgccactacagaggggcgggtgctgaccctgcccgtctgccgactgttcgagtggcaggcataacaaccggggcccctgcgggggccctatctcataatcaatatggtgtaatgaattacatactatga

SEQ ID NO: 27185 - DNA, 627 bp, Escherichia coli
atgaattgcatgatttacatgagggccagcactgagacacaggacgccagccgcgcagaagatgagctcaaaacctttgccgcagctaatggcctgacgatctgcggctggtatcgggagaatatctccggcacgcagctggagcgcccgcagctcaataaactgctgcacgacgccgggccgggctttgtcctgctggttgaaaagctcgaccgcctgagccgcctcacccgttcagagtgggagcagttgaaagaacggatcagagccaaacggctgcgcatcgtctgctgcgacatccccacgacgctggcggtattgcagggagaacagccgaccggggcgggcggtttcgacgttcgcaacgtggtactcgatgcgctcaactcgatgctgctcgatattgccgcagcatgggcccgcgacgattacgagacacgccggaaacgtcaggcgcagggcatccaaaaggcagtagaggccgggaaatataaagggaaacagcccaacacggcactgcataagaagattttgaaatacgccgccgcaggacataaaacgggggagatcgccagactggcgaactgctcacgctccacggtgctgcgagtaacgcgagagcagtag

SEQ ID NO: 27186 - DNA, 636 bp, Escherichia coli
atgagcaaagaaagcgaaaaacacgttgatcgtgtactcaaccaaatttccacccggctggagagtctgacggtctccgggcctaaattaggcgacctgagcactctccggtcacacatgctgcgtctgctggataaggtcagcgagcaggagatcgccgctaccgggcttcgcctgcgccttgagattgaaaatgggcaggtttcctctttggagtcccagctggcgaatctgaatgagctgatcgaggagggtaaagcctgcctacgttctggcgaaccggttcgccctgagtgtggtatggctccggcccttctgcctgaggtgcaaaacgaactggtagcggcgcagcaggtggcagcagccacccgcagcgagctgtcagcctgccagcaccagatcgatatgctcaatgcaaacgtagaccgtgcggctgaggatgcgtatctgagcgcccatctggcctacgtgagcactctgctgcgtgagtccatggatctggctgcgatggctggcgcgaaagtaagcaatggcgcggcttcggttacgctggatcgtcgtctggggctgcttctgcaaaatcagggtatggttctggcgcttaaaaattaccagggggatcgcgctaatgggtaa

SEQ ID NO: 27187 - DNA, 606 bp, Escherichia coli
atgggtaatttccaaaaacttcttgagctgctgcgtgatgcgcagggccctgtgacgctgactaaagcgctgtctgtggcttccggtcaacctctggcgcgtcagtcgctggatttagcgctgaaaagctgtgttgagctgggcgtgccggagcatcatcagaggatgctcaaagatatggttgcagctggtgaggctgctggcgtttctcaggaggagatcgaggggcgaattgctggcgttatgcgccgattctccactgagccaatgaccaaatccaccgctggcgatgtgctggcgcaggcaatgagcggttcccctgtgcagtccgtcccggatatgacgatcacccgcaacctgtcggttgagcaaatccatctggcccggcagcagcagattgccgatcagcagctgctgcgcgagtgtgagagcgctggcgtttcaagtgggcagattgttgagctgagcgaggctctttctgcctctcgtggccttccagacgctgcccgtgcccccggtatcgctgccgttcgccagcagctgactcaggcgcagccgtcgccagcggctcaaggcatcgactggagcgcccacggatggaaataa

SEQ ID NO: 27188 - DNA, 369 bp, Escherichia coli
atggaaataaacagccgggccgtattgctggcctgtctgtctgcgctgcgcttgcctgcgggtgagcgcacttctgatcacgtcatgcagctggcacatctgcgcaccgttctgcgtaacgaggggtattcctcccctgctattcatgacgacgcggctttactcaaagaggctgaggggctggcaaaggcccgccgtgagtggttggctgactccgctgatatgcgtcaacgccatgccgaactccagcaccttgttgcgttaaacctcttacctgaggatgaagcgaggcaggaacagggcgataactaccgggagcaccagttacgcgatccggttaagcaggagggcaaacctgaatatgattga

SEQ ID NO: 27189 - DNA, 2751 bp, Escherichia coli
atggctattaaaatcccggtcagtgcgcagtttgacgctgctgaccttaaacaacagatccagatggtcaacgaccagatccgcgtccttgcgtcgcaggttgggcaggccaataaacagaagtttgagcccattaacctgcgctcaaaagacgatctgaatgctttcatcaagcaaatgcagaagctgctctccattcagactgagctcaagcagaccatgagcaagaccggacagggcgcgactaatccgcttatggctgattggtcaaagatgtataccgatcaggcagtacgcatcaaaaaaatgcagtccatgctccagtttctcggcgtggagtttaacgaccagccagcgccgaaacctaagccgccagcacctaccccctcaaatccttcacctgcgcctcatagcaggccgcaaaacaataaccagcctccggcatggcagaaccatcttagcacgatgctacgcaacgctggcccggttggcggcaccattagcggcgcaatgaatgccgggctttctggcggtgctggtgcaggactcatgggcttagtaggcggtctcgcagctctcggcgtcggcaaaatcattggtgcgattgcggacaagatcggacaggcgcaggacaacgtgatcgggctggataagctctatcgtcaagtgggcggaattgtcagcttttccagcctccagcgtggtgtcatgagtaccgccaaccgtctgggcatgaccaacggtgacgcaatcgcgctggcctccacttattcccgcgccgctaacatccagccgggccagaaccttggcaccggaatgctggtatctggcggtctggcacgttcctacggtctcgacccaaacagcgtcgcgggcacaatcggccaactctccgcctcccgtgtcgtaaataacgatcagcagctgcgccgcatgggcctgctcatgggggaggctatcggcaaatcaggtgcgtttgctcaggctggcgaagccatgcaggcaatcagcgactttgccacccaacaggcacgcatgagcctgaccgcgcctaatgtgcctggctatgcgggtgcaatggctggcctgatgagctcagggatccccggtatggatttgcagggctccaccaacctgctgggccgcatcaatgcaagcctccagcgcggtggtgcaatgggcgacccgtcgcgggcattcatggcccgcattgccctccgcaacggcatcaataacccgatggcgcttgaagtcctccagtctggcggcgctttcggcacaatcagcagcactctggggcctgattcgctgtacggtcagcgtttcggcggcaattatcagggcgatcagactcttctcgatatgacccggcagagcatccatcgcgcctatggttacggccctgattcagtcgtagcgctctctcgccaccttggcgtcggtatcaacgatgcgctggcgctcgaccagatgagtagcgcagacatgagcggcgtttctgatcgcctcagccgcctgaaacttgaccccagcagcgtaaacgcgaccagctacgccgcactgggacagatccagagcgggaaagggttggaggtcatgggcaatgagtacctcaagcgtgggagccttgatgctggcgaacgccagcgccttaccgatgcccttaaagggactgacccggagaaactgaaagacgtactcactcaggtagccgcaacgcatggcccggcaaagacagagggaagcgagatccgcgataacgtagcgaagctcaacaaccagtttgaagactacgcacgccgcgccctgcctgctctcgatgtgatgcgcatggcgctggtcaaaatgaccgggggcagtgaggacagtctgcgccgcgattatgagaaggggatgcgcctcgatacgcagcagcaggcccgccgcaaatacggctggcgtctcgatgcctaccagcaggaaatgaacaccttgcaggacaagggcgtcggtatgcagaccatggggccagatggcgaccgatacagggcactgaaacgccagcagcacctcatgcgtcagcagcagctcaactttgtagagcagggcaatgcaaatgcacacgcagctgcatacggcccgcaaacagcaggagaggctgcgctcgacagcaactatatttcttcaccatccgccgccgcagctggcagcggtgctgccggaaactgggcagggaacaatgtcggcaacgtgaaagacgttaacggcaactggcggcgcttcccatcccagcaggcaggcgtcgcagcgtcggcggggcagctgctgcgctatagcaccggggcattcaaaggcggacgcaagcgcaccctgcgcgagattgtcagcacatatgccagtggcgatccagaggtgcctcgctacatccggcaggcaagcgaatggacagggtacgggccagatcagcaactggacttaaccgaccagaacacgctgctgaacgtgacgcgggccatcctccgcaaagagaacgtgaaaaatgccagcatcccgcaatcagtggttactgagggcgttaacatggcactgaacaatcagaacaactacaagatcgcccctgaaaccatgccagccgggcaacgcggaggaaaaattgatatttcagacgccaatatcaatgtaaacctgcaataccctgatgggcgcacacaaacgcaaagcgtcccggtaaaaagctctttcacgcagccgcgcagctttgccagtcgatag

SEQ ID NO: 27190 - DNA, 1215 bp, Escherichia coli
atggattctccaacacccgaaaaaatccagcttgtcggagccgtcgaggcttacccggatttgatgcccggcattctgtttgtcacctgcccggataaagcaaaatcatgtgtcagtgtcagcacctgccagcgtcttcacgacgaaacgataagtcgtaaggcagaccctgaggcttgcgccagaccatgctcacgatgcgctacgggcgtgattttgtggcgcggtgaatcttcacggctacctcccgttaatattgagcattgccctcgatgcgggagaacagggagacttgttgggaagaagaacggcagcaaggctacaccatggagcgtgtgttgcgtgtcttgctggaatcgcgtcgctgagaacaaaaagggcgttggagcccgtgggaatccgatcatgcagccgcctcttatggccccgtggcttatcggtcacgttgaggacggcgtgcctgtctggtcagtctggattggcgacagccaaagcgaggccatacagcgccagctgctgcgtaatccatcaacagagtttcacaaccagcgccccggagtgacagggtttaatgcgagtggccacccggtttatttatgcgagaaacacccatcgaccccactcaattgggactgggacagggatgccccgacagtaggcacagtgcggttttattgcccagaatgcgagccgaaggcacgcccgctaccgctcgccattccacgctcccccatgcagtttatgacagtgcaggaagcagcagagatatacgccacagtggaggataaagcagacaccgcagccatctgcgccgattgtcaccgggcaccgctgcgaattgccagagaccgatcaggctttgttactgcgtcatgcccttgctgcaatgccagcgctacctcctccggcaataatgtctcacgcaactggattgacccggagccagtccagccgcgctatttcggcgtctaccgggctgcatacagcgatttccccctaagcggtagcggtgcagctgcgctgcaattggcgtccactttacccctaacgctggaacgggtgccgcagctcctgtttaaccgcttacgggcctgcattctggctgcgctgggcgaatgggagtatcttgacgggctcatgattgacaccgaacgtggcgacgggccggaacttctcgccctgctggcacagctacgagcggctgatttgtcgtga

SEQ ID NO: 27191 - DNA, 1212 bp, Escherichia coli
atgagcgagagcaaagatgaattcctgttgtggcccggcgtgtttgatgaagcgctggcccgcgtactgccagccccctcttacatggaatgggtgcagcaggtacggcagatcgcctgctgggctaacatccttaggctgagcgatgcgcaggctatctgcgagcgttggagcgcgtcaggcgttaatgcagccccagctgacgcgggccttattcgcgccgctctccgccctcagtctctcgaaaaactcagcccgttctccatggctggcgcgttcctgcgtgattctggtcttatcccggagattaacgccgggcgatttggctcataccagcccaccaccgcagacctcgccagacgtgaagcacagcgccgggaaatggaagaggcccaccgggtagcactggaggctgacgaacggcagcgccagattgctatccggcaggctacgcagatttataacaaggccagtctcgatcccgcgctgtcgccatactggcagggcaaatgcagtgcagccgcactgcccctaccgctcccggatgacgtaaaagccgcaaactggcgcacctttgaaaaaggcgcatccagcaagggaatttactggaatcacagcctgatcgtgcctttgtatcgcgttgatgacgagttgcagctgggcatgagcaccatcgagataatttgcgggcgtcctaatccagccactgagctgtcattcactggggcaaaacgtggcctgaaaggggctcagcgtggaggatgcttctatccgttcaatatcgacaaggcccgccatagtgcgccgctggtcgtctgtgagggcttttcctccggcatggcgctatctgtcgctatggggcacgccctgcccgtattctgcgctatgagctgcaataacttcgccgccgtcattgatgaactgcgcattgtttacagcagttgcccgatctacatcgtgggcgacgtgggcgtgggtgaggaaatagctcagggcatcgctgagtccagcacttcacgccgtccgccagtgtatgcagtaccgctctcccgcgtcttgtttgaagacggcaacgatccttttgacctgctggcccgtcatggcgtggataattcccgcgccctcctccgctcattgttccgggaggcccgtattggtcgtgacggtactctgtccgggccgagctcatcggatgccagtcacaatatttga

SEQ ID NO: 27192 - DNA, 288 bp, Escherichia coli
atgaccgatcaggactttgaaacgatgctgtttaacgagtccagcaagaccgccacgctgtttgtggcccgcgctgtgactgacctcgacgcaatgctgggtgaaggttacgccgtcgctaaccctgctgttctggcccagtggctcgcggtagccggttctcaaatggttacgctccagcagctgcacggcgcaaacggtctggcaactcaaatcgagcgtcttggggccatggctgacgccattgaagcaagcgccgcagctgcgcacacggggagaatgcagtga

SEQ ID NO: 27193 - DNA, 432 bp, Escherichia coli
gtgaaccacgaacaaatccgcagcgataccacggcggagctcactcgcattattcagcttgccctctctcaatggcaccgcgagggcggcaaatcggcagggcctgagggcccggtgattgcgttcggtcagcgagtcatgcgcggcggggtgatgatgatagtgggacattccatacgtgggcacgaatgggccaccccggcctattacgctgatgcagcccgcagcctgcgcaaagataaatccggcaaaatgtacgccagccactgccagatcgagagggaaacattcacctgccagctgctcgcccgcattatgggactgacgccagctgcttatcgtggtttgcctgacgtggctccagagtggcagacaatcagcgaggatgagcagcggcagatcgttgagttcattagcagctgtctggcgtaa

SEQ ID NO: 27194 - DNA, 492 bp, Escherichia coli
gtggctatcggtgatgatgctatccgggatgctttctatttttttactcagcaagccgccgaaatggatgataaagggctccctcaggaagtttgggaaacgccttgcttcacctatttgatgacaaaaaagcaatttaatcagatgaaggttgtttgtcagaaaagcggctgggacatgcctacatcacctgcaataccaattacttgggctatgttccggcatgttctttctgcgcgtaactcgaaggataaattaagctggcaagagtgcgcagagattctggctactgctttttcagtgcagagcaatgtgtacgtcaacagggattattcagagcagactattgtgctcaatgctattcgtcgtataagggtggctggggcagggtttttcgcaatggcgatagttgatgtctctgaaaataatttggcccccgtgactgcataccatgcaacggaggccaaatgtaaagctatacagcgagggtga

SEQ ID NO: 27195 - DNA, 516 bp, Escherichia coli
atgaaagagaacaaaacagccgccctgagcctcaggctcccggcagatctcatgcagctgcttgatgagcgagccagtgctgaacacctcacccgcacagatatagcgctggctgcgctccgggagtacctcggcgtcgctacagctccggcagcgtctgacaagctcgatagggtgatcgaactactggaaaccattgctgggaatgccccacagcgtaagacagccgcaccacagcgtcagacagtgcaacacgctgaagcaacacaacgtaacacgccgtcaggcaatgaaatacagcgtaatacggcgcgagccgccgatcctcgttttcatgccgtagaccctgaggccgatgccatgatagtgcgcatgagtgctgagggggccgggctggctgacattacgaatgcgctcaatgcgctgggctttaccagtgcgaccgggcaggagtggacacgcagccgcctgcgggactatcggcataagctgcgggatagcgggttactgaattag

SEQ ID NO: 27196 - DNA, 561 bp, Escherichia coli
atgctggatacagagaagcagaaacaggcccttgctactgcaattcctgttaacgagcagaaagcagaactggaaaaactgaaagtactgcaagcatcgccggactgtaacacgcaatgccagcagctggttgcttattcgatctctgaacttgaaccggtggcgaataatactgaattacacaaaaacaacctgagcaaagcggttcttgcgtcggtgattgtggcgtttacgttagataaaccatcatcaggaaaagtttctcagggaactgcggctacgggtaagactggttcgtcggctattgaagatattgttaagggtggtgaacaggcggggaaaaatcttgctaaaaacgaagctgtacttcttaatgatgccagcaagcaattagatgaatacgtaaattcttttgcgggtagcaagtacaaaccagcgacagcaattggtgccgtagatcctctaacgggaaagatagtgacgacatctaatggcgctgtacctgccgtagttgctccggaattgcaggcttatgctgataagttaggcgggttggggtaa

SEQ ID NO: 27197 - DNA, 381 bp, Escherichia coli
atgttattttcattaagctggacactaaatggagtcgggggaaactgtgataatcctttatggagtgatgttgaaattaaagtattggctttaagaaatgaatatgggacgataacattggatattcatgataatgatactggtcctcaaatgttacaaataagagctgaagcaggtaattatttagtaatgctaggcgaaatagtaaatgacgattatgaagtgcgaacttattacaataaaaaaagtactaccgaaatggtttgtatattgggtgactattggcctaataatcagataataactgatttttcattcgtcactctggttgttagcgaattttttcatactggtaatgtacaaaaaaaactgctgagttag

SEQ ID NO: 27198 - DNA, 10323 bp, Escherichia coli
atgaacagccttttttaccggattgtctttaataaagcccgcggcatgctgatggttgtggctgacattgcccggcgcggacggggaggaaatacacgtcgcggacgttgtgctccggcagggattatcgcctccctgtccccggtttgttttgccatctggctggctgccggtttgtgctcgtttcctgcttattccgctattgtcgctgaccgtaatgcgccgggaaaccagcaggcgacggtgatttccacggcaaacgggttgccgcaggtgaatattcagacgcccggtccggaaggggtttcacgtaatcagtatacacagtttgatgtggacagccggggagccattttaaataacagtcacagtaatacacagacccgtctggccggcaatattaccggtaatccctggctggcaaagggtgaggccaggatcattctcaatgaagttaacagccgtgatcccagccggctgaatggttttattgaggttgccgggcgtcgtgcggaagtggtgatcgctaatccgtccggtattacctgcaatggctgtggttttatcaatgcggaaagaacgaccctggccgccgggaaagcgctgatggacggcggcagactgaaaggtttcgatgttgacaaaggacggctcagtattgaagggcgcggactgctggcggaggacagtgactacactgcgctgattgcccgggcggtgaatgtgaacgcccggatgcaggtcggcggtgaactgcggatcaccaccggtcataacgaaaccgatccccggggtaatatcacccggattaagcccggtgaggatgccgggaagccggcgtttgcgctggatgtgtcggcgctgggcggaatgtatgccggtaaaattattatggaaggcaccgaaaaaggcgtgggcgtacgcaatgccggagagctgggggcgatggccggcacattgtcactccgtgctgacggtcaactggtgaacagcggtgtactggccgggcagggggatctgagcgtcgccgcgaaaggtgacctgcgtaataccggcagcctgacggccggaggagacgttgaactgactgcaccgggaacactgaataatgaggggattatccggggcggacaggatgtcaggctgacagcagcgggtattcacagttcggaaaaaagtacgcttctggccggtgctccggcagccacaactgacggaagaaaaggcgatttagttctgacatcgggcggggaactgaaagcccggggacagaataaagctgccggtaagatcgttgcctccggaaccggcgtggatgtcagtggcagccggacagaggcaaaagccgtcacactgacagcgacggaacgtgggatcagcactgccggtgcggaattacgcgggcaggatattgtcagtctgcgggcagcaactggcatcgataataccgccggccgggtctccggagggagactgactatacattccccggaaatcacgaataccggcggccttctgaaccaggagggcacacaggatctgctgctcagccagcataccctccgtaacaacgggggaagtatcaccagtgccggacgaattcatctgaaagcggatgtactggacaaccgctctggtacgcttgcggctgcgggacgggatttgagtatcgaaaccggcgatctggataaccgtcagggcaaggtgcagctttccggtgcaggtgtgttatcccttcagacaaatgtacttcagggacagcagggcgcgttgctgtcatccggtgctctccggctgaaagccgggctggcggatttatccggtggctatacgcaggccggaaaaatcaccgcagaagccgggatactgacgaatgacgatgccgtgttgtctgcccgcggacaggaagggatgcaactgacggtatccggaacgctgagtaaccggaacggccgggcggaaagtgccggggacattacgctgagcagtgcgaaactggataattctgccgggacactgcttgccgctgataaagggagtttatccctgaccacaccgggagaggtgctgaatgataaagggcgtctgattgccgggcggcatatcctgctggatacggcagcgctgaccagccgggaagggctgatttcagccaccggcggcaacatgacactgaacagccgtcaggcagttattaatgaacaggggcgaatggaggcccttaacaggctgacactgaatgcagccggattacataatcataacggtaccatcaccggacaggatgtcaccgtcggcaccggtgcggcaaaacttcacaacaccaggggaaatattgcggcccgggatacgctggcgctcagttcaggagaaacggataacacagggggactgattcaggccggggaaagcctggttattgacacaaataaccggcagctgagtaaccgtgagggcgggcagatactggccggtgcactgacgttatcggcagggaacacggataatcaggcgggggttattgcctcatccggtaatgcacagttgcagaccgctgatctgaacagtgacagcggaaaaatactcagtcagggcgatttgacactgaatactgcggtgctccgcaatcagcacgggctgttgcaggcagacggggctttaacgctggatacccatggaaacgggttaatcagtacagacagcggtgaacagggcggtattattgccggcggggatctttcactcagaacaggccgcctggaggcggcgcagggtgtgatacagggtcgcaatatcacgctggacacgcagggacaggcgctggatcaccgtggcgggtatctggcggcccgggagagtgtcagactggataccggcgaaacggataacagcggtggtcttttacgggccggcacatcgctgatactggacactcatgaccggaaactggttaatcagcaaagcggagagctgggcgggattgttgccggtgatcgtctgacgcttgaagtgaatggtctggataaccatgacggtgtcattgtcagcggcggtgacggcgtgatgaccaccggtctgctggataatacgcagggacagcttgtcagcgcatccggctcgctgtcactgacgacaggagaagtcaataaccggcaggggctgatccaggccgggaaacagctgttactggatacccggggacagacgctggttaaccgtgacagcggggagctcggggggatccgggcgcagggggatctgtcccttctcagcggcagactggataatcaccaggggattgtgagtgccggcggacaggccgggctgaaaaccgtaatgtcagataacactgccgggttgatcactgccctgcgggggctggcaattaccggcgggcagctggacaataccgccggcagtattctctccggcgccggactgacgattgacacacaggggaaccgcctgattaaccgtgatacggtttcccgtggcggtatctctgctgccggtgaggtgatcattacgactggggagacggataaccggagcggacgtatcgtgtctgacgggaatgccgtgttgcataccggcaacctgaaaaacagcctcggcctgatagcggggaatggcgggctgtcagtgaacagcggtgagaccgataacaccgggggacgccttcagtctgccggcgatcttctgattaacaccggtacggctgtcttggtcaataccggcggaaggatagccggtgaccatcatactgctgtcacgacctctcagcttactaaccgggagggaacggttcaggccggagaaagactgactctgtcagtgggtcaggcgctggataacggaaaaggggcattgttatccggcggccggctggcattgtcggctgaccgtctggataaccggcaggggcaggtgattgctgacggtgacagtcagctgaatgtacagacggtactgaataatgaaagcgggcttgtgcactcagccggcccgcttgagattgtggcttctgaaatcaataacaggcataccggacagagcggtaaggggctggaggcagggaaactcacgcttgccgccgatattctggataacgcggaaggggcagcgcgcagtgtcagccatctgaccgcacgggtaacccgggtactggataatctgcggggtctgctttcctcacagaaaacgctctctgttcagggacaggcgctgacggtgaacaaccgtgaagggatgctgatagccgatgacagtgcggatatttctgcgcgggcagtgagtggtgacggacagattttgtcccgggatcgcctgacggttcatgtggccgacgatttccgtaataccggctcggttaaagcgaacggtgatctgacgctcctgaccgaccgccggctgattaatgacggggtgattgccggacagcaggggctggagatccgtgcggataatctggtcaatactgttcagggggatatcacggcgaaagaaacgcatctgaacgtggccggcacactggagaatcgcgggctgattgacggtgaactgacacacctgacgaccggtgtgctgaacaacaccggcagcgggcggatttttggtgatcatctcgctgtcgaagccggcgttctgaataatgaccgggatggtgacaaagccccggtaatcgcatcccgtgatcgtctggatattgcggccggaacggttaataaccgtgggcatgcacttatcaccagcctcggtaatatggtttttggccgtcatctggataatgattatcgtgcaaccggccggggcgatgtcctgaataatgacggtgcatttattgaggccggcagcgatgcatttatcggcatgcagacggtgaataataccaaccggaaactggaaacacatacggtcctggtggagaaaagtcagcatcatgaaggcgttcttaacggcagtaccacccgttatgactgggcagatgttgatctcagcaggaagaataaatatggcgtccatacagcaagaatgccggatggcagcgaaaatgatcgtttttatgaatataactatacccggaccgtcacggagacacagatagcgtccactgatccggggaaaatactggcggggggaaatatccggtttgataccgcccgtctgtttaatcatgacagccagattgttgccggcggtagcctggacgggcatatcggtaccctggataaccgggcgacgcagggtgagcgggtgaccacggatgaaggatggcagacacggtggtggccgaagaaaaagaaaagaccggttggcggaaccaaaacatcacagggaagagagaccgatgattaccgtccggccccggtaacggaaaccattgatctgaaaagcctgacctggcagggacatgctgtggtaccggacaaaacctggcgcgggagtgaacggcaggtgtctgcggtgaatgaaagtgcagagggcgcaggaagtcattccgtggccggagcggacagccgggtgaatatcagtaccggtcaggctggtatggtctcaacggatattcccggcgtggtgcatgatcgtccgttactgttacctcccggacatacgttcagcctgacgctgaaaccggaaaccgggagcgggcagcagatcactccggtgatccgcacggtcagtcctgatgtccgtttaccggataacagcctgtttaccctgcatcccggcacggacagccactacctggtggaaacggatccccgttttgtgaataaaaaacagtggttgtccagtgactatatgcagaatgcctttacggcctcccacgataatgtgcataaacgtcttggtgacgggtattatgagcagagactggttcgtgatcagttgatccagctgaccggggggcgttataccgctaatcagagtaatgatgaagctcagtaccgtatgttgatgaataacggtattgccttcggtaaacagtatcagttgatccccggtgtggcgctgacgccggagcagatggcgctgctgacgtcagatattgtctggctggttgatatcccggtcacgctgagtgacggcagcatacaacaggtccgtgttccccaggtctatgcgaagctcagggaaggagatttaggtggtgacggtgccctgctcggcggacagaatgtcctgctgagtgcagaacaggatattaccggcagcggcaatatcgtgggtcgggatgtgacacaactgagtgcacggacgctgatcaacagcggcagcatcagtggtaaccgggtcagtctgctggccggtgaagatatcctgaataccggcgggcagatactgggcggcaaagccgtgtcactgctggccggcagaaatattaccagcgaaaccaccacccgcagtgacggtgtgaaccgctgggttgatcgccgggccggtatttattcagagggggcagatggtcatctgacactgcgtgcgctgaacaatatcaccctgaccggcagcgatatccggaatgccggagagaacgggaagacgtcactgacagcaggtcatgacctgcgtctggatacggtcagtacagtccgttctcaggaaagtgactggggtaaagataactggcgccgggagcatatacagacggaaagtggcagtcgtattcatacggccggagatttggtgttgtctgccgggcgggatatttcggccactgccgctgatgttaccaccgatgccgcgctgactgcacaggccggacgggatttacggctgaacgccggtaacagcgtgacggatctggcggagcacagtaaagaaagcagtcgcgggctgttatcggggcattcatctgagcgtcatgatgaggtccacacgcgccaggccgtcagtactgaactgtccggagagacagttcatcttcagtccgggcgggatatcagtgtgtcaggcagcaatgtggtcagcagcagaaatctggcattgcaggccggacgggggctggatattaccaccgcaacggaatcacgggatgagactcaccggcgtgaagagaagaaatccggcctgatgagcagtggcggtattggttttaccgtgggtaaacagtctctgaagcaaagcacggacagcgacagccggctgaataaaggcagtacgctgggcagtacggacggaaacgttgtgatgacggccggcggggatataaaggtacacggcagtgatgttgtggcgaaaaaggatatcagcctgaccggtcagtctgttgcggtaaccgcagcggaaaacacacgcacggaactgacaaaaaccgaacagaagcagagtggttttacgcttgccctgagcggtactgccggtgcagcactgaataccgcagtacagacggccggagatgcaaaagaaacggataacggccgcattaaagcccttcagtctattaaagccgggttatccggtgttcagggggctgaagccgcgcgtcttgctgagacacagggggatgcgggttctgccttcggaattaatctctcttatggcagccagtcttctgtatcagaaaccgaaacccgtcagtccacggcgcagggcagcagtatcagtgccgggcaaaacctgacagtgaatgccggcggtaaaacggcaggcagcggcaacattgatgtcaccgggagtgagttacaggccggtggtcacgccacactcaacgctcagaatgatatcacgctgacatccgcgcagaacacccggacggtggacggcaaaaacagcagtaaaggcggttccgttggtgtcggtgtgactttcgggtcaaatggtgcgggtttcaatgtgaatgccagtgtgaacagaggtaaaggatttgagaaaggcaacagtcagtatgccactgacagcacggtaaatgcaggcaaaaccctgaccctcagcagcggccatgacaccaccctgaaaggtgctcaggttcaggggaataaagtcattgcgaatgtcggcaataatctgacactgcaaagtgagcagaccactgataattatgactcaaaacaaacccgcttaagtgcgggtggtagcgtcggtttcggcaatggttctctgaacatttcggccagccgggataagatgcacagtgaataccgttcagtacaaaaccagacggggatttttgccggtaaagagggttttgacattacggtcgggaagcacacccaactggatggtacggttatcgcatcagaaggaaatgcggagaaaaaccgccttgacaccggtacactgggctttaagaatattgagaataaagcagaataccgggtggaacaccagggcggtagcctgagcaccggtggcggtgtgggggggaatctgatatccaatatgggcagtgcgctggccatggggggtaataaaaaggaaagcagccataacaccacgcatgcggcagtctctgacggtaaatggattatccgggatacagaacatcagacgcaggatgtggcgacgctgagccgtgatacggagaatgcccattcggcgctgaataaaatctttgataaagagaaagagcagaaccgggtaaaagagcagcaactgcttggtgagattggtgttcaggtcagagatatcgtgcggactgaggcgacaatccgagccacggaaaaggcgaaggcagactttgatatccgcaactataaacaagatgatatcgataaagcgaaagcggagctgattgctgaaggtaagagtgtgggtgacagggatatcactgcgctgctatttaacaaagaggttgagaaaaacttagcggaatcgggctttggcaccggcggtaagtatacccgtgccatgcaggcggcaacggcagcggttcagggcgtgatgggcggagacctgaaggcggcgctggcggatggtgcagcaccgtttatcgcaaatgaaataaaaaaacagatcccggatgaagaagccgatgccaacctgaaacgcaccattgctcatggtatagcgaatgcagcccttgcgctggctaaaggtgagaatgttgcggcgcaggcaaccggggcgatgacaggggaagccatcggtatactggccgaatatatctacaacaaacagccgggtgaactgacagaacgggaaaaagagaatgtcagtgcctgggcaacactggcgtcaggtcttgccggtggtctggcaggcggagatacacagagtgtggcgaatgcagcccgggcagggaaaacaacagttgagaataacttattatcaccagagaaagacgatcgccggtttaaagcgctcgaagcccaaaaggccggacaaaacctgctgaaggcttcacaggatattttttatctcacaaatgaagataaatataatgataagttaattgccggttataaagcaggaaaactggatgatgcaggtaaagcagagctggcccgttttcttaatgagtacggaacacaattacagctttacagaggaatgagtgaagcagaagcgtctcaggttattgattcaatattaaagtatgattcaatcggcccggttttaacaaaagaatataacgaagcataccgatatcttaattcggccggagttcatttgtctcaggccgtgataggaaccgatgcactgttagccggacccggcagaatcagccagttaatgcgtttatcattagctgccggtggttcttaccagacaggaaaggggatagcccaggtatctgatggtaaaattgctgaaggtggtacaaatatcgcgctgggttcagccgctatattcggcggatatgttggcaataaagttgttggtaagccaagtggtggaattatttcgcctgaatctaaagtaattcaagaaagtagctgggttttagacaaaaaaacacacacatcgattcctaaagtggaagctgagttaatagataaagagtcaggtaaaatatttaaagatacaaatcaaggaaatcggcctgactattttcttggtgataaaagcagaccaactttaattaatgataggatagaggctaaaatagaaaaaaatcctagtaaagatttaccaaatggaaatatggcttctgctcatgctgaagttggtactattcaacaggcgttcgaggatggtatcactgttggtcgagatatgaatatgagggttacaaaagagcctgtatgtggatactgccgtggagacattgccgctatggctgacaaagcaggtttaaaatctcttactgtttatgaggagagcacaggaaaaacattatattggaatcctggaatgaaatcactcaaggagaaaaaataa

SEQ ID NO: 27199 - DNA, 1746 bp, Escherichia coli
atgctatcttttttatccccgttacagcggttgtgctttttcccgtttctctctctggtggtgagcgcggtatctttctctttatctgccaaagaaacaacttccccgttattccggtccggtgaacatccttttattcatcaggaacaacagcaacagtcacgcgaagcatcgctgatgccgaaagcgccggatatacgcttatccccgccgtcctctgtatcctcccggcttatttttccggcagagtcaccgtgttttcagatcacacaggttgtaactgacgggggcggggcgcttcctcactggatcccggtacagcgtattgtcgatcaggcaaaagggcagtgcctggggcgtgacggaattaatcttctgatgagtgcattacagaaccgtctgattggacacgggtatatcacgacccgtgtgctggcaccgtctcaggatcttaaaaccggtacgcttcgtctgctgattgtgccgggaacggtcagggatatttatctgaatacaggcagtgatgactatatccggctgtacagtgcgttcccggcccgtaagggggaattactggatttacgggacattgaacaggggctggaaaaccttcagcgccttcccacggtcagtgcacggatggtcctgaagcccggtgacaggcccggacagagtgatattgtgattgaacgctcgcagtcccgttactggcgtaccggtgcctgggtggatgattccggcacggaaagcacggggcgatatcagggcggagtaatgctggcgctggataatccgttgtccttcagcgatttgttttatgtcaccgcaagccgggatctgggatttggcgggcgtcataaaagtacccacagttattccgcacattattcggttcctctgggatactggctggccggcataaacctcaacgattaccgttattatcagaccgtggccggaaaatataccgacattcattacagtggtaaaagccgttccctgaatctgcaactgagccgtgtgttacatcgtggtgccagttcccgtacgacggccagttatgacgttcttctgcgtgagacccgtaattttattgatgatacggaaattaccgcccagaaacgccggaccagtgcatggcgtatcgggttatcccaccgccattatatcggggcagccaccctggatgccagggtgagctatcagcggggtacccgctggtttggtgccctgccggccccggaagaagcctgggatgattatggcggcgttaccgccttatcaaaaattctgagctggaatgcctcactgaccgcaccgttttctctgggggaacagtctttcagctggaataccacctggcgcaggcaaatgagcgccacccctctgaccccgcaggacgaattttccatcggcaaccgctggagcgtgcgtggttttgacggtgaacgtacgctcagtgcctcaaatggctggctggtacagaacacgctctcctggcagacacctctgcctttgcaggagctctatctcggggccgattacggggaggtcagcggtaacagtaccactcagagtgatttaaccggacaacatctggtggggtcagtgctggggatccgtggcgcattcgggaataccggcgtgagttatgacgcttctgtggggatccccctctcaaaaccggccggatttaaaacagaccctgtggtcaccacgttcagtgtgaactggaactggcagtga

SEQ ID NO: 27200 - DNA, 1149 bp, Escherichia coli
atgtgcgaactcgatattttacacgactctctttaccaattctgccccgaattacacttaaaacgactcaacagcttaacgttggcttgccacgcattacttgactgtaaaactctcactcttaccgaacttggccgtaacctgccaaccaaagcgagaacaaaacataacatcaaacgaatcgaccgattgttaggtaatcgtcacctccacaaagagcgactcgctgtataccgttggcatgctagctttatctgttcgggcaatacgatgcccattgtacttgttgactggtctgatattcgtgagcaaaaacgacttatggtattgcgagcttcagtcgcactacacggtcgttctgttactctttatgagaaagcgttcccgctttcagagcaatgttcaaagaaagctcatgaccaatttctagccgaccttgcgagcattctaccgagtaacaccacaccgctcattgtcagtgatgctggctttaaagtgccatggtataaatccgttgagaagctgggttggtactggttaagtcgagtaagaggaaaagtacaatatgcagacctaggagcggaaaactggaaacctatcagcaacttacatgatatgtcatctagtcactcaaagactttaggctataagaggctgactaaaagcaatccaatctcatgccaaattctattgtataaatctcgctctaaaggccgaaaaaatcagcgctcgacacggactcattgtcaccacccgtcacctaaaatctactcagcgtcggcaaaggagccatgggttctagcaactaacttacctgttgaaattcgaacacccaaacaacttgttaatatctattcgaagcgaatgcagattgaagaaaccttccgagacttgaaaagtcctgcctacggactaggcctacgccatagccgaacgagcagctcagagcgttttgatatcatgctgctaatcgccctgatgcttcaactaacatgttggcttgcgggcgttcatgctcagaaacaaggttgggacaagcacttccaggctaacacagtcagaaatcgaaacgtactctcaacagttcgcttaggcatggaagttttgcggcattctggggctttgttgaataaatcagatttcgggtaa

SEQ ID NO: 27201 - DNA, 915 bp, Escherichia coli
atgcttttatataaaatgtgtgacaatcaaaattatggggttacttacatgaagtttttattggcattttcgcttttaataccatccgtggtttttgcaagtagttcaaagtttcagcaagttgaacaagacgttaaggcaattgaagtttctctttctgctcgtataggtgtttccgttcttgatactcaaaatggagaatattgggattacaatggcaatcagcgcttcccgttaacaagtacttttaaaacaatagcttgcgctaaattactatatgatgctgagcaaggaaaagttaatcccaatagtacagtcgagattaagaaagcagatcttgtgacctattcccctgtaatagaaaagcaagtagggcaggcaatcacactcgatgatgcgtgcttcgcaactatgactacaagtgataatactgcggcaaatatcatcctaagtgctgtaggtggccccaaaggcgttactgattttttaagacaaattggggacaaagagactcgtctagaccgtattgagcctgatttaaatgaaggtaagctcggtgatttgagggatacgacaactcctaaggcaatagccagtactttgaataaatttttatttggttccgcgctatctgaaatgaaccagaaaaaattagagtcttggatggtgaacaatcaagtcactggtaatttactacgttcagtattgccggcgggatggaacattgcggatcgctcaggtgctggcggatttggtgctcggagtattacagcagttgtgtggagtgagcatcaagccccaattattgtgagcatctatctagctcaaacacaggcttcaatggcagagcgaaatgatgcgattgttaaaattggtcattcaatttttgacgtttatacatcacagtcgcgctga

SEQ ID NO: 27202 - DNA, 213 bp, Escherichia coli
atgcggctgcgtctcgcgcggatttgcgggactggtgatgtttttgccgaacatgcagcctttcgccgtcagcgaccagaattttttgatgttgttaatcgcagtgcggctgtatcgttcacgttgttcaacgatccccagcttcgccatctggtgatatgcctgattagccgtcaggcgtataccatactgtttcagcagtgcactcagtga

SEQ ID NO: 27203 - DNA, 579 bp, Escherichia coli
gtgaatttagcacttcgtgaaggtgccaaaagatggtcaattagcgaccccaaaattgttgaggattggtttaacgatagctgtaagcgaatcggtggacatgttcgttcaatttgtcgatttatgaaggcttggagagatgctcaatgggatgtaggtggaccatcatcaatcagtctgatgaccgcagtggtaaacatccttaatagggaagaacataatggttccgacctcgctgggacgatgaaactcgttgccaagttactgccggatgagtttaatagaggtctggaaagtcctgatgacactgatactaagttactcttccctgccgaatgggatcaaaatgtgcatcaaaagaccattgttgaaacaatgaagaccttgtatgagattttagtcgatgcagagaatgcaaatactagagaagatgctttacacaaaatgaatgaggcatttggaaagcgtgtgactaatgctcagttaataacatcaatcgctgcagctcccgcatttcatgtttctccatctagggagccagagccaagaaaaatcaataaaacaatggtaagtggctaa

SEQ ID NO: 27204 - DNA, 222 bp, Escherichia coli
atgaagaatgaaatactggaatttctgaacaggcataatggagggaaaaccgcagaaattgcggaggcgctggcggtaacggattatcaggcacgctattacctgttattactggaaaaagaaggtgtggttcagcgctctccattaaggcgaggcatggcaacatactggtttttgaaaggagagatgcaggcgggacaaaactgttcttccacaacttaa

SEQ ID NO: 27205 - DNA, 297 bp, Escherichia coli
atgacacaagcaagctacagcaagccaacacagcgagaaattgatcgcgctgaaactgatttactcatcaacctgtcaacgcttacccagcgcggtctggcaaagatgattggctgtcatgaatcgaagataagcagaacggactggagatttattgcttcggtcttgtgtgctttcggaatggcatcagacatcagtccgattagcagggcttttaagtatgcgcttgatgaaatcacaaagaaaaaatccccggccgccaccgaggattttaagcaaattgatatgcaattctga

SEQ ID NO: 27206 - DNA, 231 bp, Escherichia coli
atggtcaacaaggctattaaagcggctattgactcagtaggaagtcagcaaaagttagctgatgcctgcggtgttaagcagccgtctgtatgggcttggttgcatgggaagaaaagggtatccgctgaaaatgccaagcgcattgaaatggctaccaatggaagcgtccctgcatacctgattcgccctgatttatccgctttgttccccaatccgaacaaagcagcttaa

SEQ ID NO: 27207 - DNA, 234 bp, Escherichia coli
atgtcggactgtcaccctgttttattgcccgaaggccctttctcacgcgaacaggcggttgccgtcacaacagcttaccgcaatgtgcttattgaagatgaccagggaacgcatttccggctggttatccgcaatgccggagggcagctacgctggcggtgctggaattttgaacctgatgccggaaaacagctaaattcgtatctcgccagtgagggaattctcaggcaataa

SEQ ID NO: 27208 - DNA, 207 bp, Escherichia coli; identical to SEQ ID NO: 16402

SEQ ID NO: 27209 - DNA, 2928 bp, Escherichia coli
gtggacaaggatgcctccgtaaactggcaggttaatggtgtgaaaggtgacaacctgcataaaatcggcgaaggaaccctggttgtacagggaaccggtgttaatgagggcggcctgaaagtcggggatgggaccgttgtcctcaatcagcaggctgacagttcaggacacgttcaggcattcagtagcgtgaatattgccagcggccgcccgacagtcgtgctggcagacaaccagcaggttaatccggacaatatatcctggggctaccgggggggtgttctggatgttaacgggaatgacctgacatttcataagctgaatgccgccgattatggcgcaactctcggtaacagcagtgataaaacggctaatatcactctggattatcagacgcatccggcagacgtaaaagttaatgaatggtcatcatcaaacaggggaacagtaggttcattatatatttataataatccctatactcataccgtcgattattttatcctgaaaacaagtagttatggctggttccctaccggtcaggtcagtaacgagcactgggaatatgtcggacatgaccagaacagtgcacaggcgctgcttgcaaacagaattaataataaagggtatctgtatcatggcaagttgctgggaaatattaatttctcaaataaagcaaccccgggtacaaccggcgcattggttatggacggctcagcgaatatgtccggtacatttactcaggaaaacggtcgtctgaccattcagggccacccggttatccatgcttcaacgtctcagagtattgcaaatacagtctcgtctctgggcgacaattccgttctgacacagcccacctcatttacacaggatgactgggagaacaggacgttcagctttggttcgctcgtgttaaaagatacagactttggtctgggccgcaatgccacactgaacacaaccatccaggcagataactccagcgtcacgctgggcgacagtcgggtatttatcgacaaaaaagatggccagggaacagcctttacccttgaagaaggcacatctgttgcaactaaagatgcagataaaagtgtcttcaacggcaccgtcaacctggataatcagtcagtgctgaatatcaatgatatattcaatggcggaatacaggcgaacaacagtaccgtgaatatctcctcagacagtgccattctggggaactcaacgctgaccagtaccgccctgaatctgaacaagggagcaaatgctctggccagtcagagttttgtttctgacggtccagtgaatatttctgatgccaccctgagtctgaacagccgtcctgatgaggtatctcacacacttttacctgtatacgattatgccggttcatggaacctgaagggagacgatgcccgcctgaacgtggggccgtacagtatgttgtcaggtaatatcaatgttcaggataaagggactgtcaccctcggaggggaaggggaactgagtcctgacctgactcttcagaatcagatgttgtacagcctgtttaacgggtaccgcaatacctggagcgggagcctgaatgcaccggatgccaccgtcagcatgacagacacccagtggtcgatgaacggaaactccacggcaggaaatatgaaacttaaccggacaatagtcggttttaacgggggaacatcatcgttcacgacactgacaacagataatctggacgcggttcagtcagcatttgtcatgcgtacagaccttaacaaggcagacaaactggtgataaacaagtcggcaacaggtcatgacaacagcatctgggttaacttcctgaaaaaaccctctgacaaggacacgcttgatattccactggtcagcgcacctgaagcgacagctgataatctgttcagggcatcaacacgggttgtgggattcagtgatgtcacccccacccttagtgtcagaaaagaggacgggaaaaaagagtgggtcctcgatggttaccaggttgcacgtaacgacggccagggtaaggctgccgccacattcatgcacatcagctataacaacttcatcactgaagttaacaacctgaacaaacgcatgggcgatttgagggatattaacggcgaagccggtacgtgggtgcgtctgctgaacggttccggctctgctgatggcggtttcactgaccactataccctgctgcagatgggggctgaccgtaagcacgaactgggaagtatggacctgtttaccggcgtgatggccacctacactgacacagatgcgtcagcaggcctgtacagcggtaaaacaaaatcatggggtggtggtttctatgccagtggtctgttccggtccggcgcttactttgatttgattgccaaatatattcacaatgaaaacaaatatgacctgaactttgccggagctggtaaacagaacttccgcagccattcactgtatgcaggtgcagaagtcggataccgttatcatctgacagatacgacgtttgttgaacctcaggcggaactggtctggggaagactgcagggccaaacatttaactggaacgacagtggaatggatgtctcaatgcgtcgtaacagcgttaatcctctggtaggcagaaccggcgttgtttccggtaaaaccttcagtggtaaggactggagtctgacagcccgtgccggcctgcattatgagttcgatctgacggacagtgctgacgttcacctgaaggatgcagcgggagaacatcagattaatgggagaaaagacggtcgtatgctttacggtgtggggttaaatgcccggtttggcgacaatacgcgtctggggctggaagttgaacgctctgcattcggtaaatacaacacagatgatgcgataaacgctaacattcgttattcattctga

SEQ ID NO: 27210 - DNA, 474 bp, Escherichia coli
atgaagtttaaaaaaatgacagaagaacaaatacagcttgatgtcgaaaaaataaatgggtttctgtcagcaatagaaatgttgaatgtcgcagataatattggcgttgactacacatttgttcgtttaccaccggagcggacattgcttaaatctgttgagagaaatattacagcagcatatccggatacgattgttgcgaactggcatattagcctggagcaggttaacgaaaaacaacttgccgataacatcaatatgtggtttttccacttcggaaatgcagcgattttgaacgataaattatctgctctgcgtccaggatttatggatatgctaaaacaggttgtttatgcacctaatatctatcgagtcaccatgtctctgccagtatggtatgcaataaactgggatatatttgctttcgacacaaagaatggttttttcttgctggagtttaacttcaatgcgtga

SEQ ID NO: 27211 - DNA, 882 bp, Escherichia coli
atgccattcaataataaaaacctgtttattactctcttatccctctgcacatttcagacttacgcagcacaatgcactgcggaaatcttcgctaaaaacaaactgaataacttcatccttcagagccagcagataagaactgaaatccccaagtctgtatcaatcactattgatagtcccgatgggtatctccgcacatcgggtcaaagcaacttcagtcaatgcggtgagctaattggcggccgtgtgaaagaggtcaaaacctcaacaggccagaaaacagttttcacggcaacctctgaaattcagttgaataaaacggaatttggttggcgcatccatcaggactcaaacggggttatagccgataaaaacagtcagaaaaccacgcaggtatatcggcagactcttgagggaatgtaccaacttaacgataaaggaattatcagccgcgcggttagtcgttcggttatcgcggccacaaaaccggaagataaaaacaaaaccgcagtgagcataattgactacgcctttaattcatcaggattactagcaagcgcgacaagtaaaggaagtatggcgatagataataatacgattgtatatagttatgatggcaatcatcgcctaatcaaaacccaatcaccctccaccatagaagagtatggctatgataacgagggccgtgagttgaccctgagcaagatccagacgtatttcaccatcgaaaaaacactggccacctgcgaggagtggaactcacatggagaatgcacacgcgccaatatggatatcacgataaccccaactgatcggacaggtaaacagtatgtggacaaacataacgccgtaatgacggcgaaatatgaatactggaactga

SEQ ID NO: 27212 - DNA, 273 bp, Escherichia coli
atggtcacagttaaccttcattgcccccgttgccagtctgttcaggtttaccgtcacgggaagaacccaaaaggacatgatcgatttcgctgccgtgactgtcatcgagtgtttcagctcacttaccgttacgaggcccgtaaaccgggagttaaagaccaaatcactgaaatggctttcaacggtgccggagttcgcgatactgcccgtacgctgaaaatcggcattaatactgtcatccggactttaaaaaactctcgccacgaagaataa

SEQ ID NO: 27213 - DNA, 1158 bp, Escherichia coli
atgcacgttacagccaagccctccagttttcaatgtaatctcaaatgtgattactgtttttaccttgaaaaagagtcgcagtttactcatgaaaaatggatggatgacagcactctgaaagagttcatcaaacaatatatcgcagcgtctggcaatcaggtctattttacctggcaaggcggtgaacccactctggctggcctggattttttccgtaaagttattcactatcaacaacgctatgcaggccaaaaacgaatttttaatgcattacaaacgaatggcattttattgaataatgaatggtgtgcctttctcaaagaacatgagtttctggttggtatctcgatcgatggaccccaagaactacatgaccgctacagacgcagtaattcaggtaacggtacttttgcaaaagtgatagcagccatcgagcgtctgaaatcatatcaaatagagtttaatacgttaaccgtcattaataacattaatgtccattaccctcttgaggtttatcattttttaaaatctatcggcagtaaacatatgcaatttatcgaattgctcgaaaccgggacgccgaatattgatttcagtggtcatagtgagaacacattccgtatcattgatttttctgtgcctcccacggcttatggcaagtttatgtcaaccatttttatgcaatgggttaaaaacgatgtgggtgaaattttcatccgtcagtttgaaagctttgtcagccgttttttggggaatgggcataccagttgtattttccaggagtcctgcaaggataatctggttgttgaaagcaatggagacatttacgaatgcgaccattttgtctatccacagtacaaaattggaaacattaataaatcggaactcaaaacgatgaacagtgtacaactgacagcgcaaaaaaaacggatttcagcgaaatgtcagcaatgtgtatataaacctatctgcaatggtggttgccctaagcatcgtattactaaagtaaacaatgagactgtttcctatttttgcgaaggttataaaatccttttttcaaccatggtaccttatatgaacgccatggtagagttagctaagaacagagtaccgctttaccacattatggatgttgcaaaacaaatggagaataattaa

SEQ ID NO: 27214 - DNA, 1026 bp, Escherichia coli
atggtgctggttggcctgatttgcggcatcacgctgtttgttgaagtgggcgtcgtgctattgattcctctggctttttcaattgccaaaaaaaccaatacctcattgttaaagctggccattccgctgtgtaccgcattgatggcagtgcactgcgtggttcccccacatccggctgctttatatgttgccaataagcttggcgcagatatcggttcggtgatcgtctacggtttgctggttgggctgatggcatcactgatcggtggcccacttttccttaaatttctgggtcaacgactgccctttaaacctgtacccacagagtttgccgatctcaaagttcgcgatgaaaaaacactaccgtcattaggcgcaacgttattcaccatactgctacccattgcgctgatgttggttaaaacgattgccgaattgaatatggcgcgtgagagtggtttttataccttgcttgagtttattggcaaccctattactgccatgtttatcgccgtgtttgtcgcctattatgtgttgggtatacgccagcatatgagcatggggacaatgctcacacatacggaaaatggcttcggttctattgctaatattttgctgattatcggggccggaggcgcattcaacgccattttaaaaagcagcagtctcgctgatacgctggcagttattctctccaatatgcatatgcacccgattcttctggcctggttggtggcacttattctgcatgctgcagtgggctccgctacggtggcaatgatgggggcaacggcaattgttgcacccatgctgccgctgtatcccgacatcagcccggaaattattgcgattgctatcggttcaggtgcgattggctgcacgatcgttacggactcgcttttctggctggtgaagcaatattgcggcgctacgctcaatgaaacatttaaatactatacgacagcgacatttatcgcttcagtcatcgctctggcgggcacattcctgctgtcatttatcatctaa

SEQ ID NO: 27215 - DNA, 435 bp, Escherichia coli
gtgttcgacggtgagctgagttttgccctgaaactggcgcgtgagatggggcgacccgactggcgcgccatgcttgccgggatgtcatccacggagtatgccgactggcaccgcttttacagtacccattattttcatgatgttctgctggatatgcacttttccgggctgacgtacaccgtgctcagcctgtttttcagcgatccggatatgcatccgctggatttcagtctgctgaaccggtgtgaggctgacgaagagcctgaagatgatgtgctgatgcagaaagcggcagggcttgccggaggcgtccgctttggcccggacgggaatgaagttctccctacttccccggatgtggcggacatgacggaggatgacgtaatgctgatgacagtatcagaagggatcgcaggaggagtccggtatggctga

SEQ ID NO: 27216 - DNA, 435 bp, Escherichia coli; identical to SEQ ID NO: 27215

SEQ ID NO: 27217 - DNA, 675 bp, Escherichia coli
atggcaggcatcaggtccggctggagcgagtggaaagagagtgccacggacagtatgtcgcaggttaaaagtgctgccacgcagacctttgatggtattgcgcagaatatggcagcgatgctgaccggcagtgaacagaactggcgcagtttcacccgttccgtgctgtccatgatgacagaaattctgcttaagcaggcaatggtggggattgtcgggagtatcggcagcgccattggcggcgctgccagtagtggcgcatcggcctcaaccggcacagccattcaggcggcagcggcaaacttccattttgcgaccggaggatttacgggaaccggtggcaaatatgagccagcggggattgttcaccggggtgaatttgttttcacgaaggaggcaaccagccggattggcgtggggaatctctaccggctgatgcgcggctatgccaccggcggttatgtcggtacaccgggcagcatggcggagagccggtcgcaggcgtccgggaagtttgagcagaataaccatgtggtgattaacaacaacggcacgaacgggcagataggtccggctgctctgaaggcggtgtatgacatggcccgcaagggtgcccgtgatgaaattcagacgcagatgcgcgatggtggcctgttctccggaggtggacgatga

SEQ ID NO: 27218 - DNA, 699 bp, Escherichia coli
atgcaggatatccggcaggaaacactgaatgaatgcacccgtgcggagcagtcggccagcgtggtgctctgggaaatcgacctgacagaggtcggtggagaacgttattttttctgtaatgagcagaacgaaaaaggtgagccggtcacctggcaggggcgacagtatcagccgtatcccattcaggggagtggttttgaactgaatggcaaaggcaccagtacgcgccccacgctgacggtttctaacctgtacggtatggtcaccgggatggcggaagatatgcagagtctggtcggcggaacggtggtccggcgtaaggtttacgcccgttttctggatgcggtgaacttcgtcaacggaaacagtgacgccgatccggagcaggaggtgatcagccgctggcgcatcgagcagtgcagcgaactgagcgcggtgagtgcctcctttgtactgtccacgccgacggaaacggatggcgctgtttttccggggcgcatcatgctggccaacacctgcacctggacctatcgcggtgacgagtgcggttatagcggtccggctgtcgcggatgaatatgaccagccgacgtccgatatcacgaaggataaatgcagcaaatgcctgagtggctgtaagtttcgcaataacgtcggcaactttggcggcttcctttccattaacaaactttcgcagtaa

SEQ ID NO: 27219 - DNA, 672 bp, Escherichia coli
atggcagcgacgcacacactccctctggcgtcaccgggcatggcgcgcatctgcctttacggggatttgcaacgatttggccgccgcatcgaccttcgtgtgaaaacgggggctgaagccatccgcgcactggccacacagctcccggtgtttcgtcagaaactgagcgacggctggtatcaggtacggattgccgggcgggacgtcagcacgtccgggttaacggcgcagttacatgagactctgcctgatggcgctgtgattcatattgttcccagagtcgccggggccaagtcaggtggcgtattccagattgtcctgggggctgccgccattgccggatcattctttaccgccggagccacccttgcagcatggggggcagccattggggccggtggtatgaccggcatcctgttttctctcggtgccagtatggtgctcggtggtgtggcgcagatgctggcaccgaaagccagaactccccgtacacagacaacggataacggcaaacagaacacctatttctcctcactggataacatggttgcccagggcaatgttctgcccgttctgtacggtgaaatgcgcgtggggtcacgcgtggtttctcaggagatcagcacggcagacgaaggggacggtggtcaggttgtggtgattggtcgctga

SEQ ID NO: 27220 - DNA, 654 bp, Escherichia coli
ttgatattaactcgcctgaacaatggtgagtcactagccgtccgggagttatctgaggaatttaacgtttgcgaaaaaactatccgtcgtgatcttactcagcgcctgtcctatcttaatctgattcgacaaaatggtcgttatcgcctgtctgacggtgttctcggtcaacgcagcaatgctgatttacgtcatttcacgcgcatcctgggtattgaagggctgttccctcgctgggatgacagactactgagtattttgttaggtaacacgaaaaacaacccgtttctgataaaacaacgtccatacgaaaactgcggatcattcatgtcaattctgaatgtattatccgatgccatcctgtcacagaagaaagtaaattttaattacaaagataaagagtttcgggctgttgagccatacaggctggttaatgacaacggattgtggtatctcgctgccgcccatgacagtacattaaaaagctttgttatctcatctgtcaaagacgtttgcatgagtaatatcgctttcaggataatccccgagatggtatctggtatagcgaagaccttatcgaagttctcatttcagtttccgcacatgttgctccgtggtttacccaccgtcatctattgccaggacaggaaataa

SEQ ID NO: 27221 - DNA, 579 bp, Escherichia coli
atggccataaaaggtcttgagcaggccgttgaaaacctcagccgtatcagcagaacggcggtgcccggtgctgccgcaatggccattaaccgcgttgcttcatccgcgatatcgcagtcggcgtcacaggttgcccgtgagacaaaggtgcgccggaaactggtaaaggaaagggccaggctgaaaagggctacggtcaaaaatccgcaggccagaatcaaggttaaccggggggatttgcccgtaataaagctgggtaacgcgcggattgtcctgtcccgacgcaggcgtcgtaaaaaggggcagcgttcagccctgaaaggtggcggcagcgtgcttgtggtgggtaaccgtcgtattcccggcgcgtttattcagcaactgaaaaatggccggtggcatgtcatgcagcgtgtggccgggaaaaaccgttaccccattgatgtggtgaaaatcccgatggcggtgccgctgaccacggcgtttaaacaaaatattgagcggatacggcgtgaacgtcttccgaaagagctgggctatgcgctgcagcatcaactgaggatggtaataaagcgatga

SEQ ID NO: 27222 - DNA, 312 bp, Escherichia coli
atgagtgttggttttttggatcaggagttaagagagtatttattctatagttttaaagtgattaatgataacaaactatttctctctatggccgttcaccgtgagtttgctgaaaatgaaggtgccggaatattgaacgtatcaagtggcacaacttatatttttaatgaagacggtaatactattgtcagagaagaacagtttaatccttataaactggatgaaagtcagacaatggttgatatatcaggtaattacgaagaatttcccgagtttggtaaatacgatcttctgatacgaaaagaaaggtaa

SEQ ID NO: 27223 - DNA, 435 bp, Escherichia coli
gtgttcgacggtgagctgagttttgccctgaaactggcgcgtgagatggggcgacccgactggcgtgccatgcttgccgggatgtcatccacggagtatgccgactggcaccgcttttacagtacccattattttcatgatgttctgctggatatgcacttttccgggctgacgtacaccgtgctcagcctgtttttcagcgatccggatatgcatccgctggatttcagtctgctgaaccggcgcgaggctgacgaagagcctgaagatgatgtgctgatgcagaaagcggcagggcttgccggaggtgtccgctttggcccggacgggaatgaagttatccccgcttccccggatgtggcggacatgacggaggatgacgtaatgctgatgacagtatcagaagggatcgcaggaggagtccggtatggctga

SEQ ID NO: 27224 - DNA, 435 bp, Escherichia coli
gtgttcgacggtgagctgagttttgccctgaaactggcgcgtgagatggggcgacccgactggcgtgccatgcttgccgggatgtcatccacggagtatgccgactggcaccgcttttacagtacccattattttcatgatgttctgctggatatgcacttttccgggctgacgtacaccgtgctcagcctgtttttcagcgatccggagatgcatccgctggatttcagtttgctgaaccggcgtgaggctgacgaagagcctgaagatgatgtgctgatgcagaaagcggcagggcttgccggaggcgtccgctttggcccggatgtgaatgaagttatccccgtttccccggatgtggcggacatgacggaggatgacgtaatgctgatgacagtatcagaagggatcgcaggaggagtccggtatggctga

SEQ ID NO: 27225 - DNA, 435 bp, Escherichia coli; identical to SEQ ID NO: 27223

SEQ ID NO: 27226 - DNA, 246 bp, Escherichia coli
gtgcttgtggtgggtaaccgtcgtattcccggcgcgtttattcagcaactgaaaaatggccggtggcatgtcatgcagcgtgtggccgggaaaaaccgttaccccattgatgtggtgaaaatcccgatggcggtgccgctgaccacggcgtttaaacagaatattgagcggatacggcgtgaacgtcttccgaaagagctgggctatgcgctgcagcatcaactgaggatggtaataaagcgatga

SEQ ID NO: 27227 - DNA, 489 bp, Escherichia coli
atgctgggggcagtgttaatgtctcagcatgtacatgcagctgataatctgacctttaaaggaaaactgattattcctgcctgtactgtacaaaatgctgaagttaactggggtgatattgaaattcagaatctggtacagagtggcggaaatcagaaagactttaccgtcgacatgaactgcccctatagcctgggaaccatgaaagttacaataacatcaaatggtcagacaggtaattcgatactggtgcctaatacttcaaccgcttctggtgatgggctgctcatttatctttacaatagtaataacagtggtattggtaacgctgtcactttagggagtcagtttacgcccggaaaaatcacaggaacagcaccagccagaaagattactctttacgcaaaacttggatataaaggaaatatgcagagtttgcaggcgggaacattttctgcaacggcaacgctggttgcatcatattcgtaa

SEQ ID NO: 27228 - DNA, 372 bp, Escherichia coli
  misc_feature (297)..(306): n is a, c, g, or t
atggcattaaatgctgatttttatccataccacagcaatgagcattcacaatataatgcttctgcatgttgtttatatggatataatggttttagaataaatgaagaggctattgtaaaatctaaaatcggtgaaatagcaacaagaatactatcaatcgataatgacatgtcagccttagaattagacgacgcaatacttaaaggtgatattccgaggataagggatttttcaagatcgttgtctaatttatcaagtgaagagcttgatataaaaatttacgaactaaacaaagannnnnnnnnntttaatgatacggcgaccaccgagatctacactatcctcttcgtcggcagcgtcagatgtgtataa

SEQ ID NO: 27229 - DNA, 459 bp, Escherichia coli
gtgcaaaatagcggtgacaacaccagttatttaattcaatcatgggttgatgacagtaaaacggaaaaaaagagccaggattttgttatcactcctcccctctttatgttaccaacgcgtaaagaagcttcattacgtatcatgtttcttggtaagactaatttgccgaccgatcgtgaaactttgtattggatgaatgttaaagcaattccgccaacagatgagaaaaatacacagaagaataccttacagttggcattacaaaacaaaatcaagctattttatcgcccggaaaatctacctgtgcaaccaggaaaagcacgaaatatgttgcggtttaagtatgagggcaaacaactaaaagttatcaatccttcgccttattacctgacactgacaggaattaaagtacctgtctcttatacacatctgacgctgccgacgaagaggatagtgtag

SEQ ID NO: 27230 - DNA, 195 bp, Escherichia coli
atggggcgtgtctaccctgagctggaaaaagaaattgatttttgctggtcggggaattatgtattccattatctgattggggatatttcactggcagcagagaggaatgaactctggtccctgtgggagcgtaattttatggagtatctctctatggggatttaccgggtaacggtaactgtggaaagttgttga

SEQ ID NO: 27231 - DNA, 231 bp, Escherichia coli
atgcggctgcgtctcgcgcggatttgcgggactggtgatgttcttgccgaacatgcagcctttcgctgtcagcgaccagaattttttgatgttgttaatcgcggtacggctgtatcgttcgcgttgttcaacgatccccagcttcgccatctggtgatatgcctgattagccgtaaggcggataccatactgtttcagcagtgcactcagcgacagcgtagggcgacttga

SEQ ID NO: 27232 - DNA, 1569 bp, Escherichia coli
atggttttgacaggggaggcagctcgtgacctgcaactcatcaaaccacaaaactgcgcatcaaattttaaacgcatgatgggcacatcaaagacgttaaaactgggcggacgggaatttcgtgcggaagaactctcatcgttgatattacgtcagctaaaagaagatgcagaaaactatttgggcgaagaagtcactgaagcggtgattagcgttcccgcatattttggtgatatgcaacgtaaagcaacaaaagccgctgcgacaatggcaggcttaaatgtcgaacgtttaattaacgaaccaaccgccgctgcactggcgtatggtttgcataataaggatgatgaacatcaatttctggtattcgatttaggtggtggtacgtttgatgtctccatactggggttgtttgacaatattatggaagtacgtgccagtgccggggataactttttaggtggtgaagatattgtcgatatcctgatcgatgcatattgctcacgtcgggatcttcctgaaaatattgaatggcgtgaaccgacactccagcggcatttacgcatcgaggctgagcgtgtcaaacgcgtgctgagtgtgcgagatgaagccactttcagtgtggagattgaaggaaggcgatattactggcatctgactacagaaaaatttgaatttttattacagacctttttcgaacgaatccatatgccactggagcgggcaattcgcgatgccaaaattaatattagccaattagaccaggttgttcttgtgggtggcactacacgtatgccactgattcgcaaacttgtgacacgattatttggtcgtataccggcaatgcatttaaacccggatgaagtcattgcccagggcgcggctattcaggctgcacttaaagcgcggcacagcgaattacgagatgttgtagtgactgatgtttgcccttatacgcttggcgttgatacctctaaatcgctggggcatacccgcgaatcaggctattttgcacccgttattgagcgtaacaggagtattccttgtagtcgcgttcgtgccttttacacggcacatgatcaacaaacagaggttaattttaaaatctaccagggtgaaagcaggatggtggctgataatattttccttgcggagttgtcagtgaatgttccgccaaaaccggccggtgatgtgcgtattgatgttcgttttacgtacgacattaacggtattcttgatgtcgatatcagcgtgccactgacaggtgctaaaaatagtctggttattgaacagaatccaggggcattaacggcagaacaaatacagcagtcgttgtccaaattaagcctgttaaaaattcacccacgcgatgaacagataaaccaggcctttattgcccgtcttgataatctctatcaactcaccctggcggaaacgcgagactggataagcaattgctcccgtcatttcagttatctactcgagaagcaggatcctgatcaacttgctgattttcggactaaagttgaacctacattagactctctggaaagagaacgtctgcaatga

SEQ ID NO: 27233 - DNA, 993 bp, Escherichia coli
atgctactgttcccgagtagtgtgttggcgactcaaatatggggaaaatggtcgctcattggcgtactcagtgcaacccgcggctcttacatcggtgcgttggcatctgctctgtatattccctctgcgggtgagggcagtgctcgtgtgcctggacgtgatgagttctggtatgaggaagaactgcgccagaaagcgcttgcaggcagtaccgccactacccgggtgcgttttttctggggaactgacattcacagcaagccccaggtatatggtgttcatacgggtgaaggtacgccgtatgaaaacgtccgcttggcgaacatgctgtggaacgaggagaggcagcgttatgaatttacccccgctcacgatgtcgatggccccctgattacctggacgccggaaaatccggaacatgggaatgttccgggccataccggtaacgacaggccgccgctggatcagcccaccattctggtgacgccgattccggacggtacagatacctataccacgccgccattcccggttcctgatccgaaagaattcaacgattatattctggtttttccggcgggatccggtattaagcctatctatgtttacctgaaggaggatccgcgaaagctgcctggtgttgtaacagggcacggcgtcccgctttcaccaggaactcgctggctggatatgtcggtatccaataacggcaacggcgcaccaatcccggcgcatattgctgataaattgcgcggacgggagtttaaaacctttgatgagtttcgcgaggcgctgtggctggaggtgagtaaagactcagtgttattggcgcagtttataaaaagtaatcagaataacgttagtcaaggatattccccctatgtccctgaggaggggtattattacggaccaaatgagatagttaagaaattccagatacatcatgtagttgctatagaacatggtggtggagtgtatgatattgataattaa

SEQ ID NO: 27234 - DNA, 270 bp, Escherichia coli
atgctgatggcggggattcagttcaccgctggtgagcatgagttccagttgtttcatcagcagtggaaaggcctggtccagatggtatgcatccgcatcgctgaaccggcctctgataccggcgcggtctgcaagttaatgcaaccggttaccctcctgcaccagacgggcgccgaaacagggcgtcacggtgcagggcagcccccaccaggggcggtcgtgattgtcgtcgggaagtgttgtcgtcgtggagtgtgtctgacacgataa

SEQ ID NO: 27235 - DNA, 246 bp, Escherichia coli; identical to SEQ ID NO: 22343

SEQ ID NO: 27236 - DNA, 282 bp, Escherichia coli
atgatgcgtaactggctgatttaccgcgtttaccatgaggtgattggacagacagacggcgcagattattgcccgctggtgtgcgatttttatcttatccgcacgttaatcagtttatggacgctggatggttctccgctgcgacaggaggatattttcgccctcttcgccatgtttgaacgctggcgagccagtgaaaatgccgtgctgattcgccaacaaattcaggctgaatgttccgcagatcccctgctttatgcgttttcactgctgtcttgctaa

SEQ ID NO: 27237 - DNA, 522 bp, Escherichia coli; identical to SEQ ID NO: 5509

SEQ ID NO: 27238 - DNA, 927 bp, Escherichia coli
atgagttcatgtgcttacacgattgatagctatatcacattattgactatgagctctaaaaagcgtctgttagttgaagggaggcatgaccgttcgcatctgtatcaattaatttataaattcaaccctgcgtctaaagttaaaattgacacggcacaagatataaaagcatctgacaaagctatgtctaaaaataataggttaaaaatagaaaccattcattcgaaggttaaaggaaaagataatatctccttcttatgtgaccgcgaattcagagagttcgcttttaatgatcaaattgaagacttattgaattcacattattgtgatgattctttgtattggactttaggtcattcacttgaaaattatttttttaacccatctataataatagatgcatttcagtttctctcaccttcggaatataaatataaggctattgagttattttctgaattaatatcatcttcctttgctgttctggctgcgatttcacttgcagctaaggatattgacaaggctggattgccagccgcgttgattgattggaaagatatagtaattaatgatggaacgatcaagctaattagacgtgactcttatgatattgattcagcatgcgtagacagtttttttaatgcttttgatgcggtattacccagagtcatcgcttcagatgttggaatttgctctagagttgttagggggcacactggtattttacttctacaaaaactattttcagcgtgtttatattacgttggtagggaggatgatgctttacaggctgattcaagcgcaaattatttttgcaatttatcggaattatcattaacaaccgctttagctgagagttgggttaggaaaattggagtgttagaagatgtgtattttcctgactcgcttttgaaaaatattgagtga

SEQ ID NO: 27239 - DNA, 1395 bp, Escherichia coli
gtggcgattagaacaataagcaaaatagagctttcaaaaattcataatagatataatttaactgtggacttctttaatgacctgaatgtgattcatggaaagaatggtgcaggtaaatctacattaatacatgttatagctaatatagtgaatggggactttattcgatttgcgtttttaatttttgaagaaataaaggctacttacagcgatggtctaaaaatagtaatacgcagagataaaatagatgagcaatcttttatctcggtaacactctctaatggtaagtatattaaattcgctgttggagaagctatggcaacggtgagagagatagaaagtgaacgtcacttgagggaacgagatgttaaatccatgcttgcgatggatatcgataagtttgttaaggaaaatgaactacaaaaagtaagagcatcatactttccggcatttcgaacgatgttagaagcgtggagttcatcttctgatgtaggctatgagcgaagagttattcgctcatcattttataaccgtaaagccagtacttttgcacgagaactttttggccaatttttgcctagtataaattatccatctccaatggagattgaagatcgattgagagaagaaataagacgagcgcagttaggtattgcagcttatgaaagtagaactttttctgaatcatttgtgaaagttttttcagcattgtttgataattcatcagtagagggggagattacaggggaattattaaaagaaatagaagggttggcaatagcacaagatagctcaattaaaaatggttattatgccgaatattcaaaagtatatgaggagattagatctttaattaatagaaatctaaaaggtaaagtggagaattctgtttctggtgctttggttgtgtatcgtgatgcgctaagagataggcaggattaccaagagaaagcattttctgagattgataattatatgtcatcagttaattcttttttagaagataaagagatggcttatgactttgacttaagaagaaaatatcccaaggtcggtctaaaattccctgatggttcatggagcccaattagggtattatcttctggtgagaggcaacttttgactatgctttatgcagcatctaagatgggcgatgatgcaattgtgctaattgatgaaccagagatttcattacatatcgattggcaagaagatctattgaaaagaatgctttcccaacttagtgggcggcaaattatcgtgtgtactcattcaccttctattgccacaggctatgaagattttatgataaatatttcgcctgaatttatttcttcgcgtgataatgataaccataaagactcagaagaaatggaagaggatgaatctttatga

SEQ ID NO: 27240 - DNA, 732 bp, Escherichia coli
atgaatcaaccaatacacaatgattactggttatcccgttttgaaagtattctcaacagtgccctggtgcaacaccgtgccgtctcgttaatccgggtggatttacgtttccctgagcatatgcctgtcaccatcatggatcccgatccggattcagcggtgatttctcgttttttcgaatccctgaaagccaaaattcaggcttaccagcggaaaaaacgacgtaccaacaagcgtgtgcgtgcaaccaccctgcattatttctggtgtcgggagtttggcaaggaaaaaggcaggaaacattatcacgtgatattactgctcaacaaagatacctggtgctcgccaggggatttcaccgttccttcttcgctggcgacgctgatccaactggcatggtgtagcgctctgcatcttgagccctggcagggtaatggactggttcatttttccaggcggacgcctttccgtaaaccggcatcatctgatgctcgcccttcttccgatgatacgcctttgtcgggtggatgttctgaaaccaggaaggcttcagacaaaaagccgggtgaagccgctgttctctggatcaagcgtggtgatgtggaagcgatgcagaaagccatggagagagcccgttatctcgtgaagtatgagacgaagcagcatgacggttctggtcaacgtaattatggttgcagccgtggagcggggcgtctactggatggcaggtga

SEQ ID NO: 27241 - DNA, 192 bp, Escherichia coli
gtgactaaacaggaaaaaacagcccttaacatggcgcgctttatcagaagccagacattaacgctgctggaaaagctcaacgaactggacgcggatgaacaggcagacatctgtgaatcgcttcacgatcacgccgatgagctttaccgcagctgcctcgcacgtttcggggatgacggtgaaaacctctga

SEQ ID NO: 27242 - DNA, 3693 bp, Escherichia coli
atgggaaaaggtggcggtaaggcacacacgcctcgtgaggcgaaggataatctcaaatccacgcagatgatgagtgtgattgatgcgattggtgagggaccgatagaaggtccggtgaagggactgcagagtatcctggtgaacaaaaccccactgacggacacggacggcaatcccgtgatacacggtgtgacggcggtctggcgtgccggggagcaggagcagacaccaccggaaggctttgagtcctccggagctgaaaccggactgggtgtggaagtgacgaaggcaaagccggtgacgcgcaccattacgtccgcgaacattgaccgcctgcgggttaccttcggggtgcagtcactggtgcagaccacgtcaaagggcgaccgtaacccggcatccgtccgcctgctgattcagttacagcgtaatggccgctgggtgacggaaaaggatgtcaccattaacggcaagaccacctcgcagttcctggcctcggtgattctggataatctgccgccccggccctttaacatccggatggtccgggagacggcggacagcaccacggaccagttgcagaacagaacgctctggtcatcgtacactgaaatcatcgatgtgaaacagtgctacccgaacacggccattgtggggctgcaggtggatgcggagcagttcggcggccagcagatgacggtgcactaccatatccgcggtcgcatcattcaggtgccgtcaaactatgacccggaaaaacgcacgtacagtggtatctgggacggcagtctgaaaccggcatacagcaacaatccggcctggtgtctgtgggacatgctgactcacccgcgctacggcatgggaaaacgtctgggggcggcggatgtggacaagtgggcgctgtatgccatcgggcagtactgcgaccagacggtcccggatggtttcggggggaccgagccgcggatgacctttaatgcgtacctggcacaacagcgtaaggcgtgggacgttctcagtgatttctgctctgcgatgcgctgtatgccggtatggaacggtcagacgctgacgttcgttcaggaccgcccgtcggatgtggtgtggccgtacaccaacagcgatgtggtggtggatgataacggcgtgggattccgctacagcttcagtgccctgaaggaccggcacacggcggtggaggtgaattacaccgacccgcagaacggctggcagacatccacggaactggtggaagacccggaagccatactgcgctacggacgcaacctgctgaagatggacgcgttcggctgtaccagccgcggtcaggcccaccgtgccgggctgtgggtgataaagaccgaactgctggaaacgcagacggtggatttcacgctcgggtctcaggggctgcggcacacacccggtgacatcattgaaatctgtgataacgactatgccgggaccctgaccggcggacgtgtcctgtccattgatgctgccacccgcaccctgacgctggaccgtgaagtgacactgccggagaccggtgccgccacggtgaacctgattaacggcagtggtaagccggtgagtgtggacatcaccgaacaccccgcgccggaccggatacaggtcagtaccctgcctgatggtgtggagacatacggggtgtggggactctccctgccgtcactgcgccgtcgcctgttccgctgtgtctccgtccgggaaaacacggacggcacctttgccatcacggcggtgcagcacgtaccggaaaaagaagccatcgtggataacggtgcccgctttgagccgcagtcaggttccctgaacagcgtcatcccaccggcagtgcagcacctgacggtggaggtgagcgcagctgacggccagtatctggcgcaggcgaaatgggacacgccgcgggtggtgaagggtgtgcgcttcagtctgcgcctgaccagtggtaagggagcggatgccagactggtgaccaccgccatcactgccgatacggagcaccgtttcagtggcctgccactgggggaatacaccctgacggtcagggcgattaacagttatggccagcagggcgaaccggccaccaccaccttccggattaacgcgccagcaaaacccgccaccattgaactgacgccggggtattttcagataacggcggtcccgcgtcttgcggtgtatgacccgacggtacagtttgaattctggttctcagaaaaacgcatcacgaacacagcacaggtggaaaaatctgcccgttatctggggaccggcagtcagtggactgtccaggggagccggattaagccggggacggatttctggttttacgtgcgaagcgtcaacctggtgggaaaatctgcttttgtggaagccagcgggcagcccagcaatgatggtgaagggtatctggaaattttccgggggctgatagatgagacgcttctgggccaggcactgaaagagcgcattgatgcttcagcgctgcgtacggaggtcacgcaactggaagaagatatccgtcagcggatggacacggatatcgcagaagtgacccggaaaatcgggaaggcggaaaacagcctcacgcagctggttgcgaaaaagaatgaggaccagacactggccatcgcgcaggtgagccagaaagtggaccgggtgagcagtgaaatctcacagactgtcagccaggggcagtcagaaaacgcccgacagatagcacaggtccgccagtacgtggataaaaaagggagtgaaattacctcgaccacggataaaaagctgggtgaccaggccgtgaccatacagcaaatccagcgggttcagtcagacacgcgcaatgagctgaatgccatgtatatgctgaaggtgcagaaaacaaaaaacggtattccctatgtggccgggattggcgcggggattgaggatgttgatggtcagaccctgagtaacattctgctgcaggccgatcgcattgcgatgattaccccggagaacggcaacaccacgccgctgtttgtggcgcaggggaatcagctgttcatgaacgacgtgttcctgaagcgactgtttgcggtgagcatcacgtcatccggcaatcctccgacgttttccctgacgccggatggcaggctgacagcccgcaatgcggatatcagtggagccatcacggcgaataccggcacgctcaataatgtcaccattaacgagaactgtgtcatcagagggaaactgtctgcaaaccagattgaaggcgatctcgttaaaacagtgggtaaggctttccctcgtgactcccgtgcaccgaagcgttggccatcaggaaccattaccgtcagggtttatgacgatcagccgtttaaccggcagattgttattccggcggtggctttcagcggtgccagacatgagcgggagaacagcgatacttattcgtcatgccgcctgatagtgaagaaaaacggtgctgaaatttataaccgtaccgcgctggataatacgctggtttacagtggtgttattgatatgcctgctggtcgcggtcacatgacgctggagttttctgtatcagcatggtgggtaaatggctggtatcccacagcaagtatcagcgatttgctggttgttgtgatgaagaaagccactgcaggcatcacgattagctga

SEQ ID NO: 27243 - DNA, 537 bp, Escherichia coli
atgcgcattatggcttcgtacgcttttgaggattatgcccgcagcgcagcgagtaaaaagcagtgcccttgttgctatggggaaaaatttattgaaagcgtagtttttacaaacaaggtccagtatccggatggtaagccgccggtatgggcaaagtgtacgaaaggtgtgtattcgtcttactgggaagaatggaaaaaagtcagggaggtggtaaaagttgcctgtccggagtgtggcggaaagggtgaggtttccaccgcctgtaaggattgccgtgggcgtggtgtcgccattcatcgtgaagagtcggtaaaacgtggtatgcctgttatcagagactgccagcgttgtggtggtcgtggctatgaaagactaccatcaacggaggcatttaatgctatatgcgaggtgacaaaccagataacacgcgcgtcatgggaaaaaacagttaagaaattctatgatgcgctggtgacccggtttgatattgaagaagcatgggctgagcggcagttaaaaaaggtaactaggtaa

SEQ ID NO: 27244 - DNA, 681 bp, Escherichia coli
atgttaagaatcaatcaaatagtaaagatccttggtgaaatgaaggcatatgccccttatacatacaaaagtaaaacagataaagtggttgataaaatacatggtagattagtcaggctcggggtttttatcatcgctttacttgctttatgcattgctttgtataaattcaatagttgttttagaaccgagacagttgtagatgttatttttgggttgtattttacaggggtgctaataggattagtaataatggcattgccacctatcttaggaataaaacatttgattgattggaagaaagaagcttttaatgactttatttgcgaaatatcacatgatgaagataacgcaaagcgtcttttagattattcagaaaaagaattattgtatgcgattcactggatacaacttaagattaatagaataacgatgagagttagtagcttttttggcgaaaaaacagcagtactctcggtattgggtctctgctattcggcagtacaggcatcaattggctttgataaattaagtcaaacatttattggagacttttctaatgcggattctactaatactattatcatgtttggattagcacttttgctgggtatgtcattgggggcattaatgttgaaaaaaagttgccagccaccagttatatctgaaagaaattgttga

SEQ ID NO: 27245 - DNA, 291 bp, Escherichia coli; identical to SEQ ID NO: 4611

SEQ ID NO: 27246 - DNA, 321 bp, Escherichia coli
atgatctatatgtatattatttacgacactgtaggtttaacatacaagaacagctttcctgatgatgaaaaagccgctattctggaatgctataagttgaactacagtaatattcccatttacaaggcagaagtagccaaattcaaagacggctcacccgataaactcaaggacatatccccataccaaaaaattgaagattctaatgaggaatacgacaaccttcacgacgaggaaaaagtgaaattattcgaatatttagagaaagagcatggtgtagaaaatatctctccagttaagctaagaagaccgagaccttaa

SEQ ID NO: 27247 - DNA, 471 bp, Escherichia coli
  misc_feature (413)..(422): n is a, c, g, or t
atgtcgttttgttggaatgaaattaactctggtgtcaagtctttaattctcatattatgtatgttgtctttaatgactttgtctttgtgggatgatgttgcaacaaagtttcttcatgcagctggaattatatctgcattatattttctagcgacaccaaaaaaaacaataactaataatcctactttgttaattttcatctcattatgtcttttgggtatcgttaatatcatctggtattcacattataaagtttcaggctcggtttataccaatgcatatcgtggcccaatggaaactggaaaaattgccttgtgtagtgcttttattttcttagttctttttgctaaagatgagatgagaaccaaaataaaatttgggaaactaattctgttcgcatccttggcaacgcnnnnnnnnnnacgcagttacttttttttgcgcatgccatgtggcaacatttctatttaa

SEQ ID NO: 27248 - DNA, 456 bp, Escherichia coli
gtgatagttgagttctcagcagcaatgtcggcaatcaaagaaactgcggtaatggcaaagggtattctgaatgccaaaactcaaactgagataaattccgctgtcagcgatatgctttcaaaacttacgtctgttcagtttgaatgcgtatcgctcattgagatggtgcgctcttatcaggaagaagccgcatctctcaaagcaaaaattgcagagatagaagactttcagcaacaggcggaaggttacaaacttaacaagcttgattctggaactcttgtgtattccaagaagcaatttataggcgataccgagataacagtgcatctttgcccacaatgttttggaaaaaaggtaatatctgtactgcagccaatggaaataatgcgccttgatgctcattttcgtactttttgccccgcttgcaataataagttctggatgaactcaagataa

SEQ ID NO: 27249 - DNA, 267 bp, Escherichia coli
  misc_feature (238)..(247): n is a, c, g, or t
atggaagacatgaagctcaataattattacactgcgtacgcgataaaatttgcattaagttattatccagattcattctggatatataattttatctgccaaaattcacagaatacaacttatgctacacctgttatttatagggggtttttccagcgagagggtattttgggttttgaaaaagatgaagggcagggcgatgcttggctggaaaaagctagtgacattaaatacaatnnnnnnnnnntaattggcggtcggcaataa

SEQ ID NO: 27250 - DNA, 522 bp, Escherichia coli
atgctcagaaccggggcatctgccacaccatcagtttttgacgtcacggttgacgggtcactttcattaccgctcggatctttggcaaccccggtaacttcactgttatccttcacgttatctgccggaatggtcgctttatcgccagtgctgtccgggatcagcgtcggatcactggatgtccagccgttatcccctttctccagcgtcacggtgtgcttaccacctttttcatcttcaaaggtgacatccacggtatcgcctttattggcatcacccggcagctcaacagaaacagaaccatcatcctctgccttcagtgctggtgacgatggggctgtagtatcagagtcatcattttcatgtctatgtttgcttccaccgccacctgcagctaaagccatagcagccagtcccccaccaaatgccagaccgcccaaccatataaaaccgccacgatcatcatctgacaaggttcccgattgtccggcagtaatatcatccagcaccgggccatcctga

SEQ ID NO: 27251 - DNA, 273 bp, Escherichia coli
  misc_feature (31)..(40): n is a, c, g, or t
atgcgttctccttattacctgcacaaaatgnnnnnnnnnngtgtaccggttgaagtttctctggatccaaaagaactcatggaacaccctttgcgcattggtttatcgatgactgcaactattgatacgaagaatgaagacattgccgagatgcccgatctggcttcaaccgtgacgtccatgcctgcttataccagtaaggctttagttatcgataccagtccgatagaaaaagaaattagcaacattatttcgcataatggacaactttaa

SEQ ID NO: 27252 - DNA, 222 bp, Escherichia coli
atgcagaatgaaataatgggttttctgagcagacataatggagggaaaaccgcagaaattgcggaggcgctggcggtaacggattatcaggcacgctattacctgttattactggaaaaagcaggtatggttcagcgctcaccattaagacggggcatggcaacatactggtttctgaaaggagaaaagcaggtgggacaaaactgttcttccacaacttaa

SEQ ID NO: 27253 - DNA, 342 bp, Escherichia coli
  misc_feature (267)..(276): n is a, c, g, or t
atggggactggattgtactcgagcgataaccatcaaaaaatccgcagcaggtttaatatacaggaatcatattgtgccattaagactaatggtgtccttggattcagcaaccgaaaggatgtattgcgagaaaatggtgattcaaccggaaccaccagttccagcactaatgccatgatgctgatggaaaatggtgaaaatgaaatcagtctggagattggggcgttaaggtggttttctgataaacctgccagtaccgaagaacgnnnnnnnnnnaagcagggtgcagtctggatttggttcgttttgttaagcaggaagaaaccatactttcttcgataa

SEQ ID NO: 27254 - DNA, 621 bp, Escherichia coli
atgagtaaaaaacatggaaataataagaaagtcccacaagtaatgtatatatactgtgagggtgagaaaaccgaaccattataccttgaggcttatatttcagacagatctaaaagaactttaagtgtatttaaaatacctaaaacaagaaaaaatacacctgagcagttggtggatgaggcgataaagaaaaagaattcatcatcttccgcagaaggtgacgtcttttgggttgtttatgatcaagagcatctgacgccttcgtctatttcatgtcatcaaaaggcatggaataaagctaataggcatgggataaatatagcaatatcctgtgtttgttttgaattatggttattgttgcatttcggcttcacaaccaaagatttttcgtcgtatgataatttgatgtctagctccccgctaaaaaaattaataactaactatgataaaggtagtaaactaacttaccttgctataagagagaggattggtactgcgaaagataacgcaagaaagctagatatttacgctaaaactaattataaaaacacgcacgaaccttatctatttccatgttatacatcattccatgagctacttaaggcgattgacgacttttga

SEQ ID NO: 27255 - DNA, 1356 bp, Escherichia coli
atgtttgtttatttgactattgaaaattttaggtcggttaaggaaaaatcgacattaaacttgagcgcatccggttctagtaaccatttaacaactcatatctataaaaatgatggaatgaatgttggaacgctcatgagtgctgggatttatggtgctaatgcgtctggtaaatctaacgttctcatggcttttgaagctataaaatttatcgcaacagaaagcggtgatttgaaagaaggtaaacggattccctgctatgagccatatgctctttcttcggctacgaatgaggctcctgtaaagtttgaggctgaattttattctgttgaggggaatcggttcagttatgaagttgcttttattaaaaatcggattttatttgaatcattagactattatccatctagggttaaagcaaatttatttactagagatgagagcgacacctgggaaacaatcaagtttggtgggcattataaaggaggtattaaaaaaataccattcttccctaataattcatacttagcgaaagcaggtaataatgccgcatcaccagacataattaaagaagcttataacttttttagaaagggaattagacatataggtttaaatgaaaagataagaatatcttcttttggggagagggaggacgtcgtaaatgaaacggccaaggttttatgcatggttgacactggtgtttccggtatatctgtacgggaggttgaggcggaaataccaataaaaatggatgaggaaatccctcaagaaataaaggagataattgaagaagattataaatatcgttatatgttctctcatcctactgatgaaggggggagtgtttctttccctatggggagagagtctgaaggcacccaaaagttatttgaaatcatacctctaattagatctgcgtttaatgatagtatggttgtaattgttgatgagttagataatagcttgcacccgcatattgctgacttgattgttaagttatttaatgatcctgatgtcaataaaaaaggctcacaacttgtattctcaacccataatatgcagttaatggctccagagaaaatgagaagagatcagatatggttttgtgaaaaaaataaaggtgcgtcgtctctttatagcttagatgattttgataagaaaaagataaaaacaacaacaccttacgcagcttggtatgatgagggtaggtttggtggggttcccgacataaactacttaaaggtagcctcatttatatctggtgatatatccttggtaatgccggatattgacgtcaaagaattgtctgatggtttttttgaagagtttgacggggatctttctgatgagtaa

SEQ ID NO: 27256 - DNA, 276 bp, Escherichia coli
atgaaaatattcattactgagcaacaaaaagctgaacttgaacgccttcatgattccagtcgtgacgggcgagtcagagatcgtattaaagccattcttctggcttccgaaggctggagttctgccatgattgctcaggctttacgcttgcgtttaaaagatgagaccagtgttattctttctgatctctatctgcaaatcttgcagtacattgaaatgcataagactacactaacggatatcattattaatgacagggaatctgtgctctcttaa

SEQ ID NO: 27257 - DNA, 330 bp, Escherichia coli; identical to SEQ ID NO: 8916

SEQ ID NO: 27258 - DNA, 1965 bp, Escherichia coli
atgtcagtaacaaagtctgaaccaaaatctacccgtaaagcaagccgtaaacctgcaaaaacgcaggaaactgtcctgtctgccctgctggcgcagacggaggaagtgagcgtgccgctggcctcgctgattaagtcaccactgaatgtgcgcacggtgccgtattctgcggagtccgtcagcgaactggctgattccattaagggggtcggcctgctgcagaatctggttgttcatgccctgccaggtgaccgccacggtgtcgccgcaggtggtcgccgactggcagcactcaacatgctggcagagcgtggcatcattccggctgactggcctgtccgcgtgaaaattattccgcaggaactggcgacggccgcatcgatgaccgagaacggtcatcgtcgggatatgcacccagccgaacagattgccggattctgtgcaatggcgcaggaaggcaaaacacctgcacaaatcggtgatttgctgggctattcaccccgccacgttcagcgaatgctgaaactggctgaccttgcgcctgtcatcctcgatgcgctggcagaagacctcatcaccaccgagcactgtcaggcgctggcgctggagaacgacaccgcgcgtcaggtgcaggtgtttgaagccgcctgtcagtcgggatggggcggtaaaccggaagtacagaccattcgtcgtctggtgaccgaaagtgaagtggcggtggcagggaacagtaaattccgcttcgtgggggctgatgccttctcgccagatgaactgcgcactgacctgttcagcgacgacgagggtggctatgtggactgcgtggcgctcgatgccgccctgctggaaaaactccaggctgttgctgaacaccttcgggaagccgaaggctggggatggtgcgccggacgcatggagcctgtcggtgagtgccgtgaggatgccggaacataccgctgtctgccggagccggaagcggtgctgacggaggcggaagaagaacgtctgaacgaactgatgacgcgttacgacgcgctggaaaaccagtgtgaggaatctgacctgctggaagcagaaatgaagctgatgcgctgcatggcgaaggtcagggcgtggacgccggagatgcgtgccggaagcggtgtggtggtgtcctggcgttatggcaacgtgtgtgtccagcgtggtgtgcagttgcgcagcgaggatgatgcggctgacgacgctgaccgcacggaacaggtgcaggagaaagcgcccgtggaggaaatcagtctgccactgctgacgaaaatgtcttccgaacgcacgctggcagtccaggcagcactgatgcagcaaccggacaaatccctggcactgctggcatggacgctctgcctgaatgtgtttggcagcggagcgtacagtaaaccagcacaaatcagcctggaatgtaaacattattcgctgaccagcgatgcgccatcggggaaggacggtgccgcattcctggcgctgatggcagaaaaagcccgtcttgcagccctgttaccggagggatggtcacgggatatgacgacgttcctgtcactcagccaggaggtactgttatccctgctcagtttctgcaccgcgtgcagcatccacggcgttcagacccgcgagcatggtcacacgtcacgcagtccgctggactcgctggagagcgctatcggattccacatgcgcgactggtggcagccgacgaaagcaaacttcttcggacacctgcaaaagccgcagattatcgatgccctgaatgatgccggactgtccggtgctgcgcgggacgcggagaaaatgaagaaaggcgatgccgctgaacatgcagagttccacatgaaagacaaccgctgggtgcctggctggatgtgtacaccacgtccacaggcagagacggaaaccacggagtaccgtgacgaccaggcagaagccgcctga

SEQ ID NO: 27259 - DNA, 1959 bp, Escherichia coli
atgcctgtaacgaagtgtgaaccagaaaccacccgcaaagcaagccgtaaatatgcaaaaacgcaggaaacagtcctgtctgccctgctggcgcagacggaggaagtgagtgtgccgctggcctcactgattaaatcaccgctgaatgtgcgcacggtgccgtattctgcggagtccgtcagcgaactggctgagtccattaagggcgttggcctgttgcagaatctggtcgtgcatactctgcctggtgaccgttacggtgtcgccgcaggtggtcgccgactggctgcactcaacatgctggcagagcgtggcatcattccggctgactggcctgtccgtgtgaaggtcattccgcaggagctggcgacggcggcatcaatgactgaaaacggtcatcgtcgggatatgcaccctgctgaacagattgccggattccgcgcaatggcgcaggaaggcaaaacacctgcacaaatcggtgatttgctgggctattcaccccgccacgttcagcgaatgctgaaactggctgaccttgcgcctgtcatcctcgatgcgctggcagaagaccgcatcaccaccgaacactgtcaggcgctggcgctggagaacgacaccgcgcgtcaggtgcaggtgtttgaagctgcctgtcagtcgggatggggcggaaaaccggatgtgcgggttatccgcaatctgattacggaaagtgaagtggcggtggcggggaacagtaaattccgcttcgtgggggctgatgccttctcgccagacgaactgcgcaccgatttgttcagcgacgacgagggtggctatgtggactgcgtggcgctcgatgccgccctgctggaaaaactccaggctgtcgcagagttccttcgggaagccgaaggctgggaatggtgcgccggacgcatggagcctgtcggtgagtgccgtgaggatgccggaacataccgctgtctgccggagccggaagcggtgctgaccgaggcggaagaagaacgtctgaacgaactgatggcacgttacgacgcgctggaaaaccagtgtgaggaatctgacctgctggaagcagaaatgaagctgatgcgctgcatggcgaaggtcagagcgtggacgccggagatgcgtgccggaggtggagtggtggtgtcctggtgttatggaaacgtatgtgtccagcgtggtgtgcagttacgcagtgaggatgatgcggctgacgacgctgaccgcacggaacaggtgcaggaaaaagcgtcagtggaggaaatcagtctgccactgctgacgaaaatgtcttccgaacgcacgctggcagtccaggcagcactgatgcagcaaccggacaaatccctgacactgctggcatggacgctctgcctgaatgtgtttggcagcggagcgtacagtaaaccagcacaaatcagcctggaatgtaaacattattcgctgaccagcgatgcgccatcggggaaggaaggtgccgcattcatggcgctgatggcagaaaaagcccgtcttgctgccctgttaccggagggatggtcacgggacatgacgacattcctgtcactcagtcaggaggtgctgttatccctgctcagtttctgcaccgcatgcagccttaacggtgtccagacccgtgagtatggtcacacgtcacgcagtccgctggacacgctggagagcgccatcggctttcacatgcgcgactggtggcagccgacgaaagcaaactttttcggacacctgaaaaagccgcagattatcgcagccctgaatgaggcaggactatccggtgccgcacgggacgcggagaagatgaagaaaggcgatgcggctgaacatgcagagcaccatatgaaagacaaccgctgggtgcctggctggatgtgtgcaccacgcccacagacggatgccactgaacgcaccgataacctggctgatgccgcctga

SEQ ID NO: 27260 - DNA, 234 bp, Escherichia coli; identical to SEQ ID NO: 10186

SEQ ID NO: 27261 - DNA, 186 bp, Escherichia coli
atgacaaaacagcaaaggatcgacggattccgtaaagcggaagcatcgttaaaactggagggtatggatccttctggaactcccttttatgagtcggtaaaagcccgaatcatctccggtgaaattacctacgaacagggcaaagctgagattctttcccaccacaaagcccgcgcagaagtttga

SEQ ID NO: 27262 - DNA, 996 bp, Escherichia coli
atgcaaaaccctaagctacagaacctcaccgactacagccccgacgataagccgtgggatgctcataagtcacaatctgatgatgttggcggtatctatctgcgtgctgctgaatttgagtcttatgcagcccgcatgcgcgattgtggcggcctcctgcgttttggctggtctacccttaaagacaccggagaaacgcgtttacggctccgtgaggcgcatttctgccgcgttcgtcactgccctgtctgccagtggaggcgctccctgatgtggcaagcccgtttttatcagtctctgccgaaaattgtcgctgattaccctgatgggcgatggatgtttctgacgctcaccgttcgtaactgcgccattgaagatctcggagaaacacttaccgccatgaatgcggcattccagcgaatgaaggtgcggaaggaatttaaacccgtacagggatggattcgcaccacagaagttacccgcggccgagatggttctgcgcacccccactttcacaccctgatgatggttcctcctgggatgctgaacggtcatgactacgttaagcactaccgctgggttgaactctggcgtgactgcctgcgcgttgattacgatcctaatgttgatgttcgggcagtgaaaccccgtaagcctaaagatggccaaacgctggcatgtgcaactgccgaactggtgcgcggtgccgttgctgaaaccctgaaatattcgacaaagccggctgatatggttgccgacccggactggttcttagagctgacccggcagacgcataaacgccgctttgttgcgaccggtggcgcgcttaaggacgttctgaaactggaacaggaaacggatcaagacatggtgatcggggatgatatttccgatggtgaagacgatggttcacgcctcgcctttggctgggattcgacgccaagaaaatacgtccgcttgcctgagcgcgataagtttaaatcagatcctgattag

SEQ ID NO: 27263 - DNA, 486 bp, Escherichia coli
atggagaaccgtctgagtgccgtacttgctgcaagggaagcagaaggtcgccagatggccagcctcttcgaaccggaggttgcctccggagaaggcgtgactcaggctgaacagccacaacagccacaacagccacaacagccacaacagccacaacagccacaacagccacaacagccacaacagccacaacagccacaacagccagtgtcttctgtcatcaatgataagaagtcagatgcaggtgtgagtgttccggcaggggggatcgagcaggagctgaaaatgaaaccggaagaagagatggaacagcaactgccacccgggatcagtgaatccggtgaagtggtggatatggccgcttatgaggcatggcaacaggaaaatcatccggacatccagcagcagatgcagcgtcgtgaagaggtgaacattaatgtgcaccgggagcgtggggaggatgttgagccgggagatgatttctga

SEQ ID NO: 27264 - DNA, 282 bp, Escherichia coli
atgaaagatttaacactcaaatttgtcgacagggccgacttttcggcctttatggagagtatcggctattatgatgatgagtcgatgcaggatgatattcttattgacgtgataggtaacgtgtacaaagaaaccggagaacttaccgaagatggcgagccggtatgtgttaaggaagacggatattttgtaaacgtgcgcatcattaatgatgcaaaaaaatcgtcaatattcgataaatacgcggttgttgttgagcatcaacttcgtggctggatgtga

SEQ ID NO: 27265 - DNA, 192 bp, Escherichia coli; identical to SEQ ID NO: 13008

SEQ ID NO: 27266 - DNA, 315 bp, Escherichia coli; identical to SEQ ID NO: 9107

SEQ ID NO: 27267 - DNA, 204 bp, Escherichia coli
gtggcagagcatgacctggaaaccctgttctggcagtggggcgagcgttttccgtcactggccggaatggaacgctggcagtggcaggatatgccattctggcaggttatcgcggaagccagtctggcagcaaaggaggccggtcatgctgtccgtgagatggagcggtggatggtgccgaacaaactccgggaggtggcgtga

SEQ ID NO: 27268 - DNA, 354 bp, Escherichia coli
gtggctgccgctttacagtgggcaatcaaaaatgaccgttttgttatctccctttgccacggtccggcggcttttctggcacttcgccacagcgataacccactgaatggttattctatttgcgcattcccagacgccgcagacaaacaaacgccagatattggctatatgccgggtcatctcacctggtacttcggcgaagagttgaagaaaatgggcatgaacatcattaatgacgacatcaccgggcgagtacataaggaccgtaaacttctcaccggcgacagtccttttgcagcgaatgcgttgggtaaactggcggcgcaggaaatgctggcagcttacgcgagttaa

SEQ ID NO: 27269 - DNA, 474 bp, Escherichia coli
atggcgcatggtcgctattactatggtgatcataccaatgggatcgcctggcgtttaatctctcagggcgagatgtatctgactgacaatattattatggctaacgcgcttgtctattctcatggcgaagatgtttatagttatgaaagtggcgctcatagtgattttgacagtattcgcaccgtaataagaccggcctggatctggaatacatggaatcagacggggcttgaattaggctggtttaagcaacagaacaaaactcagcagggggtaacgctaaatgaatcggcttataaaacgacactctggcatgcattgaaagtgggtgaaagtattttaggttcacgaccagaaattcgcttctacgggacgtatatcaatattctggataacgaattatcgaattttaagtttaatgagaacagcaaaaacgagtttatggccggcatccaggtggaagtctggtggtaa

SEQ ID NO: 27270 - DNA, 204 bp, Escherichia coli
gtggcagagcatgacctggaaaccctgttctggcagtggggtgagcgttttccgtcactggccggaatggaacgctggcagtggcaggatatgccgttctggcaggttattgcggaagccagtcttgcagcaagagaggccggtcacgctgtccgtgagatggagcggtggatggtgccgaacaaactccgggaggcggcgtga

SEQ ID NO: 27271 - DNA, 174 bp, Escherichia coli
atggtcgcattcgtaaatgtctccattgctttcaacaaccagattatccttgcaggactcctggaaaatacaactggtatgcccattccccaaaaaacggctgacaaagctttcaaactgacggatgaaaatttcacccacatcgtttttaacccattgcataaaaatggttga

SEQ ID NO: 27272 - DNA, 546 bp, Escherichia coli
atgaaatcgaaagacgaaatttttgatgccgttcttggcaaagaaggcggctacgtcaatcacccggatgacagaggcggtccgacaaaatggggcatcactgaaaaggtggcacgggcgcacggataccgtggcgatatgcgtgatttaacgcgcggacaggcactggaaatccttgaagctgattactggtacggaccgcgttttgatcagatagcgaagctgtccccggatattgccgcagagctgtgtgacaccggcgtaaatatggggccgtctgtggcaaccagaatgcttcagcgctggctgaacgtattcaatcagggcggaaaactgtatcccgatatggacacggacggacgcactggcccacgcacgattaacgcattgcgtgcatatctggaaaaacgcggtcgggacggcgagatggtgatgttaacagcactgaactgtacacagggtgaacgctatctggagctggcggaaaaacgcgaagccaacgagtcatttgtctacggttggataaaggaacgcgtggcagcatga

SEQ ID NO: 27273 - DNA, 408 bp, Escherichia coli
atgaggttatggacttctctgggcgtcgcttttcttctgattgccgcatggggaacatccatgcgtctgtcgtggtcgctgggccgggagaacgccagaaacgaagcgcaggccagcaccctgaaaagtaccgtcgacaccctgaatatcatcagcgccggggtacaggatatgcagcaggtgctggcacaactccgcgtggaaaatcagcaacgcaatcaggacggagaggccagacgtgaacagctacgcaacgatattgcaaaagatgaatgcgcccacgctttgcctgacgctcgttttactgacaggctgcgcaggcacgcagaacgcgccactgccagcgccgtcagtccggcttataccgcagacgctgaccataccggtaacgccgccccccttccctga

SEQ ID NO: 27274 - DNA, 1476 bp, Escherichia coli
atgaatacccagtataattccagttatatattttcgattaccttagtcgctacattaggtggtttattatttggctacgacaccgccgttatttccggtactgttgagtcactcaataccgtctttgttgctccacaaaacttaagtgaatccgctgccaactccctgttagggttttgcgtagccagcgctctgattggttgcatcatcggcggtgccctcggtggttattgcagtaaccgcttcggtcgtcgtgattcacttaagattgctgctgtcctgttttttatttctggtgtaggttctgcatggccagaacttggtttgacctcaataaacccggacaacactgtgcctgtttatctggcaggttatgtcccggaatttgttatttatcgcattattggcggtattggcgttggtttagcctcaatgctttcaccaatgtatattgcggaactggctccagctcatattcgcggaaaactggtctcttttaaccagtttgcgattattttcgggcaacttttagtttactgcgtaaactattttattgcgcgttccggtgatgccacctggctgaatactgacggctggcgttatatgtttgcctcggaatgtatccctgcactactcttcttaatgctgttgtataccgtgccagaaagtcctcgctggctgatgtcgcgcggcaagcaagaacaggcggaaggtatcctgcgcaaaattatgggcaacacgcttgcaactcaggcagtacaggaaattaaacactccctggatcatggccgcaaaaccggtggtcgtctgctgatgtttggcgtgggcgtgattgtaatcggcgttatgctctccatcttccagcaatttgtcggcatcaatgtggtgctgtactacgcgccggaagtgttcaaaacgctgggggccagcacggatatcgcgctgttgcagaccattattgtcggagttatcaacctcaccttcaccgttctggcaattatgacggtggataaatttggtcgtaagccactgcaaattatcggcgcactcggaatggcaatcggtatgtttagcctcggtaccgcgttttacactcaggcaccgggtattgtggcgctactgtcgatgctgttctatgttgccgcctttgccatgtcctggggtccggtatgctgggtactgctgtcggaaatcttcccgaatgctattcgtggtaaagcgctggcaatcgcggtggcggcccagtggctggcgaactacttcgtctcctggaccttcccgatgatggacaaaaactcctggctggtggcccatttccacaacggtttctcctactggatttacggttgtatgggcgttctggcagcactgtttatgtggaaatttgtcccggaaaccaaaggtaaaacccttgaggagctggaagccctctgggaaccggaaacgaagaaaacacaacaaactgctacgctgtaa

SEQ ID NO: 27275 - DNA, 849 bp, Escherichia coli
atggctttatggaatatattgaaaacattactgcgtgtgatgatgtttttttctgagtattgtttagatgataatgaaaatatgagtatccagccagcgcggataaatacgccgggaatatctgatttggattctggcattgatttgtctggtatatcttttattcagagtgaaactaaccaggcattaggattaaaatatgctcctgtagatggcgatggatattgtctgttaagggccatactggttttaaaacactttgattattcgtgggcgctgggcagtcataagacgccaaaggaagtatacgaagagtttattaaaattgttgataaacaaacgatcgaggctcttgttgatgcggcattttatgatctcagggaagatattaagacattatttagcgttgatctgcaatctgacaacaaaattcagggggagggtagtcatatgtcatggagctttctgttttttaaaaaagaattcattgatagttgcttgaataacgaaaaatgtatcctgcatttacccgagtttatatttaaagataacaagaatttgcttgctttagataccgacgcttcggataggattaaagcggtgaagaattttcttgctgttctttcagatagcatttgctcatcgtttattgttaccagtaatgtggcatcaatttccttggggaacgaatccttttcaacagatgaagaccttgagtgtggttatttaatgaatactggcaatcattatgacgtttacctccctcctgaactttttgaccaagcttgcgagttaaacaataaggaaaggaatgcgcaaattgattttttaactcgttatgcaatttaa

SEQ ID NO: 27276 - DNA, 1263 bp, Escherichia coli
atgatagttaaacctttgattgaactttcaaaaaaaatatcaagcggactaactcctcttcgtagtaatcctgaattctgggataatggaactattccgtggttaaagacggagcagcttggcgaaaaatatatttatgaaacgaatgaacatatttcagaagtagcattggaaaaaacagcgattcgtcttttccctgttaattcgctatcaattgcaatgtatggcgaaggtaaaactcgaggcaatttgtctatcctgaaaaaatcaatggctacaaatcaggcctgttgcaatgttgagattgattctgataaagctgattatgaatatgtttattattttttaaagacacaatatgatgagcttcgccagctatcttccggtgttagaaaaaaccttaattctaacgatataaaaaactaccctattcgtttgccatcctctctggacgaacaacgaaaaattgcctgtgtattaaaagtattagatgacaaacttgctctcaacaaccgcatcaacgccgaactggaagcgatggcgaaaacgctgtatgactactggtttgtacagtttgatttccctgatgccgacggaaaaccgtataaaacctccggcggtaagatggagtataacgccacgctgaaacgggaaattccggcggggtggaatgactccattcttggtaagtttattgagttagatcgtggcgttacttatagcaaagaggatgttcgaactcaggatgataaagatacgataggcattcttcgcgctacaaatgtgacgggaaataatgttgatattgatgatttagtcttcattccttctagtagagtaaacgttaatcaaatgctaaataaatttgacatattgatcgtgatgtcaagtggtagtaaggagcatgtagggaagaatggcgtgtattatttcgaaaaaaaacatgcatttggcgcattttgttcaaaaattacacccgtcagaaaatacagatattttataaatacattcctgcaatcgaaatggtttaagtcttatataaacaatcagtgcttgggaactaatattaataacctgaccaatacgcatatcactaattgtgaaatcatatgccccactcctgatattgtggcgttattcgagaataaaatgatgccaatttataataaactggcatcaaacactcaagagaatagtcatttaatccaactccgcgactggctcctccctctacttatgaacggacaggtcacggtcaaataa

SEQ ID NO: 27277 - DNA, 279 bp, Escherichia coli
atgcctgatgcggtgttaacgccttatctggcctacaaagtccagcagattcaatatattacaggtactgccaggcctgataagcgtagcgcatcaggcaattttgcatttgtcatcagtttcagtagccctgaccatatcagggctactgataataacttactcgatccctttactacgcaggtaatcttcgtaattaccgctaaagtcgatcacgcgttccggggtgatttccagaatacgggtcgccagggagcttacaaactcacggtcgtgtga

SEQ ID NO: 27278 - DNA, 177 bp, Escherichia coli
atgttttcgcgcttttttgttcgccgcccggtctttgcctgggttatcgccattttgattatgttggcggggattctggctattcgcacattgcccgtcgcacaatatcctgacgttgcgccaccgaccattaaaatttcagccacttatactggtgcttctgccgaaacgctgtag

SEQ ID NO: 27279 - DNA, 381 bp, Escherichia coli
atgagcaaagaaatcagagcaaaaagaatcaaaaatgcaattcttaattcttcaacttatgaggacgtatctaataagacagggattagtgttagtacgttagttagaatttcttccggtaaaacagaaccgaagtttagtgatattattaaaattgcgagggtgacaggtgttgatttgaatgaattggcgcatggagatattgtaaatataaaaaaagatgcaatgctaaaaattgacgagaaaaatgacgaagttgttgaggctcataatttcatcgtttggaatatatcaagtttagataaaaaagatatattatctatctcaagaatggtttatgctttttcgactttgaaaaaaataagtcctaagtatttataa

SEQ ID NO: 27280 - DNA, 396 bp, Escherichia coli
atgaaaaacaataacttatatttggttgctttagtgacatttgttttgttagtagcatcgttttcattagatagttacattttagatatggccgagagttatcttctttttcttttaagtggattgatatttttgtgtctcattcctattgttttagtctcgaattatatgaaagttattaaaccttatctatcagaaaaagaatattgcttgttcgggttgtttagaatccctttcgtcgcaatattattatttagcttcattaggcgatttatcccggagttccatgttcatcccattatgttctgtttgattatgatatttgagtatgtcatttgtatcttgacggcttatgtttttgttaggaaaatgttgtctgtgattaaatttaaatga

SEQ ID NO: 27281 - DNA, 321 bp, Escherichia coli
atgaaccttaaaacgtttggtcggatattagccggtatcataatactggtagcgcttgtgttgttcactgagcgggccatttggaaatattcagacgcctacccttctttcctggccggaaccaaacaaatatcctcaattgagttgggcggaagtttcagaggtgaagacgcaaggtctatttgtggtctaaaagataatgaggatacttacgaaaatgcggatgttgcatttaaagaaaacggtacgtttgtaagatgtgaaaatctcattattacccatgtgtacaaagtggtttatgcaagtgtactgaagaggtaa

SEQ ID NO: 27282 - DNA, 249 bp, Escherichia coli
atgaaatcaggtccgggtatacaaacaaaaatgctggcgagtatggcgcgggtttccgaagccgagcttgtttatgctatcaagcatacgggcgagctgcacggcgttaagattcctgagcctatgcaggcaagaggcaatgccaaaacgagaaattttgattatctgcagtgtgttgcttttgtcgaagaactcgaaaaggcgcgggtgaatgagaatgtaagaaagactgtagggaaaggaaaataa

SEQ ID NO: 27283 - DNA, 504 bp, Escherichia coli
atgaggaaattaattttatgtaatatccttatcttgccaactttattctcatgtgtcgaagcagcgccagcgattacggtaacaagaatactggatggtgatacccttgaggtcaaagatgatggtgagttgataagaattcggcttgtagatattgatgccccggagaaaagccagccgttcggtcagagagccaaacagaaattgtctgagctggtaaaagatgctgatggcgttgctgtatcttcaaccggtaaagaccgttatggccgtaccttagcgaaggtctatgtaaaaaaatgccagccagcatgtctggcttattacttaaatgctgaaatggtaaaaagtggcctggcttgggcctatcgttaccatggaaaggcaaccagtccggctatggaggaactggagagcagggcgaagcaggccaaaacagggctttggtcattaccagatgctgttgaaccatggcgttatcgatatgaacatataactcagtaa

SEQ ID NO: 27284 - DNA, 252 bp, Escherichia coli
atgggaaataacaatgctcaagtaactaagcgggaagtagcaataagtttctttcttttcatttccgtttttctgttgtttttaacaggcatacccaagtttaacgattttatttatctttcaacacctatggtaataggtaagataataatgggttttgtgtttatttttgtggttgcttataacggtgcaagttttatttataaacttctaagttactttgaaggcttaaataataaggatggtgagtaa

SEQ ID NO: 27285 - DNA, 324 bp, Escherichia coli
atgcgaaataaggctaatttattattcattgcgtttatagccataccgttttattccttttcatcaactacaaccatcacgaacttacacacaatgcagttgcaacaacaaatttcaagaaatgcagcagtaaactctggagttactaccaatcatagtaagtctgtaagaagtagcggtggtggtataccaatgtatgacgctgcagctgttgaagcagcaaagcaccaattgtacgagcagtggctaaaagaaagtgataagaaaatgggctatgagaaatggaaagatatgattctggagggacataacaatgggaaataa

SEQ ID NO: 27286 - DNA, 447 bp, Escherichia coli
atgagtataaaaaacagtggcttgctagttttaatgatgacgttttcattggtcaatgtcgctgatgcgaaaaatgaacagccttatagagtagttaacatgagtgatattgccgatgacggaaatcaaaatgttaaatttattaataaaaagggtaactgctactatttcggacaggcattgttaatttctgttcaaaatgcaaaaatatttggcgtggatattcctagcgcaccaaaaagcaaagcgtgggattttattatcaaaagcaaagtctgtcagggtggcgacagtgataagactccctactcagtgaaacaaacgttatatttagcccctgatacgaaaaccattcaaagaaagagtgattctgtactaatccctgcaggtactgagtttttcgttttcccatctgaggaagaaagaaaaaaatattttgataaatga

SEQ ID NO: 27287 - DNA, 507 bp, Escherichia coli
atgaaagagcctgatccaatttttcttttgatagataactactgccggagttataacaaggcaaacaaaaaggaaattttctccagctggtattacataccagcatttagcgcgatagccgctgtgatgtattggaaagttggtataaatggctttatgtgctcaatggttgcgggttgggggctattacttacagtttattcgattatgaacaggagaatgtctttatccaagctaaggatggagtattcctattttaaaaataatggccctgtaatgggtgtgattagtgatgactttctatcacttctggccgattctggaagcattgataattacgccaaaagaagacttgcagaaaagcaacaggaaaaatgtgatgcgctcagatggaatgacttgtttgaaataagagaagaacttctgttattgaaagaaaaggataaaagtttaataggaaagggggctgtaaaattacagcggtacaatcaacaagataaatgctaa

SEQ ID NO: 27288 - DNA, 345 bp, Escherichia coli
atggcatacagcaaatatctgaatgatcccctcgacgaacgctatctgattgagccaggtgagtgggtagaagagggggcaattccagacgaagagctggaagttagaaaacaattgactgcattaaaattatgtgaagatcgtctgcgtaaatgtggtttcttttggcgtttatttaattcggaagaatataaaggctatcttcatatagctaaaacagttaatgacaatctaatgaaacttgtgaacaggacaccccagcataaagctgccatcaggcgtattgtgaattcgatgcctgaaagcaatggcgggcgtgaagccttaaaagactttctcaaatga

SEQ ID NO: 27289 - DNA, 480 bp, Escherichia coli
atgggtactgatgtaaaagtggagtttgaggcaaagagaaacggtaagtgggagcaggtacatactcaatacgccatcgagcgcaattatttgttcttcgcatggttagccaaccaacgaaatgaatatggcgtacagccaatagcaaaacacagaggtttgccgagggattatcgttacgaggatggtccgggggagcattcacaaagctggctgagtgccgatgagatcctgaatgcaccagaccaagaaatcacaatgaaaggctgtttggccgaagctgaatataaaaaatggaatggtgccggaaagccgtcagcggatgttatctatggaccagacctgtcaggtcgtcctggttatattgaagtatcctggacagttaaaatcagagaagagttctctgattttctgaaaactgtagaagcgcttcgaaatgagtacggcgaagtgcgtatggtgtttgggtttgatagctaa

SEQ ID NO: 27290 - DNA, 216 bp, Escherichia coli
gtgggaaataggaaaccaaaagccagatacatcgttggcattcctcatggcctgattctgtacgagggcaatctgcgcattgcagcctggtggtactggttgttcaattgtcgccaggctgtcgcttttgaccggcgttcgtgggttatcaatcccaactactggatcactggcgatacacccaatgaaaattactttaaaaataaggaatcatga

SEQ ID NO: 27291 - DNA, 330 bp, Escherichia coli
atgtcacacaatccttacattgttcagttcccggatggttcccgactatatggcgtgagcaacggcagtggcgtccttctgcgacccttgtttcgctcaccggaagaggctatgagttttccaagagaagctctttacaatgcaacggagccgtctgaggcgtctcagacagacgttaaagtcatcatcgaaccaggagaggcttgggagagtgaaaatcgagcctcattgaaattaatgtggcttactggtcctcagaccagtaacgagcgattggcggaagagtcaaatagtgatcatggactctatggcggtattcaatgggagtga

SEQ ID NO: 27292 - DNA, 1023 bp, Escherichia coli
atgactgaggataaatttcaatttatcaaaaatgcaatattgacatcactcaagcgcttaatattcgtcgccgttgtctatctttgtatttcaaatttttcatatcctgtaactgaactaggaagccagattttttctggcgttactacagcgtgtattcttggtttattatttgcctttatacataccttcatgtactcgcaggcaagcctatttcctgttaccgtttggggaataactacagttataattatcggatttattgcaggtaaatttcttgatcctgccatcgaaaaccctatagcagcactggtcgttatcatttccacttttgctttctggatagtatacagactatcgttacaaggctcacaacacacttcatcgtcgatggtagtggcatcaggaaccgctgtgtttcgcaagcaaaaacctcttgctcgtaagcctactgaacaagatcgtaatactatagctgctcacgaagcaggacatgcaatgatttatgcagccttgggcaatctccccgatgatttccatgtcaggattaaaaaagagacagacagcacaaattctttaggttatgtttccggccttcgggacgaacatacccttaattataaaactgagactgagtggtttatgcttgttttactggccgggaaaatgggtgaaataaacgccaacaaaaacgaatcattaggcgcaataaatgacatgagacaatggctagatttagccactcagtatctttcaaatcagtataaaggggttttctatactactccctctagtgatattgaactgaccagcaataaagaagaaattcaaaagctaaagggcgaacagaacattatgcttgaggaatttttcacattaaatgttgatgtgcataaagagctgacagctgaactccttgataaaggtcttttaagacgcgagcaactgcttccttttttattgaaagttaaatttcctaaaaacttcccattattgccacatcttgtaagaggtaataaatga

SEQ ID NO: 27293 - DNA, 249 bp, Escherichia coli
atgaaaatatttgctcttattttttgtattttccctgtggcttcttttgcttcaagcgaaaatgtagatcacgtttttataaaggcattccaggctgcaatggcttcatcattatgtatagatgttgcgaatataactaaagatacccagcctgaaaaagagcttgagcctcttataaaaatgtgcgcagagaagggcgaacagagtcgcgccattcttaatgcttataccaatgctgaacacacttaa

SEQ ID NO: 27294 - DNA, 594 bp, Escherichia coli
atgctgacgctggttaagaccatgtggcagtcgatgatcgcggcggcttctggagatcgtcaattaataaagaataatgccaaattggttttcacctgttttcctgcagtttgctttattgtatcaccattcattttgtcgtttctttctggtgaaggcggttatacagttaaaactctttcaaaagtatcaatcatttcacaatggttaggctttatttcatcgcttgcactggtgatggtatttaccttgtattctgaacgtggaaagaaattctggaatactggttgtgcagttctatcattaatactcgcatttatcttttttgacagcgctctgttcaacactggtgagaatggttccgctaattcaatgtttattcaatccatttccccggatgttaagtgtgaacgtggaatggttgtttttaaatacaaaaaaggcgatgaatctgaatggcgttgtcctacatcaatggcaatgatgcaggaatcaggaaagatgttcattccatggcctgattatgaagatggtaaaagtaaagatttgactaaaggaattgataagctgcaggatgaatttaaagataaatag

SEQ ID NO: 27295 - DNA, 207 bp, Escherichia coli
atgtcccgtatatcgtataggaaaatcgactcagagaacagcaagcgccttgctttgttatcccttcgtgaatttctgaacgaactaccaaaagtcaccattgacgagatagaaggtctggcggctaccaactcccatctggtagaacagatcccacgctacctgagtgagatggtaagctatgagtgtcgtcttatcggtttctga

SEQ ID NO: 27296 - DNA, 450 bp, Escherichia coli
atgactacagaacaaggccaaccctttgggttcaaagttgaacatctttactctatgttacgtgcgtactgcctgtcagttgccccctaccccctggaaaatattaccgtaccagcggtagcgaatgcttttatgactgagaacacgcctatttcagggaagcggtttaaaatgtcaggcgacgttcctcctgattttaccggccaactcgttgatgcttttggaccatatcttgagcatgacgaatccaggtggcctgcagcaggatctgatgcctggtttactattcagtttatgcgccttaaaactgccgatgacttaaacaaattaggtgatagtctggatgcaatggcgaaatggatggttgcaactggatatttaaccggtgacagtacggatggttatcttccaacgccgaaacttctggaagaaagaacactcaaattctga

SEQ ID NO: 27297 - DNA, 492 bp, Escherichia coli
atgaagaaaatatatacggcagcgatatttttaatgtttacccctttaacttatgccaccggtattccgtgtgccagctgtgcaacggttgagaatgcgataaaaggaaacgctgatgaaacaccaatcatggtgacgctggatacaccgattgacaaaaatgatattacgccaaaagaaatcaatttaatctcacaggacactaaatgtctttactctggagtgctgacgcagactctttcggaaaataaagatagtcgtattattgatgtgaataaaaagatttgcggctccaatactgaaaaagtgtcttactccgttttgcgtattagtgccagcgaacaatacagcaaaggtacaccgctaaaactgtatcatgccgccgtaatgactcccgcaggcccgctattcagcgccgatgtaatgagcgaaatgattaaagatattaccgatgcagctgaacaggccaaggcaaaagggctgactaagtga

SEQ ID NO: 27298 - DNA, 465 bp, Escherichia coli
atgcaaaaacgtagctatacccaggatgcggccatgcctgcaggtcgctccaataaggatattggtgtcatcatgaagccggagggatcggttaaaatatgtgtgttaaataacagtcgtcaggtggataaggtcatcgatggcgagtggaccacgttaaaggtaacgccaaaaggtgatctccctaacggtatttatcagctttcggacgcgctgcaagcgtcgaagaacgtctacccccattcccatgtaggccaggttgtccatgtcgatgaacgtcacgtttaccaactggctgagaaaggcgttgttcagcacaatcgcaacgcatgggagaaagaacctgtgataggaaaaaattacgaggtagcatattctcgtggggtagggaaggtaaaggctgaattgacccaagatgaagcgcagaagttaaaaaatagtcagtctaaatcgcgttcgctttaa

SEQ ID NO: 27299 - DNA, 3960 bp, Escherichia coli
atggcagaagctaaagcgaaaaaaccatttcatgagattgtggctgaaaacctgatagcccagctcaaagagggtacggcgccatggcagaagccatggaatccgggcgcaccaggtgccgctcttcccatgaaccctaccaccggtaaacgctataagggtattaacgcgattcaccttatggcgcagggttacagcgatcagcgctggatgacctataagcaggcgacagctgcaggtgcgcaggtgaggaaaggcgaaaaaagtacgcatgtccaatactggaaattcactgaggaacgtatcaagcgcaacgatgatggtagcattgtgctcgataaagatgataagccggtaaaggaaaccgtccagctggagcgtccgaaagtatttatcgcctcagtgtttaatgcagagcagattgacggtcttccaccaatggccgttcgccaggataagagctggaacagcattgaacgtgctgaatccattcttgaagcctctggcgcgaaaatctcacatgaccaggtagaccgcgctttttaccgcatgtctacagacagtattcacttaccgcagcaggccgcttttccaagtgccgaccgttactatgccactgcacttcatgagctgggccactggaccggtcacgcatcacgccttgatcgtgatctggcccatccttttggtagtgaaggttacgccaaagaggaacttcgcgcagaaattgccagcatgatcatgggcgatgagctgggaataggtcatgacccttctcagcatgtcgcctatgttaaatcctggattaaagccttgcaggatgatccgctggaaattttccgtgctgcagctgacgctgaaaaaatccagggcttcgtgctgggccttgaacagcagaggacacaggaacaaccggtaacgctggaaacagagcagcgcgtaaaagagcataacgaggtcttggccgaggtacagcggctgactaacccgcagattttcgatgctgaaacagtacaactttatcatttcactttcatgactctggaacagacagcggaggaagctggttacgttacctattacagtcgtggcactggtgagctgggcgaagaaaccattcgcgttaactacgaagacaataacggcaatactattcctgttcatactgatgtggttgggcgcggaaaagcgttgacgtatatcggtgatgaacgtgtacccggaacgggattctcttctgataatgaatggcaaagtaacgctcttaaaaccgctttcgccagcatagataacaacctgactttagcggctaaaaaggttcagagtcagattgaaaatatcagtggcgacccgcgagaattaccgcaggacgttaagtttcctaaaaactggtggcctaattccagttttctggcgtcaaaacctaatggagaatcttccgcagcgcctgcgtcagaagaggaatccctagaggtttatcgtgaaaggaagagggcagaattatttaataagccagcgcttcccaaggaactacaagaacagctgaaggaaaatattaagcggcatgctgacgccatcgaaacggggcgcatcaatatgagcagtaaacctgaaacgtctgttacacccgaacagcagcggcagtatcgtgctgagaaattcattctttctaatctcgatagtggcctttctaagcacgtccagaatatgaaccgtcgccagcttacactatcgcgtaacgtcctctttgatgcgcagaacagcaatcatgatagtgatttctggaagcgtaacagcgaatttcattcttcattcagtcaaaactggaatgaggctcaggacaagattaagagcgcatatcgtgagcttgatttagcattagccctcctgcctgagccgaaatataccattgtggaaaatcccggccagaatgagcatgtgaatatcatcatgcagaccaacagcgcggttaaggcgctggccgccgttaacgaaggggataaccgttcaatttatgactcacgccttatcgataacggtcaggtcgatctaaatgacctgcagaacaacttttaccaaactcttgaggcagaaaaagcagccttaacgcaaggtgttatcaagcctgatgatgagattagcgtactcccgccaggagaagcgcaggaatggtatcaggaccgtgttgaaagcctgatggagggtgctgacagcccggatgaaatgaaaagcgctctggatgcgctggggccggaaccgggcgataatgaggctgttttccttggtgaagacggcgggcgagttctcccggaattcagcttgaatgttgctcaggaaaataccccaatcaatgtaccctacaaagaacgcaatgaggccaaagcgcttggggctaaatgggatcgaaccgaacagacctggtttgtaccaaaaggcgtatctcttgataaatttgcaaaatggagcggtgagccagctgcagctgcagaaaaaaatacgccggttgcatctgtgaaagaagtaacgccagaagtgggtgagcgtcaggatctggccgtcccttacaaagaccgtgcagaagctaaagcagctggcgctaaatgggacaaagagaaaaaaacctggtacgccgaagccggggcagatatgcaaaaactggcgaagtggaaacctgaaaacgtagtgatcgagcagtcaccggcaatgacgctgcaggaggaagtggaaaccgcgctgaaagatattgggtgcatcctcgatgccgatactgaccggggccagaaacatccaattatggatggtgagaagcatcggatcacggtagagggtgacaagaaaggggagaagtcaggtttttatatcatccacactgacggccatcctgcaggctttatgcagaacaaccgcaccaaagaagagttacgctggtcttccaaggggtatgtgcagtccgacgaagaaaaagcgctcctgcgggcgcaggcagctcagaaacaggccgaaaaagcggcacagcaacaaaaagaccatgagtcctctgcaaagcgtgttgaaaagcagctcgccaaactcaatgaacctcagcagcaaactgcttacctggagaaaaaagggctgcaggtgcataaaggcgtgttcacagacaaggaagggcagaaaacctttatccctgcttatgatgtccagggtaagcaatggaccatgcagtacatcaacgaggacggcacaaaacgttttgccaagaacgcccgtaaagagggatgttttcatgtcgttggagggctggacgcgcttaaagaatccccggtgctgatcgtggccgagggttacgcaacggcagggagcatcacagaggctactaatatgccaacggtcgccgccttcgattcaggtaatctggaacctgtcgctaaagcacttaaagaagcctaccccgataagccaatcatcattgccggtgatgatgatatttctcagtcatgcaaaatgaaggtgaaggataaggccagtgtaaacgttggcagggaaaaggcgctggagacagcgaaagctgtcggcggtgtggcggtgtttccggtatttgctaaaggtgaagtacctgggaaagacgaactcagccagattaaaccggcggtgtatcttgcacaccagaccgcctcgcgcaaactggaggctcatacgagcggtgataagccactcccggaagccgaagtgaaggtactgcaggcagcgcaactatcggaaaagcagcttgatattattcgccgcgctgatcgttacactgactttaacgatctggccgtaaatagttctcttggccgggaaggtgtggcgatgcagttgaaagccgtcattgctgaccagctgaataaaaaacagcagcagtcacaggtccagaccgaagagaaaaaactcgttcaggaaaaagagaaaaagcggaccattcgccacgctatgtaa

SEQ ID NO: 27300 - DNA, 330 bp, Escherichia coli
atggggttatttaatcagagtgcggagaaggagaagttagaagcactggaaaatgttatttcaaaaaacaatcggggtgtttttaaacgaattgatgagaatcgcgagctactcgaattgttatatgaaaaaacgccagagcttatggatgaatgttcctggattcgtggctggattgaatctcaggatgaatttttaagtaagttggcggaggtttccggtgtggaaaatcgaacctataaccttactgctggtaaaccgtacccacgtccttttccgaaagaaccggattgtcttacggattcttcgaatgaggataataccgtatga

SEQ ID NO: 27301 - DNA, 156 bp, Escherichia coli
atgaaagaaaataaatcagcaacagattggtattacttacctaataaaggtggtttgagcataccgaaggtattggtatgggttcctacattgataacgttgaacgtcactgctgaggattcaagtacaaaagaggtccagcatgagaaagcctaa

SEQ ID NO: 27302 - DNA, 234 bp, Escherichia coli
atgcaaaacgtgtcactgatggaagaaacactgcgaaaaatgaggaaacatggtagccaaaacgtcgaggtaacacagtctttggaagcatttggccgttataaatcccgccctgcttttcaggactggatctaccgtttgaagaaaggcgaacgcttaccacggggccgttactttgtaggcaaaaaaccaggtcgtccattacagatcattgacgactttttttatcgttga

SEQ ID NO: 27303 - DNA, 483 bp, Escherichia coli
gtgagaaatgaaacgaaagaggctatgcgactgtttttaggaggccgctgttacacggctgaaaacctagaaagggattacctggccgaagtgactggttacagtgacgagcactgggaagccccgcagcgtgccgcacgtctggcggcagcggtaaaacgctacaagacctcagaaatgttacgtttcattttcgcgacagttgcacacgatcccgacccagatttaacaccactggccgttaaacgtctgtgtaaagcactgtttggcagaaccggcagccagtggctgattgtggacattttcggtgagaaggggcggcagcgccgcagcaacgacagcaacccggagtccgtggaaaagatagccgcaaaatatcgccacgaagccgggcggcactggtctgcaacgcttgccgaaattgaacgtataaaacggctctatcagtctgaaattcgtgtatcaagagaaaagcaaagctaa

SEQ ID NO: 27304 - DNA, 198 bp, Escherichia coli
atgtcaaacagttcagtcagggcaagaggatttgaaaaagctgaggccagtctgaggctggaaggtatggaccctagcggaacccccctttatgaaggtatcaaacaacgcatcattgccggtgaaattacttacgagcagggtagagcggagatattcgaatatcatgctcaacgtgcaaaacaacaccaggcatga

SEQ ID NO: 27305 - DNA, 897 bp, Escherichia coli
atggttaagactgacagtatcgggcaggaggtatctgcccttgataaacgtacccgcactatcagcagaagcggtattgttttacttatctccgggctggtaacactggtcgttgcgggaataggctatgctatttcgcgtttgttaagtccgggtgttaatgattttatgatagacgtaccggcactattgatcccttctgccggtcatggaaatggaagtgatctgttctcagctgcaatgccattcgaatcagcgttatccggcttcctttcatcgcctgtatttatcgctgttccggtgataattgctgtcggtttcggtctgatgaaactgatgcagggggagggaataggggcatttcttcctgtactggcaatcgtccccatgatctttgcagcgaagatggttacgggcgtacttactgatactgatacgccagaagatagttcatcttcaccaacagaacttgtcaggcagcttatcaaggatgataagccagcagagcttgttacctatcttgaaaaaaacagcggccagactccagaaaccgccaagttacttgattacgtcaaagcgcaggccagtatccgggaaaacaaacccgatatcgatctggtcaggaaggttgtagccgactatcaacgtaatccagctgagcctgtccctgctgatgtcagatacgggcttgaaatgactgcttttaaggaaacaatcacgccaccggctacccgttatgcgcagggaaaactgaaaaaggcacgtttctttacctctgtttcatctgcaggattttcgattagtgggattcttgttctcctcggaggcatgttattcctgtggggggcgcagatgaaaaaacgagtagctttcatcaaagatgttgcactgaaataa

SEQ ID NO: 27306 - DNA, 1113 bp, Escherichia coli
atgaatactcaaactgccaccaatactgcaattacgccgtatgtcattaatgcaaccgaactggaaaagtttggtttacgccaggaagatgaatctgagattcaggccgttgccgagcgaattgatgccagcaacccggacacggtgtatcagtttggccgtgatgttgcggaaaatactgcagcttatgcagatagcctgttggaacagatcagaaataaagatctggatgacgctggctctaagctgacggaagtagtcaacctggcccgcagcgtgaatgtttctaacctgacggaaagccgttctaacctgccggtcatcggtccgattatcaataaaattcgcacacggggtaagaatttcgctgcacagtttgattctacccgcgagcagatagatgcgctggtatctgaggtgtctattacgcagcgtagcctggctgctaataacggtgcattgcagcagatgtttgaagaggtggtaaaagaacatcaccttcttggcgtccacattgccgcaggtaaggtccgtctttcgcagctgcagctgcaggctgagaagctaagagcgagtgtcggcaataaccctgcctctttccaggaagtagccgatctcgatacgctgatttctaatctggataagcgaatcggggatttgatcgtgtctcagcagtcggccatgcaggttctgccgatgattcgtatcatccaggcgaataatcagaaccttgtcgataaatttcatagtgttaaagaaacaacggtcccgaattttaagagacaattcctgttggctatttccctgaatggtcagcgtaatgctgttaacctggcgaatgatattgataacgccaataacgaactccttcgcagtaacgcaaaactgctgcaccgaaatgcggttgaaacgatgcgcgctaatcagcggcttgtaatcgacgtcagtacgcttaaagaggtacaggatacgctgatccagactgtcggtgacgttattaagattcaacgtgagggggcgacaaaactccgtgagactgaaaagcaggtgttaaccatgcgtgaaaatctcagggccagactgactcagaaagggatcactcaggaggtttaa

SEQ ID NO: 27307 - DNA, 786 bp, Escherichia coli
atgacaggtgcaggaaatatcgaggttccaaccaaggaacggctgaaagaggtcattttaccgaccttattcagcgatgcaaatgcgataagcagatatggcgaatcggaaatttcttctaatgctatggaccgctactcgtcgcttatggaaaagtcagctgtctccgaattatccggctcaataagccaaatagttaatgcgctggctgaggccgatccccggaccattgcaaggaaaccatcatggtttgcccgtttttcaggtacacatcttgaaaaaaaggttcgttatcaaaaagctcgcatgaatgttgaggctttaattggtgaagggaaaagtttcatggagcacgtatacgaaatgcttcatgcgctggaagatctcatggtgattcatcatcaggaaattgaaaggctcaaagtgttcattgacgccggaagggaatatttacgcgaaataccagaagaaccgaaagccgacgacctgaatattgtcttcgataagccgcgtgaacgatttgccaggaaaatcgcaaaccttgctacgttgcttgcttcgcatgaaatgagcgtcatgcaaatgaaaattacccgcgctcagtgcattgatattctggatcgtttcaacgaaaccgtgaatgttttggttcctgtctggcgacaacataccctgtcgctaatcacgacaacaaaaatggacccggatatggtcagcaaagcgactcaggcacaccaggcgcttatgaaaagtctgcataagagtttagaggggatcgataaatga

SEQ ID NO: 27308 - DNA, 474 bp, Escherichia coli
atgacaaagattttaactaccgcagaacacaatcaagcaagagttgatctcgccacattaaccgctgtcgttgagaactacgcagttacccaccccaagaaacatggctggagtaccctgggcgcactttgtatgcctgctgttttcgttcttgctgttggataccccatcatgacggatattgattcactgactggcgcagtattctcattgattggatgtgtcatgttgtatggcgctgtaggggctgcaggttatctccagggagaatggcataacgatgaacttgatatgtcagatcttcataaaattcgtgctttttcaccatttgtgaaacagctggtcactaacggcatggcaaagaataacggtctgctgacttataccctgcttgaaagcctgctctgtgaaatcgagttcgcgctgaaagaagatgacctgcgtttcaatataaataagcaacttaatgtgtag

SEQ ID NO: 27309 - DNA, 342 bp, Escherichia coli
gtggtcggaacttcattcagactcagaaggtttattgtaggtaatactgtatctcggtttcttttgcagagacaattttatgtgttcctggcgtggggagtgatcaccttcttgcaggctgttctctttgcattagccggtgaatacaggtattccctgctttgcctttttgtgtctgctcttactcctggtctggccccgaacgacagctttgccgaacccttaaagagccagaacgcggcgatacgcgccctggctacgtatggaagtcgccattacaggaaatgtcgtttactgtgcctgttggcagtcatattgatgatggtgagcatcataaaataa

SEQ ID NO: 27310 - DNA, 378 bp, Escherichia coli
atgatttatgcaggtgttttgaagccgtttgtgggagctatcagcgtcggctttttgatttcgcttatcattgtaatttggttaatgtggcgttatcgcaagtggggtaaggatcggtttcttactgagagtctggtgatattggttgtatttattgctagtttaatcacggtgtttctgttaccaacttacaacgatgaagacgtgaaatatggcgagaagttatccagctgcaggatgattgaagaaaatgccttcaatggttccttgaatgaaaacgtcaataaaatagattgcgatggcgtgatcacaaatattcctgtcagtacgtaccaaaaaatgatttacgcatatcaggaaaagaataaaggaggttag

SEQ ID NO: 27311 - DNA, 324 bp, Escherichia coli
atgaccaatgtcgttaaatttcctcgtcaagaggacagtaaaccgcagcagggccagccggtcgagaatgctgccggtcaaacatcagggagcgccatgcgtaatatcatgcatggagtcattggtgcggtgtacatggtgctggtcattctatggattcctgttcgcttcctgctgatcgcgaacgttgtcattcagtttttcaaaatgatgtttaaatggagtgatggcccgtttgctgcagcctggccgtttgtgatcagtttctttgtactggcagccctgacttacattatggctacatggaagcccaaagcgccgtaa

SEQ ID NO: 27312 - DNA, 225 bp, Escherichia coli
atgaaaaatacacttatccatactcactgcaagcgttgcggctgcagtctcaccatgcttaaacatagcgtttttggtgcaaattcattaaaggctgaattaggtcaaatttgtgctgaatgtcttacgccagaagaaaatcaacgtatcagtaaagaaatcatggagcttgctgttcggcgcgtatgccagccaacattaacgcttcatcgcagaggacactag

SEQ ID NO: 27313 - DNA, 123 bp, Escherichia coli
atgtcctataatatttgtgaaggccgggtaaaccactcaggtcagcagccggagaattccgatgaaaaatacacttatccatactcactgcaagcgttgcggctgcagtctcaccatgcttaa

SEQ ID NO: 27314 - DNA, 507 bp, Escherichia coli
atggaaaaatctacatttggagcaattgcaagaaatctggataatcgcctttacagtggcggtttacattttcttattggtataactggcacaggtaaaagttctatttgtgaaattatacaaaaaaacaacaaatctgatgctgtttattttgatgttcaaacggaccattcaattgaaaattatgctaatttggtagaaaaaatcaacctaactaacaaacatattgtgatagatggtttggtaatttttaaagaaccgggtaacaaggttttagatgccttagtaaaacatgttcatattaaaaagatgggggctttaatactgacccaatcttttaatgatttatcatatgaacatattaatgcttcatcatctgtatctttgatctcgaatttgtatcctcgcgaaattagtaatgtgtatctacattccgttgatataaaaaacgatataaatgaaaaatacaaaagtctaacagagttttggatgaagtattcccgttga

SEQ ID NO: 27315 - DNA, 585 bp, Escherichia coli
atgaatgataatgcgcattttgaaacggtattttctacattcccgctattttattttgcaatggttgttgctggtttgtcgtatataacttttgcggtaatgatgaatttaataaagcgtagtcagtttttaaagaaagttttagatggtaagtatgatctacctgaaaatggtgataatgaagaagaggtctggaagaaggaaccatttttaagttttataaaatgggacagaaaacgctgcattatccagtcaatagtatctgccgttttctttgttttgatcattgcatcatttatttactatctgcttgaggtgggaaccaaaaaggatttatatctgtttgtttttactttttcattacttgcaagttgtcacaatttaataaagtctattcaggcaatgattgacgccaagaaaatgaataaagatctcaaagagaatataagtgctgatttgtttaattcacactttacaaaaataattaaagtagaaggtatttatttatactgctctctattttttgatattgcatgtatcattgtctttggctggatgctatattcagaatttgtcggaaaatag

SEQ ID NO: 27316 - DNA, 249 bp, Escherichia coli
atgatcaattacgtagaaatagcccggagctggcgattacagaacccggaacatgctgatagcggcattgtgcttatctggaatgatgcggtttacggctggaaaaactgcctgcgtgatcctcaacatgaaagacctggagcaatcgctgttgattccagtgagcatatttttattaccgaaggcggtaacgattatgatggtgcgaagtgttgggtagttttggaaaataagaaggaacttatatga

SEQ ID NO: 27317 - DNA, 894 bp, Escherichia coli
atgaagcgcaccgccaaaagcgccatcgattctgttaaagatgcgctgatgaaaactcatcgcgatgatcttatacacaaatcagatgaagaattacgccaggcacagctttcgctctttgatctcgcaccttgggatgatgacatgcgggctatgccgaatgattacgcgcggtctgctctgttcactgtaaggaataagagaaaaaaacgtgaagcctgtgataacaaagctatttatcacgttaataaagacgtcagtatcaactacaccggtattgagttacgggcagaagatgatgagctggtatggcaacaaatactggagtacgccaaaaactatcctttaggtgagaaaatttacttttcgttttaccagttgtgtaaagacttaggctgggctgttaatggtcgctattacaaaaaagctgaggaatgcctttccaggctgcaggcgacatcgatgcatgttacatccgaacgattaggccgattgaaatcgctgtctttaatcaaagagtttgacgttgtggaacgtggcaccaagaaagccgtttgtgaagtagaactctcaccacaaatggtttatctgtttgcaggtgatcactatacaaaattcatctggataaaataccggaagctgtccccgataacccgccgcttattcgactatatggcttcacataaagagccgtttccgctcaaactcgaaaccttcaaaatgatgtgcggctccgatacagaacagggctggaaatggaaacaacaggccaaagatgcgtgtgcagaactggctgagagtggtcttgtcagttcctcctgggttcagggcgatgcaattttttgtttaagggctgctgatgcgaaactaggggaagctgatgcaaaggcttag

SEQ ID NO: 27318 - DNA, 453 bp, Escherichia coli
atgaaagcagcaatgaaattaacctctgctatggtgctggccgcaagcctgttaatgactggctgtgtctcttcgggttatggcaactattcaaatgccagcatgttcgcctctacgagcatggcagataacaccgttgcgcatctggcggcgctgtatcctccgggacgaactacgttcacgatgaaacagcctgccaaagatcagttcggttcggcacttgttcaacgtcttcggtcgcggggttatgccgttattgagttcacgaaagacggtaagccacagagcgccctggcaaattcaggcaccactcttggttatgtcgtgaacaccgtcgcgcctaacctctaccaggtcacaacgtatgttggtggcgtcacgttaagccgtggtttcgctctggcaacagacggcaaagcatacccggcaggcccatggactcgcgaggaataa

SEQ ID NO: 27319 - DNA, 1338 bp, Escherichia coli
atgatggcaatgcagggcgaaggattatcggcagctcttgcggaagtagttcgtttttttgctgtgttaggttttttcttctatctgctaaaaaacggcccggcaatatcggtagatattcaggattcattacgtcaactcgcggctaatgcttctggtttatcaaaatcattctcgccttcgggcattgtagatatagggtttgatatcgtatcaagagtcgttgaccagtcttctatttggtccccggcagactccactgtcggcttgattttagccggagttattctatgcgtattagcacttgtcggtgtgaatatgcttcttctgctgattaccggttggattttaagttacggcggtattttcttactcggttttgggggttctcgttggacttccgatattgccattacatacttcaaaacagtcctaggaattgccctgcagctgttcacaatggttctaattgttggtattggaaaatccttcatagaccagtattaccaggcgatgggcgctgacgcagtacaaatgaaatctatgtttgtaatgcttgtagcctcaattgttcttttggttcttgttaataaagttcctcctatggttggtagtattgtaggcggtgcttcaatgcaaggcattggtggttttggtgccggtgcaattattggggctgcagctgcagcaggagccgcaatagcaacagctggcgctgctgcggcggcgggtgcagcaaacgctgccgggggcgcatcagcactcaaagcggcgtttgaatcagcacaagcggcaatggccgaagaatcaggttccggcggttctggcggttccggtggaggatttggcggcggggaagataccggttccgtagatacttctggaggccaaccatctggcggttccggtggttcgtctgcaggaagcagttcaggtagtgccagcggaggaagtcaggggtttgcttcatcgttctcacgagctggccgcatggcttctcacatggcgagtagtctggctgacggtatggctgcacgcaatgcggccaagcatgactcaaaaatcagcgcggcaaaagacaccattgcacagactgcaggtggtcagcttgcttctcaaatacgctcgcaaacagctgcgcgtcagtctggcccgatggtatcagatgacacggctatgcagggcgctttcgccagtaacgataccgccagcgcaaatcagtttggtggtgacggactgagcggaagtcagccggatacagacactggatcggcagagtcacagacgccacaaggcagtgatgaatatgaacagttcaaaaacaaacaaaacttctaa

SEQ ID NO: 27320 - DNA, 306 bp, Escherichia coli
atgaaagcaattctttccgttctggttttagctgcaagttctgttgctatgacagccccggctaaagccgcagatccatgcgaacaggtcttatgcctgtatggtgtgatgacaaccggcaatatcgcaagcggatgttcagggccggttggtgactattttaatatcatcgagaaaaagcacggttctttcctgccggatcatacttcccgcaagcgtaaaaaacagctggataagtgctcatccgctggaagtgatgtggttgaaaaaattaataacaagtttggccgtctgcgcgggctgtga

SEQ ID NO: 27321 - DNA, 771 bp, Escherichia coli
atgccgtatttagatatgccaccggctcaggttgaacgtgtagtttgctcaattactgcggctataaaatatcaggttccggctaacatcatgttagccgtagctgaaaaagagggtggtagtaccgggcttgagaataaaaaccgtaactcaaatggcacatatgatgtgggccgtatgcagtttaatacgctttatttaaaggatctggaaaaatacggcattacagcggaggacgtagcgcagccgggctgttattcatatgatttggctgcgtggcgtatacgcggccatatcaaaaatgataagggcgacatctggacaaaagctgcaaattatcattcaaaaacggctcaatttaacgaggtctatcgtgctgacctgataagaaaagcagctaaatggcagacatggattgaagcacgctttaatacgtttgatgcgacaaagcctgccggaacgactccacagccgcaactggcggctgcaggggttacgccagaagaaagggcggggaaaagcattgcgcaggttactgaccttgcacaaagcgacacacacgctacagaaccgccaaaaaatgacgggacagcagcaacaccatctacaccggatcaacttattggttttgccgcttctgtaaaacaaattccggttaaaagcgtcgcaaaggctgactaccagcagcccgcacagcaactacctggtcgttataataaggctgcagcggatgcactggctgcagtatatggaaatatcaagctacgttga

SEQ ID NO: 27322 - DNA, 564 bp, Escherichia coli
atgcctcttttttgctttgttctggcgtataaccttgcaaggccagattcatacacctatagcgtatattcaaaagtctgtcagcgactgatgatatatggccttctggctacgcctgcatacataatgctgggtggtgtaattgatggttggtggccgcttaatattctttttacattgcaggccgttactatcatctgttacctcatcgaattgggcgagcgcagacatcttctctttgctttattagtttttgctggatatggcgcgatagttgaattttggtggcctgcggtggctatgggtgtatgtatatggctatattataagaagggaaggggagtgtttattctccttgcatttgtcagctgcgtattactaactgttattaactataatttttatgcactactggcaataccgttaatttccattattgggaatatccgttttaatctccccaggctaaaatggtttttttacgtcttctatcccgcacacctttatctgattctggctttacagctttacctgactacaaagggctatctgtttttcacatga

SEQ ID NO: 27323 - DNA, 1242 bp, Escherichia coli
atgaaaataaaacaggccctgttcaccgctggctactcctcattctatttcgatgaccagcaggcgataaaaaacggagcgggtcatgacggctttttttataccggggagccagtaacacaggggtttaacgccgtacgtcaggccggggagtgcgtatcggtacagttgattctggaaaacggcgcggtcgccgtaggtgactgtgctgccgtacagtattccggggcaggtggtcgcgatccactgttcctcgcggagcactttattccgttcctcaacgaccatatcaagccattactggtaggccgcgatgtggatactttcctgccgaatgcccgtttcttcgacaaattgcgtattgacggcaacttgctgcataccgccgtgcgctacggattatcacaggcgctgcttgatgctaccgcgctggcaaccggccgtctgaaaactgaagtggtctgtgatgaatggcagttgccacgcgtggcggaatccattccattatttggtcagagcggcgacgatcgatatatcgccgtcgataagatgatccttaagggcatcgacgtgctgccccatgcactgattaataacgtcgaagagaaactgggctttaaaggtgaaaaactgcgcgaatatgtccgctggctgtcggatcgtattctgagcaagcgcaccagcgcacgctaccaccctaccctgcacatcgatgtatacggcactatcggtctgatcttcgatatggatccgcttcgctgtgcgcaatacatcgccagcctggaaaaagaagcgcaaggcctgccgctctacattgaaggtccggtcgatgccggtaacaagcccgatcaaattcgcctgctgaccgcgattaccaaagagctgacgcgcctcggttccggcgtgaaactagtggccgatgaatggtgtaacacctaccaggatattgttgatttcaccgatgccgccagttgccacatggtgcaaatcaaaaccccggatctgggcagtattcacaacatcgtcaatgcagttctttattgcaacagccacagcatggaagcgtaccagggcggcacctgcaatgaaactgatgtcagtgcccgcacctgtgtccacgtcgcccttgccgctcgccccatgcgtatgctggtaaaaccagggatgggctttgacgaaggcctcgatatcgtcttcaacgaaatgaatcgtactatcgcgctgttgcaggctaaggattaa

SEQ ID NO: 27324 - DNA, 1653 bp, Escherichia coli
atgtccaaaccatttatctggcaagaaccgtttctacaaaataaagacggtacagaatatacattaattagcgatcaacatattacagtaacggaattagacggcgaagaagtaataaaaatcgctcctgaagcattaacgctgcttgcccggcaggcattttatgaagcctcttttttcttacgttccgctcatttgcaacaggtcgccagcattcttaacgatccgcaggccagtagtaatgataaatacgttgcgttgcagttattacgtaatgctgaagtctcagcaaaaggggtattacccaactgtcaggataccggcaccgcaactattgttgccagtaaagggcaacagatatggactggaggtaacgacgccaaagccttaagcaaaggcatttacaccacttttcaggaaaataatctgcgcttttcacaaaatgcgccgctggatatgtataccgaagtcaatacgcaaaccaatctcccggcgcagattgatatcagcgctgtcgctggtgatgagtaccattttctctgtgttaataaagggggcggctctgccaataaagccgcgctttatcaggaaaccaaatccttattgcaaccagaaaaactgaccgcatttttaatcgaaaaaatgaaatcgctgggcaccgctgcctgcccgccttaccacatcgcctttgtcgtcggagggctttcagccgatcaaaccttaaaagttgccaagctggcttctacgaaatattacgacaatttgcccaccagcggaaacgagcagggacaagcattccgtgatattgagctggaaaaagtgttgctcgaggccagtcagcaatttggtattggtgcgcaatttgggggtaaatatttcgctcatgatattcgcgtcattcgtctgccgcgtcacggtggctcttgcccgatagctatggcgctctcctgttctgccgatcgcaatatcaaagcaaaaattaacaagcacggtatctggctggaaaaactcgaacacaatccggggcaatatattccagcctcactgcgggaagaaaatcacgcgcaacatgtacaactggatctaaaccgtccgttgcgtgacgtgatgcaggatctcgccagattaccggtaggcacccgcgtgtcgttaagtggtcccatcgtagtggcacgcgatatcgcccacgccaaaataaaagcgcggctggataacgccgaaccgatgccggattacctgaagcatcatattgtctattacgctggcccggcgaaaacaccggagaacatggcctgcggttcactgggtccaaccacgggcggtcgaatggacggttatgtcgataccttccaggcggctggcggcagtctggtgatgttatcgaaaggtaaccgcagccagcaggtcaccgatgcctgtcacaaacatggtggcttcaatctgggtagtattggcggtgcagctgcgttactggcgcaagaatatgtcaaaagtctgcgttgcctggaatacccggagctgggtatggaagcggtgtggatgatggaagtggaaaatctgcccgcattcatcctggtagatgataaaggcaataatttctttagtcagtttgagcagcaacaccgctgcgccagttgccctgcgggacattaa

SEQ ID NO: 27325 - DNA, 705 bp, Escherichia coli
atgctgggggctcaatatctttctatccgtaatagtaagaatgaaacgctcttgcgtcgcaaaatcggtattttgcctgctgatttcagtattgagataaaaggtggaatacacgcaaatgaaggcactatcgtaatcaccacacagcatccttgtgtagcaaaacttaaagataaaacattggaggctacacgtaagcgtactgaggggcgaacagagatacaactcaaagcggaaggggtacctccggcatttattacattacaagttctgcctaatttggcggctgaccccatcgatattgagttaccttttcccgctaaaggctgtctcgctcttgatgtaaacggacgtcctctggataaaaacattacgctgcatgatctgctgggttccagagcgtttctgttctccagaaatggcgagccgacaagatatacattgcagttgcatttgcgctccgttagtggattacaggcatggcacgaatggtgttatacggcgttgagcgatcgtcctgttgaattgaatctctatagtctgcgcgaacatattgagaacctgatttcacttgaggcaggtattgaccaggttgttgagatgcgtattacggggcgggtgtggtcatggcctggcaaattcgtcgctataaatacagtctgcgctatgattatgaaaaagaactattactcagccagtcagtga

SEQ ID NO: 27326 - DNA, 201 bp, Escherichia coli
atgaaaaagcgtcggaaggaaccggaaacgctacgtgaacactgtcgccatatttttggtgacgagccgccagtgctctgtgtatgggaaacggaatttgattacgcagatgccgaactcaaggcgctggcggctaaagagtggcaacagataggcgaatgggatttgagtgcttactatgtactcaatctccttttttaa

SEQ ID NO: 27327 - DNA, 540 bp, Escherichia coli
atggccattaaaaaacgcagtgcaaccgttgtgcctggcgcatccggtgcggcagcggcagttaagaatccgcaggcctctaaaagcagcttctggggtgaactcccgcagcatgtgatgtcagggatttcacgcatggtgccgaccttaattatgggcggtgtgatcctcgctttcagccagctgattgcttatagctggcttaaaattcctgctgatatcggcatcatggatgctcttaatagcgggaaattctccggtttcgacctttccttactgaaatttgcctggctgtcgcagtccttcggcggcgtgttgtttggtttcgccattccgatgtttgccgcttttgtggcgaactctatcggcggcaaactggcgttcccggctggttttattggcggcttgatgtctacccagccgacgcaactgctgaacttcgatcccagcactatgcaatgggcgacctcttcgccggtgccgtccaccttcattggtgcgctgattatttctatcgttgccggttaccttgtgaaatag

SEQ ID NO: 27328 - DNA, 786 bp, Escherichia coli; identical to SEQ ID NO: 9891

SEQ ID NO: 27329 - DNA, 504 bp, Escherichia coli
atgaatttctatgatgagagtctacgcagaaatgtatcactgcatgctgcaacagataaaataaatattcctggcgtttttactattggaggacatggatatcctggttttattacagatgaaagtggaaattatgagaccgctgagggattagccaagagaatcagagctaatccacgctataaaaagggaatgtctgtttggttattctcatgtggtacagccagagagggaaataaatcttttgccagcaagttagccagagcacttcatgcaaatgtcactggagctgatacacaatggcaagtatggatggcgtgggataataatactcctctttttaatacgatccaaacaggacttacggataatatctcggcaattgacacaagtaataatgtcataactggtaataatatgggccgctggataacgtttggaccttcaggtcaacccatttcttccactcctggcaaagttatgagaccaagtgatataaaataa

SEQ ID NO: 27330 - DNA, 1098 bp, Escherichia coli
atggttgataacgtaactgttggcagtgtatgtgcacaatctccttctttcatgcctgagttggatggaggaaaaaataaaactcaattaatcgttaatgatatagtggcgtatcttaaaaatccttcagtttattcgcttgaaaaagagggtccgttaaattattttgttaatcattgttctgaagttgagttgggtttctatagcgatggtgcatattcaattcttgtcaccagatctaagcaagaacctggtatgattttaaccgtaagcgatgctgatgcaatcaatatattacatattctcgtatctccagcacggataaaattcctggataatatttttacttgccttcatacgtatgcagatgatgagacttttacaaaagagcagataaaagctaataataaatatgacgttataaaatacaactgtaagcttttttttaatgaaaaaccagaaaataaaattgagtgtaggcatctttctctgcaatattgtatagattcaatgaatgaacattcagggaaggttccattaaaggcttactattcatctccggaagatatccaaaaacatattccattcaagcttgagcagcaatttcacaatctacaaaaaaatccaccacccggtacatgcgtcgttgccagtgataaatttggagaggcattatctgtcttctttcaaagaatggaaaaagagaaattaacgcatatggctgcaatcgttcaatctcaaacacacgctatggccgtccgcttgaggataaaaaaaacgcctgctggagaaaaagaatatgttgtatccttttatgatcctaatgcaaccaatactgcagtacgctataaagcaaacaactacgattcttttggcacattgcaatcctttatgaacattaaccaggaaacacaaaaatgggttacaacagatatttacttccagtgtgtaggaataactccttatcttcctcgagaacaggcccatttattaagtggtataaataatgagttgcaaccaccattaacaccatcagcattatttctattaatgagaatggggatacatgaaaacattgttcttttttcgataaattaa

SEQ ID NO: 27331 - DNA, 153 bp, Escherichia coli
atgcagcaaaagacgatgttaatcgccctgattgtcatctgtattaccgtcgttgtgatggcactggtaacaaggaaagacttctgcgaggtacaaatccgaaccggtcagacggaggtcgctgtcttcacagcttacgaacctgaggagtga

SEQ ID NO: 27332 - DNA, 1830 bp, Escherichia coli
atgagcacttccgcatacaagagcaaaattcgaacactccagtgcgcgttaaaaaacggtgaatttgaaccattcatacaacatatccgttttccatactttaaaaatatagagcagaatgcaaggatcgattttcagttccctataacggctttagtaggaaaaaatggaactaataaaagttctgttatcaaagcgctatttggttgcccacatggtaaaaatataactcgttattggttcacaactgaaacagatgagtttcctgacctaaaacttgctgatggcagttctcttaaacctagatatatatatggatataaaaatgctgatggccgtttagttgaaatactccaagcacgtatcaatgctaccaagaaaacaatcgattattgggaaacaagtcgaccatctgttggtgataacatggagagtatttcggatgatctgggtgctaatagtaatgcaaccagatggaaaaaaatcaagaagggattggttttcctagatttcagatcggaaataagtgcatttgatagatgtatgtatcactctgattttaaattaagaaagaagaagagtggtgtattaattacaaagcaagactatatcagaagcaaatctaaatatataaagaaagcttttgatgaaaagctaagtaatttaagactctggggggcggaaaccattgttaaaaatataaccttggcgccagaactagttgagcacgtctcatttatattaggaaaaaaatataaagtcattaaatttcttgagcatcggttatttggaaccagaggaggaaccgctttactttcaactgataagttgaactatacagaagcgtttgctggaagtggtgaatttgcaatagtttcactaatactcaatatttattcggccaaacctaattcattaattcttcttgacgaaccagaagtttcacttcaccctggtgcacaaaaaaggatgatggatgttctgtactctattgttgagcagaaaaaacatcaagtggtaatatcaacccattctcctgttattgtgaacactcttcccaaagatgccattaaattatttgtttttgatgaagagagtgaaacagctaaaatagttcaaaatatagcaccggatgaagcttttatagagctagggcatgatattaacaagaaaacaataattgtagaagataaattagctaaagcaattatagataaagcgattaaaaatgatgaaagattaagcttatcatttagtgtaagttatataccaggtggttcggagaccattttaagcaagcatcttcccagttacgctgtggtagaacgcaatgatattttgtttttacttgatggtgataaaaacaaaaaaataaaaccagtaagaattagtgaaattgctgatgctgatttagttaatacaatgtgcaaatattatggttgcgagttaattatcaatgccagtggtagtaatggcaaaaaaaatgaacaagaatctaatagactcaaaaggcaagtgcttgagtatgcattcaataaagtgaagtatttaccatttgatactcccgaacaattactcattgaaaaggcaattacgccaagtgaaaaagaaataattgattcacagacctggagttctaatgatccagaactgtataagaatcaaataagattattagcgcaacacctgtatgataaagaagaagtaaatgcagaggaaattttttgcctccaacaaatgatgaccgcaagacttaaaaatgaattgcctgaatttataaaaataagaaaaataattactcaggctcttgaccgtggtatcattaggtag

SEQ ID NO: 27333 - DNA, 1041 bp, Escherichia coli
atgaaaaaaatcaaagtgtttgacttcttttccggttgtggtggaaccagccaaggtttccatcaagctggaatggatattgtttttggcctcgatttcgacgttgatgcagccagttcatttcgtgcaaatttcccgcaggctgcttttattaactcggacattaggttaatcgacaacaatgccataaacaagttagtaaaaaaacatcgtaatgattacattcttttttcaggatgtgcgccttgtcaaccgtactctaagcaaaactcaaataagaaaaatgatgatccacgattagatctattaaaggaattcagtcgctttgtagagcattatatgcctgattttatttttgttgaaaacgtgccaggaatgcaaaagtttaacaaaaatgaaggaacattcatgatgtttttagaaatgctttcatcaaagggatatagtgtagattataaagtaatgccagctgcgtggtacggtgtaccacagacgcgagaaagattagtgctcattgcatccaaggatttttatgtcgcattgccttctcctacacatggggttggaaatactccctattcaacagtaaaggactggatcgctaatttaccgaagatagaagcaggagaaaagcataatagtattcctgatcatgaagctgcacgcttatcagagcttaatttacgtagaataaaatgcactcctgaaggtggaagtcgagaattttggccagatgaattgattttagaatgccatcgtaaccataaagggcatacagacgtatatggacgtttgagttgggacaaaccagccagcggactaacaactcgttgtattagctattcaaatggacgttttggacatccaacacaaaatcgagcaatatcggttcgtgaagcagcgtgtctacaaacatttcctttggattataaatttattggttctttgcaatctcgggctcgtcaaataggaaatgcggtccctccgaagatgtctgaaacgattggaaaacatttgcttaatataatcaaagcctcctag

SEQ ID NO: 27334 - DNA, 156 bp, Escherichia coli
atgtgcggtgagctcggcgatatcgacatcaacatcctcttcgaacagggagcgttgcataccagccagcgtttcacattttttaccgaagcgctgttgacgaaccagtttcagcatttcttccagaagctggatgcgccggcttttctccagtaa

SEQ ID NO: 27335 - DNA, 1116 bp, Escherichia coli
atgatgcaaaccgtgaatgaacggctgcgtgatgaatcaattgctcatgcagtctggatatcccgctatagcactggcgtggctgccagaatggtgaaaatactgaatgacagcgatgcggaacttactgctcgcctgctgatagcactggacagcctcgatccaggtaattttaccgttaagcgcctggagtcacttctggcgagcgtcagaaaggttaaccgcactgctattaacagcatgtttaccagtctctccggagagctgaacgagctggcaatttatgaggctggttatcagttaagtctgtttgattctatgctacctgattttgttgctgatgttcaccctctggttggtatctctcctgatgcactttatgccgctgcaatggcgcgaccattccagggacgactgctcagtgagtgggcctcagatcttgaggcggatcggctcagacgcataacaaatacagtgcgtcagggttttttgctgggggataccaatgagcagatcgcaagaaaaattcggggacatgtcagtaagggatttcaggatggtgcattgcagatgagccgggctaatgcggccagcattgcaaaaacagcggttggacatcttgctgctactgcccgtgagagttttgccagcgcgaataatgatttgattaagggtaagcaatggttatcaacgcttgataatcgtactacgccacaatgtcgaatcagggatcgcctcaaatatacgctgaataataaacctgtaggtcacagcgtgccttatttgcaggggccgggaaaaattcatttctgctgccgctcaacggaaacgttcattctgaaatcagcgaaggaactgggtattgatgttcgcgatatttccccggctgagcgggccagcatggatggcgtggtggccggagatacaacctacagggaatggtttttgcgtcagccttacaccagacaaaaacagattgtgggggaaacccgagcaaagctgattcgggatggtggtatgtcgccagatgaattttacaccgataaaggcgaatggctgacgctgaagcagctccgtgagcgtgatgcacaggtattcagaaaagcagggatttaa

SEQ ID NO: 27336 - DNA, 1551 bp, Escherichia coli
atgaagagatcgatatcgtttcgtcctacattgctcgcgatcgtccttgccacaacaatgccggttgcgcacgccgccgtaccgaaagatatgctggtgatcggtaaagctgccgacccacaaaccctcgacccggcggtaacaattgataataacgactggacagtgacctacccgtcttatcagcgactggttcagtacaaaacggacggtgataaaggctcaaccgacgttgaaggcgatctggctagtagctggaaagcgtctgacgatcaaaaagagtggacgttcaccctgaaggacaatgctaaatttgccgatggcacacctgtcactgccgaagcagtaaaactctcttttgagcggttactaaaaatcggccaggggccagcagaagcatttcccaaagatttaaagattgatgctcccgacgaacatacagtgaggtttacccttagccagccattcgcaccgttcctctacacgctggcgaatgacggtgcatccattatcaatccggcggtcttaaaggagcatgcggcggatgatgcccgtggtttcctcgcgcaaaataccgctggctccggaccgtttatgctgaaaagctggcaaaaaggtcagcaattagttctggtgccaaatccgcattaccccggcaataaaccgaatttcaaacgggtatcggtaaaaattatcggtgaaagtgcttcccgtcgcctgcagctctcccgtggcgacattgacattgccgatgcgctgccggtggatcaactcaacgcactgaagcaggaaaacaaagtcaatgtggcagagtatccgtcactgcgcgtcacctatctgtatctgaataacagcaaagcgccacttaatcaggcggatctgcgtcgggccatttcctggtctaccgattatcagggtatggttaacggcattctgagtggtaacggaaaacaaatgcgcggcccgattccggaaggcatgtggggatacgatgcgacggcaatgcaatacaaccatgacgaaacgaaagccaaagccgaatgggataaagtgacgagcaaacccaccagcctgacgtttctctattctgataatgatccgaactgggagcccattgctctggcgacacaatccagtctcaacaagctgggcatcaatgtgaagctggaaaaactggcgaacgccaccatgcgcgacagagtgggtaaaggtgattacgacatcgcgattggcaactggagtccggattttgccgacccgtatatgtttatgaattactggtttgagtcagacaaaaaaggtctgccgggtaaccgctcgttctatgaaaacagtgaggtcgataagttactgcgcaatgcgctagcgaccaccgaccagacgcagcgtacccgggactaccagcaggcacagaaaatcgtcattgatgacgctgcttatgtgtacctgttccagaaaaactaccaactggcgatgaacaaagaggtgaaaggctttgtgttcaatcccatgctggaacaggtcttcaatatcaataccatgagtaaataa

SEQ ID NO: 27337 - DNA, 348 bp, Escherichia coli
atggtgacgaaaaccatcactgaacagcgtgcggaagtacgtatttttgccggtaatgatccggctcacaccgccacaggcagcagcgggatttcctcggcaacaccggcactgacacccctgatgctggatggggccaccgggaaactggtggtctgggacggacagaaagccggtagtgcggttggcatactggtactgccgcttgaaggcacagaggaggtgctgacctattacaagtcggggacctttgcgacggaggcaatccgctggcctgaaagtgtggatgaacacaaaaaggccaatgcctttaccggcagtgccctgagtcacgcggctctgccgtaa

SEQ ID NO: 27338 - DNA, 1191 bp, Escherichia coli
gtggtggcaagtgaactgcacggcgagcagccgcaggcggtgccgggacgcaggggttcaggtaccacgctgaataaccactttgcggtaataccggcagacagaacatggcggccacagccgttgctgaaaccgctggtggacggcccgcagagcgccgtcgtgacgggaccggcaggagaagaaatcttctgtgatgaacatggccgcgtgcgggtgaaatttaactgggaccgctataacccgtcaaaccaggacagttcatgctggatccgtgtggcacaggcgtgggcaggcaccggctttggcaacctggcgataccgcgtgtgggtcaggaagtcattgtggacttcctcaacggcgatccggaccagccgattattatggggcgtacctaccaccaggaaaaccgcacccccggcagcctgccgggaacaaagacgcagatgaccattcgttcgaaaacctataagggcagcgggtttaatgaactgaagtttgacgatgcgacagggaaagaacaggtctacatccacgcgcagaagaacatgaacaccgaggtgctgaataaccgcaccacggatgtgataaacaaccatgccgaaaaaataggtaacaaccaggcgatcaccgttaccaataaccagatccagaacattggcgttaatcagatacagacggttggtgtcaaccaggtggaaacggtaggcagcaaccagattgtcaaagtgggttcaaaccaggttgaaaaggtggggatcattcgtgcgctgacggtgggcgtggcttaccagacgacggtaggcggcatcatgaatacctcggtggcgttgttgcagtcctcacaggtagggctgcataaatcactgatggtgggaatgggctacagcgtcaatgtagggaataacgtcaccttctcggtgggcaagacgatgaaggaaaacaccggacaaacagcagtttattctgccggtgagcatctggaactctgctgcggtaaggcaaggttggtgctgacgaaggacggaagcatatttctcaatggtacgcacattcatctggaaggagagtcggatgtgaacggtgatgcgccggtgattaactggaactgtggtgccacacaacctgtaccggatgcgtctgtgccgaaagatttaccccccggaatgccggatatgcggcaattttga

SEQ ID NO: 27339 - DNA, 270 bp, Escherichia coli; identical to SEQ ID NO: 11414

SEQ ID NO: 27340 - DNA, 312 bp, Escherichia coli; identical to SEQ ID NO: 10689

SEQ ID NO: 27341 - DNA, 600 bp, Escherichia coli; identical to SEQ ID NO: 6952

SEQ ID NO: 27342 - DNA, 603 bp, Escherichia coli; identical to SEQ ID NO: 6093

SEQ ID NO: 27343 - DNA, 207 bp, Escherichia coli; identical to SEQ ID NO: 6094

SEQ ID NO: 27344 - DNA, 297 bp, Escherichia coli
atgattgatgtcttagggccggagaaacgcagacggcgtactacacaggaaaagatcgctatcgttcagcagagctttgaaccgggaatgacggtctcccttgttgcccggcaacatggtgtggcagccagccagctatttctctggcgtaagcaataccaggagggaagtcttactgctgtggctgccggagaacaggtcgttcctgcctctgaacttgctgccgccatgaagcagattaaagaactccagcgtctgctcggcaaaaaaacgatggaaaatgaactccttaagtaa

SEQ ID NO: 27345 - DNA, 444 bp, Escherichia coli
atgtatatgaatggcagaatggaaatgtatcgttatacaccagagagtttgaaacgagcattagtaatatttagagattgtgtgagtacgcaaccgcaaaataccttgccctactgttgcctggcggaatgccatatatcattagccctccttggactcagtgaacaaaaacaagcaataactacggcagtaacctccattgaaaaggctcttgaaattaacccttcaaattctcaggcattgggtttactgggtttaatcagtgggctaaaagatgaacattcagtgtctaatgtgctatttaagcaagcacatttactcaaacctaattcgccagacgtttattattatcagtctctgctatgttttttgaacggtgaccttgcaagagcatttaatctaatagaaaaagtattgctcttgaacccaataaaatgggtataa

SEQ ID NO: 27346 - DNA, 405 bp, Escherichia coli
atggcaggtaacaagtggcagatcagcgatgaactctgggaaaaaatggctccgttgctcccggaacacaaaactcaccatccgctgggtacgcatcgcaggcgggttaataatcgtgccgcaatgaacgccattctctttgtgctcagaacgggttgccagtggaatgccctgaatgccaccgggatatgctcgtcaagctctgctcaccgccgcttccaggagtggcgggatgcaggagtttttgaacggttctggcaaaacgggttgctggcctgtgagcagttggatgccatcgactggtcatggctgtcgatggatggctgtatgacgaagtcaccgctggctggctcaaaaaacaggacggaaccccacagaacgagggaaacagggcgtaaaacgtag

SEQ ID NO: 27347 - DNA, 267 bp, Escherichia coli
atggacaaaggctatgaagccgaatggctggaggcctgtctgaaaaaccgccgttacgaacctcatatccagtcaaggaaagaggagtcggaagccatcaaaagcacggattttaaagctcaccgctgggtcgtggagagaacgcacagttggatgaatcgcttccgtcgggtgttgactctctgggagaagaaagtcgaaaattatgtggcaatgctgtatcttacctgcggcgtcattgtctggaataaaatcctattgggatag

SEQ ID NO: 27348 - DNA, 183 bp, Escherichia coli
atggcacgctgtcgaaaaaatccagactgggcgaaggcgttcgactatatcctgaatcactggaatgcgctgaacgagttctgtcgtgacggccaggtggaaatagacaacaacatcggtgaaaacgcgttacgttcggtggcggttggaagaaaaaatcttatgacctttgtcaaatattga

SEQ ID NO: 27349 - DNA, 393 bp, Escherichia coli
atgtttgatagaatatatcttggtgatcgagcaataaaaaaaattgaatttgatttatggagtaaacaaattagaattcaggttaatttaatctcaaggatagcctatggtacaacagaatggaatttttatgataatgaagacttagaagatggttatttggtattttcaggtgttagtttcttcaatataactcctaatggctctattccagatgattatataatttcaataattacagataatgtcaatgttgaatattttgaatcaactatagttgcagttggacaaattccaaatacaaattctggaggcattgataatattggtgagtgtcaaattttcatcaggtataaagacagctggattgagaataaattcaaagaaaaataa

SEQ ID NO: 27350 - DNA, 450 bp, Escherichia coli
atgaaaataaaagtgagtattgttattgtagcagtagtggtttttatgtttttggggaaagacattagtcataatgtaataaagaatgatgctgatattagaaaaattgcgcaggataaagttgttatcattcaaaaactatacaatcagaatgaagtggacaaaatctactctgacacaagcagtgaatttaaaaaagcaacatcggaagatgtttttataacgataatgaaagaaaaaaaacaggtgtttggaagattaaataaaataaacttattggcgagtaatgtaattaatcataatgttgtggttttaacctatcgctctacatatgaacattactctctaatagaggaatttgagtttacaaaagaaaataagggtgatctgtatttgagtgctttttatgccgatgaggggggtaagcttggcgaggtcattaaactatag

SEQ ID NO: 27351 - DNA, 135 bp, Escherichia coli
atgaaaattattgatgtgaataaaagacgaaaagaaagcagggagttgtttttgcatgaaaaatataaaaattacaacatggagcaacttattcctgttttatatggaaaagatcgtgttaaaagggatgggtaa

SEQ ID NO: 27352 - DNA, 1503 bp, Escherichia coli
atgaaacgacatctgaacaccagctacaggctggtatggaatcacattacgggcaccctggtggtggcttccgaactggcgcgctcacggggaaaacgcaccggtgtggcgattgcgctgtctcttgctgctgtcacatcagttccggcactggctgctgacacggttgtacaggcgggagaaaccgtgagcggcggaacactgacaaatcatgacaaccagattgttctcggtacggccaacggaatgaccatcagtaccggtctggagtatgggccggataacgaggccaataccggcgggcaatggatacaaaatggcggtatcgccaacaacactactgtcaccggtggtggtcttcagagagtgaatgccggaggaagcgtttcagacacggttatcagtgccggaggcggacagagccttcaggggcaggcagtgaataccactctgaacggcggtgagcagtgggtacatgaaggcgggattgcaacgggtaccgtcattaatgagaagggctggcaggccgtcaaatccggcgcaatggcaaccgacacggttgtgaataccggcgcggaagggggaccagatgcagaaaatggtgataccgggcagtttgttcgcggaaatgccgtacgtaccaccatcaataaaaatggtcgtcagattgtggctgttgaaggaacagcaaataccactgtggtttatgccggcggcgaccagacggtacacgggcatgcgctggataccacactgaatggcggttaccagtatgtgcacaacggaggcacagcctctgacacggttgtaaacagtgacggctggcagattgtcaaggaaggtggtctggcggatttcaccaccgttaaccagaaaggcaaactgcaggtgaacgccggtggtacagccacgaatgtcaccctgaaacagggtggagcactggtcaccagtactgcggcaacggttcttggcagcaaccgtctgggcaatttcacggtggaaaacggtaaggctgacggcgttgttctggagtccggcggtcgcctggatgtactggaaggccattcagcgcagaaaacacgggtggatgacggcggaaccctggcagtgtctgccggtggtaaggcaacagatgtcaccatgacatccggtagtgccctgattgcagacagtggtgccactgttgaggggaccaatgccagcggtaagttcagtattgatggcacatccggtcaggccagcggactgctgctggaaaatggcggcagctttacggttaatgccgggggacaggccagcaacaccactgtcggacatcgtggaacactgatgctggctgccgggggaagtctgagtggcagaacacagctcagtaaaggcgccagcatggtactgaatggtgatgtggtcagtaccggcgatattgttaacgcaggggagatttactttgacaatcagacaacaccggatgccgtgctgttgcaaaaggcgactccccggtaa

SEQ ID NO: 27353 - DNA, 381 bp, Escherichia coli
atggcgcgactgtcgcaactggcggggaaccagcgggtcatcctcacgcccactgtaacgatcgctttcctgctcgcgttgtttcagcagggcttcagcctgttcaacctcacgacgcagtttttcagaacgggttccgaacagcatccggcgcagtttttctatctgagcccgcagatgctctatttcccgttcatcttcttcgatcttttcttcggcacgtgccagtgcagagcgcaggaaggcctccgtctcttcaaccagactcagttgctggtctttctgacggagggcttcagcctgctcagagagcaacctttccagctctgcgatgcgaatgaggtatttctgactcatgaccgtttttataatgcgatctga

SEQ ID NO: 27354 - DNA, 777 bp, Escherichia coli
atggcaagaagtggatttgaagtccagaaagtcaccgtagaggcattatttctacgagaaatacgaacacgctttggtaagttccgtctgggatatttgtgggcgattctcgaaccctctgcgcatttgctgatactgttgggcatttttggttacattatgcaccgcacgatgccagatatctcattcccggtgtttttacttaatggcctgattcccttttttatctttagcagtatcagcaatcgttctgtaggtgctattgaagcgaatcaggggctgtttaattatcgaccagtaaaacccatcgatacgatcattgcacgcgcactgcttgagacactgatttacgttgctgtttatatattgcttatgcttatcgtctggatggcaggcgaatatttcgaaataacaaactttttacaacttgtgcttacctggagtttgttaatcattctttcatgtggcgttggcttaatattcatggtcgttggtaaaaccttccctgaaatgcaaaaggtcctgccgatactgcttaagccgctgtatttcatctcctgcatcatgttccctctacactcgattccgaagcaatactggtcatatctactctggaatccattagtgcatgtcgtagagttaagccgcgaggcagttatgcctggctatatcagcgaaggcgtgagtctgaactacctggcaatgtttactctggtcaccctgttcatcagtctggcgttataccgaacgcgtgaagaggcaatgctgacatcatga

SEQ ID NO: 27355 - DNA, 1038 bp, Escherichia coli
gtgagcgaaacagcggcggcgaactcggcgaaagcatcggcagcaagccagacggcagcaaaagcaagtgaagatgctgccagagaatacgcaaaccagacagcagagccgtacagatatgttttacagccgctgccggatgtgtggataccctttaatgattcgctggatatgattacgggctattctccgggttataaaaaagtgaagattggtgataatgtggttcaggttgccagtgataaacaggttaatttcagtcgcgcatcaacggcaacatatatcaacaaatctggcgaactgaaaacggcggaaattaatgagccacgatttgaaaaagaaggtttattgattgaaggtcagcgaaccaactacatgttgaattcagcaactccagcttcttggggtaaatctgcaaatatgaatgtcgctgaggttggaactgatagttttggttttacttatggaaagtttgtttgtaacgattctctgattgggcaaacgtcagccattaatatggcatcaattgctgctacaaagtcagttgatgtttcaggcgataacaagtacgtgacaacctcatgtcgttttaaaacagaacgacaggtaaggttgcgtatccgctttgataaatatgacggtagtgcaacaacttttcttggtgatgcatatattgatacacaaacgcttgaaattaatatgacaggtggcgcggcctcagggattacagcgagagtcagaaaggacgaagctaccggatggatttttgcagaggcaacaatcctggcaattgatgatgagttaaaaataggatctcagatacagtattctcctaatcagggcggagcaaccgtatctggagactatatttatctggccacccctcaggttgaggatggttcgtgtgcatcatcttttattatctcaggaacgacggcggctacccgcgcaagcgatatagttacagttccaattaataataatctttataatcttccttttacggttctttgtgaggtacatagactggccccctga

SEQ ID NO: 27356 - DNA, 399 bp, Escherichia coli
gtgtcttttcagggagatgaaagtacacaaaaaactttaaaagaagcatataaagctgtagcagaaacaaagtttggacataaaataacagaagaattagagtcatcagagcatgaatatatatttagaggattaagaaaaggcataaaccaaacatgctacgatgatactgaatatagtttttacattgatattgataacgaccatagctcatgtgtatatcaaggaaaaaacaaagcatgtgccatgaaacccactctgttgagtgtggttcttgcgcatgaaatggggcatgcaaagggaatgaaagacgatggaactgactcgatggctaatgttgataaatatgaaaacccatttcgtaaagagttgggcttgccagcaagaatgaaatattaa

SEQ ID NO: 27357 - DNA, 408 bp, Escherichia coli
atgccactggacagactgatcgcgacactgatgaaagcgaaacaggaaaaccggctggagcgtcagctgcagcaactgagttatgcccgggtgttgatcctggatgaaataggctatctgccgatgaacagagaggaagccagcctgttcttccggctactgaaccgtcgatatgaaaaagcgagcatcatactgacgtcaaacaaagggttcgcagactggggagaaatgttcggagatcacgtgctggcaacagcgatactggatcggttgctacatcactcaaccacgctgaatatcaaaggagagagttaccggttaaaagagaaacgtaaagctggagtgctgaccaaaaacacaacgccaatcagtgatgatgaaatggtgaaaagcggacagcatcagtaa

SEQ ID NO: 27358 - DNA, 1020 bp, Escherichia coli
atgaaatatacaccggttggcgttgatatcgcaaaacatctgattcaggttcacttcattgatgagaacacaggtgacgtggtggataagcaacttcgcagaagagattttctggaatatttcagcaaccgggagtcatgtctgattggtatggaggcctgtggaggctctcagcactgggcacgggaactgacaaagctggggcataaagttcggttgttgcaggcccgcttcgttaaggcatttgtcatgggcaataagaatgacgtgatggatgcacgggctatctggatggcagttcagcagccaggtaaagaaatcgccgtcaaaacagaagaacaacagtcagtgctggttttgcaccgttcccgcagacaattggttaagttccgcaccatgcagattaattctctgcacggcacgctcttggaatttggtgaaacaattcacaaaggtcgggcagcaatggagcgggagttccctgaagcactggagcgaatgaaagagagattgccaccgtatctcattactgtgctggaaaaccagtacaaccgactgaatgagctggactcactgatagaggatattgaaaaacagcttaccagcgtggcgaaacagaatgagacctgtaagcggttgctggatattccctgcgttgggccacttattgcgacggcagcggtggccaccatgggggaagcatcagcgtttaaatcagggcgagagttcgcggcttatgttggtctggtgccaagacagactggctcaggagggaaaatccgcctgctggggataagcaaacgtggtgatacatatctgcgaaccctgtttatccatggcgcaagggcggcagcattactgaccaaagaacctggtctgtggataaccgaactgaaaaaacgtcgtccggtcggcgtggcaaccgtcgccatggcaaacaagctggcacgaacagtgtgggcaatagccgcacatggacgtaaatacgataaagaatacgtcagtatcaggtcatattaa

SEQ ID NO: 27359 - DNA, 1107 bp, Escherichia coli
gtgaacaccgttggcaaatcggcattcgtggaggctgttggtcagccgagtgatgatgcatccggctatctggattttttcaaaggcgagatagggaaaacccatctggctcaggagctgtggacgcagattgataacggtcagcttgcgcctgacctggctgaaatcaggacgtccattacggatgtcagcaatgaaatcacgcagaccgtcaataagaaactggaagaccagagtgcggcaattcagcagatacagaaggttcaggttgatacaaataataacctgaacagcatgtgggctgtgaagctgcagcagatgcaggacggacgcctttatatcgcgggtattggtgccggtattgagaacacccctgacggcatgcagagtcaggtgctgctggcggcggacaggattgcgatggttaatcctgcgaatggcaacacaaaaccgatgtttgttggtcagggcgatcagatattcatgaacgacgtgttcctgaaacgcctgacggcccccaccattaccagcggtggaaatccaccggcattttccctgacaccggacggaaagctgactgctaaaaatgcggatatcagtggcagtgtgaatgcgaactccgggacgctcaacaacgtcacgattaatgagaactgtcagattaaggggaaactgtcagccaatcagattgaaggcgatattgtcaaaacagtgggtaaggctttcccgcgggactcccgggcaccggagcggtggccatcagggaccattaccgtcaggatttatgacgatcagccttttgacaggcaaattgttattccagcggtggcattctgcggcgctaaacatgagcgggagaataacgatatttattcgtcatgccgcctgatagtgaagaaaaatggtgctgaaatttataaccgtaccgcgctggataatacgctgatttacagtggtgttattgatatgccagctggtcacggccacatgacgctggagttttcggtgtcagcatggctggtaaatgactggtatcccacagcaagtatcagcgatttgctggttgtggtgatgaagaaagccaccgcaggcatcagtatcagctga

SEQ ID NO: 27360 - DNA, 186 bp, Escherichia coli; identical to SEQ ID NO: 12423

SEQ ID NO: 27361 - DNA, 399 bp, Escherichia coli
gtgaagttcgggcatggcagtgcacaacatgtgcgtgccggcttccgtctgggcagccaccacgatatgaactttggtaaaggcacctcatcccgtgacaccctgcgcggcagtgcaaaacacagtgtgagtgaactgccggtgaactggtgggtacagccttctgttatccgcaccttcagctcccggggggacatgagcatgggtacagccgcagccggcagtaacatgacgttctcaccgtcacagaatggtacgtcactggacctgcaggccggactggaagcccgtgtccgggaaaatatcaccctgggcgttcaggccggttatgcccacagcgtcagcggcagcagcgctgaagggtataacggtcaggccacactgaatgtgaccttctga

SEQ ID NO: 27362 - DNA, 132 bp, Escherichia coli; identical to SEQ ID NO: 6019

SEQ ID NO: 27363 - DNA, 207 bp, Escherichia coli
atggtgaaatacctcaaggagaacttcttcgttcggtaccgcaggttcgacagcttcactcatgttaatcaacaactggagcaatggatagccgatgtggctgacaaacgggaacttcgccagttcaaagaaacgccggaacagcgcttcgcgctggagcaggaacatctgcagccgttaccggatacggacttcgataccagttaa

SEQ ID NO: 27364 - DNA, 480 bp, Escherichia coli
atggtgaaatacctcaaggagaacttcttcgttcggtaccgcaggttcgacagcttcactcatgttaatcaacaactggagcaatggatagccgatgtggctgacaaacgggaacttcgccagttcaaagaaacgccggaacagcgcttcgcgctggagcaggaacatctgcagccgttaccggatacggacttcgataccagttacttcgacatccgccatgtgtcctgggacagctatatcgaggttggtggtaatcgttacagcgttcccgaagcgctgtgtggtcagccggtatcgatacgaatatcgctggatgacgagttgcggatctacagtaatgagaaactggtggcctcacatcgcctctgttcggcatcgtctggctggcagacagtgccggagcatcacgccccgctctggcagcaggtcagtcaggtggaacatcgaccactgagtgcctatgaggagctgttgtga

SEQ ID NO: 27365 - DNA, 606 bp, Escherichia coli
gtgctgaagaataacaacgggaaagtcgtgttcaactccggattcctgttgctggccgaccactataacttcctgccacgggcatgccgtccacgcagggccagaacaaaaggtaaggttgagcggatggtgaaatacctcaaggagaacttcttcgttcggtaccgcaggttcgacagcttcactcatgttaatcaacaactggagcaatggatagccgatgtggctgacaaacgggaacttcgccagttcaaagaaacgccggaacagcgcttcgcgctggagcaggaacatctgcagccgttaccggatacggacttcgataccagttacttcgacatccgccatgtgtcctgggacagctatatcgaggttggtggtaatcgttacagcgttcccgaagcgctgtgtggtcagccggtatcgatacgaatatcgctggatgacgagttgcggatctacagtaatgagaaactggtggcctcacatcgcctctgttcggcatcgtctggctggcagacagtgccggagcatcacgccccgctctggcagcaggtcagtcaggtggaacatcgaccactgagtgcctatgaggagctgttgtga

SEQ ID NO: 27366 - DNA, 207 bp, Escherichia coli; identical to SEQ ID NO: 27363

SEQ ID NO: 27367 - DNA, 141 bp, Escherichia coli; identical to SEQ ID NO: 6191

SEQ ID NO: 27368 - DNA, 198 bp, Escherichia coli
atggtgatacgcaaaaagaagtgcagggactgtggaaacgcgattactcataatacagtgtgttgcccgtattgtggttctgtcgaccccttcggctactaccggaatacagaccgtatcgttaccatactgctggcactgattattgtggtcctgctgactactgtcagcgtcagtcagtgtgtatatactgtgtag

SEQ ID NO: 27369 - DNA, 408 bp, Escherichia coli; identical to SEQ ID NO: 27357

SEQ ID NO: 27370 - DNA, 339 bp, Escherichia coli
atgccggattttcatcgcgaggatgactggtggcgtcacggtcagaatctctatctggataatctggaggccacagggctgtatcaggtgccgttgtcagcggcgcagccgggcgatgtgctgctgtgctgttttggttcatcggtgccgaatcatgccgccatttactgtggtgacggcgagctgctgcaccatattcctgaacaactgagtaaacgggagaggtattccgaaaaatggcaacgacgaacgcattctgtctggcgtcaccgccactggcacgcatctgccttcacggggatttgcaacgatttggccgccgcctcagcctgtatgtga

SEQ ID NO: 27371 - DNA, 588 bp, Escherichia coli
atggatacacacacaccctacaactgcaatgacatagccagacttgcattggctatgcacggccacagctatttcttctcactccgccgccatctcaacattaactttagccgggacttgaacggaagcggaacacagggtttattcatcaaaaaacaaaacgttgatattgatttaattaaggtaatttttgattataccgacaacaaaaacgatgatttcctctatgaggctgatctcatcaaagatcaacgtaaggactatgaacccacagttaacagaggtaaacaccggttcgttgccaaacaaatcgagctaaatatcgactggaacggtaatgaaatccagcagtggagagcggatatcgaacgactaacgagatcgcacgataatcttgaggactggttaaaaaacggctcggagatgctggtatgttgcgcctctggatttttttgtcgtctccccacaatccttactttgaacgaccttaagcagtatgttgcaatgggagtaactctagaagaccttaaaactcggctcaagtgctcgaaatgtggtaaacgtgggtccaaagtcacagtattttga

SEQ ID NO: 27372 - DNA, 1188 bp, Escherichia coli
atgtccacccccaaacgcttccgttttactaatcagctcattaaatccctgccccctaacacatccgatgcacgcagtaccgatgccgaatacagcgacactgagatttccggcctcaagtgtctggtcagcagaagagaaggtcgtaaaaagtttttgctacgctacctttatcatggacgaaaacgcgccatcgccattggtcactggcctgaagtggacgtcaatcttgctcgtcagattgccatagaacacaaacgttcccttgccaccggcactgaccctaagcaggagcgtgaaaacaagagaagggagctgacgttcgatgaactctttaatcagcattatctgccatgggctaaatccgctaaacgcagttggggaaaggatgttcagcgctaccgcgatcatatccgtcccgccattggtcagaggctgctgagcgatatcacaccagcgagcattctgcgccttcagcagacgttaagtacttccctgtcagcggctacctgtaaccgtgtcatcgtactcattaaagccgtctttacatgggccggaaggcaaagcatgacctctgtccatccggcaagggtggtacagctactcagggagaacaacgcccgacagcgttattttaccgaggacgaaattcgtcgtatttttctctccgccgataacgataccagccctgtagctgcccgctatgtcaaactgctgttattgaccggccttcgccgcgatgagctgcgtctggcaaagtgggagcatgttgacccggttaaacgcaccctgtggctccctgaaaccaagaatggctatggacggattgttcaccttaactcactggcgatggacgtaatcagaacgctgccaacgcagcggggaaatccgtggttgtttataggcaaaaaaccggggatgccgctgagtaacccggttaaggcctttcagcgtatcgttcgtcgggcgggaattttcgacaaggaagtgtgtattcatacctgccgccattcggttgccgccctcatcgtgtcctacggcggaacactgtatgacgttcaggctcaactggggcatcgcagcagtcagtcatcacaacggtatgcgcatcttcatcctcagcgtttacaaaacaccagccagctactggcggaaaggataacggctcagctaccgtccttgcgataa

SEQ ID NO: 27373 - DNA, 357 bp, Escherichia coli
atgatttttgaatcagaccagtactatgacggttttcctcacgctatcagcagcgaaaatgaagaaaaaacctcattcaatgattacgctctggttaacacactggcggagtgcctgtatcacgacatttctcgtgaaatcttcgatggcagtgagccggcgctccgggccgtcattgccaacggtaagattaaattcctggctcgttatacgcttcaaggggcctgctattatgaacccctcggcacatttccacgtatgcccgttaacgtcgcgcgtgaacgagcacgtgaactctataacagatttgatgatcaccgggtgccggatgaagaatatggggccatcccgttctga

SEQ ID NO: 27374 - DNA, 1926 bp, Escherichia coli
atggtaatacacatgaataaaaaagtgacaactaatgttcctaaggtttccgggattaagcgtattcgcgtttttgctgaccgcgataaaaatttcaccaaaatgtcggaggcaattatcaggcgtgctgaaaagactgaagtcggtgaagatgatatcgcttcactcggtattagtgatgggctgccacggcattatgtgaatacggctgatggccttttctacatcggtggacagaaacctgtgctggtttgcggtacgccagttgtgcctgtcgccctgttttgcgggaaagataaggagtccagtcttgggattcgcctgatgaccggtaacgggctgggtaagtatgttaaggccctggtgcgctttgaggatattgttcagagcggtgctcaggtagtaggcaaactggcagatcgtggattttgtgttggctcctctccacagcagtttgccctttttgaccgttttcttcagcgctgccggagtttaccgctgcctgtctatctgatggcagatgcgatgggattcgtttcggaggatatggcctttttacatggtcatgagcccgttgtgacctctctgaccgggtttgattatctgctgccgggattccgcgtgcgtcccggactgcacaaaggtggggctctggaggagtggattaacctcatccgggaaaatgtccatggctgggcgcagacctttgcgctgagtgcgtcctttgcttcgatgcttctggttcctgccggtatggatgtgggcatgtttcattttcacggcgtatccaccaccggtaaaacgcttctcctgatgctggctgcatcggtccatggtgatggcagcgagccgggcagtggggggaatgtaaatattattcgctggaataccacgcctaacgcgatggagcgccttctcgctgactattccggtctggtcgcctgcgtcgatgaactgggtgcgagtaatcataagcaactttcctcactgctttacaacattacgtcaggtacggcaaaagagcgcctgaaccgtggcctgacggcagatgagccgtttaaatggcgcatgtttattctctccaccggtgagatgtcaatctccgaaaagctggctgaacagaaagccgtgttacagggagggcaggagcacagggccatcagtatggaactgttgcctgaggatgctcaaaaaccggatgaaccggtatcagaaacacgtgcccgtgcagatgcactgaagacggggctggcagaggcttatggtcatgccgggcctgcatttatcggcaaactgttatccgggaaaaatacggctggcggtcttcgcacctacgcagagttttcatcctggctccaggaacagacagatgattgctgtaacgcactggaagaggccctgagggatgaggggcgtgatattacccgcgttcagcggcgcggactgaaaagatttgcgctggtatggctggcaggagagaaggcgctgaaatatggccttttacctttcgaaagcgatgcggtggctaaatccgttatatccgctgcacgacgctggctggatgataaccagaatcagtataacccggtgcgtaacatgctggaggagcttcagctgacgctggtgacaaaaagcagcaggcactttatcaccctgcgtgacgaacatgcccgatgcccgggagatatgtggggattcgtccattacaaaaccggcgacttcctgatttatgaatcggtgtttgaaaagctctgttctgaaaagggacttaagaccgttgatgtggccagaccgttagagcgttccggttatctgcttggcgaaagtgccggacactataaaaaaagagcgctgaagacgatggcgcagtcttactaccaggtcaaaaaagcgtttctgaaatgcaatgtgatgaccgaattttaa

SEQ ID NO: 27375 - DNA, 1179 bp, Escherichia coli
atgaagttatatccctccacaaaaaaggctaatcagccattaactaaatccgtgattgcggaaagctgtgcccgtgcattgcatgagggccggacagtcgaagccagtgatagtaaactgacggggctaaagataattgcctctcctgctagccctgatggagccacttttatcgttcgcaaaagtatctgtggcgaaaatatctacaagcgtattggacgatatcctgaattgtctgttgcagaggctcgtgaaattgcgtctgaaattatcaccggcctgaaagagagcgctaaaaagcacggtaaagattaccgtaagattaaaaaaatggactttaatggcctgctgaaaacatacgttgaagaggttctgaacaaaggtattaagcgttcagcaaggacagacctgtctaaaattcacaagtatctactccctcgtcttggcgataaaaaaatcgccgatatgacggaggcggacattgtggcctatctgcatgatctcgatctcaagcctgccacccgcaaccgccatctggcactcattaaagcggtgtttacctgggctatccgcatgggatatatcagccgctctccggcgctttatatcaaagcgctgcctgaagtgacgtcagatagacgcgccatggatgactcccagcttcagtgctggatggatgtctgtgagcgctggcgtaatggtaatcccgatcatgaagctcttgctctgctcatgttccttgccctgacgggactgcgtctgggggaaacccgtcatcttcgccttgaggatgtggactggagccgaaaggttatcacccttcgccacaccaaaaacggcaaactccgccgtgtaccggtatgtgataaggctttcgttcttctgacagaacagcgtcagcatctgggtgatgaaggctgggtatttccgggcaaggggaccgataatccggtttctgagccgcgtcgcctgcaaaaacggctttgtgaggctgcgggtattccaccgttcaccatccatgagatgcgacatacctttgcgacaaagctcattgagagcggggccgacattcacaccgtcaaagacttactgggccacagcactatcaaagtaacggagctttacttgcacgcttccccggcgcgttaccacgaagtcgttaaccgggcgatggggtaa

SEQ ID NO: 27376 - DNA, 354 bp, Escherichia coli
atgtttaaactcactacccccaccagtcttccccttctcaacctgcccacctccgcgctggaagccctcagaaatgaaatccttggacctgtcgatgatatcaacctgtttaccgccttctggaacgaaacgggaaccctgctctggcatctcaaccacgatgacaccctccccgaagacccgctgctggcagtcgcactggctaacccggaatacgtcaccgcgcttgatgatggctggtatctcctgctcggtatcgtctgcgataacggacagggtatctatctggtgttcccggacacgaccgttatcactcaactccggaacctgattgaggcgcagaaccatgagtaa

SEQ ID NO: 27377 - DNA, 432 bp, Escherichia coli
atgagtaagaaaaaaaacgctaccgaagccgccgtcaccgaaagctataccgtgttctacaggggtgaagccgagaaaatcagcccccacagtaaaggactgctgacgtatgagctgggtaaagagggtgaaaccgggagtcttgccctgcgcttaaccgccaatggcgaagggggcctgttctcccgtgaatggatagcgcttgatgcgattcacgccattctggaacagcagccagacagctttccatcccgtgtatttcgcccactgtttggtcagggcagcaccaataacgcaggttttcttgctgctgtgctcagaagtccggatatctgccttatcgaagcggacagcagcagactctttatgcaccgctgctatgccgactggcagcatcgtatgacgcagcttgctacgctcagccaggactaa

SEQ ID NO: 27378 - DNA, 429 bp, Escherichia coli
atgtcatcacccgtaatattgcagggcggctatgtgctgccgctctcccggtcgttcacccaactgcttctgggtatcgttgcgcaaaaaccgcctcatcgtcaccccatcaccggattaaccattaacttccgtgaccctgaatactcaccggaaaagggcggctggcatccggtcgaaatacgcctcatccctgccggagaagactggcagctcgattacgtcaccgattttcactatgcagggcatccatggcctgagcttgaaaaagatgtcgatgtgagctggacgcaacaatacacgtggctttcccgttgtggcgatatctctcatgtcgacgcccgtgagttctggtcgctatgggaaagtaactttatggcttaccacgatatgggggttttcacggtccgtacgttgtgggaaagctga

SEQ ID NO: 27379 - DNA, 465 bp, Escherichia coli
atgtaccggcttctgctgctgaacttcgtggattcatttatcgataactgcattctctcctgcgtcgatgaaccggcttacggtggtatcgtgcagtgcgaactgctttttggccttgccgcacacagcggtatctatgtgggtaacggcgatattgttcatcttgatggcgatggaaccgttatcaaaagtaaggctaaagggtttcttgaccggctcgatggctggaactccgctatctcggtgtataccgactgtatggatttgacgcctcagggttgtgcgcaggccgctgaacgggcaaaggcggcagtgggtcagcgctatccttatagcctgctcgactttaactgccaccggtttactgcccgctgcgttaccggcgattcgtgccctgatatctggcttgccagacacctcgattcttttcagaaaggggaccgatggcgcgtatggcaacgatga

SEQ ID NO: 27380 - DNA, 240 bp, Escherichia coli
atggcgcgtatggcaacgatgaaagccagccgttgcaggcaacgtgtcaccggacagggagaacggcttatccggctgaccatggccctgttttacggtcagacaatatctgttcgctacatcatccggcagtttgacgtatctccccggaccgcaagacgggacctcgctcaactggcctttgtgctggaatccgctggccctcaccgctggcgactggctccctcgctgaaaccctga

SEQ ID NO: 27381 - DNA, 384 bp, Escherichia coli
atgaaaattttaaaactgttaaccgccacaattctgctttccgccttcagccacagcgcgttcgccgacgagcaggctgacgctcagatgataaccaactcgaccttctgcgcgatgtactccacccgcctgacccagaccagtgacagcggccttcaggtaaaaggcgttaatctcaatgcccgcttcaacggaccggtattcaaccgggtacttcaggtgatgaacaaaacctatggcagaacctggctcgaatcaaatgcccgtaacggcagcatgaccgccatgcagctttcgcagtcggagctgctctataacccggaatatgcccggcagtgcgatgcctttgcggataaagtggaaaaggaatggcgcggaaagtaa

SEQ ID NO: 27382 - DNA, 750 bp, Escherichia coli
atggctacctaccgacacgaccccgaccttgagtttctgcgccactgccatcgtgacgatctggatttactggtttctgtgcttatctgcgatccgaaagacggactggcacgcatcacggaaacgctgacttacgatcctcagtataaaaaacacaagcccaaccacccgcgctactgggatgccattgccgccgaagttcagacctttggggcgaacagctttgccacgctgctccgctgggggaaaggggtgctgtaccgggaaattcttaccgatgcctgcgataaaatgaaggtgaactacaacagcaaatccagtgttgaaaccattgaaatgaatctgctgatgaagattctggagaaaagtcttgagaagatgacgcccgaccagctaaagactgtggcggaagaattgcagacaggctacagcaatcccacgccggagctgctgaccatggcaatccaggcggggataaaaacatccggatttgcggcctatcagatggcgcttgttgtcacaaatggcgtagcaaaagccctgttaggcagagggctgaccgttgcaggaaatgccatgctgacacggactatgggcgcttttgccggtcccgtgggctgggtgctcagttctctctggctactgatagatttagccggtcccgcataccgggtgacgctaccatcctgcatttttattgcctacatgcgccagaagcatctttattcacctgagaatactgacgtttag

SEQ ID NO: 27383 - DNA, 714 bp, Escherichia coli
atgacgctgataacacaagaaaacgaacatgacagactggcaacccgcctttccatcatcctgagccgtttgtttcagggtgaaaagctgcatatcgggacgctggcagaagaatttggagtgacgacgcgaacgctgcgacgggatttcaacgtccgtctgacgtaccttgatattgaacagagcaacggcgtgtatcagcttgcctcacattactttcgtcgccgcacggaacgggatatgaagatactggcgaggttgctgcatcttgaccgtctgttacccgcgatggatgccaaactgctgagcctgatgcttgacggggaacgtccctcgccatacaggattatgctaccggagccgcgccagaaacccacccttttcggtgatttcagcagactgacgctcgccatacttaaccagacccaggtgcgtatcagaaccgacgaaaacgtcagccataccgttcatccctaccgtctgctttgcagccatgcggagtggtttcttgccggatgtacgtcatcgggcgtgttcgttatttccctgtcccgaatcaggctggttgaggtattaccggatacaacgtttgagatcgataacacactcatttcgctgattgaacagtctgactttatggaagccttaccccacatgaacattattcatcagataatgcattacgggagtaaacagacgaataatcgtaattaa

SEQ ID NO: 27384 - DNA, 312 bp, Escherichia coli
atgattatcgataaagaatacgcacttgtagatgcaacagcaagacttaacactgacctgagggattatgaacatgaaataaacaacgccgccattataacatttggcaatgacctcattgaggtaatcgtatatcagttcagctttatcatcagcatcagggcagagggtgaaaaaataaagcacggccttcttgttaacttcggtaaaaatatagcaagacaggtttcatcactttgtgcatccgcaatgcgagtctacccgaatgaaaaacacaaaccgagccgtcagcttttccattgcataaattag

SEQ ID NO: 27385 - DNA, 987 bp, Escherichia coli
  misc_feature (951)..(960): n is a, c, g, or t
atggctggccagtatgaaaaagcaataacgataaaacaagcgatagatttgattaatttacgccactatcttctgcctgcaattcagaggaagttcgtctggagcagcagtcaaatatgtttgctgtttgattccatcatgcgagactatccgataaactctttcatgatgtgggatatccgtagtgccagtattaaaaatgattacaaattctatgaattcctgaaagaatactgtcagcgatttaatgaagaaaacccctgcgtagcaacaaatgctggatttcatgatttcaaggcggtgattgatggtcagcaacgtctcacatcattatatattggattgtgtggaacgtatgcgtataaacagccccgggtgtggtggccttcggcacaggatgatcgcatcctgccgccaagaaagctttacgtcgatttaacagcgccacttaattcagacgatgagctcatgatgaagtataacttcaggttcctgaccgacaagcaatacactgattcacttacagacaacaaacatcactggttctgcctgcacgaaatattcaaatacgagcagtatgattcccctgatgatattttatttaacgttgtcgtaccagaacttgaaaaaagagatctcatttccagtgagttttccagaaaaactctgctgagactttatacaaaaataagaactgagaacatcatccactacttcaatgagagcagtcaggatattgaccatgtgctggatgttttcatacgcacgaacagcggggggacaaaacttgagttctccgacttactgatgtcaatagcggtagcgcactggcagggtgatttcagaagagaactggatgaactgacaaaaaatatttatcagaacaacgaaatggggttttatattgaaagagactggttcttaaaaaccagcctgatgcttattgactcnnnnnnnnnnttgactctgacgtccggttcaaagtaa

SEQ ID NO: 27386 - DNA, 360 bp, Escherichia coli
atgctgaatgcgtactatgacttccggaatgacagcgcattcacaccatgggtatccgcagggattggctacgccagaattcaccagaaaacaaccggtatcagtacctgggattatgagtacggaagcagtggtcgcgaatcgttgtcacgttcaggctctgctgacaacttcgcatggagccttggcgcgggtgtccgctatgacgtaaccccggatatcgctctggacctcagctatcgctatcttgatgcaggtgacagcagtgtgagttacaaggacgagtggggcgataaatataagtcagaagttgatgttaaaagtcatgacatcatgcttggtatgacttataacttctga

SEQ ID NO: 27387 - DNA, 285 bp, Escherichia coli
gtgaataaatcatggcttgaacatcaggtgcaaactgaaaaaataaaaaaagtacaggaagagaaaaaagatggcaccatcccaaaagaactgtacagggtacgtataaaagacaaatacaggtgggatttgtgggaaaatgattgcagaattgttattgcttattcgaaagatgatgcagagctaaaatttacgggaatgacaggttttaatgaccattactatatagaaggcattgaaaaaataacgttttcagatatagaaaaactattactggaaaactga

SEQ ID NO: 27388 - DNA, 219 bp, Escherichia coli
atgcgctgtcgtaacctcgcgccggagacgttcgccagtcctggcgaaccaataaacccgaatgagagcgataaccccctcacccctgccaggccaatttctgactatcaggcgatgtttagcctgtcgcagttagcgcgtgagcttgcgaacggtacgccgggtcagtgtgaaacactggagcggggcgctgtatctgcgcgttatgagatgcgttag

SEQ ID NO: 27389 - DNA, 237 bp, Escherichia coli
atgctctctctgttttggcaaattacccctcactttgaagggatcggagctataaaaatggtgttatccggcttcctcaaattgaggattgtggaagaatcaatgggttatgtcatcgtgcaaatttgcactctgccagccaacgcaatttctcgttggcggaaatatcaggtatttactgaacgaacggtctaccagtctgttcagttaccagttgcacatggctgtttcatgtga

SEQ ID NO: 27390 - DNA, 1197 bp, Escherichia coli
atgaaaactttgttatttatcttcatgaccatagcaatgttgctatggtttttaagtacgctaagacgtaaaccctgtcaaaagaaaggctgtattgacgccattataccagcttataacgaaggcccgtgtctggcgcagtcactggataatctgctgcgtaacccttatttttgccgggtaatttgcgttaacgacggatccacggacaataccgaagcggtcatggcggaagtcaaacgcaaatggggcgaccgctttgttgccgtcacgcaaaaaaacaccggtaaaggtggcgcactaatgcatggactaaaatacgccacgtgtgatcaagtatttttaagtgatgcagatactttcgttccacctgataatgatggaatgggctatatgctggcagaaattgagcgcggcgctgatgccgttggcggaattccctccaccgcgttaaaaggggcaggtctgctgccacatatccgcgccaccgtaaagttgccgatgattgttatgaagcgcacgctacagcagtttctgggcggtgcaccgtttattatcagcggtgcctgcgggatgttccgtactgatgtattgcgtaagttcggtttctctgatcgtactaaagtcgaagaccttgatctcacctggacgttggtggcaaacggctaccgtattcggcaggcgaatcgctgcatcgtatacccacaggaatgtaacagtccgcgtgaggagtggcgccgctggcggcgttggattgtgggctacgcggtctgtatgcgcctgcataaaagacttttatttagccgcttcggtatcttcagtatatttcctatgctgctggttgtgctttatggcgttgggatttatctcactacctggtttaatgaattcatcaccaccgggccacatggtgtggtgttggcaatgttcccgcttatctgggtcggcgtagtttgtgttattggtgcatttagcgcctggtttcatcgttgctggttgttggtgcctttagcaccgctttccgttgtgtatgtattattagcttatgccatctggattatttatggacttattgccttttttactggacgcgaacctcagcgcgacaaacccacccgctattccgcactggtggaagcgtcaaccgcttattcccaaccttctgtcacaggaactgaaaaactttctgaagcttaa

SEQ ID NO: 27391 - DNA, 678 bp, Escherichia coli
  misc_feature (609)..(618): n is a, c, g, or t
atgacagacattacagccaatgttgtagtgagtatgccttcgcaacttttcactatggcgcgttcttttaaagccgtagctaatggcaaaatttatatcggtaaaattgacactgacccggtaaatcctgaaaaccagattcaggtttatgtggagaacgaagacggttctcacatccctgtttcgcaaccaatcatcattaacgctgctggatatccggtatataacggacagattgccaaattcgtaaccgtgcaaggccattctatggctgtatatgatgcgtatggagcgcagcaattctattttcctaatgtgctgaagtatgatccagacatgtttcagcagaaactaaatcagattgacggggtatcgtatttaggaggtggtaattatacagacatacgttcatataatggcacaaatgacaaaataatctgttatggaagaaataatttgttcgatggcggtgatggggtgttctatgctgacccaacagatacgacatcagaagataatgacggaacaattcttgtaggttttaacggtagaaggtggaagagggtttacgggaatgaggtttcaccgtcatggtttggggttacaggnnnnnnnnnncttacagaatgctttaaatatcgcaaagataaacggatgtttgaatttaacctttcgtag

SEQ ID NO: 27392 - DNA, 1191 bp, Escherichia coli
gtgagttgtcgttatttaaaaattgaggatttttgtagcaccggtagcggtggaacacccagtagggcaaagcctgagtattatgaggggggagatatcccttggattaaatcaggagaccttaaagattcaaaaatttatgaagcaaatgagtacattacagccgcagggctagaaaatagcagcgcgaaaatagttgagaaagactcaatcttaatagcaatgtatggagccactgttggtcgcttagcaattttaggaattaatgcagccacgaatcaagctatttgcaatatcaggccagatacgacaattgctgatatgaagtatctctattacttcttgaagagcaagttcagctattttgtcgaaaatgcggttggtggggctcaacctaatattagccaaggattgattaagtcattagaagttcccctaccttctttagatgaacaaaagcgtatcgcagatattcttgataaagctgctggtgtatgccaaaaacgcgagcaagctatcaaactggctgatgattttttgcgtgctacgtttctggaaatttttggcgatcccgttaaaaaccctaaaggatggaaaaagaataaaataaaaaaaggtgtattagacattacttcaggttggagtgccactggcgagaatattccctgtaaatcggatgaatttggcgtattgaaaataagctcggtaacttctggaatattcaagccggaagaaaataaaatggtagacagtgaaactattcttgcttcgaaaaaacttatattccctaagaagggagatttgctatttagccgtgcaaacaccagagagttagttgctgcgatatgtatggtccatcaggattatgataaccttttccttccggataagttatggtcgattaagctagatcatgatctattgctaccagagttttttcttgttttgatacaaaatgaaaaaatccgtgatttattaacaaaacaagcgactggaacaagtgggtcgatgctaaatatatctaaaaataaatttgaagaaactgagattatcttcccagagatcaatgttcaaaaatatttttgcaatactttcagaaagacaataaatttgaaagaaaagttaataaaaagtaatgaattagccaatgaatcatttaattcattatctcaaaaggtatttttgcaatga

SEQ ID NO: 27393 - DNA, 624 bp, Escherichia coli
atgaaagaaattgacatcaaattgaaaattgtagagtttcttttaaactctgaacccgctgatacatacctagctgctgaggttagatttagtttcggatcaagacgtgctgatatcgtttcagtttcatcggatattgcaactgtttatgaaataaaaagtgaaaaagattccgttgaaagacttgtttatcaaatagatagttataaagaatattttgattactgttatatagtctgtgtggataaaaatttagatgcggtcagaaagaaaattagcaccaatgtgggtattattgtcgtggatgatattaacgttaagagaattagaaaggcaaagcgtattgcccgacaagaaaaattatgtttagcgagcactataccagtgaatgaattgaaaaagatcgttattaataaaaaaggactatcaaaatacgagttatgcatttcgttagccaatgaaaaacccctcgctgaaataaagagcttatcgagaaagtttttattgaaaaatatcataaaaaattttgatatttttcatgatgaaattggtgaaattttatcaccagatgacattctaacaataacaagaatgcctcctggtagaatattaagggtttcttaa

SEQ ID NO: 27394 - DNA, 546 bp, Escherichia coli
atgatagtatatgttattttagatgcaggccaagttgaaggagctactgataaagaagaagagtatttcttaaatgcttgtagtgatctagaaatgtttaatgataaaattgaagacattatcattgcttgtacatcatttccctctagtccgattaagtatggtcacgatgatcaaggtgaaatacctattttagaagagaaaatattcaaaaaaattagtgaaaactatcaagtgaaatatggtgattatgcttcaattaatattgagcaaattgaaatgaaaggagggacttttgtaccaagaatagatatttctttggaggataaatttatctataaaaggtatagaagagatgccggaagttatccgttgtgtgcagcaatgatggtaaaagatgtacggtatacaccaattgggatatgggctgatcatgaaattagtcttgcagccaaaaatacaccttcgggtataagtccatctttttggattgcggtaagaatgaattatttcatgtcaactcgtgtattattaagaaacccttaa

SEQ ID NO: 27395 - DNA, 516 bp, Escherichia coli
atgaaaaaattcaattactttccaattatgaagactcgggacgctgagttaaaagcgatgtcaaaactctcttcaggggtatttgatcatattctacctatttatgagctaacaaagtcaagaaaagccaaaattgctccagatggagacattcatcgtagaatgctgactatcaaagatattcagggtgaaagaccttttattttagatttaacatcaaatgagaaatatattaacgatcaaatccgacaactcgttgatgaaaaagatggttattatgaatggagatacttcattaatctttataaccatttgaacattattccaatgatacacatctatgatgatgaagatttttctgaagtgcggagttttgttagtgaaataacaaaaacaaaaaaaatgctggcattacgccttccatacgatttagataattattctatttttgttaaacctatcgccgatagtttacaagatgatagtatatgttattttagatgcaggccaagttga

SEQ ID NO: 27396 - DNA, 543 bp, Escherichia coli
atggcgtttatgactaagaaattaaaaagcagtggtgtaataagcggccaagacattgatatgaaaacggcttcagagcttattgtttttgctaagaaaaataatattgaaacaagccctttagatgtttcaagacttaccagtctgttaggtattacattgcggctagaaccgatgaaaggagaagaatcgggttctctcaaacaagagaaaagcggcaattgggtaatgacggtaaactctttacaccatcctcatcgccaacgcttcacaatcgcccatgaactaggccattttattcgccatacactcaatagaaatagttttacagacacggttttcttcagaaatgaagaaacaaataaaatggaagctgaagcaaatagattcgcagccgaattattaatgccagagaatgaatttagtaagtttatagaagaaaaatcaaatcaagtggctgatatagcagcacatttccaagtgtcttcaatggctgtgagaattcgtgctcaacaattaggcttcagtggacataatttataa

SEQ ID NO: 27397 - DNA, 705 bp, Escherichia coli
atgtcgataaaagataaggctcaacacggaggtttaaaccctaagacaaaactttgccatcatagtaaatggattacttttctatccattgttttttgcaccttagtaactagttttttttggctcttcattttctatttaattctacgcccaagtttttactcttatattggatttgctgataattttgtgcttaaaaaacctgatgtgatttctgatcccaagactttacagaatattggcaaaatggtcactgatggaacccttttaagtcttgacgatttttggtctttccaaagtaatttatatcagacaattattactgtgctcattgcgctcaatgggatagtagctgcattttcatttcttattattaaaaactcttctacagcaaaagcaaaagaagaagcgagagatattgctgttgtcgaagtaaatcaatatgtagaaagttcaaaatttgaaaaagaaataaaggcgattttatacgaaaagattgagcctgtacaatttgatttactagctcaaataagttcacttgacgatattaaacttagtcaacaagaacacaatcagtcatttgaaaaacttgagcaagaactggatggtttaaaaaggaatcttaaattaattgctgaaagcatttctttaaaagatacctcagatgaagatggcggcaactttatcttaggaaggagaacttaa

SEQ ID NO: 27398 - DNA, 279 bp, Escherichia coli
atggtggaggatgaggttgcacaaaagctggaggttgctggtctctggcgcagggctgccagtcgctggcttgatgtgatgcagcaccatgggctgacggctcagcaacgtgatcgaatacgtcagcacagaaaatattgtctttcctgcgtaaagcccatcagcatcctagagaaactggatgtgacggaaattgctagggctgcaaagaccgtccaggagcggatggggctgagtcatccgtatggggtagctttcaggttgaaagacgaaaaataa

SEQ ID NO: 27399 - DNA, 213 bp, Escherichia coli
atgagtgatgtaaaaggaactggcgaggtgggtaaaacacagcggcaccgtaatcaccggacacagtggacagccaccgaaattacgtttgtggaacaacactatggtcagttgtctgcccgtaaaatcggagtgcggcttggccggtctgcccatggggtggcccgaattgttcagcttttaggtctgtcccaaggcgtggcaccgccctag

SEQ ID NO: 27400 - DNA, 2079 bp, Escherichia coli
atgaaaaaaaataaatcgacttttaccatcaattttattacgtattcattgatgctttctctggcaggagtgcctgtctatgccgtcgattttaatacggatgttctggatgccgcagacagacagaatattgatttttcccggttctcccgggccggctatattatgcccggacagtatcagatggaaataagggtgaatggtcaggatatttcaccatcggcatttcagattgcgtttcttgaaccacctttttcggattcggataacgagaaaccgttaccagaaccctgcctgacaccggagatagtcagccggatgggactgactgaggcgtcacaggaaaaagttacgtactggaataacggacaatgtgcggatttccgacagttatccggagtggagatacgcccgaatccagcagaagggatgctgtacatcaatatgccacaggcctggctggaatattccgatgcctcctggctgccgccgtcccgctgggataacggtattcccggactgttgtttgactacaacatcaacgggacagtgaataagccgcatcaggggaaacagtcccagtcgctgaactataacggaactgcgggggctaacttcggtgcctggcgtctgcgtgcggactatcagggcaacctgaatcacaccaccggcagtgcgcaggggacggacagccagttcacctggagccgtttctacatgtaccgcgccatcccgcgctggcgcgcaaatctcacactgggtgagaactacatcaattctgagattttcagctcctggcgctacactggtgccagtctggaaagtgatgaccgcatgctgccgccaaaactgcgcggttatgcaccgcaggtctcagggattgcggatacgaatgcgcgtgtcgtgatttcgcagcagggacgcatactctatgactccactgtgccggcaggtccgttcaccattcaggacctggacagctccgtgcgtggccgcctggatgttgaagttatcgagcaggacgggcggaaaaaaacgttccaggtggacacggcatatgtgccgtatctgacccgtccgggccaggttcgttacaagctggtttccggtcgttcgcgtacctatgagcacaccatggagggtccggtctttgctgccggtgaggcatcctggggtatcagtaacacgtggtcgctttatggaggcagtattgttgccggggattataacgctctggctgtggggctgggccgggacctgagtaagttcggcactgtttccgctgacgtaacccagtccgtggcccgtataccgggttatgacacaaaacagggaaaatcctggcgtctgagctattccaaacgttttgatgaagtgaatacggatatcacttttgcgggttaccgcttctctgaacgcaattacatgacgatggaccagtacctcaatgcccgttaccggaatgattttacgggacgtgagaaggagctgtacaccgtcacactcaacaagaacttcgaggactggaaggcatcggtcaatctgcagtacagccatcagacttactgggaccgccggacatctgactattacacgctgtcggtgaaccgctacttcgatgcgttcagctttaagaatatcgcgctggggatatctgcatcccgttcgaaatacctgaaccgggataacgattcggcgtttgttcgtctgtccgtgccgtggggaaccggtacggccagctacagcggcagcatgagcaacgaccgttacaccaatacggtgggttacagcgacacactgaataacggcctgagcagttacagcctgaatgccggcgtgaacagtggcggtggtcagccgtcacaacggcaaatgagtgcctattacaaccataacggttccctgacaaatctgtcagccagtttctctgccgtggagaacggatacagctcattcgggatgagtgcatcgggggggggcgacggtcacgatgaaaggagccgcgttacatgccggaggaatgaacggaggaacccgtcttctggtggataccgatggtgtcggaggtgtgccggttga

SEQ ID NO: 27401 - DNA, 492 bp, Escherichia coli
atgaacggaggaacccgtcttctggtggataccgatggtgtcggaggtgtgccggttgacggtggtcgggtttataccaaccggtggggaattggtgtggtgacggatgtgagcagttattaccgcaacaccacatcagtagacctgaacaagctgccggaagatatggaagccacccgctcggtggtggagtcggttctgacggaaggggccattggttatcgtgagttcgaagttctgaaaggtagccgtctgtttgctgtgttgcggatgtctgataacagctatccgccctttggtgccagcgtgacaaatgcgaaaggccgtgaactggggatggtggcagacagcggtctggcctggctgagcggagtgaatccgggagaaaccctgaacgtcggctgggacggccggacacagtgtgtggtggacatcccggcacatccggacccggcacaacagttgctgctgccctgtcgtcaggtgaagtga

SEQ ID NO: 27402 - DNA, 258 bp, Escherichia coli
gtgaagaataaaaccctcaccattaaatttattttcaccatcaaaattaacaaccacttcattgattatagaacaagtaagctcagacagaatcccagctttctccatattatctataaaactatctggataaattactcctctatcagaggtatgccaacggacaagcaactcgccaccaataattttatggttgctggcacaaacaataggctgaatgtatggtttgaattctcgtttctgtattgcctgcaataa

SEQ ID NO: 27403 - DNA, 882 bp, Escherichia coli
atgagcaaattgttccagttcaaaagttggttgaccatagaggaaaccgcaaacaggttaagcacaacactcggtgaaagggtatctgtagccgattgcctgcaattggctgtagaaggccacattacaatttcagcgatattggacgaaggccgttacgctatcgctgctcaagtcatcaaaaactcgcaacgaagagtttttgaaaagtggattgttgaaaatactaacgaaggtgcggtaattagaactcctgccggtgatgaattctatactaatgaacaattggattatgaatacgaagatatagaaagagtcagtgatgtttttcgtattaatcatggcatatacgatctaccgatggttggggctgaatctttagatgttatgcacgagtttgacctttcacgcgacaaggttccccgtgaatttcacaacatggaaggtgctttcctcttaacagaatttggtctggtgaatattctgaacgcgttcaatgaatatgccatcaagtcagatgaaaatggcaaacctaaactgtacgacaaagaatcacagaggtttgttgactttagcctcgatggttatcatccctttttctatcctgctgatgggctgggtaatgtcgagttcgtattcagaaaagaaaatattgcagaatttgaaaagaaaacactcagtgataacaacagtctcctgaacctcgatgaaagccttttactgcttggcgcggtgctcaacgctttaaagaaagccgaaccaacttctaaaaggtggacacaagaagccctcaaagcagaaatgctggataggggtttaaaattaagctcccgcttactggatgaatatttctcatcagctaacaaatcttttaaatcataa

SEQ ID NO: 27404 - DNA, 855 bp, Escherichia coli
  misc_feature (770)..(779): n is a, c, g, or t
gtgaaggcttggctgaatgttgggggacagggatacgatccgtcaattaatttccaggttctgaagtttttaaagcaggttgagcggctttcttcagttaaaacaacgtatctacctcaaattcgtgaattcggtatcgcatcaaaatcatcaagcctatatatggtcacggatcaggtacagggagaaacctgggataaaatagcggtccccgatgatgaaaaaatcgacctcattggtaagtttgtcgccgccgttgagcacttacatggtctgggtgtttctcacggggacatccaccctggcaatgtgatatttgagacacagagccgtttgctttttctcatcgatatccccgatttttcaccgtccggtgacgaacctaaaaatcacagttacagccctgaatacattgataattgtacttcttttgaacgtgacaactatgcagtgatgaagatgtcctgcgagttgctaggcatgtcatgggggctggaatcagacatttatccgacaatcgcgaatgctatccgagcagagctggaagatccggtttttgggtttaaggatttaggccgctttaaaaaagcgatagatagtaatgacctggtgccagaacaagacctgatagagattactgcaggaaatgccgatgaaataatctctattctgcctgataacgggcatctgtatgtcaaagttaagtcaaatcctaaagcgccagctgaagtaaatgtgactttctctgggattggtggcagttttactgnnnnnnnnnnttactgcggtgttcaacaaagatcagaagacgctggttcatggcttcaggccacgggctcgcgtcacaattcgtaa

SEQ ID NO: 27405 - DNA, 153 bp, Escherichia coli
atgttccgtcactcggaaaacgagtacgactggctgagctcagacgccgctgtggatgaggtcctgctcatcaacgaatacacctttaccgaagccggtctgcgcgccggctgccccgtcatcgttaaactatcattcaccgattttctgtga

SEQ ID NO: 27406 - DNA, 477 bp, Escherichia coli
atgcagcagctttcctttctgcccggagagatgacgcccggcgagcgcagtctcattctgcgggccctgaaaaccctggaccgccatcttcatgaacccggcgtggccttcacctccacccgtgcggcacgggaatggctgattctgaacatggcgggactggagcgtgaagaattccgggtgctgtatctgaacaaccagaatcagctgattgccggtgaaaccctcttcaccggcaccatcaaccgcacggaagtccatccccgggaagtgattaaacgcgccctgtatcacaatgccgcagccgtggtgctggcacacaatcacccgtccggtgaagtcacacccagcaaggcagaccgccttatcacggaacgtctggtacaggcactgggcctggtggatatccgggtgccggaccatctgatagtcggtggcagccaggttttctcctttgccgaacatggtctgctttaa

SEQ ID NO: 27407 - DNA, 162 bp, Escherichia coli
atggtctggttggttatttatttcggaatggaattactttttatctccgatcgggttcatccggtattaagaataattgttgtcctgggaatgttattcctgatgataatgattgcgggcggtatgtgtcgttctcttctgtcacgaaagaaaacatcatga

SEQ ID NO: 27408 - DNA, 342 bp, Escherichia coli; identical to SEQ ID NO: 11593

SEQ ID NO: 27409 - DNA, 1095 bp, Escherichia coli; identical to SEQ ID NO: 11592

SEQ ID NO: 27410 - DNA, 1266 bp, Escherichia coli; identical to SEQ ID NO: 11591

SEQ ID NO: 27411 - DNA, 309 bp, Escherichia coli; identical to SEQ ID NO: 11590

SEQ ID NO: 27412 - DNA, 234 bp, Escherichia coli; identical to SEQ ID NO: 11589

SEQ ID NO: 27413 - DNA, 1053 bp, Escherichia coli; identical to SEQ ID NO: 11597

SEQ ID NO: 27414 - DNA, 366 bp, Escherichia coli
atggatcaccagctccgctccgcggatatagtccatgaactcatcggctacctcggcaaacgtgggcttatcgagcaaaaattcatcggcaataccatgtacgccaaaggcttccggatccaccagccgatcgggtttgagataaacatggaagttattgcccgtcaggcgacggttcaccacttcaacggcaccaatctcaatgatcttgtggccttcatagtgcgcaccaatctggttcataccggtggtttcggtatcgagaacgatctggcgtgtaattgcagtgctcatagcggtcatttatgtcagacttgtcgttttacagttcgattcaattacaggaagtctaccagagatgcttaa

SEQ ID NO: 27415 - DNA, 2784 bp, Escherichia coli
atgagaaacctctgtttcttactgacgttagtggcaactctgttgctccccgggcgactgattgccgccgccttaccgcaggatgaaaagttaattaccgggcaactggacaatggcttgcgatatatgatttatccgcatgctcaaccaaaggatcaggtaaatttatggctgcaaattcataccggttcattgcaggaagaagacaatgagcgcggcgtggctcattttgtagaacatatgatgtttaacggcacaaaaacatggccgggtaataaagtcatcgaaacatttgagtcaatgggcctgcgttttggtcgcgatgttaatgcctataccagctatgacgaaacagtgtatcaggtgagtttgccgactacgcagaaacaaaatctgcaacaagtgatggcaatcttcagtgaatggagtaatgccgcaacctttgaaaaactcgaagtagacgctgaacgcggcgtaattactgaggaatggcgtgcccatcaggatgcgaaatggcgcacctctcaggcgcgccgccctttcctgctggcaaatacccgtaatttagaccgtgaacctatcggcctgatggataccgtcgccacggtcacaccggcacaattgcgccaattttatcaacgctggtatcaaccaaataatatgacctttattgtggtcggcgatatcgacagtaaagaagcgctggcgctgataaaggataatttaagtaagcttccggctaacaaagcagctgaaaatcgcgtctggccgacaaaagccgaaaaccacctgcgctttaatatcatcaatgataaagaaaaccgggtgaacggcatcgcactctattatcgcctgccaatggtacaagtgaacgatgagcaaagctttatcgaacaagctgaatggagcatgttggttcagctgttcaaccaacgtctgcaggaacgcatacagtcgggcgagttgaagactatttctggcggcactgcgcgcagcgtcaaaattgcacccgattatcagtcgctatttttccgtgtaaatgcacgagacgataatatgcaggatgctgcgaatgcattaatggcagagttggcaaccattgatcagcatggtttttctgctgaagaactcgatgatgttaaatctacccgccttacctggctgaaaaatgcggttgatcagcaagctgagcgtgatttacgtatgctgaccagtcgcctggcatccagctcattaaataatacgccgttcttgtcgccggaagagacatatcaactttcgaaacgtctgtggcagcaaattaccgtgcaaagtctggcggaaaaatggcagcagttaagaaagaaccaggacgcattttgggagcaaatggtaaacaatgaagttgccgccaaaaaagcattgtctcctgcggctatcctggcgctggaaaaagagtacgctaacaaaaagctggcagcttacatcttcccaggcagaaatttatcgttaacagtagacgctgacccacaggcggaaattagcagcaaagaaacgctggctgagaatctgacatcattaacactttccaatggtgccagggttattctggcaaaatccgcgggtgaagagcaaaagctacaaattactgccgtatctaataaaggcgatttaagtttccctgcgcagcaaaaatcacttatcgcgctggcaaataaagcagtaagcggaagcggcgttggtgaactctcctcttccagcctgaaacgctggagtgcggaaaactcggtaaccatgagcagtaaagtcagtggcatgaatacattgctctccgttagcgcgcggactaataaccctgaacctggtttccagttgattaaccagcgaatcaaccacagcacgattaacgacaatatttgggcatcgctacaaaatgctcaaattcaggcgttgaaaacgctcgaccagcgtccagcggagaaattcgcccagcagatgtatgagacgcgctatgccgatgaccgcacgaaattaccgcaagaaaatcagattgcacagtttactgccgcagatgcgctgactgccgatcgccagttgttttcatctccagcggatatcacgtttgtcattgtcggtaatgtcgcagaagacaaactcgtggcgttaattacgcgttacttaggatctatcaaacactctgattcgccattagccgcaggtaaaccattaactcgcgcgacggacaacgcatcggttactgtaaaagaacaaaatgaaccagtggcacaggtttcacagtggaagcgttataattcccggacacctgttaatctggcgacgcgtatggcgctcgatgcttttaacgtcgcactggcaaaagatctacgcattaatattcgtgaacaggcatctggggcatacagcgtttcttctcgcctctcggttgatcctcaggccaaagatatcagtcatttgctggcttttacttgtcaaccagaacgacatgatgaactgttaacgttagcgaatgaagtgatggttaagcgtctggccaaagggatcagtgagcaagaactgaacgaataccagcaaaacgttcagcgcagcctcgatatccaacagcgtagcgttcaacaattagcgaataccattgtaaatagtcttattcaatatgacgatcctgcagcatggattgagcaggagcaattgttgaaacaaatgacggtagagaatgttaacactgctgttaaacaatatctttctcatccggtgaatacctataccggagtattattgccaaaataa

SEQ ID NO: 27416 - DNA, 858 bp, Escherichia coli
atgatggcattattactggagccactgcagttcacctttataagtcacgcactgctgatttcactggtagtttccataccctgtgcgctgctgtcggtctttctggtcctgaaaggttgggcactgatgggtgacgcgatgagtcatgcggtttttcctggcatcgtgcttgcctggattctggggttacctttggctacaggggcattcgtcgccggagtattctgcgcggtggcgacgggatacctgaaagacaacagccgaatcaagcaagatacagtgatggggattgttttttctggcatgtttgccgcaggtctgatcttgtatattgcagtcaaaccagacgtacatcttgaccatattcttttcggcgacatgctcgggataaccatcggcgatataatccagacggtgattattgctgggctggttacacttgttattagcgtaaaatggcgagattttttgctgttcagctttgattatcaacaggcgcaggtaagcggtttgcatacgagatggctgcattatgggctgctgtgcatggtctctatgaccattgtggcgacgctgaaagcggtaggtatcattctctccatttctctgctcattgcgcctggcgccattgcggtactcctgacacaacgctttcatattgcgctcctactggcgactggcatatcggtaatagtgtcaatgactggtgtctggttgtccttttttatcgacagcgcaccagctccgacgattgtcgtcttattcgcggttttgttcatcatgacgtttgccgttaccagcatcaacgcacgcaaaaagggaaactcccatacacaggatctgttatcacccaattag

SEQ ID NO: 27417 - DNA, 246 bp, Escherichia coli
atgagcgtatccgggtttatgggatatctgaaagggaaaagcagtctgatgctttacgagcagtttggtgatttgaaattcaaatacaggaacagggagttctggtgcaggggggactacgtcgatacagtgggtaagaacacggcgaagatacaggattacataaagcaccagcttgaagaggataaaatgggagagcagttatcgattccctgtccgggcagcccgtttacggaccgtaagtaa

SEQ ID NO: 27418 - DNA, 369 bp, Escherichia coli; identical to SEQ ID NO: 11801

SEQ ID NO: 27419 - DNA, 198 bp, Escherichia coli; identical to SEQ ID NO: 15028

SEQ ID NO: 27420 - DNA, 825 bp, Escherichia coli; identical to SEQ ID NO: 11800

SEQ ID NO: 27421 - DNA, 492 bp, Escherichia coli
atgatgaaactggccctgacgctggaagccgacagcattaacgtgcaggcactgaacatggggcgcattgtcgttgacgtcgatggtgttaatcttgctgaactgattaacgtggcctgcgacaatggctactcccttcgtgttgttgatgaatctgaccggaccgcaactgacagcatgccaccctccgctgccctgagcggtatacgctgcagcaccgcacatatcacggaaacagacaacgcctggttgtactcgctgtcacaccagaccagtgacttcggcgaatcagaatggattcattttaccggtagcggatatctgttacgtaccgatgcgtggtcatacccggtcctgcggcttaaacgcctggggctgtcaaaaacgttccgtcgtctggttatcacacttacccgacgttatggcgtcagtctcattcatctggatgccagcgctgaatgcctgccgggtttacccactttcaactggtaa

SEQ ID NO: 27422 - DNA, 153 bp, Escherichia coli; identical to SEQ ID NO: 27405

SEQ ID NO: 27423 - DNA, 180 bp, Escherichia coli; identical to SEQ ID NO: 8008

SEQ ID NO: 27424 - DNA, 2082 bp, Escherichia coli
  misc_feature (987)..(996): n is a, c, g, or t
atgttcaatctcctgcaatcgttggcatatgaaccggaaacttttgaacgttgcgtcaggctgctaattcatgcggtagattatgaggttgaaaacaacaaccatgactctgtacggggtaagatcaagaggctttatcagccatacctgtctggtacacaggcctctttagaccagcgccttgcaattttgaaacaatgcctttcatcagacgtcgttggacgcaaagaattgggccttatgatgctttcaacagccctcagcggcccaccttggacggggttcggggctaatgagtttggtgcacgaccaagagattatggttttcaaccaacctatgaagaacttgttgaatggcgtagtgcattcattgaagttgcggttaatgcaggaacttgcggaattcctgcggttgaggaaactgcgcggcagcttttagcgagggcttttcgatcaatatggcgtcaagaggctgccaggacaatgctcattgatgctgctcacaaattacattcttactatccgtgggttgaaggatggaaggccgttcgttcaacgatatattttgattacaccaagcgcagagatatcgaagatttagagccgttgccaagcgatcttgtcgctctggagagtgagttagaaccacatgacttggttccggaaataatggcttatgtattaagtaacggacgcgattatttggcatttagtgccgatacttctcctgatgaacctaataagttcgctaatcttaggacataccttgactctaaagcttatcaattggggcaggatttcgcgtcatctcagcatacgcttgatgagttggggcctaatctgttcttggtgggggggatgccctaccgtgttaaatttggtcaaggtttagcaagaggggcacttgacctacgggagtgttggcaacaactcgttgcttatttggatatacaaaccggttctcaaaaggattttgcagttatccgnnnnnnnnnnatccgtggctttatcgacgagacagatactattgattcaatattagcccaagaatttctcgatcaatgtgtgcgtcatcctgagttgcgatacggaattgtttatttacatccttggcgagaattcactgaaactgacttggatcgctgtttggctcttttagatgaccccgacatcatgccgtcaatgtatggacaaattctttggggagaccaatacgctcatttgccagagccgcgcattgttgatcttgctcacaggcttttaagtatgccaaatggcgatgatgttattttggaagctttaagcatgaagttaagtgaccagaaagacggttcgagtactcttggctttgatctgcttcaaataggattgaaagctgcaatccagaggttcaaaagagagcacaatgattccgctgggggaatggattacggcatggaatgtgttgttggtgccatattgcgtctcgaaggcaacgaggcggggaagttagagtggttaaatacgatctttgctgttgttgatgaacagtatggctgtattcattcgtttgaagacactataaagatgactgcggcatcaatgccagaagcgttcctctctcgtatttttgaagggacagaagaacagcaacaacgacgtattcattttatccattatgatgatgtgacagagtcccctatcgcgaatatcgacgtgaatgtattgatcgaatggtgtcttactcgaaacgatattaatgtatgggcacctctcgcaaagggtatccgcctttggtctgtgggggatgatttggataaggtcacaatgcaggtttcagcgattcgcttccttgaagcagctcctgtgccaaaggccgtactggaagaattcgcttatcgcgtaacaccgacatcttggtggggaagtcgagttaacgtaatgcaacccagagcaaatactattagtagattaatagagcatgagcgtacagatattgctgcggcagctagaattgtttccgagaaattaaacgattggatagaacatgaaaagttgcaagagcagcaggaggatgagatgcgcgaacaacgcttcgaataa

SEQ ID NO: 27425 - DNA, 897 bp, Escherichia coli
gtgtttggtgatctgaactttaccgaatgttgtgaagaagtgctggaagtcaaagacagtgagatgaagaacaaaaagcatctcgcgcaatggcgttccacactggagacctatgcctaccctttcattggcaaaaaggccgttagtgaaatcaccaaagtcgatcttctggcaatactggaacctatctggttaaccaagaatgaaaccgccagtcgtctacgtggacgtattgaaacggtgatcgattacgccaaggccaaagaatactttgaaggtgataatcctgctgcatggaaaggtatgctgaaacctctcctgcctcagccaagtaaagttcagatcaccaaacaccatgcggctcttccctataaccagatcggctcctttatgaaagaactgcgtgaacgaagcggcgtttcgcctcgtgcgcttgagtttgccatactgaccgcagcacgctcaggtgaaattcgtggtgccgagtggtcagagatcgatcttgaaggtaaaacatggaccatccccgccagtcgaatgaaagcaacgaaggagcatcgagttccgttgtctgatgctgctgttgccctgttaaaggctttaccacgctttaaaggtatcaattttgtattccctgccactcggaagggacaactctcggatactgctttactggcagtcctaaagcgaatgggatataccgacttaacgcagcatgggtttagatcgacattccgtgattgggctggtgaaacgaccaactacccgcgtgaggtaattgaacatgcgttagctcatcagttggcaaataaggcagaagctgcgtatcaacgtgggacgttatggcctaagcgggtggcgttaatggatgattgggcggggtattgtatttcttag

SEQ ID NO: 27426 - DNA, 390 bp, Escherichia coli
  misc_feature (339)..(348): n is a, c, g, or t
atgaaatttgaacgccatcatgaaatattgaaacgactcagtaaattcggttctgtaaaagtatccgatctgtccaatagcctcaatgtaacgaaagaaactattcgatcagatcttaatgaacttgccaggcttggctatctgactcgatgtcatggcggtgcttttatcgtcctagactcgcttgatactattgcgaaaaatgaaatcgcttatgcgcttgaaaattatgatacagcccagggaataaaaaaaggccactcaactatgaaaagtcaagtatgcgttattggttcgtttaatgttgatatcatcagttatttgccgaggcttcccacnnnnnnnnnncgctggcagcaagctttgccgatactgatgtttatttcataa

SEQ ID NO: 27427 - DNA, 222 bp, Escherichia coli
atgttttggtgtgtaaacaaaatatttgatgagaatatagatatcactcgcctaattattcctaaagaagatgttttaagatttgattttgattttgttattagcgtttttaaaagattaaaagtgacaaaggaatttgcttatagtcaacagggtaaggttgaaatattattttggggtatgatgatgaccccagagagttgcttgaaatacctgaggtag

SEQ ID NO: 27428 - DNA, 417 bp, Escherichia coli
atgatagataaattcccaaaataccaaaaagaagctcaattaggtgagcttggagtaaatatagtaaaatcagtaattaatgaaaattttggatggatttttaagagaaaccatcaagaaatggatttcggtatcgatggttttatcgaaatagtacgagatgatggagccgtaacggggaaaatgcttgctgtacaaatcaaatgtggagcttcatttttttcggaagaaaatcggtgggggtatgtttacagaggtgaaaataagcactttaattatttatccaactgtccaatacctgttttggttttgctttgtaagcctgaaaaaaagaagtgttttgggaatgttttgatcctatcaaaattgaaagaacaaaaaaatcatggaagattaatattccaaaacgtcaattga

SEQ ID NO: 27429 - DNA, 159 bp, Escherichia coli
atggatggttgtgactcgttcggtcaggattgtggcgctgacatgactgaagattctgatggcgattatgtcctgtttgatgacgtggttaagttgtttgagtttgatacaaccactcaaaagttagaaatcccggcaaaggaggcaaccagtgaataa

SEQ ID NO: 27430 - DNA, 543 bp, Escherichia coli
  misc_feature (239)..(248): n is a, c, g, or t
gtgagcgaaattaattaccaggcactgcgtgaaaaggcagagaaagcaacgtgtggtgtgtggtcgctagaatatggagagggccgatttgatggtgatgatgcactaattcatcgcgaggctgctggatatattcccatttgcagaattgaaggagcgcatccagaaagcggtttcgatgaagatttccaaatggaacagcaggccaatgctgaattcatcgccgcagccagtccagnnnnnnnnnngctggcgctgctggatgaacgggaaagaaaccagcaatacataaaacgccgcgatcaggagaacgaggatattgcgctaacggtagggaaactgcgtgttgagctggaagccgcagagaagtgcatagcagaactgtctgctagccacagcaaattgcgcgacacaatggctggcatccacaacacaatccgaatggatggcggctatacgccactggcagcaatccttaacgctgctaaacgcgcatatgaagaatcagcaagcgcagctggcattcgcatcaaaggagagtga

SEQ ID NO: 27431 - DNA, 417 bp, Escherichia coli
gtgattggtaagatctcagaaactaataaaaatatattaaattcatttaaaaatacaattgctttaggtactgttgatgatatcaattcttccgcttctacagggcatataggtatatgtcctgttcgtcttggagcaggcgtacaaaataaaattcttgaatacatggctttaggtttaccatgtattacatctagcattggttatgaaggtattaatgcaaaatcaggtagcgaaatttttgttgcagatacagtagagcaatataaaaacgtactaagagaaataatttacgattataatcgttatactgaagtggctgaaaatgcccgtagttttgtagaaaataatttttcttgggaatcaaaagttgccaatttaatgaatacattagatgagaaattatatgaacaataa

SEQ ID NO: 27432 - DNA, 837 bp, Escherichia coli
  misc_feature (223)..(232): n is a, c, g, or t
ttgcagattttccacgccggtaataaagccatcccggagcttgtgccaaataacgatgttattagtgccagcgcatcaagcgtaaaatctggtgactttatgaagagagtggtacaaagcagggaaatgactgaaaacgaaattcaggaaaccattagagcattcggagatgtcacaaaaagggcgattaaagcaggttttgatggcgttgaacttcatggtnnnnnnnnnntccttctgcagaatttcttctcccctctatttaaccagcgtaatgaccgatggggaggagatcttgaaggacgtatgcgcttcccgctggccgtattacaggaagtaaaaaatgtagtctatgaatatgcgacaaagccctttgctatcggttacagaatatctcctgaagaatctgtaacaggggggctgcggatagaggatacttataaactccttgatcggctcatttcatccggtatttcgtatatacatacctcgctggtcagtattaacgatagctaccctgttgagtcgccaaatggcccccgaactattgaattgattttaaatcatattgcaggcagagtgccggtaatcgccgcaggtaaaatacgcacaccgtctcaggctcaagaagcaatttccgctggcctgccacttgttgcgatcggtaaagggctggtgataaatccagaatgggtgactttagctgaatcaggtagaagtcatgaaattcaaacagcccttaatccacaacgcgttcctgaattaaccattccggataaactatgggatcaaattcaggcatcgaaaggaactggttggtttccgttaatggattaa

SEQ ID NO: 27433 - DNA, 249 bp, Escherichia coli
atgattagattcatggccttgcatcgcgctagtaaggtctggtgcagggttatactctgcgcgaccagtgactattgcatagcggaaaacttccccgcaccgctgcctcacttttttggctttttctgtcgcaccgcgcccctcgatgcgccgcagcacattcagaagttcaagtggtttgatttcggcgattggttttttgccaatgtaagggaacacatctttgttgaaggcttcgaggatgtctga

SEQ ID NO: 27434 - DNA, 453 bp, Escherichia coli
atgtacaccgccagcagtgctctgccaaaagacagagaaagtgtgttctggtttaacgtactggaagtacctccaaaaccagatgcagcaaaagcagcaaaccaaagcctgctacaactggcatttcgcacacgtataaaactgttctatcgcccggaaggattgagtggaatttcatctgatgcaccattggctctgaagtggtcctgggcaacatctgaaggcaaagcagcattacgcgttgataaccctacgccctactatgtctcttttagcagtggtgatttagaagccaacggcaaacgctaccccctggatatgacaatgattgcgccgttcagtaacgacgtcatcaaggtaaatgggatgagtggcagaacaagctctgcaaaagtgcattttttcgccattaatgattttggtggatctattgaaggcaacgccaacctttaa

SEQ ID NO: 27435 - DNA, 777 bp, Escherichia coli
atggctcagccagatggaaatgtccaccaggctgttattaattctgttcttctttgcttgtgggcatttgttggtgtcgaatctgcggcagttagttcagatcttgtccataatccttcccgaacagttccattggcaacgctggggggaactgcacttgcaggaatagtttatattgcggcctcccaagttattgcaggcatgtttccgaacgaagtcgtggcaaattcaggagcaccttttgctttaagtgcatccagaattgtcggggactgggcggctccatttgtatcggcatttacggctattgcatgtctgacatctctgggctcctggatgatgctggttggacaggcaggacgtcgtgcagcaatggatggtaacttcccggctgtatttggagaaacagacaataatggtgtacccaagaaagggttgctcattgcatcaacgatgatgagcattttgatggtattactgactattctcagtgccagtggttctaacgctgcggatttatttactcaattaacaagcattgctgttttgttaactatgttcccatatttttactcggctattgaccttattcgttttgaaagtgcaacttcaaaaagtattttgagtctgatcgcttcagcgtttgctatgttgttctgttttgctgcgctggctggtgcagagcattatgaaataactgcaacaattattatttcattattaatattcgctttctacgcaagaaagctgggtggcattcagcacaaaaatatttaa

SEQ ID NO: 27436 - DNA, 144 bp, Escherichia coli
gtggaagcgaaagataaccgcgaaataatcaatattgctgagctgaatgcagaactgaaaactacggtcagcaaaatcgaccagttgcgtaaagatattgatgcgattgtggctgaaattgaaggctgcgaggtgcagaaatga

SEQ ID NO: 27437 - DNA, 489 bp, Escherichia coli
atgaaactggccctgacactggaagccgacagcgttaacgtgcaggcgctgaacatggggcgaattgtcgttgacgtcgatggtgttaatctcactgaactgattaacaaggtcgctgaaaacggttattcactccgtgtggtggacgactccgaccaacagtcaacctgcacaccaccaccgttaacaacccttaccggcatacgctgcagcaccgcacatatcacggaaacagacaacgcctggttgtactcgctgtcacaccagaccagtgacttcggcgaatcagaatggattcattttaccggtagcggatatctgttacgtaccgatgcgtggtcatacccggtcctgcggcttaaacgcctggggctgtcaaaaacgttccgtcgtctggttatcacacttacccgacgttatggcgtcagtctcattcatctggatgccagcgctgaatgcctgccgggtttacctactttcaactggtaa

SEQ ID NO: 27438 - DNA, 477 bp, Escherichia coli
atgcaacagatttcctttctgcccggagaaatgacgcccggcgagcgcagtcacattctgcgggccctgaaaaccctggaccgccatcttcatgaacccggcgtggccttcacctccacccgtgcagcacgggaatggctgattcttaacatggcgggactggagcgtgaagaattccgggtgctgtatctgaacaaccagaatcagctgattgccggtgaaaccctcttcaccggcaccatcaaccgcacggaagtccatccccgggaagtgattaaacgcgccctgtaccacaatgccgctgccgtggtgctggcgcacaatcacccgtccggtgaagtcacacccagtaaggcagaccggcttatcaccgaacgtctggtacaggcactgggcctggtggatatccgggtgccggaccatctgatagtcggtggcagccaggttttctcctttgcggaacacggtctgctttaa

SEQ ID NO: 27439 - DNA, 240 bp, Escherichia coli; identical to SEQ ID NO: 11875

SEQ ID NO: 27440 - DNA, 615 bp, Escherichia coli
gtgcaggtcattcagcagtttgaacagaccggctcacacgctaaccgttatgacgtcaccattctggttaacggcctgccactggtgcaaatcgaactcaaaaagcgcggcgtggctattcgtgaagcctttaaccagatacaccgttacagcaaggaaagctttaacagcgacaactccctgtttaaatacctgcaactgtttgtgatatctaacggaaccgatacccggtactttgccagtaccactaagcgggataaaaacagctttgatttcaccatgaactgggcgaagtcggataacactctgattaaggacctgaaggactttaccgccactttcttccagaagcataccctgctgaatgttctgtttaattacagcgtgtttgacagcagccagacgctgctcgtcatgcgcccctatcagattgctgccactgagcgaatcctctggaaaattaacagctcatttaaaatgaagaactggtcaaaacccgaaagcggcgggtttatctggcaaagtccggaagggtatcagaagcatctcccggtattcctaaagcctgataccaggcgggtgaaagcataccctaacggtatcaatgcctgttag

SEQ ID NO: 27441 - DNA, 363 bp, Escherichia coli
atgcaaccactacatggtaattgtctaattgcgtacgcaagacataaatatattctcaccatggttaatggtgaatatcgctattttaatggcggtgatctggtttttgcggatgcaagccaaattcaagtggataagtgtgttgagaatttcgtattagtttcaagagacacgctttcattatttctcccgatgctcaaggaggaggcattaaaacttcatgcacataaaaaagttccttcattactcgttcatcactgtaccagagatattcctgtttttcaggaagttgcgcaactatcgcagaataagaatcttcgctatgcagaaatgctacgtaaggtaatgactccaacttattga

SEQ ID NO: 27442 - DNA, 531 bp, Escherichia coli
ttgcaggatgttgtttcggagctggagcagcgcttccctgacccggccagtatcgacagtgaaaaagagaaaaaagccttcgtcaaactgtttggtgaatatctgcgggcagaaaacatcctgcaaaactacgatgaatttgccacgctgaaagccctgcagaagattgatattagtgacccggaagcggtagaaacctttaaagcagagcactatgtggatgatgaaaaatttgctgaattacaaaccattcgtctcccggcagaacgtaaagttcaggactatcgctcagcatacaatgatatccgggactggcagcgacgcgaaaaagcagcaaacgacagggataaatcaaccacagactgggatgacgtggtgtttgaaattgacctgctgaagtcgcaggaaattaacctggactacatccttggtctgattttcgaccacaatcgtcagaaaaaaggtaaagaagccgttactgtcggtactgaaattggttttaaagtggttgttatagtcatcaatggctga

SEQ ID NO: 27443 - DNA, 354 bp, Escherichia coli
atggcgcgaaagacggtcgtaaagcgtgcaagcaagtattggcctaaggcatcacgtcttgatagtgctattcacgtactaaacgaagaagaaggtgtgtggactgaaccagttatgccgcacaaatcagaggaagatatccgcgaagatgaacggaaacgccagcaggaaataatggataaagcacaacttctttgcgatgaaatggctcaggcagaaaacatggacgatttgaagcgatattttgcagaagcatatcgcctgacatctggaatgaaattgcagcagaacgtacaagccatttacgcagaatgcaaagcgaaactggaggttgccagtgagcaaactatatga

SEQ ID NO: 27444 - DNA, 288 bp, Escherichia coli
gtggtgaaactgctcattgcaaagtttagtgatctccatgagatgaaaattgcgcacagggatgtcgccgatcacagtctgtggatttcaccttcaaaagaagttgctctttcgaactttatttcggcttaccaccagccagccggaacggttggcgattaccgtaagcttttatccgtaggtgcagtccacgtaaaagacatgcttgataagggcgagcttacgccttttcagcaagatgttcatactctgggccatcgtcttccgggtattgacgagcgtgattga

SEQ ID NO: 27445 - DNA, 1833 bp, Escherichia coli
atgaattacaatgaagagctaacctcatatcttaattatttagtgggtcttgaaaaatcccctaatttcgcagtaatgattgacggcgaatggggaagcgggaaaacatggtttgtccgtaaattaatgaatgaagaatcactaaaaggggaagttaagccattaatgatctcattatatggaataaaatccaccgaacaaattgacgaaataattttcaagcaaatgcatcccttcctttcatctaaaggcatgttgcttgctggcacactaactaaggcactaattaaaggcacacttaagattgatttaagtgattcattcgttacaagtgtagagggctccccagaactacccaacgtaagtattaaagacttttactactcaccagaaaacaccatattgatatttgatgatcttgaacgctgcgaattagattggaattctatatttggttatataaataatttcgttgaagaaaaagaatgcaaggttttgattatcgccaatgagagagaaatattaaaccccgctagaaataaaaatcatgatggtatttatttagatgcaaaagaaaaagttataggtataactttcaaatatcaacctcaacattctcacgcctacgaatattttctaaaaaatataactagcgaactcaacaccattctgaacataaaaaatattgagagcttactcactctttcagagtgtaataacattagattaattgaaaggcaaatttctttttttgaaagaatattcaaaatattaccagcacagtttcagcaaaattcagatttgacactcagattatatcaattacattttatactctattttgaatctaataaaataaaacgaaccgtttctgacttgttaacatataaaatagatgatgataataaatacacatccaatttaattgaaaaatatggtacaacttatttgtcaaatttaatcttagacgaggatacctggatcgatataattgacaatcagaaaatcaatcaagaaaaaataatatctgaattaataacatttgtcagtgtttctaataaaacaattgagccatggacacaactttggaattatgatcgattaaaatacacagaatttgaggaaaattacaattcaacacttcatacgcttattaattttgaaatattgaacgagcatgttcttaagcatatttacggattattacttcatttatccagagaacatataaaacccatcaacgaacactatttaacaaacttagcccactctgctgttgatattttagcagaaaaaggaatgatacaaactagttatgaaatttttgatgaagacattaaggatgagcgatggggaggattaacttttcattgcaaagaaactagggaattcaaggagcttgttaattacatagaacaaaagaaaaatgtgttaattgcatatcaacttagccaagacgctcaaaagatattcaaattaatacagtccggaaatcatgaatattacgcacatctaaatttcaacaacaaagatatttattcatttcacgacaaaccagttctttattttggtgatgctgaacaactaacaaaaatactggtagactcaaccgagatgcatttctttggctatgctataaaaaaccgatacaacaactccccttatctaaaagagctttctgcagagcgttttttccaccgtgagctaattagaaagctaattgaaaagaaaactcaaataaactcaaatatattatcattacaaatcgatgagctcataaatgattgtttaactcccgcaatagataaattaaagcaaagcattgaaaattaa

SEQ ID NO: 27446 - DNA, 390 bp, Escherichia coli
atgaaactaagattacgggataatactgttactcgactgttgtttgtcgatgctgaagggcgcaaaatcgaatctggttttgcgcttcgatttaagcccatttttgatgaaaatccgcgcgaattttcagtattgtttgatttttattacattactgagaatgatcgggcattacgagtcgagtttcaaagtgtttttgaaacagataaagacattgacgattcttttaaagaatcgaagtttccagttgttaatgctcctgcgatatcgttcccgtttttacgttcgtttgttgccaattttttgatgacaagtgggtatacaccgatcctgcttcctagctttaactttacaacttttgaacaggatatcgggaagtttcctaactga

SEQ ID NO: 27447 - DNA, 234 bp, Escherichia coli
atgctttcctttgaacaaagaatggccttacttaacaaggcattacagcagtatactcctgagtcgctttatgaaaaattaagctcgtacccggcttatggaccaacaatcgtaagctacgagcttccaagctccgaagggttcattacattgagaccacgtctgatcaatcatgctgctgaacgttcagtggatttcttttcagatgatactgaattggatttagcggcctga

SEQ ID NO: 27448 - DNA, 573 bp, Escherichia coli
gtgcaggtagttcatatagggtttcataactgccttaatcgtggcagttatgagacgatacggcaaagcgtaccctttttaagccgttcaggccctaaacaatggttaactcaaggttactatttttggactgatgacccatactgggctcatcagtggaacgaaggtcatgatacggtcattagtgaattttctatcacctttgattcaaaggatgagttgcttgatttggttggaaatgctcgagatatcaggcaatttgaagctatgcgtcagaaagttgccagtactttgactcgaatgagcgccttgcatatcacagtcaatcaggtcattagcttttttagagagctcgagcaatctgatgattttaaaggcgtatttccatatgctgctgttaaggcacaagatagtacgaaagtgtctaatcttataagacttaactttgtagatgagcgcccagaacagatggtttcatttacccgtcagcaaatgtgtgtttatgaacatgctcgaggtaagatagagtttagaagatttatctttccagagcatttctgtgagaaggattaa

SEQ ID NO: 27449 - DNA, 807 bp, Escherichia coli
atgaagaaattaactggcgtaattgcttttgctctgctgcttactgcttgtgacaaaccgaagatcgatgcatcaagcgatcagtcgatgaaagagtccattcaaaaagtaagagagtccttacctgcagataaaaaagctcagtttgatgatgcagttaaagtcgttgcctttagccaaatcaacatgagagagctaatgcaggctggaacgtcttctggggacgtctacgaaacaaaaattaagtcagcgttggaaggtaaaactggtgatgaggttataaattacgcacaaactattcgccttgagcgtgagaagagagagaaagaacaggctctgcaagaaataaaagaactggaagccaaacaaacctctgcaacacaggctgcggaaaaaatgaaagccttcaaggtcgaacgttcccgtttttatttccagaaagaggattacggcaatgatcagccaattctggatattagcgttgaaaacggaacagacaaagcggttgccagagtattcttcaaaggagttattgccagcccaggaagaagcgtcccttggttctctgacgtcttcaactataaaatttctggaggtctggaaccaggtgagaaagccaactggaaattagcccctaatagatactctgattggggaaaacttaaagttccggctgatgctatatttaccgtcacagtcattggccttgaagacgcagatgggaaatcgatctatggtgacgccgagttttcagaacgcgatgctgacagactgaatcaacttagagataagtacctttctaaataa

SEQ ID NO: 27450 - DNA, 300 bp, Escherichia coli
atgaaacgtataactttctcctttacgttagtagcaatcatcatagccttagctggatgtgctttgccagataaagacggcgacttcggagcttatgttcatgcctgtcagcaatatgcatacggaaaatcctatgcctttgagaatagagacttcgcgtataaggtctgtaaggacgcggcgaaactgtggagtgaagaagttcctggctatatcatcaggcaaattcaactacatcctgaaatacccagcgaagaaattaaatatgcagccatggccggctctttgggtaacaactaa

SEQ ID NO: 27451 - DNA, 201 bp, Escherichia coli
atgagtgaaaaaagcattgttcaggaagcacgggatattcagctggcaatggaattgatcaccctgggcgctcgtttgcagatgctggaaagcgaaacacagttaagtcgcggacgcctgataaaactttataaagaactgcgcggaagcccaccgccgaaaggcatgctgccattctcaaccgactggtttatgacctag

SEQ ID NO: 27452 - DNA, 657 bp, Escherichia coli
atggctagtatttcaacgcttggggttgggtcggggctggacttaagcagcatccttgacagtctggaggcggcagaaaaatctaccctgacgccgatatcaaaacagcaaagctcttacaccgcgaaactgagcgcctacgggacgctgaaaagtgcactagagagtttccagacagccaacacagcactgaataaagccgatttatttaccgccacctcaaccaccagcagttcatcggctttcagcgccaccaccacgggcagcgcgattgctgggaaatacaccattagcgttagccaactggcgcaggcacagacgctgacaacaaaaaatagtcaaaaagacagtaaagccgccatcgccaccagcgatagcgtactgaccatccaacaaggcggcggtaaagatccggtcacgattgatatcagcgcgggtaactcgtcactttccggcattcgcgatgccattaacaacgccaaagctggtgtcagcgccagtatcatcaatgtgggaaacggcgaatatcgtctgtccatcaccgctaacgatacgggcagcaataacgctatgaaacttagcgtcagcggcgacagcgccctggaaagttttatgggttacaacggaacgccgggtgatagcgcagcaatggcatga

SEQ ID NO: 27453 - DNA, 336 bp, Escherichia coli; identical to SEQ ID NO: 11159

SEQ ID NO: 27454 - DNA, 1146 bp, Escherichia coli
atgaatagtttaacggcaaataaccgtttgtcgcaacagctggtggtcagcgtcgctgaacacctgttgttacggcatgaatgcagattaccaaatcacctggctgtaagtaaccacagagaactttacctgactgtggggggcgagttgtgcaggaacttaaccgctggtttcgtgacggaagagggctttatgtccatgttattcgttgggagccagaaacacagcgcgttatctatcttcgcaaagactacccgcatgagtgctttagtcctttgtggaaattcaggcgtgattttgttgagtgtgaaggaccaccagcatattgattctgcaattccgggacgttacactgttcaggcaccttataaagcgggtgccgggattggcgtcctgaaattcgcacatgcgcataaccgcgcttcagcggtttttttgcgcacgtttcctcacatccaaattatggtggggcgtgcaggggcatcgaaagatgcgccggggtcatgtgcgaccggttacgccaaccctgtacgtctcaccacctctgtgattggcgtcccatgtggtgagttttcaaaattcgcacatgaggatgtcactatggcaaccacccctacccaaactcaccctaaaattgatgttatccatgggaaggctgttacctcttctttggccgttgccgaatatttctgcaagcagcacaaaaacgttattcaaaaaatccagacgcttgagtgctctgttgaattcactgagctgaattttcagcccagtgattacaccgattgcacaggccgcaaactcccttgttaccaaatcacccgcgacggttttgcgtttcttgccatgggcttcacggggaaacgtgctgcccggttcaaagaggcatacatcaatgcctttaaccagatggagaaacagctttcaaatccctctgtactgagcgacgttgcacataacgccagcgttctctattcctacatttcatcaattcatcaggtctggctgcagcagctttatcctatgttggcaaaagccgaatctccgctggctgttagcttgtatgactatattaatgatgcttcggcgctggcctgcctcataaatttgtcgctgaatccttcagaggtaagggggcgtaaatga

SEQ ID NO: 27455 - DNA, 984 bp, Escherichia coli
atgaataacgaacccttacgtcccgaccccgatcgtctgctggaacaaactgccgcgccgcatcgggggaagctgaaagttttcttcggtgcctgtgcaggcgtcgggaagacctgggcgatgctggcagaagcccagcgactgcgggcgcaagggctggatattgtggttggcgtggtagaaacccacgggcgaaaagataccgccgccatgctggaagggctggctgttctgccgttaaaacgccaggcgtaccgtgggcggcatatcagcgagtttgatctcgatgccgccctcgcccgccgcccggcgctgatcttaatggacgaactggcgcacagtaatgcgccaggttcccgtcatcccaaacgctggcaggatatcgaagaactgctggaagctggcattgatgttttcactaccgtcaacgttcagcatctggaaagtctgaatgatgtggtcagcggcgtcaccggaattcaggtacgggaaaccgtgcccgatccttttttcgatgccgccgacgacgtggtgctggtggacttgcccccggacgatctgcgccagcggctgaaagaaggcaaagtctatattgccgggcaggcggagcgcgccattgaacattttttccgcaaaggtaatctgatcgccctgcgcgaactggcactgcgccgtactgccgatcgcgttgatgagcaaatgcgcgcctggcgggggcatcctggcgaagagaaagtgtggcacacgcgcgacgcgatccttttatgcatcggccataacaccggcagcgaaaaactggtccgcgcagcggcgcggctggcgtcacggctgggtagcgtctggcacgcggtgtatgttgaaacccctgccctgcaccgcttaccggaaaaaaacgtcgggcaattctcagcgccttacgtctggcgcaggaactgggcgcggagacggcaacactttctgatccagcggaagagaaagcggtag

SEQ ID NO: 27456 - DNA, 711 bp, Escherichia coli
gtgcgcccagttacggcctggccctacacccagagcgtcgccgaacggtgtatctggttccagttttgcctgttgtcctgcatgggcaaggtcaacgttaacgcaaactgcacctgcatccagcgcgccgagcagtgcatcgcgtttcggatcgaggatcttcgtcagatcccatacatctacaacgcgaccagatttatcgacttcgaggatatggtcacgaatggtggtgacgtgtacgccgtcatcgcgacgatagttactcttacctacgcgcaacagtaccgtgccatttggcgtctcaatggactcatgagtggcgtcagcaaatccgcgcggttcgagcacctgccccatcatgtcgaactcgtaccagtgctgaccttgtacagcggtaaaggtgccgcgtggcgtttcgcggatacccatcagataaccacgcttgttgatatcgcggtcacgaccatcgtagaaagtgtcttgatccagccaccagcggtattcaccttcggtatcgacgatgaaagtaaagggcgcgatatcaaaagggagtgcgccagttgccggacccgcatcaaggataccggcatttttatctttctcaccatgccagtggagatcggaaccttgggcggtaaaggtgtgggtattaaccagatagaggcgatcttcaaaacccggtgcgactttaacgactttggtttgctgtag

SEQ ID NO: 27457 - DNA, 546 bp, Escherichia coli; identical to SEQ ID NO: 11402

SEQ ID NO: 27458 - DNA, 894 bp, Escherichia coli
atgacgaatttaaaagcagttataccggtagcgggtcttgggatgcatatgttgcctgccactaaggcgattcctaaagagatgctaccgatcgtcgacaagccaatgattcagtacattgttgacgagattgtggctgcagggatcaaagaaatcctcctggtaactcatgcgtccaagaacgcggtcgaaaaccacttcgacacctcttatgaattagaatctctccttgaacagcgcgtgaagcgtcaactactggcggaagtacaatctatctgtccgccgggcgtgaccattatgaacgtgcgtcagggtgaacctttaggtttaggccactccattttgtgtgcgcgacctgccattggtgacaacccatttgtcgtggtactgccagacgtagtgatcgacgacgccagcgccgacccgctgcgctacaaccttgctgccatgattgcgcgcttcaatgaaacgggccgtagccaggtgctggcaaaacgtatgccgggtgacctctctgaatactccgttattcagaccaaagagccgctggatcgtgaaggtaaagtcagccgcattgttgaattcatcgaaaagccagatcagccgcagacgctggactcagacatcatggccgttggtcgctatgtgctttctgccgatatttggccggaacttgaacgtactcagcctggtgcatggggacgtattcagctgactgatgccattgccgagctggcgaaaaaacagtccgttgatgccatgctgatgaccggcgacagctacgactgcggtaaaaaaatgggttatatgcaggcgtttgtgaagtatggactacgcaacctgaaagaaggggcgaagttccgtaaaggtattgagaagctgttaagcgaataa

SEQ ID NO: 27459 - DNA, 996 bp, Escherichia coli
atgaacgataacgttttgctcataggggcttccggattcgtaggaacccgactacttgaaacggcaattgctgactttaatatcaagaacctggacaaacagcagagccacttttatccagaaatcacacagattggcgatgttcgtgatcaacaggcactcgaccaggcgttagccggttttgacactgttgtactactggcagcggaacaccgcgatgacgtcagccctacttctctctattatgatgtcaacgttcagggtacccgcaatgtgctggcggccatggaaagaaatggcgttaaaaatatcatctttaccagttccgttactgtttatggtttgaacaaacataaccctgacgaaaaccatccacacgaccctttcaaccactacggcaaaagtaagtggcaggcagaggaagtgctgcgtgaatggtataacaaagcaccaacagaacgttcattaaccatcatccgtcctaccgttatcttcggtgaacgcaaccgcggtaacgtctataacttgctgaaacagatcgctggcggcaagtttatgatggtgggcgcagggactaactataagtccatggcttatgttggaaacattgttgagtttatcaagtacaaactgaagaatgttgccgcaggttatgaggtttataattacgttgataagccagatctgaacatgaaccagttggttgctgaagttgaacaaagtctgaacaaaaagatcccttctatgcacttgccttacccactaggaatgttgggtggatattgctttgatatcctgagcaaaattacgggcaaaaaatacgctgtcagctctgtgcgcgtgaaaaaattctgcgcaacaacacagtttgacgcaacgaaagtgcattcttcaggttttgtggcaccgtatacgctgtcgcaaggtctggatcgaactctgcagtatgaattcgtccatgccaaaaaagacgacataacgtttgtttctgagtaa

SEQ ID NO: 27460 - DNA, 1479 bp, Escherichia coli
atgagcttacgtgaaaaaaccatcagcggcgcgaagtggtcggcgattgccacgatgatcatcatcggcctcggggtggtgcagatgaccgtgctggcgcggattatcgacaaccaccagttcggcctgctgactgtgtcgctggtgattatcgcgctggccgatacgctttctgacttcggtatcgctaactcgattattcagcgaaaagaaatcagccaccttgaactcaccacgctgtactggctgaacgtcgggctggggcttgtggtgtgcgtggcggtgtttttgttgagtgatgccattggtggcgtgctgaataacccggacctggcaccgttgattaaaacattgtcgctggcgtttgtggtaatcccccacgggcaacagttccgcgcgttgatgcagaaggagctggagttcaacaaaatcggcatgatcgaaaccagcgcggtactggcgggcttcacttttacggtggttagcgcccatttctggccgctggcgatgaccgcgatcctcggttatttggtcaatagtgcggtaagaacgctgctgtttggctactttggtcgcaaaatttatcgccacggtctgcatttctcgctggcgtcggtggcaccgaacttacgctttggtgcctggctgacggcggacagcatcatcaactatctcaataccaacctttcaacgctggtgctggcgcgtattctcggcgcgagcgtggcaggggggtacaacctggcgtacaacgtagccgttgtgccgccgatgaaactgaacccgatcatcacccgcgtgttgtttccggcgtttgccaaaattcaggacgacaccgaaaagctgcgcgtgaacttctacaagctgctgtcggtagtggggattatcaactttccggctctgctggggctgatggtggtgtcgaataactttgtaccgctggtctttggtgagaagtggaacagcattattccggtgctgcaattgctgtgtgtggtgggtctgctgcgttcggtgggtaacccgattggttcgctgctgatggcgaaagcgcgggtcgatatcagctttaaattcaacgtattcaaaacatttctgtttattccggcgattgttattggtgggcagatggcgggcgcaatcggcgtcacgcttggcttcctgctggtgcagattatcaacaccattctgagttacttcgtgatgattaaaccggttcttggttccagttatcgccagtacatcctgagtttgtggctgccgttttacctctcgctgccgacgctggtggtcagttatgcgctgggcattgtgctgaaagggcaactggcgctggggatgctgctggcggtgcaaatagccgcgggcgtgctggcgtttgtagtgatgattgtgctgtcgcgccatccgctggtggtggaagtgaagcgtcagttttgtcgcagcgaaaaaatgaaaatgcttttacgggcggggtga

SEQ ID NO: 27461 - DNA, 1395 bp, Escherichia coli
atgacaaatctaaaaaagcgcgagcgagcgaaaaccaatgcatcgttaatctctatggtgcaacgcttttcagatatcaccatcatgtttgccggactatggctggtttgcgaagtcagcggactgtcattcctctacatgcacctgttggtggcgctgattacgctggtggtgttccagatgctgggcggcatcaccgatttttatcgctcatggcgcggtgttcgggcagcgacagaatttgccctgttgctacaaaactggaccttaagcgtgattttcagcgccggactggtggcgttcaacaatgatttcgacacgcaactgaaaatctggctggcgtggtatgggctgaccagtatcggactggtggtttgccgttcatgtattcgtattggtgcgggctggctgcgtaatcatggctataacaagcgcatggtcgcggtggcgggggatttagccgccggacaaatgctgatggagagtttccgtaatcagccgtggttagggtttgaagtggtgggcgtttaccacgacccgaaaccgggcggcgtttctaacgactgggcgggtaacctgcaacagctggtcgaggatgcaaaagcgggcaagattcataacgtctatatcgcgatgcaaatgtgcgagggcgcgcgagtgaaaaaactggtccatcaactggcggataccacctgttcggtgctgctgatccctgatgtttttaccttcaacattctccattcacgcctagaagagatgaacggcgtaccggtagtgccgctgtacgatacgccgctttccggggttaaccgcctgctaaaacgtgcggaagacattgtgctggcgatgctgatcttgctgctgatctccccggtgctgtgctgtattgcgctggcggtaaaactcagttcacctgggccggttattttccgccagactcgctacggcatggatggcaagccgatcaaagtgtggaagttccgttccatgaaagtgatggagaacgacaaagtggtgactcaggcgacgcagaacgatccgcgcgtcaccaaagtggggaactttctgcgccgcacctcgctggatgaattgccgcagtttatcaatgtgctgaccggggggatgtcgattgtcggtccacgtccgcacgcggtagcgcataacgaacagtatcgccagctcattgaaggctacatgctgcgccacaaagtgaaaccgggcattaccggctgggcgcagattaacggctggcgtggcgaaaccgacacgctggagaaaatggaaaaacgcgtcgagttcgaccttgagtacatccgcgaatggagcgtctggttcgatatcaaaatcgttttcctgacggtattcaaaggcttcgttaacaaagcggcatattga

SEQ ID NO: 27462 - DNA, 1437 bp, Escherichia coli
atggcgcagtcgaaactctatccagttgtgatggcaggtggctccggtagccgcttatggccgctttcccgcgtactttaccccaagcagtttttatgcctgaaaggcgatctcaccatgctgcaaaccaccatctgccgcctgaacggcgtggagtgcgaaagcccggtggtgatttgcaatgagcagcaccgctttattgtcgcggaacagctgcgtcaactgaacaaactcaccgagaacattattctcgaacctgcagggcgtaacactgcaccggccattgcgctggcggcgctggcggcaaaacgtcatagcccggagaacgacccgttaatgctggtgctggcggcggatcatgtgattgccgatgaagacgcgttccgtgccgccgtgcgtaatgccatgccatatgccgaagcgggcaagctggtgaccttcggcattgtgccggatctaccagaaaccggttatggctatattcgtcgcggtgaagtatctgcgggcgagcaggatacggtggcctttgaagtggcgcagtttgtcgaaaaaccgaatctggaaaccgcccaggcctatgtggcaagcggcgaatattactggaacagcggcatgttcctgttccgcgccggacgctatctcgaagaactgaaaaaatatcgcccggatattctcgatgcctgtgaaaaagcgatgagctccgtcgatccggatcttgattttattcgtgtggatgaagaagcgtttctcgcctgcccggaagagtcggtggattacgcggtcatggaacgtacggcagatgctgttgtggtgccgatggatgcgggctggagcgatgttggttcctggtcttcattatgggagatcagcgcccacaccgccgagggcaacgtttgccacggcgatgtgattaatcacaaaactgaaaacagctatgtgtatgccgaatctggcctggtcaccaccgtcggggtgaaagatctggtagtggtgcagaccaaagatgcggtgttgattgccgaccgtaacgcggtacaggatgtgaaaaaagtggtcgagcagatcaaagccgatggtcgccatgagcatcgggtgcatcgcgaagtgtatcgtccgtggggcaaatatgactctatcgacgcgggcgaccgctaccaggtgaaacgcatcaccgtgaaaccgggcgagggtttgtcggtacagatgcaccatcaccgcgcggaacactgggtagtggtcgcgggaacggcaaaagtcaccattgatggtgatatcaaactgcttggtgaaaacgagtccatttatattccgctgggggcgacgcactgcctggaaaatccggggaaaattccgctcgatttaattgaagtgcgctccggctcttatctcgaagaggatgatgtggtgcgcttcgcggatcgctacggacgggtgtaa

SEQ ID NO: 27463 - DNA, 1224 bp, Escherichia coli
atgaaaatactggtctacggcattaactactcgccggagttaaccggcatcggcaaatacaccggagaaatggtggaatggctggcggcgcaaggtcatgaggtgcgggttattaccgcaccgccttactacccgcagtggcaggtgggcgagaactattccgcctggcgctacaaacgagaagaggggggcgccacggtgtggcgctgcccgctgtacgtgccaaaacagccgagcaccctgaaacgcctgttgcatctcggcagttttgccgtcagcagttttttcccgttgatggcgcaacgtcgctggaagccggatcgcattatcggcgtggtgccaacgctgttttgcacgccgggaatgcgcctgctggcgaaactctctggtgcgcgtaccgtgctgcatattcaggattacgaagtagacgccatgctggggctgggccttgccggaaaaggcaaaggcggcaaagtggcacagctggcaacggcgttcgaacgtagcggactgcataacgtcgataacgtctccacgatttcgcgttcgatgatgaataaagccatcgaaaaaggcgtggcggcggataacatcattttcttccccaactggtcggaaatcgcccgttttcagcatgttgcagacgccgatgttgatgcccttcgtaaccagcttggcctgccagataacaaaaaaatcattctttactccggcaatattggtgaaaagcagggactggaaaacgttattgaagctgccgatcgcctgcgcgatgaaccgctgatttttgccattgtcgggcagggcggcggcaaagcgcggctggaaaaaatggcgcagcagcgtggactgcgcaacatgcaatttttcccgctgcaatcgtatgacgctttacccgcactgctgaagatgggcgattgccatctggtggtgcaaaaacgcggcgcggcagatgccgtattgccgtcgaaactgaccaatattctggcggtaggcggtaacgcggtgattaccgcagaagcccacacagaactggggcagctttgcgaaacctttccgggcattgcggtttgcgtagagccggaatcggtcgaggcgctggtggcggggattcgtcaggcgctcctgctgcccaaacacaacacggtggcacgtgaatatgccgaacgcacgctcgataaagagaacgtgttacgtcaatttataaatgatattcggggataa

SEQ ID NO: 27464 - DNA, 483 bp, Escherichia coli
atgatgtttttacgtcaggaagactttgccacggtagtgcgctccaccccgcttgtctctctcgactttattgtcgagaacagtcgcggcgagtttctgcttggcaaaagaaccaaccgcccggcgcagggttactggtttgtgccgggagggcgcgtgcagaaagacgaaacgctggaagccgcatttgagcggctgacgatggcggaactggggctgcgtctgccgataacagcaggccagttttacggtgtctggcagcacttttatgacgataacttctccggcacggatttcaccactcactatgtggtgctcggttttcgcttcagagtagcggaagaagaactgttactgccggatgagcagcatgacgattaccgctggctgacgccggacgcactgctcgccagtgacaatgttcacgctaacagccgcgcctattttctcgctgagaagcgtgccggagtacccggattatga

SEQ ID NO: 27465 - DNA, 966 bp, Escherichia coli
atgagtaaacaacgcatttttattgctggccatcgcgggatggtcggttccgccatcaggcggcagctcgaacagcgcggtgatgtggagctggtattacgcacccgcgatgaactgaacctgctggacagccgcgcggtgcatgatttctttgccagcgaaagcattgaccaggtctatctggcggcggcgaaagtgggcggtattgttgccaacaacacgtatccggcagatttcatctaccagaacatgatgattgagagcaacatcattcacgccgcgcatcagaacgacgtgaacaaactgctgtttctcggatcgtcctgcatctacccgaaactggcaaaacagccgatggcagaaagcgagttgttgcagggcacgctggagccgaccaacgagccttatgccattgccaaaatcgccgggatcaaactgtgtgaatcttacaatcgccagtacggacgggattaccgctcagtcatgccaaccaacctgtacgggccacacgacaacttccacccgagtaattcgcatgtgatcccagcattgctgcgtcgcttccatgaggcgacggcacagaatgcgccggacgtggtggtgtggggcagcggtacgccgatgcgcgaatttctgcacgttgatgatatggcagcggcgagcattcatgtcatggagctggcacacgaagtctggcaggagaacacccagccgatgctgtcgcacattaacgtcggcacgggcgttgactgcactatccgtgagctggcgcaaaccatcgccaaagtggtgggttacaaaggtcgggtggtttttgatgccagcaaaccggatggtacgccgcgcaaactgctggatgtgacgcgcctgcatcagcttggctggtatcacgaaatctcactggaagcggggcttgccagcacttaccagtggttccttgagaatcaagaccgctttcgggggtaa

SEQ ID NO: 27466 - DNA, 1122 bp, Escherichia coli
atgtcaaaagtcgctctcatcaccggtgtaaccggacaagacggttcttacctggcagagtttctgctggaaaaaggttacgaggtgcatggtattaagcgtcgtgcatcgtcattcaacaccgagcgcgtggatcacatttatcaggatccgcacacctgcaacccgaaattccatctgcattatggcgacctgagtgatacctccaacctgacgcgcattttgcgtgaagtgcagccggatgaagtgtacaacctgggcgcaatgagccacgttgcggtctcttttgagtcaccggaatataccgctgacgtcgacgcgatgggtacgctgcgcctgctcgaggcgatccgcttcctcggtctggaaaagaaaacccgtttttatcaggcttccacctctgaactgtatggtctggtgcaggaaattccgcagaaagaaaccacgccgttctacccgcgatctccgtatgcggtcgccaaactgtacgcctactggatcaccgttaactaccgcgaatcctacggcatgtacgcctgtaacggtattctcttcaaccatgaatccccgcgccgtggcgagactttcgttacccgcaaaatcacccgcgcaatcgccaacatcgcccaggggctggagtcgtgcctgtatctcggcaatatggattccctgcgtgactggggccacgccaaagactacgtaaaaatgcagtggatgatgctgcaacaggaacagccggaagatttcgttattgccaccggcgttcagtactccgtgcgtcagttcgtggaaatggcggcggcacaactgggcatcaaactgcgctttgaaggcacgggtgttgaagagaagggcattgtggtttccgtcaccgggcatgacgcgccgggcgttaaaccgggtgatgtgattatcgccgttgacccgcgttacttccgtccggcagaagttgaaacgctgctcggtgacccgaccaaagcgcacgaaaaactgggctggaaaccggaaatcaccctcagagagatggtgtctgaaatggtggctaatgaccttgaagcggcgaaaaaacactctctgctgaaatctcacggctacgacgtggcgatcgcgctggagtcataa

SEQ ID NO: 27467 - DNA, 549 bp, Escherichia coli
atgcaggatttaagtggattctcggtgccgaaagggttccggggtggcaacgctattaaagtgcaattgtggtgggcagtacaggcaacattatttgcctggtcgccacaagtattgcatcgctggcgggcatttttattacgtttattcggcgcaaaaataggaaaaaacgtagttattcggccgtcagtaaaaattacctatccgtggaaattaaccttaggtgattacgcgtgggtcggcgatgacgtcaatttatataccctcggtgaaataaccattggcgcacattcggtgatatcgcaaaaaagttatttatgcaccggtagccacgaccatgcaagtcaacatttcaccattaacgccacgcctattgtgattggcgagaaatgctggctggcaaccgatgtctttgttgccccaggcgtcacaatcggcgacggcaccgtcgtgggggcgcgaagcagtgtttttaaatcgcttccggcaaatgtggtttgccgggggaatcccgcagtggtgatacgcgaacgcgttgaaactgaataa

SEQ ID NO: 27468 - DNA, 747 bp, Escherichia coli
atgttgcttagcataatcactgtcgcgtttcgtaacctcgaagggatagtcaaaacacatgcctcgctggcgcatctggcgcaggcggacgatatcagcttcgaatggattgttgtcgatggcggttccaatgacggcacccgtgagtatctggaaaatctcaatggtatctataacctacgctttgtcagcgagccagataacggtatctacgacgccatgaacaaaggcattacgatggcacaaggcaagttcgcgttgtttctcaattcgggcgatatttttcatcaggatgccgcaaattttgtccgtaagttaaaaatgcaaaaagataacgtgatgatcaccggcgatgcgctgctggattttggcgacgggcataaaattaaacgtagcgccaaaccgggttggtatatttatcacagcctgcccgccagtcatcaggcgatatttttcccggtatccggtttgaaaaaatggcgttatgacctggaatataaagtttcttctgattacgcgctggcagccaaaatgtataaagcaggttatgcatttaaaaaactcaatggcctggtgtctgaattttctatgggtggggtatctaccaccaataatatggaattatgtgctgacgcgaaaaaagtccaacggcaaatattacatgtgcctggcttctgggcagaattatcctggcatttacgccagcgtactacctcaaagacgaaagccttatataacaaaagctga

SEQ ID NO: 27469 - DNA, 1218 bp, Escherichia coli
atgtcaacttctatcagaatctgtagctacctgctgctgccgctgatctacctgctggttaacgtcaaaatcgcccagcttggcgaaagtttccccatcaccatcgtcacttttttacctgtcttgttactgctgtttttagaacgcatcagcgttaaaaaattgattattgccttagggattggtgcgggactcacggcgtttaactacctgtttggtcagtcgttggatgccagtaaatacgtcacttcaaccatgctgtttgtctatattgtgatcattattggcatggtgtggagtattcgctttaaaacgatttcgccacacaaccatcgcaagatattacgtttcttttatctggtggtcgggctggtggtggcgctggcggcggtggagatggcgcaaattatcctcaccggtggcagcagtattatggagtcgatttcgaaatatctgatttacagcaacagctatgtgctgaatttcattaaattcggcggcaagcgcacgacagcactttatttcgaaccggcatttttcgctctggcattaatctcaatttggctcagcatcaaacagtttggtatcaaaacgcctaaaacagatgctatgattctcgcagggataatattatccggatcgttttcaggggttatgacctttatcctgttttatttgctggagtgggcatttcaatatctgaataaagaggcgattaagaaaaagttaccgttggcattgatttctctggctgtattcctggttggtgtggtaatcgcgtttccttatatttccacccgtctgggcgatttaggtacggaaggatcgtcatcgtattatcgtattgtcggtccgctggtgatggtcggttattctttgacccatattgacggtgtagtcagatttggctcactttatgaatatgtcgcatcattcggaatatttaacggtgcggatgtcggaaaaaccatagacaatggtttgtatctgctgattatttatttttcctggttcgcggtgtttttatcgctgtggtacatggggaaagtgataaaaatgatgatcaacgcttttggtgataaccgcaattttcgcgtgcaattatatctttttactccggtatcgctgttttttaccggttcgatatttagcccggaatatgcatttttaatcgtctgtccgtttattttgcgaaaagcgttaaatattacgaggtaa

SEQ ID NO: 27470 - DNA, 1218 bp, Escherichia coli
atgaatattttgcaatttaatgtgcgactggcggaaggcggggcagcaggtgtggcgttagatctccaccagcgtgcgctgcaacaggggctggcgtcacattttgtgtacggttacggcaaaggcggcaaagagagtgtcagccatcaaaactatccgcaggtcatcaaacatacgccgcggatgaccgcgatggcgaacattgccctgtttcgtctgtttaatcgcgatctgtttggcaatttcaatgagttatatcgcaccattactcgtacaccgggtccggtggtcctgcattttcatgtgctgcacagctactggctaaatcttaagagcgtggtgcgcttttgcgaaaaggtgaaaaaccacaaaccggatgtcactctggtctggacgctgcacgaccactggagcgttaccgggcgctgcgcctttaccgacggttgtgaaggctggaaaacgggctgccagaaatgcccgaccttaattaattatccgccggtgaagattgatcgcgcacaccagctggtggcgggcaaacgccagttattccgtgagatgctggcgctgggctgtcagtttatttcccccagccagcatgtggctgacgctttcaatagcctgtacggtccagggcgttgccggattatcaataatggcattgatatggcaacagaagcgattctggcggacttgcctccggtacgcgaaacccagggcaagccgaaaatcgcggtggtggcgcatgacctgcgttacgacggcaagactaaccagcaactggtgcgtgagatgatggcgctgggcgataaaatcgaactgcatacctttggtaagttctcgccgttcaccgctggcaacgtggttaatcacggctttgaaactgacaagcgcaagttgatgagcgcgctcaatcagatggatgcgctggtgttcagttctcgcgtcgataactacccgctgattttgtgtgaggcgctatcgattggcgtgccggtgattgccacccatagcgacgcggcgcgggaagtgctgcaaaaatccggcggtaaaaccgtcagcgaagaagacgtgctgcaactggtgcagttaagcaaaccggaaatcgcgcaggcgatatttggtaccacgctggctgagttcagccaacgcagccgcgccgcctacagtggacaacagatgctggaggagtatgtcaacttctatcagaatctgtag

SEQ ID NO: 27471 - DNA, 489 bp, Escherichia coli
atgctggaagatctgcgtgccaacagctggagtttacgcccgtgctgcatggtacttgcctatcgtgttgctcatttttgttcggtgtggcgcaaaaagaacgtcctcaacaatctgtgggcggccccgctgctggtgctgtatcgcattatcaccgaatgctttttcggttatgaaatccaggcagccgcaaccattggccgccgctttactatccatcacggttacgccgtagtgatcaataaaaacgtggtggcgggggatgatttcaccattcgccacggcgtcactatcggcaatcgtggtgccgataacatggcatgtccacatattggcaacggcgtcgaactcggtgccaacgtcattattcttggtgatatcacgcttggtaacaacgtcaccgtgggtgcgggcagcgtggtgctcgactctgtcccggacaacgcgctggtggtgggagaaaaagcgcgagtgaaggtaattaaatga

SEQ ID NO: 27472 - DNA, 840 bp, Escherichia coli
atgaaagacaatccgctgatctcaatctatatgccgacctggaaccgccaacaactggcgattcgggcgataaaatcggtcttgcgccaggactacagcaactgggagatgatcatcgtggatgattgctccaactcctgggaacaactgcaacagtacgtcaccgccctcaacgatccgcgtattacctacattcacaacgacattaacagcggggcgtgcgcggtacgtaaccaggcgattatgctggcgcaaggggaatatatcaccgggatcgatgatgatgatgaatggacacccaaccgtctgagcgtcttcctcgcccataaacagcaactggtcacacacgcctttttgtacgctaacgactacgtttgccagggcgaagtctattcccaaccagcaagtttgccactgtatcccaaatcgccgtactcacgccgcctgttctataaacgcaatatcattggcaatcaggtttttacctgggcgtggcgtttcaaagagtgcttgttcgataccgaactgaaagcagcacaggattacgacatcttcctgcggatggtggtggagtatggcgaaccgtggaaagtggaagaggcgacgcagatcctgcatatcaatcacggtgaaatgcagatcacctcgtcaccgaaaaaattctccgggtacttccacttttaccgcaagcacaaagacaaattcgaccgtgccagtaaaaaatatcagctgtttaccctctaccagatccgcaataaacgtatgacctggcgcaccttgttgacgctgctgtcggtgcgtaacggcaaacgtctggctgatggtattcgggggcgctaa

SEQ ID NO: 27473 - DNA, 2163 bp, Escherichia coli
atgacagaaaaagtaaaacaacatgccgctccggtaacgggcagtgatgaaatcgatattggtcgcctggtcggcaccgtcattgaagcgcgctggtgggtgattggcatcaccgctgtatttgccctctgtgccgtggtttacaccttcttcgccacgccgatttatagtgccgacgcactggtacaaatcgagcaaaacagcggcaattcgttagtgcaggacattggttcggcattagccaacaaaccgcctgcatcggacgccgagatccagttgattcgttcgcgtctggtgcttggtaaaacggtggacgatctcgacctcgatattgcagtgagcaaaaacacgttcccgattttcggggcgggctgggatcgactgatgggacgccagaacgagacggtgaaagtgactacctttaaccgcccgaaagagatggcggaccaggtgtttacgcttaatgtgctggacaataaaaactacaccctgagcagtgatggcggctttagcgcccgtgggcaagcgggccagatgctgaaaaaagaaggcgtcacgctgatggttgaagccattcacgcccgcccgggcagtgagtttaccgtcaccaaatactccacgttggggatgatcaaccaactgcaaaacagcctgacggtaacggagaacggcaaagacgcaggcgtactgagcctgacttataccggtgaagatcgcgaacagatccgcgacattcttaacagcatcgcccgtaactatcaggaacaaaatattgagcgcaaatcggcggaagcgtcgaaaagcctcgctttcctcgcgcaacagttaccggaagtacgtagccgcctcgatgttgccgaaaacaaactgaatgccttccgtcaggataaagattctgttgatcttccgctggaagcgaaagcggtgctcgattcgatggtgaacatcgacgcccagttgaacgaactgacctttaaagaggcggaaatctccaagctgtacaccaaagttcacccggcgtaccgcacgctgctggagaaacgtcaggcgctggaagacgaaaaagccaaacttaacggtcgcgtaacggcgatgccgaaaacccagcaggagattgtccgtctgacccgcgatgtcgagtctggtcagcaggtctatatgcaactgctgaataaagagcaggagctgaaaatcaccgaagccagcaccgtcggcgatgtgcgcattgttgacccggcaatcactcagcctggtgtgctaaaaccgaagaaagggctgattatccttggggcgattattcttggcctgatgctctctatcgtgggtgtgctgctgcgctcgttgtttaatcgcggcatcgaaagcccgcaggtgctggaagaacacggtatcagcgtctatgccagcatcccgttgtcggaatggcagaaagcgcgcgatagcgtcaaaaccatcaaagggattaaacgctataaacagagccagctactggcggtggggaatccaaccgatctggcgattgaagccatccgcagtctgcgtaccagcctgcacttcgcgatgatgcaggcgcagaacaatgtgttgatgatgaccggggttagcccgtcaatcggtaaaacctttgtctgcgccaacctggcggcggtgatcagccagaccaataaacgcgtgttgttgatcgactgcgatatgcgcaaaggctacacccacgagctgttgggcaccaataacgtcaatggcctgtcggaaattctgattggtcagggcgatattactaccgcagctaaatcgacctctattgccaaatttgacctgatcccgcgcggtcaggtgccgccaaatccttctgaactgttgatgagcgaacgctttgccgaactggtgaactgggcgagtaaaaactatgacctggtgttgattgatacgccgccgattctggcagtgaccgatgcggcaattgttggtcgtcatgtcggaaccacgttaatggtggcgcgttatgcggtcaacacattgaaagaagtggaaaccagtctgagccgctttgagcaaaacggtattccggtgaaaggggtgattctgaactccatcttccgccgcgccagcgcgtatcaggattatggctattacgaatacgaatataagtcggatgcgaaataa

SEQ ID NO: 27474 - DNA, 444 bp, Escherichia coli
atgtttaacaacatattagttgtctgtgtcggcaatatttgccgttccccgacggcggaacgcttactgcaacgttatcacccggaactgaaagtggagtccgctggactcggcgcgctggtcggtaagggcgctgatcctaccgctatcagcgtcgccgcagaacatcaactgtctctggaaggccactgtgcacgacaaatcagccgccgcctgtgtcgcaactatgacctgattttgaccatggaaaagcgccatatcgaacgcttatgcgagatggcacctgagatgcgcggcaaagtgatgctgtttggtcactgggataacgaatgtgaaatccccgatccgtatcgcaaaagccgggaaacgtttgcagcggtgtacacattacttgaacggtctgcccgccagtgggcgcaggcattgaacgcagagcaggtataa

SEQ ID NO: 27475 - DNA, 1140 bp, Escherichia coli
atgatgaaatccaaaatgaaattgatgccattattggtgtcagtaaccttgataagcggttgcacagtacttccgggcagcaatatgtcgacgatgggcaaagacgtcatcaaacagcaggacgctgatttcgatctcgacaaaatggtgaatgtttatccgctgaccccgcgcctgattgaccaattacgcccacgcccgaatgtagcgcgccccaatatgacgctggaaagtgagatcgcgaattaccagtatcgcgtcgggccgggggacgttcttaatgtcaccgtctgggatcacccggaactcaccacgccagccggtcagtaccgcagctccagcgacaccggcaactgggtacagcctgacggcactatgttttacccgtatatcggcaaggttcacgtagtcgggaaaacgctcgctgaaatccgcagtgatattaccgggcgcttagcgacgtacatcgctgatccgcaggtggacgttaatatcgccgccttccgctcacaaaaggcctatatctcaggtcaggtgaataaatccggtcaacaggcgatcaccaacgtgccactgactattctcgacgccatcaacgccgcaggtggcctgaccgacaccgctgactggcgcaacgtagtgctaacacacaatggtcgtgaagaacgcatttctttgcaggcgctgatgcaaaacggcgacctcaatcagaaccgactgctttatcccggcgatattctctacgtgccccgtaatgatgatctgaaagtatttgtgatgggtgaagtgaagaaacagagcaccctgaaaatggactttagcggcatgaccctgactgaagccctgggtaatgctgaaggtatcgacatgaccacctccaacgccagcggcatctttgtcattcgtccgctgaaaggcgagggcgggcgtaacggcaagattgccaatatctaccagctggatatgtccgatgccacgtcgctggtgatggcgacagaattccgcctgcaaccttatgacgtggtgtatgtcaccaccgccccggtttcccgctggaaccgtctgatcaatcagttgctgccaactattagcggtgtccgttacatgacggatacagccagcgacattcataactggtaa

SEQ ID NO: 27476 - DNA, 1584 bp, Escherichia coli
atggaatggattgccgatccgtctatctgggccgggttaatcacgctgattgtgatcgaactggtcctcggcattgataacctggtctttattgccatcctcgccgaaaaactaccgccgaagcagcgcgaccgcgcacgggttaccgggctgctgctggcgatgttaatgcgcctgttactgctggcgtcaatctcctggctggtcaccctgactcaaccgctgttcagcttccgctcgtttacctttagcgcccgcgacttaatcatgctgtttggtggtttcttcctgttgttcaaagccacgatggagctgaacgaacggctggaagggaaagacagcaataatcccacacaacgcaaaggtgcgaagttctggggcgtggtgacgcaaattgtggtactggacgccattttctcactcgactcagtgattaccgccgtcgggatggtcgaccatttactggtcatgatggccgccgtggttatcgctatcagcctgatgttgatggccagcaagccgttaacgcaatttgttaacagtcacccgacgatcgttattctctgcttaagcttcctgttgatgattggctttagcctggtggcagaaggtttcggcttcgtcattccgaaaggctacctgtacgctgccattggtttctcggtgatgatcgaggcgctcaatcagttggctatctttaaccggcgacgttttctttccgctaaccagacgctgcgccagcggactaccgaagcggtaatgcgcctgcttagcgggcaaaaagaagatgcggaactggacgccgaaaccgcgtccatgctggtggatcatggtaaccagcagatctttaatccgcaggaacggcggatgattgagcgggtacttaatcttaaccagcgtaccgtcagcagcattatgacgtcgcgccacgatattgagcatatcgatctcaacgcgccggaagacgagatccgccagttactggagcgaaatcagcatacgcggctggtggttaccgacggtgatgatgcagaagatttgctcggtgttgttcacgttatcgacctgctacaacagtcactgcgcggcgaaccgctcaacctgcgggtgttgattcgccagccgctggtgttcccggaaaccttgccgttgttacctgccctggagcagttccgtaatgcccgcacgcactttgcttttgtggtggatgagtttggttcagtggaagggattgtgacattaagtgacgtcactgaaaccattgccggtaacttaccgaacgaagtggaagagatcgacgcccgccatgatattcagaagaatgcggacggttcctggacggcgaatggtcatatgccgctggaggatctggtgcaatatgtgccgctgccgctggatgaaaaacgtgaatatcacaccattgccgggctgttgatggaatatttacagcgtattccaaaacctggcgaagaagttcaggtgggggattatttgcttaaaacgttgcaggtggaaagccatcgcgtgcagaaggtgcagattattccgctgcataaggatggcgagttggagtacgaggtgtga

SEQ ID NO: 27477 - DNA, 1854 bp, Escherichia coli
atgagacgatttctgacgacgctgatgatactcctggtcgtgctggtggccgggttatctgcgttagtgttgctggtgaatccgaatgatttccgcgactatatggtcaagcaagttgctgcacgtagcggttatcaattgcagctcgacgggccactgcgttggcacgtctggccgcagcttagtatcctctccgggcgaatgtctctcaccgcccagggcgcaagccagccactggttcgcgccgacaacatgcgtctggacgtggcgcttttaccactactgagtcatcaactgagcgttaagcaggtgatgctaaaaggggcagtgatccaactgacgccgcagacggaagcggtgcgcagtgaagacgctccggttgcaccgcgcgacaataccttgccggatctgtcagacgatcgcggatggtcgtttgatatatccagtcttaaggtggcggacagcgttctggtgttccagcatgaagatgacgagcaggtgacaatccgcaatatccgcctgcaaatggaacaagatccccaacatcgtggctcatttgagttctccgggcgggttaatcgcgatcagcgcgatctcacgatatcccttaacggtacggtagatgcttctgattatccgcatgatttaacggcggctattgaacaaattaactggcagttgcagggtgccgatttaccaaaacaaggtattcaggggcaggggagtttccaggcccagtggcaggagtcacataaacgcctttcatttaaccaaatcagcttgaccgccaatgatagtacgctgagcgggcaagcacaggtcacgctgacagagaaaccggaatggcagctgagactgcaattcccgcaactgaatcttgacaacctcatcccgcttaatgaaaccgcgaatggtgaaaacggtgccgcgcagcaggggcagagccaatcaacgttgccgcgcccggtcatttcttcgcgtattgatgaaccggcctatcaaggactgcaaggctttacggctgatattttgttgcaagccagtaacgtgcgctggcgcggaatgaattttacagatgttgccacgcaaatgaccaacaagtcgggtttgctggaaattactcaactgcagggcaagcttaacggtggaaaggtttcactgccgggcacgctggacgcgacatcaataaatccgcggataaacttccagccacggctggaaaacgttgagattggtaccattctgaaggcgtttaactatccgatttcgttgaccggaaagatgtcactggctggtgatttctccggtgctgacatagatgccgacgcattccgccataactggcaaggacaggcacatgtcgaaatgaccgacacgcgcatggaagggatgaacttccagcagatgattcagcaagcggtagaacgtaatggtggtgatgtgaaggccgctgaaaacttcgataacgtaacgcgtcttgaccgctttaccaccgatttgacgttgaaggatggcgtcgtgatgttaaacgacatgcaaggtcaatcgcccatgctggcgctttccggggctggtacgttgaatctggcggagcaaacctgcgacacccagtttgatattcgggtcgtgggtggctggaacggggaaagcaaactgattgatttccttaaagaaacgccagtaccgctgcgggtttatggcaactggcagcaactcaattacagtctgcaagtggatcagttactgcgcaaacatctacaggacgaagcgaaacgtcgcctgaatgactgggccgagcggaataaagattcccgcaatggcaaagatgtgaagaagttgctggagaagatgtag

SEQ ID NO: 27478 - DNA, 582 bp, Escherichia coli
atgcgtctgtgtgaccgagatattgaagcctggcttgatgaaggccgtttgtcgatcaacccacgtccgccagtggagcgtattaacggcgcgacggtggatgtgcgcctgggcaataaatttcgtaccttccgtggtcacacggcagcgtttatcgatctgagcggtcccaaagatgaagtgagcgccgcgcttgaccgcgtgatgagcgatgagatcgttctcgatgaaagcgaggcgttctatcttcacccaggagagctggcgctggcggtgacgctggagtcggtgacgctgccagccgatctggtgggctggctggacgggcgttcctctttggcgcgtctggggctgatggtgcacgtcaccgcgcaccgtatcgatccgggctggtctggttgcattgtgctggagttctacaactccggtaagctgccgctggcgctgcgtccgggcatgttaattggtgcgctgagctttgagccgctttccggcccggcggcgcgaccttacaaccgccgtgaagatgcgaaatatcgcaaccagcagggcgcggtagccagccgaatcgataaagactaa

SEQ ID NO: 27479 - DNA, 642 bp, Escherichia coli
atgactgatcagtctcatcagtgcgtcattatcggtatcgctggcgcatcggcttccggcaagagtcttattgccagtaccctttatcgtgaattacgtgagcaagtcggtgatgaacacatcggcgtaattcccgaagactgctattacaaagatcaaagccatctgtcgatggaagaacgcgttaagaccaactacgaccatcccagcgcgatggatcacagcctgctgcttgagcatttacaagcgttgaaacgcggctcggcaattgacctgccggtttacagctatgttgaacatacgcgtatgaaagaaacggtgacggttgagccgaagaaggtcatcattctcgaaggcattttgttgctgacggatgcgcgtttgcgtgacgaacttaacttctccattttcgttgataccccgctggatatctgcctgatgcgccgcatcaagcgtgacgttaacgagcgtggacgttcaatggattcagtgatggcgcaatatcaaaaaaccgtgcgcccgatgttcctgcaattcattgagccttctaaacaatatgcggacattatcgtgccgcgcggcgggaaaaaccgcatcgcgatcgatatattgaaagcgaaaataagtcagttctttgaataa

SEQ ID NO: 27480 - DNA, 807 bp, Escherichia coli
atgttgggatttctcgccgcccgtgcggtgagcggtgtggaaacggtcgcggacagttattatgcccgtagtctggcggtgggcgaatatcgcggcgtggtgactgctgttccggatatagcccgccatactctgcacataaatttaagtgtaggtttagaacccgttgccgctgagtgtctggcgaaaatgagccgcctgcttgatctgcaatgtaacccgcagattgttaacggtgcgttgggcaagttaggcgcggcgcggcccggattgcgtttacccggcagtgttgatgcttttgagcagggcgtgcgggcgattttaggccaactggtgagcgtggcgatggcggcaaaattgaccgccagagtggcacagctttatggcgaacggctggatgattttccggagtatatctgcttccccacgcctcagcggctggcagcagcagacccgcaggcattaaaagcgttaggtatgccgttgaaacgggcagaggcgctgattcatctggcaaatgcggcgctggagggcaccttaccaatgacaataccgggcgatgtggagcaggcgatgaaaacgctgcaaacttttccgggtatcgggagctggacggcgaattattttgctttgcgtggctggcaggcgaaagatgttttcctgccggatgattatctgattaaacagcgatttccgggaatgacaccggcgcaaatccgccgttatgccgagcgctggaagccctggcgttcttatgcgctgttgcatatctggtatacggaaggctggcagccagacgaagcatga

SEQ ID NO: 27481 - DNA, 1353 bp, Escherichia coli
gtgtttattggttttgattacggtacagcaaactgttcagtggcggtcatgcgtgacggtaaaccgcaattactgaaaatggaaaacgacagcacgctgctgccttcaatgctttgtgcgccaacgcgtgaagcggtaagcgaatggttgtaccgccatcatgatgttccggcagacgacgatgaaacgcaggcgctgttgcgtcgggcgattcgttataaccgcgaagaagatatcgatgttacggcgaaaagcgtgcagttcggactttcctcactggcacagtacattgatgatccggaagaagtgtggtttgtgaaatcaccaaaatcgttcctcggtgccagcggcttaaaaccgcagcaggtagcgctgtttgaggatctggtctgcgcaatgatgttgcacattcgccagcaggcgcaggcacagctgccagaaacgattactcaggcggtgatcggtcgccctatcaacttccaggagcttggcggcgatgaagcaaacacccaggcgcaggggattctggaacgcgcggcgaagcgtgccgggtttaaggatgtggtattccagtacgagccggtagcggcagggctggattacgaagcgactttgcaggaagaaaaacgggtgctggtggtggatatcggcggtggtacgactgactgttcattgctgctgatggggccgcagtggcgttcgcgtctcgatcgtgaagccagcctgctgggtcacagtggttgtcgtattggcggtaacgatctggatatcgccctggcgtttaaaaacctgatgccactgctgggtatgggtggcgaaaccgaaaaaggcatcgccctgccgatcctgccgtggtggaatgcggttgccatcaacgacgtacctgcgcagagtgatttctacagtagtgccaacggtcgtctgcttaacgatctggtacgcgatgcccgcgaaccggaaaaagtggccctgctacagaaagtctggcgtcagcgtttaagttatcgcctggtgcgtagcgcagaagagagcaaaattgcgctttcaagcgtagcggaaacccgcgcctcactgccgtttatcagcgatgaactggctacgctgattagccagcaagggctggaaagcgccctcagccagccactgacgcggattctggaacaggtgcaactggccctggataacgcccaggaaaaaccggacgttatctacctgaccggcggaagcgcccgttctccgctgattaaaaaagcgctggcagaacagttgccgggcattccgattgcaggcggcgatgactttggctccgtcaccgccgggctggcacgctgggcggaagtggtgtttcgttaa

SEQ ID NO: 27482 - DNA, 1941 bp, Escherichia coli
atgaaacccactttatatactgctactggtgagtgcgttacgccaggccgtgaactgggcaaaggcggtgaaggtgcggtttatgatatcgaggagtttgccgatagcgtcgccaagatttatcacacgccgccacccgccttaaaacaggacaaacttgcctttatggctgcgacagctgacgcgcagttgttgaattatgtcgcctggccgcaggcaacgcttcacggtgggcgaggcggaaaagttatcggttttatgatgccaaaagtttctggtaaagaaccgattcatatgatctatagcccggcacatcgtcgccagagttaccctcattgtgcgtgggattttctactctatgttgcgcgcaatattgcttcatcttttgctacggttcacgagcacgggcacgtcgtgggggacgtaaaccagaacagctttatggtaggtcgcgacagcaaagtggtgttgatcgatagtgactcctttcagattaacgccaatggcacactgcatttatgcgaagtcggcgtgtcgcattttacgccgccagagctacaaaccttgccatcatttgtcggttttgaacgtaccgcgaatcacgataattttggccttgcgttgctgatttttcacgtcttgtttggtgggcggcatccttattctggtgtgccgcttatctctgatgcgggtaatgcgctggagacggatattgcccatttccgttatgcctacgcgtcagataatcagcgacgtggtttaaaaccgccgccacgatcgattccgctgtcgatgttaccgggcgatgttgaagccatgtttcagcaggcgtttacggaaagtggtgtagcaaccgggcgtccgacggctaaagcgtgggtagcagcactggattctctacgccaacagttaaagaaatgtaccgtttcggcaatgcatgtttatcccgctcatttgaccgactgcccgtggtgtacgctggataatcaaggcgttatctattttattgatctcggcgaagaggtcattaccaccggcggtgattttgtgctggcgaaagtctgggcgatggtgatggcgtcagtagcaccgccagcagtgcaattgccattacccgatcatttccaaccgactggcaggccgcttcctttaggcctgttacggcgcgaatacatcattctgcttgagatcgcactgtcagcgttatcgctgttgctttgcggccttcaggcagaaccgcgttatattattttggttcctgtgctggcggctatctggattattggcagtctgacaagcaaagcttataaagcagaaatccagcaacgccgtgaggcatttaatcgcgcgaaaatggactatgaccatttagtcagccagatccaacagttgggcgggctggaaggttttatcgccaaacggacgatgctcgaaaaaatgaaggacgaaatgctcgggttaccggaggaagaaaaacgtgctctggcagcacttcacgacaccgcaagggaacggcagaagcagaagtttctggagggattttttattgatgttgcctctattcccggtgttggccctgcgcgtaaagcggcgttacggtcctttggtattgaaacagcagcggatgttacccgtcgtggggttaagcaagttaaagggtttggtgatcatctgacccaggcggtcatcgactggaaagcgagctgtgaacgccgttttgtgttcaggccgaacgaagcggtaacgcctgcagacagacaagcggtaatggcgaaagtggccgccaaacgacatcggctggaatcggcgttgactgtcggcgcgacagagttgcagcgattccgccttcatgctccagcacggaccatgccgttgatggaaccgttacgtcaggcggcagaaaaactggctcaggcgcaggcagatttaagccgctgctga

SEQ ID NO: 27483 - DNA, 681 bp, Escherichia coli
atgcaggttgcctggctaaatgaccagcagccattactggtgatgttccttgctgatggcgcaggtagcgtttcgcagggaggagaaggcgcgaagctcgccgtcaatgaagcgatggcgtttatggtgcaaaaagtacaggacggtgaattggggcttaatgatgtcctcgccacaaatatggtactgaccattcgtcaacgactttttgccgaggcagaagccaaagcattagcagttcgcgattttgcctgcacgtttctgggattgatttcatcggctaacggcacattgattatgcaaattggcgacggcggtgtagtggtggattttggtcgtggtctggaactgccgctcacgccgatggtgggtgaatatgccaatatgacgcatttcattagcgatgaagatgctgtttccagactggaaactttcaccagcactgagcgtgcgcataaagttgcagcatttacggatggtattcagcgactggcgttaaatatgctggataattctccgcatgtgcctttctttaccccgtttttcaatggactggcggcagcaacgcaggaacaactcgatttattacctgaattgttaaagcagtttttgtcgagcccggcggtaaacgagcgtaccgatgatgataaaacgttggcactggcgctgtggttaccatga

SEQ ID NO: 27484 - DNA, 660 bp, Escherichia coli
atgagcgaacaaatcacgtttgccaccagcgattttgccagtaacccggaaccacgttgcccctgcattttgctgctggatgtttctggttcgatgaacggtagacccattaatgaacttaacgccggattggttacctttcgcgatgagctgcttgccgacccgctggccttaaaaagagtggaacttggtattgtgacgttcggcccggtgcatgtggaacaaccctttaccagcgccgctaattttttcccgcccatcctgtttgcccagggcgatacaccaatgggtgccgccattaccaaagccctggatatggtagaggagcggaaacgtgagtatcgtgcaaatggtatttcgtattatcgcccgtggattttcctgatcaccgatggcgctccaaccgatgagtggcaggctgccgccaacaaagtgtttcagggggaagaagataagaagtttgccttcttttccatcggtgttcagggggcggatatgaagacgctggcccaaatcagcgtccgtcagcctttgtctctgcagggattacaattccgcgaactgtttagctggttatccagttcactgcgttcggtttcccgctccacgccgggaacggaagttgtgctggaagcgccaaaaggctggacgtcagtgtga

SEQ ID NO: 27485 - DNA, 147 bp, Escherichia coli
atgactaagagcaccacgatgatgagtagcttcatcatgaccctttccttatttaaggccccttcctcgggaggggctttcccgtttcagcgtcccgctgaaatcttcggcttacctcctttcgccctgtatgcagtctatcgctga

SEQ ID NO: 27486 - DNA, 147 bp, Escherichia coli
atgactaagagcaccacgatgatgatccacttcatcatgaccctttccttatttatggccccttcctcgggaggggctttcccgtttcagcgtcccgctgaaatcgtcggcttacctcctttcgccctgaattcagtctatcgctaa

SEQ ID NO: 27487 - DNA, 147 bp, Escherichia coli
atgactaagagcaccacgatgatgagtagcttcatcatgaccctttccttatttatggccccttcctcgggaggggctttcccgtttcagcgtcccgctgaaatcgtcggcttacctcctttcgccctgaattcagtctatcgctaa

SEQ ID NO: 27488 - DNA, 201 bp, Escherichia coli
atggatacaattattacatggatgggagatcgtctgttgggggggacacaaaaatccgatctgcagcagatggcgatcactggattaacttccgcgatttgttcaacaattttgtacactgaaaaattaaaacatggtgagcctattaacccaaacgaagaagaaaaactttataggctttggtatgaaggaaacgcttga

SEQ ID NO: 27489 - DNA, 381 bp, Escherichia coli
atgagaaaaatcctaatcgctgccatgatggcatctgtattggctgggtgtgcttcttcaggcaaccagcaactcaaaaatgaaactgaaattagtgtccagtctaaacttcaggaaggtaaaacaaccaagaatgaggttaaatcttactttggttctcctgatgctgtttcatatactgacagtggaaacgagatctggaagtacgcctttgcaaaagtaaaagttaatggcaccacttttattccattctatggattattccataatggaacgaacggtacgaaaaaagaacttactattctttttaacgatgacacgattaagaaatacacaatgtcagaaacccaaataaactcgaaatcaggttgggctgactga

SEQ ID NO: 27490 - DNA, 159 bp, Escherichia coli; identical to SEQ ID NO: 11309

SEQ ID NO: 27491 - DNA, 186 bp, Escherichia coli
atgacaccacgcgaaatagccttattgaccatcgccaaacttgagcacggaggccaccagcttacacaggcagatcaacgggagatagaacgatcagttaatgccgatatagcccggcgcgacaggttccgcgaaatgatgcgagcacctgcctaccagtggaagaagccagcgccgcgcaggtag

SEQ ID NO: 27492 - DNA, 417 bp, Escherichia coli
atgttctcttgtgtcgccttttttggcacggcctttgtaaacagcctgaactgggcactggtaccagataccgtagattacggtgaatggaaaaccggtattcgtgccgaaggttctgtttataccggttataccttctttcgtaaaatttctgccgcacttgctggcttcttgccaggcattatgctgacgcaaattggttatgttcccaacatcgcgcaaagcgatgcgacattacagggtttgcgtcagctcatttttatctggccttgtgcactggcaattattgctgcattgacgatgggattcttttacacactcaatgaaaaacggtttgcattgattattgaggaaatcaaccaacgcaaaaataaagagatggcgacagaagaaaaaacggcttccgtaacgttataa

SEQ ID NO: 27493 - DNA, 177 bp, Escherichia coli
gtgagttttatttttaatgaggaaacattgtattttactgtttttggtggggattttattatggatgatttaaaaaaagtaaaaaatacggaagcatgggtatggtataaaaattgcgatagtaaaaataaaaatgtggcagttgaacttcttcaaatctacgaattgcatcaatga

SEQ ID NO: 27494 - DNA, 342 bp, Escherichia coli
atgccaatgtttcccggttatgtattcgttcttctggattttgaggttgtacatccatcctgctttacccggatgaaaaatgtttatggactggtcagttttggtgaatatcctgctgaagttcctctgagtgtcataaatgaagtaaaagagcaggagaagattttttcgatgaatttaagcctgatgaataactcctgtctggcaaaaatacttctccttgcagacgcttcaaagcgtggacaagtctttgccgactatgtgtgtaacagaaaatacgacaggttaaaaaatgacagctataaaaggaaagcggaaaccgcaacgcaatgtactctatga

SEQ ID NO: 27495 - DNA, 237 bp, Escherichia coli; identical to SEQ ID NO: 8351

SEQ ID NO: 27496 - DNA, 2229 bp, Escherichia coli
atgatcgaatatttcgaattgggtgagcgcctcgattcatcggggcgcgatagcctttatccacaaacgatttcgctgcttaaagcatgcgagaatcatccttacgtcacagtcagagaattacgattttctgaaataaatgataaccgctcggaatatctaatcattgatgctgctgatgggactgtggcttctggtaatcaagcccgtattcgtcgtaaagaacgattggctattgaggtcaatcccaaatcaagcatacctatcttggttcatgcattgcggaaagatttccctgttctttctcaccagcatgctggagaacctggctcaccacgaattctttgcctatatgaggcctcctggagcgcagttgagcgcagttggacacccgagagattccttgagcgcattttttggtggcttagagaatcggccgaactgcatctacatcgagaagatcagccacttgagcaacttttttatttgagtccctatcagctcattttgccagccaattaccccgattatcatcacgcgactgacaataagctcagtctccagatggtcagtgaggggcgaccgattattttaagggctgtaccagaacaagatacctcaagcgttaagccatttcgcttattaactattgctgttcctcctgtcgatgtttctacggtggctacatacccggataatctgggaaaattagaagaacaacttaatgaatggggaagtgagctcctaaaaccactaactgacgctgtttatgaagcaataccaagtgatggtatccgcccaacgtctggtaaaggagaaggcttacttattctgctttggatcccccgtctaagaaacggagaaacagaacgtacggatgtgatgggctatgttgtgcaaagttcactcggtgaacttgccactgcactagatatgctggcgccaaaaaatgagcgaggagtacagcatcgcgtacggcttcttggcggatcaattagtaccaagtggcgacaattaccgcttttaccagttgaaatacgttcggctatgaaggccacacatgcgagagacatatctgctgttgattcagagagtgcagcttttcgaggtattttagctggagttggcgctcttggtagtacattggctgatatttggattcgaatggggtgggggacatggacttttattgatccagatcggcttcttccacataatttgtctcgccatattgggtttgattgtcatattggagtctcaaaaccccatattattcagcatattgccaaatctatttatccgcatgagcccctccctcaggcgatccataaaagtattcttgatgacgatgatgatattgctaaggcaatgaatgaggcagacttagttgtggatgtcagcaccacctttgaggtgccgaggactctagcgttaaaagatgatatacccagaatagttagcctgtttctgactccatcaggtcagtctagcgtgatgttaatggaggatgtagacagacaatgccgaattgatgcagttgaggggcaatactatcgggcaattttgagcagtgagtggggaagtactcacctacagcacaattatggcgatcgttgggtcggtggtggatgtcgggatatttctgtacgtatgtccagtgaatgtattcatgttcatgccggtatcctctcacgccaacttcgccagactgcactcaaaggaaatgctcgattgtgtatctgggtatctgatgaaatatcaggctcgatggatgcacatgaaattgaactctattccgtggtatctataatttctggcgaatgggttgttaaatatgaccagggcttagcgcaaaaattgcagcacacccgcttacaggcactgcctaatgaaacaggaggtgcaattgttggcataacagattttaagaacaaaacgattattctggttgacgtgctccctgaacctatcgacagtaaatcctctccagcctcctttgtccggggagaagcgggacaacaagaagcattagaacgggttcaccagttgaccgctcgtgttgtcgattatgttggcgaatggcactcccatccacaaggcttttccgcaaaagccagtaatgaagatgataatttaatcaaaaaattacaccagaaaatgcgtgtggagggtttacctgccgtgatgctgattgttgcggaaaacgatatcaatattgtagtcagataa

SEQ ID NO: 27497 - DNA, 1182 bp, Escherichia coli
atggcagccaaaattacttttttccaagtcggcaacggtgatatgacactggtacgtttggccgacacccggggcacatccattctgattgatgtacatattcgctctgctgctgataaccccaatgatgacacacctgatgttgcctcggcattacgtagcagattgaagtatgatgaaaaagatcgtccctttattgatgtttttatgctcagtcatcccgatcaggatcattgcggtggtttgcgtaaacatttctggctgggccgtcctgaagattatccagatgacgatgtgaaacgttcagaaaagcgtatcattattcgagaattgtggtcatcaccattgatttttcggcgtcgttccaaaagtcacacactttgcgaagatgctcaggcatttaatacagaagcacggcgccgagtaaaatactggcgggaacatggttatgcatctagcggtaatcgaatccttatcatgggtgaagatattaatggcaaaacagatgatctgagtgccattcttatcaaagctggagatacattcaccagaattgacgggcaaatttcagatgtgttctccgcacagcttctggcgcccgcaccacatgaagatgatgaatatttggaagaagctctttctaaaaacgaatccagtatcatcatgaacatgaaaatacagccctctgcatattcccgtaatcctatgcactttctattaggtggagacgcagaagttctcatctgggagcgattatgggatcgttacaaaagcaatgctgaggcactagaatatgatcttctcctcacaccgcatcattgttcatggcattcactttcctatgatagctggtcacaatggggggagaatgctgaagtttgtgatgcggcccgtaatgctttaggtcaggctcgttccggggcaacaattgtatcgagtagcaatcagatacttgatgatgattatgatccaccgtgcatccgggctaagcgtgagtatgaggatattctggacagtgttgatggttggtttagctgtacgggggatcttaaagatacagcgttccttgaatttgaagtggctggagacgggaagttaatacccgctattgttggtgctgtttcagctgcggtaagtgctgctacggccgccgctcctagggcaggtgtatcaaaccaatga

SEQ ID NO: 27498 - DNA, 855 bp, Escherichia coli
atgagtgataaaatggtgagaactggtcattggagccaagaaagacggcttgaattcatcgattttcgcctactgtgggaaggtcggcttaaccgtgcagatctcacgacatttttcagaatttcagttccgcaagcctcattagatttggcaaaatatcaagaagttgcgccaaacaacatggtgtatgatcgaactcagaaggcttacattacgactcctgatttcaaacctgtttttacaagctttgacagtaatcattacctgaatgaactacttgggcgagaaaatgaaatagtggatcctgatgatagtttcattgggtgggtacccccggtagccagccttcctctccctgccaggaaagtacaacctgaaatattgattgatttaattcgagccatgcaaagaaaacaggctttggttgttgattatcgctcaatgactaatgaaccagcaattcgtacgctatacccaacagcatttgcacatgatgggcatcggtggcatgttcgtgcttattgttttaagtctacaatgtttaaagattttgttcttggtaggttttttaaaatcgttgaatttgtttccccaccgatatcaattccacaagatgtggactggaatacatttattgacgtggtaataggtccaaaccctaactacgatatgaataaacgactatctattgaacatgattatcaaatggtaaaaggagaagcaaaaatccacatacgtaaagcgcaattatattatcttaatcgtcgattaaatttggatgtaaatagcgatggttcaatagatgacaaacagcagatcatcatgctcagaatagacgagtctaaaacctattaa

SEQ ID NO: 27499 - DNA, 519 bp, Escherichia coli
atgaatgcgaatgatgttaacaaacggaataaagaatggatgattgtaatcattattatctatctttttattttgttatgtatagcaacatacgctattggggctatgtctctaggttggttaccaacaccttacgcaccattaagggtgccactgatgtgcggagcaattgcctatataggaggttgtttatattgttttcgtgcaatttacctcaataaatgtattagaaaacaatgggatccagattggcatgtatggtatttcattcgcccactgaccagtacaatcgcaggtgctatcagttatttattccttaaggcggggttgttagttttggagtctagttccaatgtaggagctagtgaaatgggtttctttgcgctggcatttattgctggttttaacgtcgataaatttgtcgcaaaaatcgaggaagttgcaaaggctgtctggggtattgaaaaaactcgaagctcgactaataatgatgcgaaaaattcggaaaaaaaagaatag

SEQ ID NO: 27500 - DNA, 195 bp, Escherichia coli
atgaccggacgtaacagacgcaattttagccccgggtttcgcctcgaagctgcccagcttttactcgatcagcattacaccgttgccgccgctgctacggcaatgaacgtcggcaaatccacaatggacaaatgggttcgacaactgaaaggggagcgagcgggaaaatcccccactacttcacccatcacctga

SEQ ID NO: 27501 - DNA, 969 bp, Escherichia coli
atggtgattagcatgtctgaattagttgtgtttaaagcaaatgaattagcagtaagccgttatgatctaactgaacatgaaaccaagctaattctgttttgcgttgcaaagttgaaccctacaattgaaaacccaacaagggatgaattaacagttaaattctcatgttctgaatatgcacgcactatgggcttaagttatgaaaatgcttggggaagattgaacagtgcaactagtgatttatttaaacgctctgttgaattaatttatcctacaggagcagtttctaaacgaattttcaattggacggaatacgctgagttcaatagagaagaacaaactgtaacgttagtatttagctcatatattcaaccacttttatttcatttaaaaaaattcattaaatacaaccttgagcatgttaaagcctttgaaaataaatactcaatgcgaatatatgaatggttactaaaggagctttcacaaagaaaaacgcataggggaaacattgagataagtatcaaggaatttaagtttatgctcatgcttgaaaaaaactaccctttatatgcagaattgaatcgctggatcctaaaaccagttacaaatgacttaaacacttacagcaatatgaagttgactattgaaaaacgcggtcgtcctgctgacacactaatctttcaagttgaactggataaacaaattgaccttgtgactgaactagcaaaagatcccgcatcaaaaaaagaagataagacaatccgtttaacgcctgaaaatcgtcttcatgaggggctaaaaacaacattgcatgatgctttaactgcaaaaattcaactgactagttttgaagcaaaattcctgagcgatatgcaaagcaagtacgatcttaacggctcatttacatggctaactcaaaaacaacgaactacgctagagaaaattctggctaaatacgggcggatatga

SEQ ID NO: 27502 - DNA, 456 bp, Escherichia coli
atgaaaaacgaaaagcaagcaaaatggctcacagacagggtgcaaactatccgtggtttaaaatcaccgaatgagccacaacgcttattggtgattttgcacgataaagcggataaaaccgcccaagaaataaaaacgctctcattgttaattcaggcggagcgggcagcagaaaaagcccaggaagcccgcacaaaggtaatgaatcttattcaagcagagaagcgtgcagaagccaaagctgcccgtaaagcacgtgaccatgccctttatcaatcagcggggttactcatcatggcggggttagtggacagtcaaacgggtaaaccggtagatgaccccgcaaaactactgggtgcattagtcagcttgcatgaattatcccgtgataatcccaaatgggaagaatggaaattgaaggggcaggtattactcaatcagaaaaaggaagattag

SEQ ID NO: 27503 - DNA, 1095 bp, Escherichia coli
atggcatcttatcatctcagcgttaaaaccggcgggaaaggcaaagccgcttcccatgccgattatattgcgcgtgagggaaaatatgcccgtgaaaaagataatgaccttgagcatcaagagtccggtaatatgcccgcatgggcagcgcataaaccgtccgagttttggaaagccgctgacacgtttgaacgtgccaacggctgtacctaccgcgaaattgaaattgccctgccgcgtgaatttacacccgcacaacgccttgaactggttcgcgattttgttcaacaggaaattggcgaccggcacgcttatcaatttgccattcataaccccagagcggcgattgaaggcggtgaacaaccgcacgcgcatattatgttttctgaacggcttaatgacggtatcgagcgtgacccgcagccctattttaaacgggctaacacgaaaaaccctgaacggggcggcgcaaaaaaggtgcggttcggcgaaaccccgaccgaacgcaaggcataccttatcgcccagcgggaacgctgggctgacttacagaataagcatcttgaacggtatcagcatatcgaccgcgttgatgcgcgttccctgaaagcacaggggattgagcgtgagccggagcgacattttggcgcaggacaggtcaggcagtttgaacccgcgcagttacacgccctgatggagcgcagagaagcggagcgacaggctcagcattgtcgtgatgaatgtaacagcgtgattgatgttaccaccacgctacgggaagccctcagcgagcgtgataatcagacactgaaacacgagcagacgtcagagcctcagttgaaagcgacttcagacaaagcgtttgattttgaaaaagagtctgacaagttgaacgcactggtcagtgatgccatgaaggacatacaggaagaaatcgatcttcagacccttgttaacgatgcgatggcggagtttcagggcattcatcaggacatggttaaggctgagcaacagcgtcagcaggaaaaagaacggcagcgactcgccgagcagaaacgacaaaagtccgataaaggctggtcattttcccgatga

SEQ ID NO: 27504 - DNA, 585 bp, Escherichia coli
atgagtgatgagattaaaaaaattgcggcgctgattgggcatcagcaagcgcaggaaaagcgtgtggcggcgttgattgaagaatttcaggcggaatccgccaaattaagccgccaaacagcacaattggctcaggtgatccatgaattggacagtgcctccggtaagatgaccgacacgatcaggcgatcggtgaatgcagccttaactcaggttgaaaaagaactcaaacaaacgggattggcgcagcagaaacccgccgtcaatgcgctgaatcaggtggttacagcagctaatgaatccgtgagtgcaatgcgacgtgaaatgtcccgttatacgtggaagtctgccatttatatcgcattgacgatatttgcggtgatgggcgggtgtctttggggaatgtattattttatcgacagcggttatgaccgaattgcaaaaatgcagcgcatggaagcggtctggcaaaaaaaagccccgctggctgatatctccacgtgtgacggaaaaccttgtgtgaaagtggatacaaggcagtcatatggtgataaaaaagacacttatctgattatcaaacaataa

SEQ ID NO: 27505 - DNA, 1227 bp, Escherichia coli
atgaacagacttttttctaatgctttctggttaatggcatctcagattggcggccttctaatccccttgatcgaactgccattgcttgccagaagactgggggctgatgaatatggaaaagttgtatatgttttagctatttccataatggcttctgttttcattgagtatggattcaatttcagtgctgtgaaaaaaatcgcaggaaggaaagatgataaatatatttcacaaatttcaacagatgtttttcttgctaagataattcttagtattatacctattattttagctctcaccctaatatacacaacatctagcggaatatctatacctaataattggtttgtatggattattttatttatcttatcttttggattcactccgttctggtattacatatcaataggaaatataattttccccgcaatactcgatcttttactaagagtgacaggtttaattctcattgttatttttgttaactccccgagtgacgcaaaaaccacaatagccattcaatcaatggtaggagcgctaaatacattaatatcaactgctgttgttttttatttgtcgggagtaggagcaattaatattaaaagagcgcttaatgaaattaaagatgggtttagtgtatttttgtataaaagttcacaaggaataatgataaccatgtcatcatcattattaggtttttttgggggggctaaatctgttggtttttttgttccatctgaaaaagtaactaaggttataacaacattaatgataacaatgctaaacgtggcatatccgcatttcgttaaaaatcttagtgatagcaaaaacaatatacgccacataaaaaaaacaatccttaacatatcagcaatattattatttttatcattaattttttctttttttgtttttgttttctccgataaaataattttttttgtttttggtattgaatacgaaagagcgataccattaattaagactattatttgggttataccgttaaggtcatgggtgttgtcacttacaattctatggttcattccaataaataaagagaaatttatcacaaaaataacactcgttaatataatgctaatttcgttcactgcgtgtttatttatttatctgtttggtactataggaatagtgatgtcaattttactatcagaaataataacttttgtgatattgacctatttctttttcaaagaaaactaa

SEQ ID NO: 27506 - DNA, 1116 bp, Escherichia coli
atgggagtcaatagtgatcatgtggttacagtatacactctcttttcctgtacactattaggttgctattggcttataaaaagaaagtcttttataaaaagatcacatatttttctcctatgcttagtagttgcttaccttgttattaacatttttgtatataatcataaatctatcactctaattactagtcatgctgtatatatagtaatatctatgtggtttattttcttctttaaaagaaaaccaatacatttatcatatttaattgctttaggcctgctttttgttagctcttttttgttgattaaattatttcaacttggctttggtgactggggacgtttaacggttcctgttttttatgataactcatggtcttattttcctttgggttatgaaagttcaagtgacccaaatgtgttagcttttatgttatgcattggctcaatctatatgtttttcacattgccaaataaatacacaattaatattatattcatattgtcaatgatgtgttcatttttgaccttatcacggagttcttttttatctttttttatttcctttcttattgtaagtgtttattcattctttgtgctaaagaaaacacagctaaggttgttggcactaattatgatttcacttgcaatgtcttttgtagtgatgaaaaacattcccgctgtagtgactgagaataatggagcctcatttgtcacagaaccaaatataacagaacgaatagttagtaaagcaagtaatagtgatagaatagccagattaaaaaatgctattgttgaaataagtaatctaaagacaatgtttattggtaatggtattggctatagtacattaacacaggatccacataatttttacttatcaactattattgattccggtattttgatattagcaattgtaatgatggtgctaacaaaaccattattaatggtttcaagaacccccgcaaaatcaaatgttattttggggtgtatgttcttgactatatactatatgttcatttctcttttctactggcaagtgagagtcctatactttgttattatattattatttacctttgtaaatataagtaagaagagcgagcaatga

SEQ ID NO: 27507 - DNA, 810 bp, Escherichia coli
atgaaaaaccataaggttagtattatcatcccctgttttaataacgaaaaaactatagaaagatgcgttctttccgcattaaaacaaacccatagaaatatagagattatttgtataaatgatggatcgtcagataatagctggaatattttaaagaaattaagctcattgtatggaaatgtttttgcttttaataatgaggataattcagggccgtcattttccaggaataaaggagtttcactatccacggggcattttttgtcatttttggatgcagatgattactggcatccaaaaaaactagaattacaactatcatttattaatgatgaaaacttggattttttaggttcaacgtgttccattggtgagaaaaataaccaagaaattaaccaagaaattaaaaaagaacatttaaaattaaaaataatttcatttaacatgatgttgtttaagaattatttccagactccagccgtcattatgaaaagagatatttttattccatttaatgagaatcagcgtttttcagaggactacatgtcatggcttgttatcgtttataataaaaaaaacaaatgtggattaatatatggaagggatttggtttttctcgataaatttaactttggagtgtcagggttgagtggtaatttatggttgatggagaagtgggagttaaaaaatatatttaacttcttgttgaaaggtaaaataatggcagtgcctgcgatcttgttttctttgataaaatatggaagaagatgcgctttaacaaagaaaaataaaggtaagggtaataaataa

SEQ ID NO: 27508 - DNA, 1134 bp, Escherichia coli
atgaagatctcaataatagggaacacagcaaatgctatgattttgtttagattggatttaataaaaacactaaccaagaaagggatttcagtctatgcttttgctactgactataatgattcatccaaggaaataataaaaaaagcaggcgccattcctgttgattataatttaagtcgcagtggtattaaccttgctaatgatttatggaatacttacttattaagtaaaaaactaaagaagataaaaccagatgctattttatcttttttttcaaagccctctatctttggatcgttggctggtattttttcaggcgttaaaaataataacgctatgcttgaggggttaggttttttatttacagagcagccacatggaactccgttaaaaacaaagttacttaaaaatatccaggttctcctgtataaaataatatttccacatatcaactcattaatacttcttaacaaggatgattatcatgacttgatagataaatacaaaataaaattaaaatcttgccatattcttggtggcattggtttagatatgaataattactgtaaaagcacgccaccaacaaatgaaatatcattcatttttatagctcgtttgctagcagaaaaaggagtcaatgagtttgttgctgccgcaaaaaaaataaaaaaaacacatcccaatgttgaatttattatacttggcgctatagataaggaaaaccccggagggttatctgaatctgacgtagatactttaattaaatcaggagttatttcttatcccggatttgtttctaatgtggctgattggattgaaaaatcaagcgtatttgttcttccttcctattatcgagagggagttcctcgtagtacacaagaagcgatggctatggggagaccgattttaactactaatttaccaggctgcaaagaaacaattattgatggtgtgaatggatatgttgtaaaaaaatggtcacatgaagatcttgcagaaaaaatgctgaagttaattaataatcctgaaaaaataatcagtatgggagaagaaagtcataagttagcaagagaaagattcgatgcaaatgtaaataatgtaaagttattaaaaatactaggaattcctgattaa

SEQ ID NO: 27509 - DNA, 465 bp, Escherichia coli
atgtctaaattaccaacaggtgtcgagattagaggtagatacattcgcatctggttcatgtttcgaggaaaacgatgtcgggaaacattaaaaggctgggagattacaaacagtaatattaaaaaggccggaaatttaagagcgctgatagttcatgaaataaactccggtgaatttgagtatttaagacgttttccccagtccagcactggggcaaaaatggtgacaacgagagtcataaaaacgttcggagagctttgtgatatctggacaaaaattaaagagacagagttaacaacaaacacaatgaagaaaacgaaatcacaattaaaaacactcagaataataatttgtgaaagtaccccgatatcacatattcgttatagcgatatcttaaactaccggaatgaactgctgcatggagaaacgctttacctggataatccaagtagactggccccctga

SEQ ID NO: 27510 - DNA, 678 bp, Escherichia coli
atggggctgacgcttattactgttgatttcaatgacctgtcggcactgaagcaggtcgtcgacgagcaacaaccggatgcggcgctggtgcagcatacgcgccagcagccgcaggacagctacgtgctggcagatgtgctggcaacgttgcgcgcggcaggtgttccagcgttaaccgatgacaactatgcggtgatgaaggtggctcgaatcggctgtgaatgcggcgcgaatgtctcgacattttcctgcttcaagctatttgggccagagggtgttggtgcagtggtcggcgatgctgatgttatcaaccgtattcgcgccacgctttactccggcggtagccagatccagggcgcacaggcgctggaagtattgcgtggtctggtgtttgcgccagtgatgcacgcggtgcaggcaggggtatctgaacggttgctggctttgcttaacggtggtgcggtgccggaagtgaaaagcgcggtgccttgccttacccggtgggtgcagagtcgaaatatgaaatcccgccgctcttttatcgcctttccggaacgtttcgccaggcgaatccacaatcagaacattgtgcgattcgcattaacccgaatcgcagcggtgaagagacggtgctgcggattttgcgtgagagtattgccagtatttaatgctggatag

SEQ ID NO: 27511 - DNA, 444 bp, Escherichia coli
atgccgatcatagtaccaatacccagagccgaacggcacctgatgcagaaaactatccataaaacaaatgacaaaaaccatgcccggcggctcaccgcaatgctgatgctacatcgtggtgacaccgtcagatttagtctacgtcatgagcaactagaggttacagaaacacagtttatagagtttgcagatgcgattgcagctttctggaatgatatcctaacacactgtatgcgatcagctattcgggaagaacctgaatggataaatggcgaatataaaaacatgagaagaaagttaaaatgcttcaggactaaaattcttgataatagcaagtgtatcttacatgtagacatttgcctgccgtgttttttagctaccttggttgcgagaacaattgcgaacttctgcacctcgctcacagcggacctactgctaagttag

SEQ ID NO: 27512 - DNA, 1353 bp, Escherichia coli
atggacagtggattcgtagatctcgatatacttcttacacgaattaggcatgcccagtcgaaaacatactttcttgatgccgttaaggcctacaaagcgggcgcgttgaggggggcactaacttccgcttgggttgctctcgtctacgatctgatagccaaatatcgtgagcttagtgccatgggcgatgcagcagcgactgcatttcttaatacttgggacaacgcgactaaatcaggtgacatccctaaacttctccaacttgaggggggcattcttgaagacgcaacggccaatgctcaggtagtcaaccggttagcccgaactcacttagaccgtcttcgcgaggataggcatctttgcgcgcatccagcattctcagcagaagcagatctattcgaaccttctcatgagttagtgcgacttcatttagtaaatgctgtggaattcgtcctatcgcaagaacctttacagggaaaagcaatattcgagttatatgacgttgatgttcaatcgcccggttttcctacggacagtaaacgcattcttgattatgtagaacaacgttatcttactcgcgtacgcgctcagaatatcagtaacttcggcacgattctcgccaaatcacttctcaaaggtgtgccagaacaatgggaaacgctttatcaccagattattacatcattagtcgccgtacgagaccgcgccagcattgcttggccaaacgtttcactgtcaattgttaggcttattgataatctagaaccacgacatcggcctagagcgatcgcatttattgccgcatttaatgagttttggatgcagcttcaggagccaacgcgaacagtcttgctagagactattgaaaatgccaatccagaaaatatcactgattaccgtattttgactggtgtaactttcgtaccgtttcaagcctcgctgcaaaggctaataacgggactaactcaacagcagttggcctcagcgatcatctttaacccacttgctgaactttgggataaggcaatagaatactatgcagaatcaggtagctggcgtggatctgaggggaactttatttctctcgtcataccgttttctggccgccttagtcagcaacagttcgaccaacttctagatgctatcatttccaatacgcagaattgggatgccgctgagacgcctaagcttctcctaggaatgctccgcaattctttacccgccaacctaccaacaatagatgcacgtgctcgtttttatcatcacctagatcgccatcactgtattaataggtatggtgatgtactcacaattctacaaaccgacggctggcttcctctaccgcagaaataa

SEQ ID NO: 27513 - DNA, 216 bp, Escherichia coli
atgcctaaatcttacacaccaaactggttttttaccgctttacttgacaatcacatcaatcaaatgatggcacgctattcctgcctgcgggccttacggatggatttcttctacaggaaagatacgcccgatttcttacaacctgatcatcgctggcttgaattgcagttgcgtatgctgctggagcaggttgaacaatttgaaaatatggtttga

SEQ ID NO: 27514 - DNA, 885 bp, Escherichia coli
atgccattcagcaattcttccctctccgcgcaagtgaaatcatatctgacgtttcttcctgaagaaatacgccagaaaatccttgaacatctccacggtgttattcattacgagcccgtgattggcattatgggtaaatccggcaccggcaagagcagcctgtgtaatgccatttttcagtcccgtatctgcgccacgcatcccctgaacggctgcacccgccaggctcatcgtcttaccctgcagctcggtgaacgcagaatgacgctggtcgatctgcccggcattggtgaaacaccgcagcatgatcaggaataccgagcgctttatcgtcagttactgccggaactggatctgattatctggatcctgcggagtgatgaacgtgcgtatgctgccgatattgccatgcatcagtttttactgaatgagggcgcagatccctcgcgctttctgtttgttctcagccatgccgatcgcatgtttcctgctgaagaatggaatgccacagaaaaatgcccgtcccgtcaccaggaactctcactggcgacagtaacagcccgggtggccaccctgttcccttcatcatttccggtactccccgtagccgcgcctgcaggctggaaccttccagcgctggtgtcactgatgatccacgcgctgccaccacaggcaaccagcgcagtttattcacatatccggggggaaaaccactctgaacaggcccggaaacacgcacaactgacttttggtgaaaccatcgggaaaagttttgacgacgccgttgcccgtttcagttttccgccctggatgttacagcttctgcgcaaaacccgggaccgcattatccacctgctggtcacactgtgggatcacctgttctga

SEQ ID NO: 27515 - DNA, 966 bp, Escherichia coli
atgcctttagatttaagtaacactttagttattggcattagcgcaactgcgctttttgacatgagtgaatcagatcgcatgtttcgggaaacctatgcgaccgatcctgatagtgccattgagaagtatcgagcctacatgctggagcacgaaaatcagcctttacaaccaggaacaggttatcccttagtcaaagctcttctgggtctgaatcagtatcgtcaaccggatgatcaatcccccttggttgaagtcgttgtgatgtcgcgtaatagtcctgataccggtatccgcgttttgaataccattcgccatgacaaactcgatattacacgttcagcttttaccgcaggtgaaaccgttgccgattaccttgatgcctttgatgtggatctgtttttaacaaccaacgttgaagatgcgcaaaaggtgattgattcccgattctgcgccgctgcaatcctgaaagatccgccttctgacgcatctgatatcccggaagggcaagtgcgcattgcttttgacggcgacgcggtacttttttccgatcaaagcgaactggtttataagacccaaggaatggctgcctttcatgctcaggaagacgcgcagcaggatatccctatggaagaggggccttatgccactttgctaaaaaaaatagccaagcttcaggaacgattgccgacccgcgttgagtattctcctgttcgtattgcgctggtgacagcccgaaatagcccttcggaaatgcgcgttattaaaacgctaagaagctggggggtatatgtcgatgaagctttttttcttggcggtgtagagaaaacaaaagttctgaaggcgtttaggccacacattttctttgacgatcaggatgtgcatttgatcgcggctgcaaaggtagtaccttctggtaaagtaccttatgccagtaactccgaactggcagaacgtgaagcatcgtaa

SEQ ID NO: 27516 - DNA, 348 bp, Escherichia coli
atgtctgagaagaaaagtattgatgataagatgctcttgagggcaattgcagatatggtgattcaaaacccttcctatgccagagagatattcgatgatgcgcatgacattattaatatattcccagaacttaaaataattagtgattttttattacaacctcatgaaaataactatcaggaaattctggaggaaacaataaaagaaatacctgatactgaaacgaaaaaatattccttatggctattagttcaaaaggtaaataattctataaacccatatgccatgaagtgtcaaatcatggcatatgtggaatcaatatgtttattaaaagttaattatttatga

SEQ ID NO: 27517 - DNA, 1167 bp, Escherichia coli
atggaggggttagtcacacaaaaattcaatactccccagtctggtttaacaatgaacaatctaactcaaaaccttgcatgcattaaaccagccattaagtatcattctgtcactaataaatcatccgattataaaacccataaaaaagaatataacatcctttttattccatggccttttattgtgaaagaggaatattttcccccttcatcatttaattctaacaagcatgatatagacagttatttcgattttttcgattacaaaccagattcaatttttagtcatcagcattttctttcttatatactttcgacaataaagagagttggctcactcgagttgataatattcccagaaagtgcattatcccaaaaacattttaacagtctaaaaacgctactttttgaaacctttggagaaaatgcaccatcattgctatcaggagtttataatagtaatgatgatatcggagaaaactatgcacttttatcgtttatagaagaaagtggcaatggatttgatacaatcagacaggataaacaccatcgctggtgtcttgaacgaaatcaattaaggaattataacttaacctcaagtttagatcctagtaagaaatggtgggagaatattgcgataggacgccgcaagcttacaacattgcatactaataatggtgtatcactatgtcctttaatatgtgaggacttagctagacaagaacctgtagctcaggcggttaggtctatagggccaaacttagttgttagcttactgctagatggtccccaaattagttcgagatgccctggtaaatattcagctgtattatcagatgatcctagctcatcggttctatctgttacagcatttggaatgacacaaagatctactggtctaggctttgaacctagcactcaagttgccttatggagtgagcctagtaaaggctctgaaactttggaactgccttctgcagatcatgctattgtgctagaattggagatagagcaaacaggaatgtggtctttggatggccgttgtgaggaaaaacctatattaagaaaaaggatgcattccacaatagctcttgatacaacccaaagtgtgactgcacttaaacaaggtatagctaaatttctgaattctaggaggtcacatgtctga

SEQ ID NO: 27518 - DNA, 219 bp, Escherichia coli
atgcagaaacgagaacccgtcatcatcgcgccagactataccgatgatgaactttatgagtggatgcgccagaaaattaatgcagtgcaggatctgaaatgggccaatgaagccaggactaagcaggctgaaaatctgtccgctctggagcaggatatcaccaggctggaaaaagcagcggcattaagcattgccagaatggttacatacccacgttaa

SEQ ID NO: 27519 - DNA, 189 bp, Escherichia coli
atggcaaggtccgattacgattttatcaatctgtctctggaacatgaattgaatgagtggctggcagaggtggttacccgcaaattgcgggacagtttttatgtggacgtctcctgggatgcgctgaatgtggcatacagtgaacaccctgagtggttttcagagcttgcctccggggatgaggattaa

SEQ ID NO: 27520 - DNA, 147 bp, Escherichia coli; identical to SEQ ID NO: 11446

SEQ ID NO: 27521 - DNA, 753 bp, Escherichia coli
gtgcttcgccgtatacaccatgttatcggagagctacccacatatggttatcgtcgggtatgggcgctgcttcgcagacaggccgaacttgatggtatgcctgcgatcaatgccaaacgtgtttaccggaccatgcgccagaatgcgctgttgcttgagcgaaaacccgctgtaccgccatcgaaacgggcacataccggcagagtggctgtgaaagaaagtaatcagcgatggtgctctgacgggtttgagttccgctgtgataacggagaaaaactgcgggtcacgttcgcgctggactgctgtgaccgtgaggcactgcactgggcggtcacaacgggtggcttcgacagtgaaacagtacaggacgtcatgctgggagcagtggaacgccgctttggcagcgagcttccggcgtctccagtggagtggctgacggataatggttcatgctaccgggcgaatgaaacacgtcagttcgccaggatgttgggacttgaaccgaagaacacggcagtgcggagtccggagagtaacggaatagcagagagcttcgtgaaaacgataaagcgtgactacataagtatcatgcccaaaccagacgggttaacggcagcaaagaaccttgcagaggcgttcgagcattataacgaatggcatccgcatagtgcgctgggttatcgctcgccacgggaatatctgcggcagtgggccagtgatgggttaagtgataacaggtgtctggaaatatag

SEQ ID NO: 27522 - DNA, 426 bp, Escherichia coli; identical to SEQ ID NO: 8113

SEQ ID NO: 27523 - DNA, 294 bp, Escherichia coli; identical to SEQ ID NO: 11487

SEQ ID NO: 27524 - DNA, 282 bp, Escherichia coli
atgaaaaaaagaaatttcagcgcagagtttaaacgcgaatccgctcaactggttgttgaccagaactacacggtggcagatgccgccaaagctatggatatcggcctttccacaatgacaagatgggtcaaacaactgcgtgatgagcgtcagggcaaaacaccaaaagcctctccgataacaccagaacaaatcgaaatacgtgagctgaggaaaaagctacaacgcattgaaatggagaatgaaatattaattcaattggtcaacgcaacagttatgtga

SEQ ID NO: 27525 - DNA, 468 bp, Escherichia coli
atgagtgataccaacaaattcaggtcgctgcgtcttgcgcgtgcctggtcccaggagcagcttgctgaactgtccgggatgagcgtgcgcacggttcagcgtatcgagaacggcgatcagccaagcctggaaacactgagtgccctggctgctgtatttgaggtgagcgtggcggatctttccggccctgatgcgcatggcgatgacgctcttgaccagaaaattgccgaagcgaagagcaaaatagctgaggaaggccgtttttaccgatcagtaattacggctgtcgtcgtctgcgcgctgttgcttgttcttaaccactttacggccccggccagcgcatggtcattttgggttgcggggatctggtgtgcgctgctggttattcgtggcatgagaacgttcgttttgcgcgggctgatcagcagatggcaacagaaacgactgaggcggatgctgcggcgataa

SEQ ID NO: 27526 - DNA, 156 bp, Escherichia coli; identical to SEQ ID NO: 11556

SEQ ID NO: 27527 - DNA, 774 bp, Escherichia coli
atgacaagccgcagccgccaggctgcctactcggataatgaactggctgaaaaagcgtggcgtgcccgcctcgaagcccatgatggaaggtcctcatctctgttcagtgaggtctgcagtgagctgcttgcgcgcgttcataccctgggggaccgccgttacattgaattgattaccgatgcgttgtcctgggcgatgacccactttgacgaactgggatataactgcaaaaccggtaaacaaaagctgcagatcatgcccaatatggttggatttcagttcgtattgcgcggtatctgttcccgcctgggagcaccaaatcgcaaagccgacatcgttgtggaccagcagtcacagttcaacaccacccagcgggagctgagggagttctattaccagatacgtgagatgccgtgggtacacggtcccggtttaccggtcatggatgtgacgaacatgccggctgaaccgctggttttccagtcgggtacaaaaagtgcagggctggagctggttgatatatatctctggatcttcaaacgctttatggaagggaaggagttaaccagaccccttacccgcctggtttacaccaatcgcaataccggcaggacggacagtgtctcccttcagtcggtggctaaacgatctaaggagtttctggacaaactgcaggagccaacggcagaaatgatgaaaaaggcgagggaataccgggatcaggaagaggcaaggcggctggaacatcgggtgcaaatcctgccgccatcctga

SEQ ID NO: 27528 - DNA, 444 bp, Escherichia coli
atggttgcaaccaatttcagcaacgatatatatattactcattcattccccctaattaatcttgttggagtcccagcaactacaacattacttggtatatttctaattacaaccgacccagaaccaataatactctttgagcctagcttcaactggccatttacaacagtacagctaccaacaaaagtttcttctccaacagaaacatcaccattaagtacaacattagtagagatattgctacagcagcctatttcattaccatgttcaattaaactcctagtatttattacaacggcatcatgtattctagtatcacggttaagtatacacattttaccaataaaaattccatcacccagtataatgtttggtgatagaatagcagttttatctataatgttaattaagcgtagattatgttttcttatgatgtttaaatag

SEQ ID NO: 27529 - DNA, 249 bp, Escherichia coli
atgaaatacaataacattattttcctcggtttatgtctggggttaaccacctattctgctttatccgcagatagcgttattaaaattagcgggcgcgtcctcgattatggctgcacagtctcatcggattcgcttaattttaccgtagatctccaaaaaaacagtgccagacaatttccaacgaccggtagcacaagtccagccgtcccttttcagattacgttaagtgaatgcagcaaagggacatga

SEQ ID NO: 27530 - DNA, 288 bp, Escherichia coli
atgttgttcatgggaatgctggcggggctgtatccggcagagagggataacctccacatcatccgggtgcgcgcgaagccacgcgtcagtgactgcaatgtcgtcagtgtaaaaccatgtgccggatgtcccgttggccagaaaacgcattttccaggtttctggggtggcggttgtgttgttatctttcatggtgccaccactcattcaacaggcttaatgctgtccaggcgcagtctgctcagactgtcgtggctgccacagcggcgtccagtgcttttgctgtag

SEQ ID NO: 27531 - DNA, 294 bp, Escherichia coli
gtggcgcacgtattcggtgaacgcacgctggccacgctggagcgtcttctgggcctgctgtcggcctttgaggtcgtggtatggatgacggatggctggccgctttatgaatcacgcctgaagggagaactgcacgttatcagcaagcgatatacgcagcgcattgagcggcataacctgaatctgaggcagcatctggcaaggctgggcaggaagtcactgtcgttctcaaaatcggtggagctgcatgacaaagtcatcgggcattatctgaacataaaacactatcagtaa

SEQ ID NO: 27532 - DNA, 216 bp, Escherichia coli; identical to SEQ ID NO: 17121

SEQ ID NO: 27533 - DNA, 183 bp, Escherichia coli; identical to SEQ ID NO: 11598

SEQ ID NO: 27534 - DNA, 243 bp, Escherichia coli; identical to SEQ ID NO: 11595

SEQ ID NO: 27535 - DNA, 1251 bp, Escherichia coli
atgaaaaggaaaatattaattctttccgctgtcctcatttctcctttttcacatgctgagtcatgggaaagcattactaaatccacttatcaaagctctgcctacgctgaaagtaagcaaataaccaatcaggatggctctaagtcaacggtttactatattgatgctgctatgcaggcctccgcttgtcagggtgctaaatccagtgctcagagtgtatttactcaggttaaaccaacttatgagggtatctggcctgattctgaattccgtcttgtttttactggtgattgtacttacagcgattcaccagggcagaaggataaatattggtctttaacggcttatattgttggtgatattcagcgttctgttcctgatgaaaaacctactgacccgacaccagaagaaatttgtgaagcgaagccgccagaagaaggtgtatttaataatgttgattcatatgatggtggtcgttatatctactataacggctgtgaatatgaggctactggtgtcattgtttgtcagggtgatggtactgtttgcgctgcaacatggaagcctacaggtactgtagctgacccctctgataaaccctcaaccccccaaaatggtggtggtgagtctggcggtggtgagtctggcggtggtgagtccggtggcggtagttctggcggtggtgagtccggtggcggtagttctggcggtggctttagtggttccagtctttctaaaggtgatattcagtctgctatcgaaggtgcttcacccaaaatagccagcgatattcatgataaattaacggagaaagacacttcatcagatgataaaaaaaatgccgatgaacaaactaggaataatataaatcgtcttgacgattccattaacaatcttacgcggggggctggccgttttgctgacccttcaggtggtgattctcgttatggaaagggcgactctgaattagatggcgcttctactttggctgattctgaattgggaattgaaaaggattctcacggtgctttatgggaagcatttttaaataaaggtgctatgctgcctaatttacccaatggtaacggctgctctgattttattatttttcccggagaggtttatcagattgatattggttgcgataaattactgactattaaagatgttctttcatgggttttttattgccttacgttctggtatgtctttacttctttaacttcattgcttcgcaaagggggtgagtga

SEQ ID NO: 27536 - DNA, 411 bp, Escherichia coli
atgacccgcgaagacgcctttaaaaaaattcaccaacagcgtgatgattttaataaacagaacgatagcgaggcgttcgcggttaaatatgacaaagaggtttatcaaccggcgattgcggcatgtcataaacagagtgaagagtgttatgaagtgccgattcagcagaagcgagatttcgatatcaacgaacaacggcgacagacttttctgcaatcacaaaaacttagccgtaaattgcaggatgactggataacgctcgagaaagggcaatatccgttaacgatgaaagtttcagaaataaacagtaaaaaagtcgcgattttgatgaaaattgacgatatcaaccaggctaatgaacgctggaaaaaagataccgaacaactgcggcgcaatggggtgattaagtaa

SEQ ID NO: 27537 - DNA, 543 bp, Escherichia coli
atggcattaaatgctgatttttatccataccacagcaatgagcattcacaatataatgcttctgcatgttgtttatatggatataatggttttagaataaatgaagaggctattgtaaaatctaaaatcggtgaaatagcaacaagaatactatcaatcgataatgacatgtcagccttagaattagacgacgcaatacttaaaggtgatattccgaggataagggatttttcaagatcgttgtctaatttatcaagtgaagagcttgatataaaaatttacgaactaaacaaagaaataaaaaaaatagaaaataaagaaagtaaactttcttcattagacttatgcggacttatagcatcaacaataggtgtttacgatgacaatccatatatcccatttggatttgccttttttaaaataatctctagcgtgttaaattcaaatgatattagctcgaaaaacatcgataaaataaaatcaacacttttaggtacgcaaactgaaacattgttaataaaaagaacgaaatccagaatgtaa

SEQ ID NO: 27538 - DNA, 1455 bp, Escherichia coli
atgttatataatataccttgtcgaatttatatcctttccactctgtcattatgcatttctgggatagtttctactgcaaccgcaacttcttcagaaacaaaaatcagcaacgaagagacgctcgtcgtgaccacgaatcgttcggcaagcaacctttgggaaagcccggcgactatacaggttattgaccaacaaacattgcagaactccaccaatgcctccatagccgataatttgcaggacatccccggagtagagataacagacaactccttggcaggccgtaaacaaatccgcattcgtggcgaagcatcctcccgtgttttaattctcattgatggtcaggaggtaacttatcagcgcgccggagataattatggtgtgggactgttgatagatgagtctgcgctggagcgtgttgaggtagtgaaaggtccatattccgtactgtacggttcacaggcaattggcggtattgttaacttcataaccaaaaagggaggtgacaaacttgcatctggagttgtgaaagctgtttataattccgcaacagcaggctgggaagaatcaatcgcggtccaggggagcatcggtggatttgattatcgcatcaacggtagttattctgatcagggcaatcgtgatacgccggatggacgtctgccgaataccaactatcgtaacaatagtcagggtgtatggttgggttataactccggaaaccatcgttttggcctctcgcttgatcgctacagactcgcgacgcaaacttactatgaggatccagacggaagctatgaggcatttagtgtcaaaatacctaaacttgaacgagagaaagttggggtattctatgacacagacgtggacggtgactatctaaaaaaaattcatttcgacgcgtatgagcagaccatccagcgccaatttgccaacgaagtaaaaacgacacagcctgttcccagtccgatgattcaggctctgaccgttcataacaagactgacacccatgataagcaatacactcaggcggtcacattgcagagtcacttttcgctgcctgctaataatgaacttgttaccggtgcacagtacaaacaagacagggtcagccaaaggtccggtggcatgacctcaagcaaatctctgaccggcttcattaataaggaaacacgaactcgctcctattatgagtcagagcaaagtacagtctcactattcgcacaaaatgactggcgattcgccgatcactggacatggacaatgggagttcgccaatactggctttcttcaaagttgacgcgtggtgacggagtatcatataccgcaggcattataagcgatacctctcttgccagagagtctgcgagtgatcacgaaatggtaacatctacaagcctgcgctattcaggtttcgataacttggagggtgatgctgccaacttactgatttag

SEQ ID NO: 27539 - DNA, 516 bp, Escherichia coli
atgtacaggtgcatgagcgccacttgtaccgctccaacctatgaacaactcaccttcaccaactgccgttgcgcccttaagatgaagcacattcccgtaagcagaaggatagccgttgttgtacgcctcatacatttgcaatccagtagcagcaccttgtgttgtaccggtgagcgcagtaacacgccctctggacgtaattgttggtatcgaaatgtccacagaaccatcaaatttaacaccgttgatgtttcttgccgtcgcaagttttgtcgcggtagcagcattccccgtggtgttctggttacctgttgtatttacacctggaagattgatattggccgagccatcaaatgccacaccgccaatcgagcgtgctgttttcaatttcgtcgcggtgtcggcattccctgccagcgccccggtgatcccgccgttgaaagtctggcgtgcactccatgtgttagccgtgctcaacagggggatcttttcaccgctggtaccgagttctcttaa

SEQ ID NO: 27540 - DNA, 651 bp, Escherichia coli
atgaataacatgacaacgaaagagctttttaagttccttcccaaatacaaagctcacaaaaacgttagtgcatcgaaaatcaaaaatgttgttattttcggagtaactgatgccccactttggggctgcatcgaactcgttgaaccaaaaggggcaacagtttgtgttgacgcaatgtttttacaaaaacaccgaccaaaaactggcgggtatctgatcgtttatgaaaacggttatctgttctatgccccggagaaaccatttgaggaacgttatggcctggttaacgacgcctccaaaaatggaaccacggtcatcattacggatgacaacggcgtgatgattaatcttaccgggagcgtaactatttctgctggtggcatcaccacccagcaagaagaaatcgaccttgaagcagccgacttctctgacgcgctaatgtggttgaaggaaggcaagaaagttgcccgacgcgagtggaaaggcgaaaagcaattctgctggttagttctcgctggaagcgtcaatttacacggcattcacgttccttatggtgaccattttgtattgaaagatgcgcaaaatatggacagcgtttggttgccgtctgtggatgatttactggcctgtgactggtttgttgtggagtga

SEQ ID NO: 27541 - DNA, 525 bp, Escherichia coli
atgacaaaatttggaaagctggaagctcatttgctaactcgtaactaccgccatgatatacacccatatagacagtggatcgatgaaagtgaaggagtagttacattccctctatacagatttgatgggatgttggctgggtatcagacatatagaccaggtgctcctaagcagcatagcaatccgaagatggctcggtatttcacgcgatcacatggcaaacagttactttggggaacctatcttcctttaaaagatggcccaatatggataactgagtctatttttaagagcgcagctgtacacaacgcgggcggcaattcgtgggcgctgttaggttcgactttctccgcaggattacgccgtcaacttgcgatgctgccgtatgactttcgtgtaataggtgacaatgatgcggctggtgaattacttgtgaagtctttcggaaaaggttttgtggccccggatcttgacgagctacaaccacatgaagtgtctcatttgatttttagccatagccaataa

SEQ ID NO: 27542 - DNA, 213 bp, Escherichia coli
atgattaatggctatcagccgcataccccagaaatacaagggagcgaggggcttaaaccaccactagcaccacggaacgcatcattacggcgagagttaatattaactttgtcgcccgttctggctgcccgccaggattgggtaagtaatgatgacctggcagaaaaaatcacatcgctggtggataaaattctgcataaagctgatctctga

SEQ ID NO: 27543 - DNA, 306 bp, Escherichia coli
atgaccggcgagctttattttaaaatggcacgggagcggcgtgtgcatctggatcggatatttcatctccagaagagagtagaagaactggaacgtcgtctgaactgttatcctgttgatatggtgtctgcaataccgccgattccaatagaaatgcagatccgcctatggatggaagaatatggaatgccgtgggagatatttttctgcttcgaccataaacagtgggtagatgagctggataatagtttcccatatttcacagagaacacatgcccagtatgcaggaagagaaaggaatcatga

SEQ ID NO: 27544 - DNA, 285 bp, Escherichia coli
atgccaacgaaagctgagttacaggcgcgcatagagattcttgaaaaagagaatgcgagtctaaaaggaatgctggcgcgggcggaaagggaattatcaggcaaattattgccagaagagctgccaccagcagatatacctgatcgagtgtcctggtggatgaagtatttccgtgcaccgtgggaggcgttttggtgctacgaccatcgcagatggtgtgatgagcttgatagcagtttcccctattttgcggaagggaactcttgccctgaatgtaggagttaa

SEQ ID NO: 27545 - DNA, 450 bp, Escherichia coli
atgcaagaagaagcaaataaaattcttgttgatttattgaagaaggccagcgatggaattgattccgccattgcattcagtcaggctcagattccggatgttgttcatcagttgctggtatggaatatggttgatagcctgattaaaacattaatagccatttcaacaatcccgctggttttctggtttatgaaaaaacagtaccaaaaagttgaaattggtatattcgataatgaaggatggtcatgggagaagggaaagcctaaatacaaaccgactatgatttgggaaagtaacggtgagattagttttcttatcttaccattagcagcagtttttgttctgtgggtaagttttattattgctgtagtaaccaatatgacatggttaaaaatctggttggcacctaagttatatctaatcgaatacgcagcatcactaattaaatag

SEQ ID NO: 27546 - DNA, 861 bp, Escherichia coli
atgaaagagttgcaaaaaattaattcaataatggaaagattaagtgctcttgagcgtaagctggacgattgtggaaagctgtgtgttgaaaagcaaaatgagctttaccgggaattttttacaatcgtaagtgagctgatgccaattgttaataactgcctgatgacatccagattttttaatgtcgatgctactacatccagaaaattttctgtgaaaattcaagaaagagtttctggtagtgtgacaagagagatggctgaacagttggtggcaatgagcaataaaacaaaaagaaaaaaggcattgcttgtaacagcaaatcagctttcagggcgcgttgactttcaggtcagacagggtgggcgtgtactggtaaatgatgcgttcgttggacgtagctttagtccttactcgataaaatatgatgttgatgcagatgatcaggatatcagcatttcctggaaatctgagacagcagggattgtattaacagcagagttgttgagtgatgataaaaatgatgtccagcatcatttggacgaaaagaatcatatttctgaaatttgtatgaagccacgcagcggaatgactttattgtcacgcactcttgctgctggcttttctgcaccggaaaaacgtgtgcttctggtagtgcctgaagatgcagatattcgaccactgaatggctgtgatgttattagtgcaaaaacattgcatacccgcgtcattcctgtaccggatgtggtcattattgatgatgttgagaaatgcaagtctgtttcctcaactgccacaatcaagcgaattttacgttgtagcacgtcggctgttgtattccggaagcagttacataactaa

SEQ ID NO: 27547 - DNA, 312 bp, Escherichia coli; identical to SEQ ID NO: 21462

SEQ ID NO: 27548 - DNA, 156 bp, Escherichia coli
atggacaaaaaggcattgctttttgaaatgatacgaaaacggagcgaaaagagcttttctgatggtggtgatgggcttttgaaagtggttgggcgaggcgtaggaagggaacataagtatcggactacaaagatatttaaccagttaatccattga

SEQ ID NO: 27549 - DNA, 225 bp, Escherichia coli
atgaactgtaacaaaaatgaagaaactcgcctggtttggacggtagtaatcggagataaaaagggcggtgaagagcctcattttgattattctgtggctttgcaggctctcatccttgaagcgcagagataccaacaagagatgcagaagaaccctcaactggaacctcgaccaattggcctattctgcgagcgagtatcagcggcggaactccctgatatctga

SEQ ID NO: 27550 - DNA, 1902 bp, Escherichia coli
atgagcaaagtaaaaatcggtgaattaataaactcacttgttagcgatgttgagtcaatagataactctgaccgtcctcaaggggaaaaaacaaaaaaaataaaggctgttgcattaaaatttaaaaatgcattatttaatgataagcgaaagtttagggggaaaggattagaaaaaagaattacagccaacacattcaatgcctatatgagcagggccagaaaacggtttgatgataaacttcatcatagctttgaaaaaaatatacatcgcctatctgaaaagtatcctttatataatgaggagctattgtcatggctttctctacctgctgccgatattcgccagagaatgtcagctttacaggcaaaattaaaattaattctccctttatcagaagatttatctaatatcagaattggtgataacaaaagtcataataagttattaaaattatcaaataaatataaagagtggcaattcgccatatctgatttaactagcgataactggaaagataagcgcgattatttatataaattactacagcaaggatctgccttacttgaggagttgaatcagctaaaagttaaccatgagattctctatcatcttcaactaagccctgccgaacgcgcatctatccagcaacgatgggcggacgttctgcacaataagaaacgtaacgtggtggtcattgattaccctaaatatatgcaagctatttacgatattataaatagccctgctacattaaataatctaaacactcgttcaggtatggctcctttggcatttgcacttgctgcattgtcaggaagacgaatgattgagattatgtatcaaggtacatttactgtttctggtaagtataccgttgattttttaggccaagcaaaaaaaagaacttctgatgatataaccagaaaaatatatacattatgcgaagcaaaaacatttgtttatttaataaatgtacttcgctcatgcccagcagcatctgattttgatgatgtcgttaaaggttatggagataacgacacacgctctgaaaacggacggattaatgccatattagcaaaggcttttaacccgtgggttaaatcatttttcaaagatgaccgccgtgtttataaagatagtcgtgctatttatgcccgtattgcgtatgaaatgtttttccgcgtagatcctcgttggaaaaacgtagatgaggatgttttctttatggaaattttaggccatgacgatgaaaacactcaattacactataagcaattcaagctggccaacttctcaaagacatggaggccaaatactggaaacgaaaataccaggctggaagcattgcagcagcttgatgacgaaatgccaggattcgccagaggagatgccggggttcgtctgcataacacagttaagcagctggtagagcatgacccctctataaaaatcacgaacagcactctaagagcattcaaatttagccctacaatgattagtcgatacctggaatttgctgctgatgctctggggcaatttgttggcgaaaatggacaatggcagctgaaaatagattctccagaaatcgttatgcctgacgaagaagagctggaagcaatacctgaacagacggatgaattatcagaggatgacgatctggatgacgacgaaattgagatagaggaagaggaagaggaagaggaagagagcgtagaagaacagcaaccgcccgcgccttcttcacctgtatctaagccggtatttaagcctgtgagaaatattggtgatggctcatacgttgttgagtttcattataatggccagaattatgcgtggtcaggcagtgcaaacagccccatgtcagcaatgcagttagcatggctgacatattttggctaa

SEQ ID NO: 27551 - DNA, 783 bp, Escherichia coli
atgagcgcgttagctgtattttcgtttcaggaagagcatcaggttcgtgtagtgatgattaacggtgagccgtggtttgtggctaaggatgtatgtgatgctttaagactcgttaactcccggaaggcgctaatgtctctggatgaggatgaaaagggtgtaactttaagttacacccctggcggagagcaaaagctaaatattatttcagagtcaggtctatacaccctgatcctccgctgccgtgacgcggtgaagcaaggcacaacagcttggcggtttcgcaaatgggtaacgaacgaagtcttgccctctattcgcaaaaatggagagtacgtttacatcgagcctgagccaatgcgagcagcagagccgttgaactggaggcagaaagagtatctgcgagggctgattaacgatatagcacaaagttttcagtaccgaaatgcctggattagcggtgtatggttagctttgcgtcgggcgtgtcgtaatccatccccgaaccccataactgttgatgatttgccagcaattacggcagaactgcgccggattttgacggctgctgagtcggcattggggaacatgcgcacgtatgaacgagagttgttgcgtgatgttgttcgtgggggtaggcggagtatgtcatgtggtgatttgcccatcaccgatattaactctgatctggaaaaggcgttacccgcgcattttgaactggcagttcaaaaacttgagcagttatccgcgcagttaaagccagcagaaatcactaataaatag

SEQ ID NO: 27552 - DNA, 234 bp, Escherichia coli
atgaatcaggtaaaaatgaacactgttggcctgctggaatcgttggatgaacgtctggctcaggtctatgcgctcgtatcatcagcccatcggacaatctccagttgtgaggcgtcgatttatctctcagaagcagggaaactccttcaaattgcgtgtgagctaacacacgaagcacaggggtattcagcatctctctcgtcgcaattgcagcacaataaggaggccaaatga

SEQ ID NO: 27553 - DNA, 165 bp, Escherichia coli
atgttcaaattcaaatttgcggcagtcgttcgcacagacaaaaagtcacatatccatcatctttccaccatcgcgtcatctgaacgggaagctcgtcgccagttcgccagccggtttgtcctggtattgtctgcccgtattccggtgcgcgaggtggctgcatga

SEQ ID NO: 27554 - DNA, 225 bp, Escherichia coli; identical to SEQ ID NO: 27549

SEQ ID NO: 27555 - DNA, 3996 bp, Escherichia coli
atgacattaaacgatttctatgcggatcgctttggcagcgatccgttctcgctaattgaagcagcacgggatgaactaaccgagctggcacagatggctggtatcaactggcctgcctgttccgacaacatccaactcaaccctcgcgggggggttgagcgttactcttcatacaataaaacatctccagaagctctcgaaaagagcctgaaaggacgcgtagaaatttactccaggctggaacacagcaaagggattgattacccgttcattaacttcgtccataaaggcagcgatgctggctcatggagcggtttctccttcctgttttctgaatatcgccgtgagcaacaacggaataatgcgaccgtggtcgcacaaccggaagaagaacgggaaagaatagaacgtcaggccgaagcacgtcgtcgccgtgaagaacaaaaacgaattaatgacctgaaaaacaaccaaatggaccatgaacgtttgctgggatggctggcattccacagcgcgtgggaacatgctcaggctgaagacggctcatggccatatgcgattaaaaaaggtattcgtgacgtttttagttcatgtgatgtgcgtcgcgtgaccagtcacgacagtgcgaaatggagccgggggccaaccacatatatggctatccctctggctcacctggacggtcgttatgatggtcgtattgtgggttggcagcgaatcgacaaacaaggtgggaaataccagaccagcgcagtaaccagcggcgatttcgtcggtgcctgctttgttatcggtgagctgaaaggggcgcaaaacatcgctgttacagaaggttttgctactggtgcatccatctggcttgccacgaaaaaagataaacgctttgacgctgtggttgtcgctgtatccgctaacaacatggttcatgttgtggaacaactggtaaacatgtacccggcggcaaaaatcacctgcgcactggataatgaccggaaatctgccacagaaggaaaagggaataccggcctgcggactggctatgaaatcttatcgaaattcaacgatgtccgctgcgtctatccaacttttgaagacgatccgcaaatggagtgcagtgacttcaacgacctgcacaaactacgtggacttcgtgaaacagcacgtcaactatttgcaacagcaaaccgcctgaaaaccggtactgatttgctatctctgacgctcaaccgcctgaagacaattaagcgggataaccgtcgtacttttgccaaagagctgctgagagcggtggatattggcatgctaacctgcccggttcctaacagtccgtcagatttatttaacatgttctgcatcgttctgcgtgaaatgggactggaaaatatctatcgcgctacggtaaaagaccacattgcccgtcgcctgaataaaaagtgccgtattgcccaggctccgcgctctttcagcgaacgcataactgatcccaataaacgccctcaacatatcacctataagcgttttgaaacttcggtaatgaccgatgatgtcctgaagtacgtgcaatcactacaggggatagtcatcgtccgtgctggtatgggttccggcaaatctactggattgttacgaccgttaatgcatagctcagaacgtggtatctctgttgctcaccgtgtctcccttattggtggcctgtgggaaatgatgacagaaggaaaaggtgtaaaagccgatatcctgcactatcaggaccctggctatcaggaaatggctccatacgccagtaaactgaccatctgcataaactcgattgttaaaaactgctggcaaccgttgatgcgccagcacgactattttggctttgacgaggccacgcaagggctacgtgccgttctttccggtcgggctatggaaaacccggttgctgtattcaatacgctaattgacgcgctggccagaacggaacaacacccaatcatggtggatgctgatgcgaacgatctactggttgacctggctgaactggctatgaaacgccgtgaagaactaggtttaccggcatggctgcagatccacgtaattgaattacctgttgatgttcgcaaccgcgaaacaggtgagccaatccgggttttttatacagaaaaagatcgcatcatgaccgaggtggtgaaagctgtatcggatggcgaaaaaatcatgttggccaccgacagctccacctttgcagaagatgtgacagccaccctgagaatgcattttcctggtaagaaatttctgtgtgtaaaccagaaaaacaaaccagagccagaagttgaagcatttaccaatcaaccgaaaaagatggtcaaaaaatacgacggcctgatttatagcccgtctatttcatccggcgtgtcgattgagcaaaaacattttgaccgtcatttcggcatgttctgtggtgaagttgtacccagcgacgcagtgcaaatgctacgccgcgaccgtacagcaaaagaatttattatcggctttgataaagctcgtgcaaaacgtgaaactgacccgcaaaaaatagaacgagcattcgcccaggcattgcttgctaccgcaggtatgaacggtgaactgacggatgtcattttcgatggcgaccgtatatcaatgggggtggccaataccgactttaccaggatgaaaattaaagcagccgcaattgaagcgactgcgcgtaacgactacgccagcaacatgatctgcatcatgcacagcgacggttataaggtatcgccgctggccaccgattatgctgcgaatgatatcggtaaagatctgcgtaaagaagcgcgggatattgtgtgggaacagacactggatctgcacctcaatacagaaactccacaagaatcagagcgtgaagaactgctaaaaaaacgcgcgctgacgcttgaagaacaggcaaaacttgtccgctgggatattgaaaacgaactgaaactaccggttgaagaaggcacactgaaattctatttcgatggtgctcgagacaaagttcgccgctatgaaacaatgcttttagatgaggtaacagctcgtcgttacgaccgggaagaagcagccatcaattttacctacgcataccgtcaggcgggacagtggcaatattttgtagtgaccgcgatgactcgcgagcaggctgatgatgtctttaaaactaaattccctggaataatcgatcacaaggtaaaagctactcctactgttgaagtcggggcgcgcggtttctatgcgcttaaatcagcaactctccggcagtactttatcgactgcggtatcaaccctgagactatgaccggcgaggcgactcaggagcgtctcaaattcgctcgagataatctcatgacagccgaacgccgtgacctgttgaataacgttctgcacattggtggttttatgacgccaaaagggaagcctaaagtgccggaagcgttgtttaaaaacatttgcgactctcttggccttaaaacaggtaaacgtcgcggcagagacggcgataagcgtccaaccttgcgttttgttgagcctgaatcagcggcatttatgctggatattcttgttcagcgtcagaaagatggcctaaccctaaaaacgcgtaaagccgagaagacagccatcgaaatggatcgcgatttggatctcaatatatatatggatgataaaacgcgatccacaaacgagcaggttcaaaacgcccctcattcagtaatttctgaggctttggccgtgttgccagtggctgtacctgagtcctgggcgatgagtgcgctttccagtgaggagttggccactatgtcatcatggtcatcagccagcatagctatgacgtttgcatccctgtacctcacagagttcatggatcacctttccagcaatgagctgcggcggttacgtgaatacattacggggaatagctcatgcagctacgaagagcagggcgctttctatgggtaa

SEQ ID NO: 27556 - DNA, 711 bp, Escherichia coli
gtggagcttgagtatatacgcagctgcgtctctacggcattggctgatgttcattatcgccagcgtggcattctggaggtccagcttgagcagatgcgtctcggtagatcaggacggtttaacaataaaccagtccggtcaatcattgtgggggatgataactcatacgaagtgtccgttcctgctgagccggttagattccatcaggggaaaacatttaaacaatcatcaatgttgctcactgatattgattttcagagcgccagctggcgcagggctattggtcagttgaataacgaggaatcagcctggctttattattgctacggatgcaagcctgattacaacaatgatgtgattgtttgtcagtggttatggcttgattttctggttgctcattcggggggcggctttaaaaaaatgaaggcctccacgaaaaaagccatgcggaaattgatttattacgcggcacaacaggttaaatcagaacttacgtgtgctgaggcagttgatgagagagaacaggacaggcatctgagttttctactgaatatatctattgatagctggagacaagattataaagaacgctggcttttaattaagtcgcgatgtctgagcttaaatcgagctgcattattaaatgcggcggagaagcgcagtgaaatcatcaaacgccatcgggcaggaagtgccattctgcctttgtaa

SEQ ID NO: 27557 - DNA, 600 bp, Escherichia coli
gtgactaatcagattatttacgacaggaaacggtctgatgtaatgattgaccttgaaacaatgggtactaacacatgtgctccaattgtttctatcggggcagtgtttttttctccagaaagtgaggaattaggtcctactttttatgtgccagtgaatctcagaagctcgatgttgaatggtggtatcgccgatggtgataccattttatggtggttgaaacagagcaaggaagccagagccgctatttgtactaatgatgcccttgatattaaggatgcactttttgaattatcacactttattacttgccatgcatgtaatttaaaaaagttgaaagtatggggaaatggagcaacgttcgataatgtaattttacgcggtgcttatgagcgcgttggcttagcctgtccgtgggaatattttaatgatcaggatgttcgaacaatcgttaatcttggtcagtttattggttttaatcctaaaaaagatatgccatttgatggcgaacgacacaatgccctggctgatgctattcatcaggctaaatatgtatccgcaattttctcccgtcttgtaaaagggcaaggagaatcgtaa

SEQ ID NO: 27558 - DNA, 420 bp, Escherichia coli
atggcaaaggcttttacaccagaacagagggaagaactgaataaacaaattgtggaactcgtgcgcctgaatggacgaggaacggttaggcaacttgcggatgaaactggtattagccggtgtgctgttagtcgtttatcaagagagcttgctgccagtggtgatttgtatatctctggctccgggatatttctgtctgcacaagcacgcaaggactggcaaaacgcccgtaaaaaactatcaagagtaaagccgaagaaatcggtagtggttgatccagaccttatctggtcattacctgacggagaaatacgtcgttacgacaggcgcttgaacatgatttgtcacgattgccggaaaagtgaagttatgcagcgtgtgctggctttttatcagggaaatttacaggaggtggcgtag

SEQ ID NO: 27559 - DNA, 222 bp, Escherichia coli
gtgaataaagcagagttatttcagaaaatatcggctctcgcgactgaatgccacgctatagcatctgagcttgatgttggcgatgaacgaaccgagatgttcgaaatatacagtgtgctgcgcaatctctgtcggcgtggctacgccactcaagtagggcgaatgactaacccactactctcatcctgtgatgaggatgactcggatgaggatgacgaatga

SEQ ID NO: 27560 - DNA, 531 bp, Escherichia coli
atgatgcataaagcagtagccggtgagtttcagaaggaagtcgataatactaccgttctattggacgatattttaagcattctcgcgctgcttgaggctggcgattggtcagaacattgcactaaaacagagctaggcggtcggcttgaaagagagattacacgacttattggtgatgcgcaggaagccactgtcactggctatgagttaatcgctgaagcctggcgtttgatgggtggacaagaccctaaaaccagcgattggcatagcaaggcttcgaagtatttaaattccaatattgtagaaaaagttgatgatgaccgtattgaggccgttaaggctgtgttgcgtaggctggctggcaactctccggtaactccggatggtcatgttcagttttctgtttcacttcctgcagcgtttggtggagataaatattttattgatggtgtatttcaacctttgagatatgagcgtgactgtgaaagggcggttgtggccgctggcggtgtagttaattgggttaagtaa

SEQ ID NO: 27561 - DNA, 327 bp, Escherichia coli
atggcgctgacaccggcagaacggcaaaggagacgcagggaacggttgaagaaggaaggcacatcaagacgggactggattctagaacctgacgagttacgtatgttgggggaaatttgtgtattgcgtagaccagggcgagttccatattcagagaacgaagtcatcggactgctgatcaggaaaaactataaggagttgcagaaacagctatctactacttgtccgcgatgtggtcaaaaaatgcctgtttcagaatgcatttttgatggtgaaggctcatgccaccttacaaccacgaggctgaaacttgcgctcaaagtgtga

SEQ ID NO: 27562 - DNA, 156 bp, Escherichia coli; identical to SEQ ID NO: 27548

SEQ ID NO: 27563 - DNA, 288 bp, Escherichia coli
atgaaagcgaaaggcatcccgtttaacgaagtaaaagaaaaacttctcaacactccagaagccatcaaaggatatgaagaggccgataaagagctggagatggtcgaaatgttatacgaaatgagggaaagagcaggtttaacgaagtcagctctggctgaacgaatgggattgcgcccgtcagctatcagccgcctggaaagcaatcctttaggggcaagcatgaaaactttatcaaaatatgcccaagcatgcggtgcaacgattaatattaatgccgtctattga

SEQ ID NO: 27564 - DNA, 312 bp, Escherichia coli
atgtttaacgtaataacccaccctgcagcactggatgaactgcttgaactaccagatgatttgcgaggtcgcatgaccagattaattgagcgactggagaaggaaggcaacaaactgaagatgccccatagccgtgtaataggtggagggctttttgaactacgagtaggggataaaaacatcgcaagaacgctgtacgcctacgcgactggtaacgaaatttatctattgcatgcatttgtaaaaaagacacagaaaacaccggtgaaggctatcgaaatcgccagaactcgcctgaaggagatgaactga

SEQ ID NO: 27565 - DNA, 222 bp, Escherichia coli
atgaattatcaaggtaacgaaaaaatgcgcgacgacgttgcggagatagctaacgaactgtatgagttgtggcagaaggttgaacgtttcgaaaaggaatatggtttcaacagtaccaacctggcagaccgactggctggtcgcttagttgggactatggggccaaaactggctgagttgaaccgctttatggctgatgttgatttccagtttcaagattga

SEQ ID NO: 27566 - DNA, 228 bp, Escherichia coli
atgaatattaatgaaattcgtggaaatatgactgaagcggccctgagtgtggaatgtgttatgcgtggatacccacgcatttccctgaaagagttaagcgaagcctgttttttgagtcaagctgccgttgaatttatcatcgaacagatgatctgttttggggttgcaaagcgtagcgggtctggtcgatattctttgaccgatgaatataagcaggcaactttctaa

SEQ ID NO: 27567 - DNA, 1122 bp, Escherichia coli; identical to SEQ ID NO: 21459

SEQ ID NO: 27568 - DNA, 273 bp, Escherichia coli
atgaagatggatgaacgatacagcagcgcatcttatggtagtgctggtcttactgcgttctttgccagcctgtcattgcaggattggggcttcattatcggtgtcgcgttcagcattatcctcggtgtacttacataccggctcaataaacgcgagcagatgaagcgcacgaagatattgcaggacatattggataaaactgatgccaataatatttccgccacggcgatggttattggtgaattgggaaagagagcaccgaaggaaatatga

SEQ ID NO: 27569 - DNA, 498 bp, Escherichia coli; identical to SEQ ID NO: 21460

SEQ ID NO: 27570 - DNA, 468 bp, Escherichia coli; identical to SEQ ID NO: 20547

SEQ ID NO: 27571 - DNA, 312 bp, Escherichia coli; identical to SEQ ID NO: 21462

SEQ ID NO: 27572 - DNA, 861 bp, Escherichia coli; identical to SEQ ID NO: 27546

SEQ ID NO: 27573 - DNA, 450 bp, Escherichia coli; identical to SEQ ID NO: 27545

SEQ ID NO: 27574 - DNA, 546 bp, Escherichia coli
atggaagtcaacaaaaagcagctggctgatattttcggtgcgagtatccgtaccattcagaactggcaggagcagggaatgcccgttctgcgaggcggtggcaagggtaatgaggtgctttatgattctgccgccgtcataaaatggtatgccgaaagggatgctgaaattgagaacgaaaagctgcgccgggaggttgaagaactgcggctggccagcgaggcagatcttcaccccggaacacttgaatttgagcgccatcgcctgactcgtgctcaggcgacggcgcaggaactgaaaaatgccaaagaatcggctgaagtggtggaaaccgcattctgtactttcgtgctgtcgcgtatagcaagggaaatatccagtattctcgacggtattcctctgtcggtgcagcgacgttttcctgagctggataaccggcatattgatttcctgaaacgggatatcatcaaagccatgaacaaagcagccgcgctggatgaactgataccggggttgctgagtgaatatatcgaacagtcaggttga

SEQ ID NO: 27575 - DNA, 210 bp, Escherichia coli; identical to SEQ ID NO: 7061

SEQ ID NO: 27576 - DNA, 675 bp, Escherichia coli
  misc_feature (483)..(492): n is a, c, g, or t
atgaataccatattgattggtagtaagtcttttgacaataaatatgtggcagaaatcatttctcatttacatacaaaaaattttggcactgaactggctggttgtagtgagaaaattgaaaccattataagaaacaacgcaagaatcgctgcagtattactggatttggatgattcgaatgatattcttgacaaaattcgcatgctgaatgaacatctgccagtcttcttacttaagaccgatgatgttgccattaaaaaattttgttttgattcattcgacggaaatgtacatcttattgattgttgcctttattctgttgacgaaattgttaataaaatccagaaaataattaatgactatattgatgcaatattaccacctttaacaaaagcattatttaactatgtgaaggaaggtaaatatactttctgtacgccaggacacatgggaggaacagcttaccagaaatcgcctgcaggnnnnnnnnnnatatttcagtgtctgtcggagaactggggtcgctgcttgatcactcaggacctcattcagaagccgaaaagtatattgctgaaacttttaatgctgacagaagctatattgttacgaacggaacgtcgacagctaataaaattgttgggcaattctccgtacctgcaggatgtactgcactga

SEQ ID NO: 27577 - DNA, 1167 bp, Escherichia coli
atgtctttgaaaaagttattgcaagattgtgttacgagaggtcaagaaatgacccaagcaattgctatcgctcaattcggtgatgatagtcctgaagctcggcgtatcacccgccgatggggtataactgaagtagcagatttaattggtgtaactcctcaagcaattagagatgctgagaagagcgggcgtttacctgcacctgactttgaaatgagaggaagaattgaacgtcgtgctggttataccatagatcaaatcaacagtatgcgagcagtttttggcaacccaaaccaacgaccacaagataaaaaccctgttgtgcttgccgttatgtcacacaaaggcggtgtttataaaacatcgtctgcggtacatcaagctcaatggttagcattacaaggtcatcgtgttcttttggttgaaggtaacgatcctcaaggcacggcctctatgtatcacggttatgttcctgatttacatatccatgccgaggatactttactgccattttacttaggagaacgcgataacgctgaatatgctataaagccaacatgttggcctgggctagacattatccctagctgcctagctttacatcgtatagaaacagatctcatgcaatatcatgctcagggtaaattgcctcatcctccacaccttatgctgcgcgcagctattgaatcagtttgggataactacgatgttatcgttatagatagtgctccgaacctcggtacaggaaccattaacgttgtttgtgccgctgacgttattgttgttgctacacctgcagaattatttgattacgcttctgttctacagtttttcacaatgcttctcgatctattggaaagcgttgacctaggtggatttgagccaaccgttcgcttacttctgactaaatatagtctcactacagggaatcaatcacgatggatggaagaacaaataagaaatacatggggatcaatggtattacgtcaggttgtacgcgttaccgatgaagtaggtaaaggccagataaaaatgagaacagtatttgaacaagcagcaaaccaacgttcaacattgaatgcatggagaaatgctgtttctatatgggaccctgtttgccgagaaatttttgatgatctaataaaacctcgctgggagaacgaataa

SEQ ID NO: 27578 - DNA, 213 bp, Escherichia coli; identical to SEQ ID NO: 7905

SEQ ID NO: 27579 - DNA, 819 bp, Escherichia coli
atgtttttaagaatatctccggaactgtatttgaaaagactggttgttggaggatttgaacgtgttttcgagattaaccgtaacttcagaaacgaaggaatatctccgcgtcataatcctgaatttacaatgatggaactctatatagcttatgcagatttccatgacctgattaattttactgaagacttattcagaacagtagctcaaaatgttcttggtaccacgcttatagaatatggcgatgaattgtttgattttggtaagccatttaacaaactcaccatgcgtgaatcaatcattaaatatggaaacggaattacactgactgacattgatgatattcagagtgcttctctgacagcaagaaaattgggaattactgtggaaccatcatggggggtgggccgtctgcagtcagaaatatttgaagaagttgttgaacagcatcttattcagccaacatttatcactgaatacccggcagaaatatcaccattagctcgtcgtaatgataaaaatccattatatacagatcgatttgaattttttattggtaaacgtgaaattgggaacggtttttcagagttaaatgatgcggaagatcaggcggaacgattcaaagagcaggtaaaagccaaagaagcaggagacgaggaggcgatgtattatgacgaggactacgttactgcacttgaatatggcatgcctccgactgcaggtctgggaattggtattgatcgtatgataatgttatttacaaactgtcataccattcgcgatgttattatgtttcctgccatgagaacatcaaagtaa

SEQ ID NO: 27580 - DNA, 546 bp, Escherichia coli
atgaaggttaataaaaagaaacttgccgaaattttcaacgtggatccgcgaacgattgaacgctggcagtctcagggactcccttgcgtctccggaggtagtaagggcgttgaatctgtatttgataccgccatggcaattcagtggtatgcgcagagggaagctgatatcgaaaatgaaaaactccgtaaagaggttgaggattacagggctgccagcgaggcagatctccagcctgggactattgagtacgaacgccatcgacttacgcgtgcgcaggccgacgcacaggagctgaaaaatgccagagactccgctgaagtagtggaaaccgcattctgtactttcgtgctgtcgcggatcgcaggtgaaattgccagtattctcgacgggatccccctgtcggtgcagcggcgttttccggaactggaaaaccgacatgttgatttcctgaaacgggatatcatcaaagccatgaacaaagcagccgcgctggatgaactgataccggggttgctgagtgaatatatcgaacagtcaggttaa

SEQ ID NO: 27581 - DNA, 630 bp, Escherichia coli; identical to SEQ ID NO: 14613

SEQ ID NO: 27582 - DNA, 1275 bp, Escherichia coli
atgtccagaaataataaacagtggttgggtttgccactgcatctgatatggggatatatcgccatcgcagtatttatgactggtgatggtttcgaactcgcattcttatcgcactatattaaatcgttaggcttcacacctgcggaagcctcttttgcctttacgctctacggcctggcggctgccctttccgcctgggtttctggggtagtagcggaaatcatcacgccgcaaaaaaccatgctgattggttttgtcctatggtgcgtattccatgttctgtttctggtctttggattaggacaggcaaactatgggttaatcctgctgttttacgggattcgtggtttagcgtatccgctatttctctactcatttatcgtcgttattattcataacgtgcgtagcgaaaattccagttctgctctgggttggtactgggcggtatattcagtagggatcggtgttgctggcagttatattcccagttttacgataccgattatgggtgaaatgggaaccttatggctggcactggcgttctgctttgctggcggtgtcattgccatgatctccttgcgtcatgttaaaacgcctggacatatgcataatttaactccccgtgagaagtttgcagaattaagtcgggcagtaactttactttataccaaccgcaatatttttctctccagtattgtgcgcattataaataccttatcgttattcggttttgcggtcattatgccaatgatgtttgtggatgaactgggattcaccacctctgaatggttgcaggtctgggcggcatttttctttaccactattttctctaatattttttgggggattgtggcagaaaaaatgggctggatgcgtgttattcgctggtttggttgcctcgggatggcagcatcaagtttagcgttttactacatgccgcaatactttggtcacaactactggatggcaatgattccggcgattgctctgggaacttttgttgctgcatttgtgccgatggccgctgtcttcccggcactggaaccaaaacacaaaggtgctgcaatctcggtttacaacctctctgcgggtatgtctaacttcctggctccggcaattgccgtggtgttattaccgtggtttagcactatcggtgtggtcattgcctatacagcattgtatctattggcctttgtcctttgcgcattcattcgcgttgagcagccaggattcagttctgcgccagtgactgagaaggcattgaatatctcctga

SEQ ID NO: 27583 - DNA, 1605 bp, Escherichia coli
atgacaataaccaaaaccgttattggtgttgatgtgggatcaggcagtgtccgcgccgggatttttgatctcaacggatctctgctatcccatgccacagaaaaaatcacgactacgcggcgcagcggaagccgcgtggaacagtccagccaggagatctggcaggcggtctgttcatgtattcgtaatgcgctcactctggcagacgtttgtgcacaaagtgtggcaggcatcggttttgatgccacctgttctctggtggtactggataaaaacggtgatccattgcctgtcagcccggaaggagatgcaaagcaaaatatcattgtgtggatggatcaccgcgccaccgaacaagcagagcgaatcaatgccactcaccatccggtgctgaactacgtcggtggtaaaatttcgcctgaaatggaaacaccgaaaattctctggctgaaagaaaatatgccagagatctacgaacgtgccggacaatttttcgatctggccgattttctgacctggcgggctaccggtgatttagcgcgttcagtatgcactgttacctgtaaatggacgtggctggcacatgaaaatcgctgggatccagattatttccgcaccattggccttgcagagttagcggatgaagattttattcgcattggtcatcatattgtttctcccggaacaccttgtggaaatggtttaacagcacaagccgcggcagagatgggattactccccggcacacctgtcgctgtagggttaattgatgctcacgctggtggcatcggtacggttggcgtagaaggtggagcgctgaacaatctcgcgtatgttttcggcacttcttcatgcaccatggcatctaccacttctccctcgtttgtaccgggtgtctgggggccgtattacagtgcgatggttccaggtctgtggttagttgaaggcgggcaaagtgctgcgggagcagctattgaccagctacttgatttccatccggctgttgaagaagctcgcgaaatggcacaacgtgtgaatcagcccctccccgtctggcttgctgatcgaatcctcgaaaaaacggcgcaaccatcagatgctgtcgccctggcgaaagggctacacgtggtgccggaatttctcggaaatcgcgcccccttcgcagatcctcatgccagagcggtaatttgtggcctgggtatggagcgagatctggataatttactcgccttgtatatcgctggattatgcggaattggttatggtctgcgccaaattctcgacgctcaaacagcgcagggagtagtgagtaaaaatatcgttattagcggcggtgccgggcagcatccactggtacgacaaattctggcagatacctgcggtattccggtcattaccacgcaatgctgcgaaccggttttattaggctcggccattcttggtgctgtcgccggaaatattgcaccttctgttggcgaagcgatgcaacaattcacccatgtggataaatattattatccgcaagaacgctatcaatctcttcatcatcgtcgatatgaggcctataagcagttgcagcatactgcaaaattactcagagactaa

SEQ ID NO: 27584 - DNA, 750 bp, Escherichia coli
atgaatcactctgtgccctctatgaatactccccttaatggcaaagttgcagctatcactggcgctgcgtcaggtattggcctgcaatgtgcaaaaacgctgctcgatgcaggagcaaaggtagtattgattgaccgggaaggcgacaaactgcacaagattgtcgctgagttaggcgaaaacgcgtacgcgctgcaactcgatctcttcaataatcagcaagtcgataacatgctggcggacattatcgaactggcgggtgggctggatatttttcatgccaatgcaggcgcttatattggcggcccagtggctgaaggtgatccagatgtctgggatcgtgtgttaaatctgaatataaatgcggcgtttcgctgtgtccgtgcagtcctgccgcatatgattgcgcagaggtcgggcgatataatttttaccagttccatcgcgggcgtcgttccggttatctgggaaccgatctacaccgcgtccaaatttgccgttcaggcattcgtacacactacccgccgccaggtttctcaatatggcgtgcgtgtgggtgcggtgctgccaggaccagtagtcactgccctgcttgatgactggccaaaagccaaaatggaagaagccctggcaaatggtagcctgatgcaaccgattgaagtggcggaatcagtattgtttatggtgacccgctcgaaaaatgtcaccgtgcgagatttagtgatcctgcctggcagtgtcgatctgtaa

SEQ ID NO: 27585 - DNA, 1032 bp, Escherichia coli
gtgacacgcgttgagaaaacgaagaaaacgaccatttacgacctggcagaattaaccggcgtttctgccagtgcggtaagcgctattttgaatggcaactggaaaaagcgacgcatcagcgcaaagctggctgagaaggtcacccgtattgcggaagagcagggatatgccattaatcggcaggcaagtttactgcgcagtaaaaaatccaacgttattggcatgattgtgccgaaatatgacaaccgatactttggatcgattgccgaaaaatttgaagagatggcgcgtgccagaggattactgccaatcatcacctgtacgcggcgacagccagaactggaaattgaggctgctcgcgccatgctctcctggcaggtggattgggtcattgctaccggagcgactcaaccggataaaatagcccaaatgtgccagcaagcgggcgtaccgacactgaatctggatctgccgggaacactggcgccgtcgatcatttctgataactatatgggggcgaaattattgacggaaagaattttagccaacagccagaaacgctatggcaagctggcacctttgacttttgtcggtggacgtataagcgataacaatactgctgaacgtttatgtggttttgtcgatgcccatcaggctttggggataaccgtaccggatgaacataaactggttaccggctactcttctgctcgcgtagagggattactgaaagaggtcttccaaagctctgcagtatcgcttcacgggttattcgtcaactcgacaatctctcttgaaggggtggttcgctggctggcgcaaaccgggcagacgggagccaatcaaccgccaatggggtgttttgactgggatccttttgtttctctgctcgggcacgatatcgatatggttcgtcaggatgtacccgccatgctcgaaaaagtgtttgaaattgtggattctggcgataccaccctgcgtcgcattgagataccgccacaactcattccgagcctgaatgttgtcagctga

SEQ ID NO: 27586 - DNA, 942 bp, Escherichia coli
gtgaacaaagaagatgacatcaggctcgatcaaaaagtacgggcggcatggatgtactacattgccggacttaatcagagtgaaatcgcaagtcagttaggtacttcacggccagtggttcaacgcctgatagcagcagcgaaagacgaagggattgtgtcgattggattgcatcatccggttgccaactgtctcgattatgcccaactgttaaaggaaaagtaccaattaaccgactgcaatattatgccggtttacagtattgaaagtacgctcgacagcgtgacatttggctgttatcaactgatggcgcgttacttacagggtgacaaaccgaccatcgttggtattggttctggcttaacgttgaagaaaaccattaaacgtatcgattttgatagtcagaatacccgctgtgtggcgctgattagcgccatgaatgaacacgggcaatgtaactattacgacgacgtaccgctgcttttggcgagaaaaattcagggaaaatattaccagtggccagctccacgctatgctcagtcccgcgaagagtaccaaatgtggtcaaccaatcgattgttccgcaacgtctctaccgtagcgcgtgactctgatgttattttcgtgggtattggtgctttaggtcgtcaaagccctattttcaaagatggctttattgatgagcagcaactggaagagttaacagcacgcggaggcgttggtgaaatcctcggacgctttattgatgctgaaggcaatgttgtggaaagccagatcaaccagatgatcaccagccatgatatccgcgaaagcaactgcccacgtatcgcagctgcctgtggtgaggataaacgtccggcgatcctcgcagcattaaaaggtgggtggatcaacggtctggtcaccgatgaacacaccgcacgctggttgctgacacgttaa

SEQ ID NO: 27587 - DNA, 1368 bp, Escherichia coli
atgaacgaacaatttacatggctgcacatcgggttaggttcttttcatcgcgcacatcaggcgtggtatctacaccgtttgcaggtgatgggcgataaacgctggagcattgctgcgggcaatattcgtaatgatgctgaacatgtcgtacaggcactcagtgcacagaaaggtcgctatgtgctggaaaccgtcagcccggaaggggtaagcgaatatgaagagatcacctcaattcagaagttgataccgtggcaggcagatttacaaccgctgattgctgaaggggcagatccgaagacaaaagtgattgctttcaccgtcaccgaaggcgggtactacctgaataccagtcacaaactggaagttaacaatcctgatttagcggcagatcttaaagggggatgcaaaacaatttacggtgttattacccgtatcctcgaagcacgtatggcaaataacgccggaccactaaccctgctgaattgcgataacgtgcgccataatggtgaacgtttccatgatggcctggttgagtttctccagctaactggcaaacaggatgtcatcgactggctgagtacaaataccacttgcccgaataccatggttgaccgcattacgcctcgtccggcagcagaacttccggcacggatcaaggctcaaacgggtattgccgataaagcgccggtaatgggcgaaacctttatccagtgggtcgtggaagataatttccgtgatgtccgtccggcactggagaaggtcggtgtcgaactggtggcgtcggtaatcccctatgaagaggcgaagattcgcattcttaactcttcacacagttgcatcgcctgggcaggtacgttaatcggtcaaaaatatatccacgaaagcacaatgaccgattttatctatcagattgccgaccgctacgtgacggaagatgtcattccttgcttgggcgataacggtatcgatttgccaacctaccgtgatgttgtactcaagcgttttaccaatccacatattcaggacaccaaccaacgcgtcgctgcggatggtttctcgaaaattccggcgatgattgcccccacactgcgagagtgctaccagcgaggcgttcgcccgaatgccaccgccatgttacctgcactgttttacgtattcatggagcaatggcatcacggcaaactgccctatgaatatcaggatggcatccttgatgcaccagctgtccatgcaatgttccagtctgccgatcccgtcgctgtttatgccagtgataaagcgctgtttggcgatttaaccgaacgtgaagattttgccgcgttgttgcgcgaaaaaatcgctgacgtctacgcgttaattaactaa

SEQ ID NO: 27588 - DNA, 1464 bp, Escherichia coli
atgtatctgggtatcgatctgggcacatcggaagttaaggcgctggtcattgatgaaaacaatgaaattgttgccacccatagtgcgccgctgaccattcagcggccccatccacactggtcagaacaatcgccgcaagcctggtgggaagcgacggaatatttaatgtcgaccctgcgggaaaaatgcggtcaccactggcaggcgatcaaagccattggcctttctggtcaaatgcatggtgccgtcctgttggatgaaaaaggagaggcgattcgtccggcgattttatggaacgacacccgcagtgcgcaggagtgtgcggagctggaagagatcgcaccagagttgcatcaggtagcgggaaacctggcgatgcctggatttaccgcccccaaattgctatgggtacggcgccatgagccgcagcactttgcgcgcatttccaccgttttactgccgaaagactatttgcgtttcaaaatgaccggccaaaagatttccgatatgtcggattctgctggcacgttgtggctcgacgtggaaaaacgcgactggtcagattcgttgctggaaaaatgtggcctgacacgggcgaatatgccggaactggtggaaggttgtgacgtttctgccactctttcccctgaagttgccagccgttgggggctgacatcttcggttgtagttgctggtggcggtggcgataacgccgtgagcgcaattggtgtgggggccgtttctcccggagatgcgtttatttctttgggaacttccggggtgttgtttgtagtgacagatgcctatcgtcctgcgccgcaatcagcagtccatgctttctgtcacgtactaccgaatttatggcaccagatgagtgtaatgctcagtgccgccagttgtctgcaatggttctgccgtctggtgggggtaacggaaacagagttactggaagagattgcccaactttctgatgcagacaaagccagtgcaccgatgttcctcccgtatctttctggtgaacgtacgccacataacgatcctcatgcccggggattgttctgggcgctgacacactccagtcagcgtgcgctaatgggatatgcagtgctggaaggcgtcagctttggtattgccgatgggctgcgagtcctgcaagaaagcggtacggcaattgagcaatgctcgctggtaggtgggggggcgagaagtccattctgggcgcagttactggccgatattctcgatatgccagtggtgacgcataaaggcggtgaaacgggtggggcgctgggagccgcgcgtctggcctgtcttgctgcgggaaaaccactggcggcagtgtgtgaaaaacctgaaatcttcaaaacctggcgcagcgatcctgaacgtcataatgcgctgatgcaacgatatcagcagtttactgcgctgtatcacaacgacctgaactatcgcaatcaataa

SEQ ID NO: 27589 - DNA, 1278 bp, Escherichia coli
atgtcgttaacaaataaacaatggctgggattacccttaaatctggtgtggggatatattgccattgccatctttatgaccggagacggttttgaactggcattcctgtcgcattacattaaagcactgggtttcacgcctgcagaagcctcctttgcctttacgctctatggcctggcggcagcgctttccgcctgggtttccggcgtagttgccgaaattattacgccacaaaaaaccatgtttatcggctttgtgctgtggtgcgtatttcacgtgctgtttctggtctttggtctggggcaggcgaactatgggttaatcctgctgttttatggtattcgtggcctagcctatccgctgttcctctacgcctttattgtggcgattgtccataacgtacgcagtgacagcaccagtgctgctctgggctggttctgggcagtttactctattggtatcggcgtattcggcagctacatccccagttttaccattccgcttattggcgaaatgggaacattatggctggcgctggccttctgtggggttggtggcgctgttgcgttaatttctatgcgcaaagtagaaacaccacgccatatgcaaaacctaaccacaaaagagaagtttagcgaactgggccgtgcggtgactttgctttataccaaccgcaatattttgctttccagtattgttcgcattatcaacaccttatctttattcggattcgccgtaattatgccgatgatgtttgttgatgagctgggctttaccacctctgagtggttgcaggtctgggcagtcttcttctttaccaccatcttctctaacgtattctggggcgtgctggcagagaaaatgggctggatgaaagttgttcgctggtttggttgcgtgggaatggcgctttcaagcctggcgttctactacatgccgcaacatttcggtcataactttgctatggcgctgatacctgcggtggcactggggatctttgttgctgcattcgtaccgatggcagccgttttcccggcactggaaccgaaacataaaggagcagctatttcggtttataacctttcagccgggttgtccaacttccttgctccggcaatcgccgtggtacttctgccttatttcagtactattggtgtggttatcgcttacaccaccctgtatgtgatagcgtttattatttgcccgtttattcgcgtcgaacaaccgggattctcaaatcagcaagtgtgtgaagggaagaccgccaccatttcctga

SEQ ID NO: 27590 - DNA, 654 bp, Escherichia coli
atgtttaattgtaaagcagtcatttttgatatggacggcgtcatcattgattcggaagggttatggcgtgaggcacaaaagggagcactggcaaggtggggcgcatgtgtcagtgacgaagagtgtataagactgactaaaggtaaaaggctggatgagattgcccaaacctggtgtgaatattgtcatttacacattgaacccgcactgttggaaagtgagattcgccgcctgatcactacgttgattgccgggacgggcgaagcgatgccaggcgttcaggacgtgttattttttttgcgccggagtggctatcaactggcgctggcaacctcttcatcttaccaggtgatcgatgctgtactgacaaaactcaatattcagcattatttttcggtgatttgtagtgctgatgacgaaaagcatgggaaaccccatccggcagtttatctttctgcactgcgagaattgcaactgtctgctgcagattgtttggttatagaggacagcgtgagtggttttcaggcagcacaggcggcaggaataaacaccattgtggtatcagaagatgcccaacaaacctgctttaatgcggcgagtgcaagatatttatcgatgaatgaattactggcagcgttagccgtagctgcgtaa

SEQ ID NO: 27591 - DNA, 972 bp, Escherichia coli
atgatgaataagaaacgtgtctatattgcgggccatcgcggaatggtcggttcagcgatttatcgtcagcttgctaagcgtccggatattgagttaattatccgtaatcgcgagcagctcgatctgttagataccaactcggttaatgatttttttgcccaggaaagcattgatgaagtttatctggccgccgctaaagtgggtggtattatggccaataataattatccgtcagactttatctatgaaaatatgatgatggaaaataatattgttcacgcggcccactgctctgacgttaaaaaactgctttttctcggctcttcatgtatttatccaaaatttgcgcagcagccaatcaaagagagcgaattattacaggggacgctggaaccgacgaacgaaccctatgcaattgccaagattgccgggataaaactgtgcgaatcctataaccgtcagcacggtcgggattatcgttcggtgatgccgaccaatttatacgggccgaatgataatttccatccgcataattcgcatgttattcctgcgctgctacgtcgtttccatgaagctacccagcagaacgaaaaatatgtcgaagtctggggaagcggcactccgaagcgtgaatttttgcacgttgatgatatggcgaccgccagcattcacgttatggaacttgatgacgaagtgtggcaggaaaataccgaaccgatgctttcacatgtcaatgtcggaacgggggaggattgcactattcgcgaactggcagacgttatcgctaaagttgtgggctataaaggtgagatcgtgtttgattcctcaaagcctgatggcaccccgcgcaaattactcgatgtcagccgcctgagaaaactgggctggcaccatgaaatcgaactggaaaaaggactgaccaatacctaccgctggtttgtagataatcagcgccagttccggggggagtaa

SEQ ID NO: 27592 - DNA, 480 bp, Escherichia coli
atgtttctcaataaagaagatttcgctaatacagtacggatgactccgcttctctcactggactttatcattgagaatgagtttggcgagtttctggttgggaaacgtaccaacagacctgcgcagggatgctggtttgttcccggcgggcgggtattgaaagatgagccgctggagcaggcttttatgcgcctgacggaagaggagctgggccagcaattttcgctcgctgaggggcgtttttacggcgtctggcagcatttttacccggataatttttccggtacggcattttcaacccactatgtggtgttaggtttccgcctgaaaattgattccagtatgccgatgctgccttcccgccagcatgataactggcgctgggctaaatctgacgagctggtacgcgatgagacggtacataaaaatacccgcgcttatttcgacccgaaaatgcaacaacaggtgccaggaatatga

SEQ ID NO: 27593 - DNA, 1224 bp, Escherichia coli
atgaaaattctggtgtatgggatcaattattcgccagaattgaccggtattggcaaatataccggggagatggtggagtggctggcccgcaatggtcacgaggtgcgggtcattaccgcgcctccctattacccggaatggaaagtggcggagcattactcctcctggcgctaccgccgggaagagggcgccgcgacggtatggcgttgcccgctctatgttccggcaaaggtttcaacacttaaaaggttgttgcacctgagcagtttcgcgttcagcagttttttccctttgctggcacagcgtcgctggaaaccggatcttattatgggcgtcgtgccgacgttattttgcacgccgggcatgaggttgctggcgaaattaaccggcgcgcggacgttactgcatattcaggattatgaagttgatgccatgctggggctgaaactggcgggcaatggcagtggcggcacgctggcgcgactggcgaaaaagtttgagcgtcagaacctgacgagggtggattatgtttccactatctcgcgctccatgatgaacaaagcgcgggaaaaagttgtcgctgtcgaaaagattattttctttcctaactggtcagaagtcacaaggttcagcaacgtcgctgaaagcgatgtcgaacagttgcgtgggcaactggggctgccagcaggaaaaaaaatcatcctttattcagggaatattggcgagaaacagggcgttgaaaatattgtccaggccgcatcgttatgccaacaacagccctggctattcgttattgtgggcgagggtggcgggaaagccagaatggaaaaaatggttcgcgagggcgggcttgaaaatgtgcaattttttcccttgcagccttatgacaaattgcctgccttattacatttagccgactgtcatctggttattcagaaacgcggggccgcggatgcggttctgccctctaaattaaccaatattctggcggcgggtggcaatgcggtgatcactgcggaaaatgacacggaacttggtcaactttgccagatgaatccgggaattgccacctgcgtggagccggagtctgtacctgcgttaattgccgggatcaccgaagcgttatccctgcctgaatataatgccattgcgcgaaactatgcagaaagtacattcgaaaaagagaatgtattaagccaatttgttgttgacttacaggattaa

SEQ ID NO: 27594 - DNA, 1440 bp, Escherichia coli
atgaatcaaaataatctttatcccgtcattattgctggcgggtcctgcagtcgtttatggcctctgtcgcgcacactctatcccaaacagtttttatgtctggacggtgaaaataccatgttacaggcgaccatctcccgactgaatggtttgcactgcgcgccaccgctggtcatctgtaatgaaaaacaccgttttatcgtggctgaccagttagctgagataagacaattaacgggaaatattattctggagccacaggggcgtaatactgcgcccgccattgcgcttgccgctattgccgcctgcaataataatccggatcataaccctttactgttagtgctggcggcagaccatattattgaagaaagcaaagcctttcaggatgctattactgcggcgatcccacttgccgaaaatgggaaactggtcacgtttggcatcgtgcccgatgcccccgaaacaggctatggctatattcgccggggtgaagtcagcagtacgcaacttaaagtcgactctgttgcatttaatgttgacgcctttgtcgaaaaacccgatctggaaaaagccaaagagtatatctccggtggtgattattactggaacagcggtatgtttttattccaggcgcgccgttatctcgaagagttggaaaaatttcgcccggatatcatgcaggcctgcctggatgctataaacaacgctgaactcgataacgattttattcgcgttgatagcgacgcttttaaattatgcccggatgagtcgattgattatgcggtgatggaaaaaacccaggatgccgttgttttaccgatgaacgtgggctggagcgatgtcggctcatggtcttcgctatgggatatcagtgaacatactgaagaaggaaatgtttatcatggtgatgtcattggtcataacaccagcaacagctatatctattctgaatcgggtcttgtgaccaccgtcggtgtaaaagacctggttgttgtgcaaaccaaagatgcggtactgattgccaataaagatgatgtacaggatgtgaaaaaaatcgtcgaacaaattaaaaccgatggcagaaaagaacatcatattcatcgcgaagttttccgaccttgggggaaatatgactccattgatgaaggtgaccggtatcaggtaaaacgtatcacggtgaagccgggtagcggttttgccttacgtatgcaccaccatcgcgccgagcactggattattgttgccggaacagcaaaagtgaccattgagggcgaagcccagcttcttagcgaaaatcaatctgtctatattccgcaaggcaccgttcattgtctggaaaatcccgggaaagtgccgcttgaaatgatagaagtccgctccggtgtctatcttgaagaagatgatattgtgcgctttgggcaacattatgaaaactga

SEQ ID NO: 27595 - DNA, 1482 bp, Escherichia coli
atgagtttacgggaaaaaaccattagcggcgcgaaatggtccgcgattgcgacggttatcattattgctcttggcctggcgcagatgacggtgctggcgcgcctctttaaccatcaccagtttggtttgctgatcgtttcgctggtgatcatcgcacttgccgacacgctctctgatttcggtattgccaactcgattatccagcgtaaaccgataagacatctggaactgaccactctctactggctgaacgtcgggctggggatagtggtttgtgtggcgatgtttttgctcagcgaggtgattggcgatgtgctcaataaccccggcctggcaccgttaatcaaaacgctgtcgctggcttttgtggttataccgcacgggcagcagtttcgcgcgttgatgcaaaaagagctggagtttaacaagattgggattatcgaaaccagcgcggtgctggcaggttttaccttcaccgtcgtcagcgcccatttctggccactggccttaaccgccatcctcgggtatctggttaacaccgccgtgcgcaccctgctgtttggctactttggtcgcaaaatttaccgccctggcctgcgtttctcgctggcatcggttgcgccaaatttacgttttggcgcatggctgaccgcggatagcatggtgaattatcttaataccaatctttcgacgctggtgctggcgcgtattcttggcgcaggtattgctggcggctataaccttgcctacaacgtggcggtcgtgccgccgatgaaacttaaccccatcatcacccgcgtgctattcccggcgttcgccaaaattcaggacgatagcgaaaaactgcgcgtcaatttctacaagttattgtcggtggtgggcattattaatttcccggcgttacttggcctactggtagtgtcagataacttcgtgccgctggtatttggcgagaagtggaacagcataattcccatcctgcaactgctctgcattgtcgggctgctacgctctgtgggcaatcccatcggttcgctattaatggcgaaagcccgcgtcgatatcagctttaaattcaatgtctttaaaacttttctctttattccggcgatttttatcggcggtcatctggcaggggcaatcggcgtaacgctggggttcttgttggtgcaggtgattaacaccattctgagctatttcgtgatgataagacccattcttggaccgggatatcgggactatttactcagtctgtggctgccgtttcgactctcattacccacgcttattaccagctatggcgttggacgtgtgcttgaggggaatgtctctttgccgctgctgctggcaatgcagatattcgcaggcgtcgtcagtttcgccttagtcgtgatgctttcgcgcaacagtctgctgattgaattaaaaaaaacgctctgtcggagcggcaaactgaaaacgttattacgtgttcctgattga

SEQ ID NO: 27596 - DNA, 1281 bp, Escherichia coli
atgaaattattaattttgggaaatcacacctgtggcaaccgtggcgatagcgccattatgcgcggattgctggacgctatcagccgccaacagccggacgttgagatggatgtgatgagtcgtttcccgatcagttcctcctggctgcaagggcgtgaaattattgctgacccgctgtaccaactgagccagaaacaacaggccgctgcgggcgtcagcgggcgggtaaaaaaggtgctgcgccgccgttttcagcacaagatcttgctggcaaaagtgacgggagagggcaggatgcgcaatttcgcaattgcgcctgagtttgatgattttgtgcgttttctcggcaactacaacgcgattattcaggttggcgggtcgaactacgtcgatctgtacggtttaacacattttgagtatccgctgtgcgcgtttatggctaacaagcccatttacatgattggtcatagcgtcggccccttccagaacgccgattttaaccagcttgccaattacacctttggccgtaccaatgcgctgatcctgcgggaatcggtcagtcgcgaattgatggaaaaagcgcaaattgctagccaaaaagtagagatgggcgtggataccgcctggcttgtggaacagcgtaacgatacctttgtgccaggctatgcggtgcagcactggcttgatctcaccgcaaggcgcaaaacgattgcggttacaatgcgtgaactggaaccgtttgacaagcgccttggtaccactcaggaagcgtatgaaaaagcgtttgccggtgtggttaactcgctgattgatgatggttatcaggtactggcgctctctacctgtaccagtatcgatcgttataaccgtgatgaccggatggtggcgctgcgtatggcgcgcttcgtggaaaatcgtgagcattttcatattgtcatggatgaattcaacgatgttgagatcggtaaaatcctcgcatcctgccagttaaccatcggtacacgcctgcattctgccatcatctccatgaatttcggcacgcctgccatagccattaactacgaacacaaatcggcgggcatcatgcagcaactgggaatgccggaactggctattgatattcgccacctgctcgacggcaatttgacggcgatggtgaacgatactctggggcagctccccgcactgactacccggacagaagcggctgtgaggcgtgagcgggaaaaaggacttgcgatgatcgagtctgttttgtcacggatccgggagggtaaatga

SEQ ID NO: 27597 - DNA, 1404 bp, Escherichia coli
atgtctgataaatcgctctccaggcgtaccttcctggcggcaggttctttacttgccactctgcctgttctcccgactcctttcgcccgcgcgcaggaaccaggcctgcgcatcgacattgacaccgtgaaatcctccgactgggttgcctcatttcgtaaggcgtttaatgaagcgcaaaccgtggttgttcctgcgggtatcgtttgcgacgagatcaacaccgccatcactattcctccgggtaagtcgctgtatattcagggagaaataagaggtaacggcaaagggcgattcatcctgcaagacggttgtgaggtaagaggggagaagggggggaaactgaccaatattaccctggacgtccggggttctgattgcgtaatcaaagggctgacgatgagtggtttcggtcctgtcgctcagatattcatcggcgggaaagacaaacagacctggcgtaatctgaccataaccgaacttaccgtcacacatgctaactatgccattttgcgtcaggggttccataatcaggtggtggatgcgcaggtaacccactgcaagttcagcgatctccagggcgactcaatagaatggaatgtggcgattaacgaccgcaatatcctgatttctgaccatgttattgagcgtatcaactgtaccaacggcaagatcaattgggggattggcattggcctcgcaggaagtacttacgataacaagtatcccgaagatcaggcagtaaaaaacttcgtggttgccaatattaccggatctgactgccgacagttaatccatgtggaaaatggaaaacattttattatccgcaatattacatcgcgtaatgtaacgccagagtacagcaaaaaagccggtatcgacaatgctacggttgctatttacggatgcgataattttgtccttgataatattaagatgagcaattctgctggaatattaataggctatggggtagtcaagggtaaatatttgtcgatcccacaaaatttcaggctcaataatattacactcaacaattcacaattgggttattcgttgcgtggcatccagatctcttcaggcaatgcaatatcctttgtcgccctgacgaatatggaactgagccatgcctccctggagctgcacaatcaaccgcaacatctctttttacgcaacattaatgtgatgcagaaatcaactatcgggcctgcattgacgatgcattttgacctgcgtaaagatgtgcgtgggatttttatggcgaaaaaagagacgctgttgtcgttggtaaacattcatgctgtgaatgaaaatggtgataattcagtcactatcgataaaattaatcagcagattgtgaacgttgaagcgattaacttctcactccctcagcaagagaagtag

SEQ ID NO: 27598 - DNA, 1002 bp, Escherichia coli
atggagcgtaacatcagtagcataatcgcgcagcaattggtggtaattgatgctggcgaaaagaatcgaaagagctataattcagcaaccattttacaggtggatgaaataatgacgaatttaaaagcagttataccggtagctggacttgggatgcatatgttgcctgccacaaaggcgattcctaaagaaatgctgccgatcgtcgataagccgatgattcaatacattgtcgacgagattgtggctgccgggatcaaagaaatcctcctggttacccatgcgtccaagaacgccgttgaaaaccatttcgacacctcctatgaattagaatcacttcttgaacaacgcgttaagcgccagcttctggccgaagttcagtcaatctgcccgccgggcgtgactatcatgaacgttcgccaggcgctgccgctgggcctgggacactctattttgtgcgcacgcccggttatcggcgataacccatttgtggtggtgctgccagatgtcatcatcgacaacgccagcgccgacccgctgcgctacaaccttgccgcaatgattgctcgtttcaatgaaaccgggcgcagtcaggtgctggctaaacgtatggcgggtgatctctctgaatactccgttatccagacgaaagatccgctcgatcgtgaaggcaaagttagccgcattgttgaatttatcgaaaaacccgaccagccacagactctggattccgacatcatggctgttggtcgttatgttctttccgctgatatctgggctgaactggaacgtactgagccaggcgcatggggtcggattcaattaactgacgccatcgccgaactggcgaaaaaacagtctgttgatgctatgttgatgacaggcgacagctacgactgcggtaaaaaaatgggctatatgcaggcttttgtgaagtacgggcttcgcaatctcaaggaaggagcgaagttcagaaatagtattgtaaaacttctcgattag

SEQ ID NO: 27599 - DNA, 1416 bp, Escherichia coli
atgttacttcctgtgattatggccggtggtaccggtagtcgtttatggccgatgtcgcgcgagttatatccaaagcaatttctgcgtctctatgggcagcgctcaatgctgcaggagactgtgctgcgtcttgatgatgttgacgcacgggaacccgttgtgatttgtaatcaggagcaccgcttcctggtagctgaacaactaagacaaattaataagctttcccataacatcatccttgagccagtggggcgcaacacggcacctgcgattgctttagcggcgcttagtgcaattgaaaatggcgatgatcctatactgcttgtacttgcggccgatcatattatcaacaataagctggcgttccatcaggcgataaaatcagcattcaaatttgccctgcagggaagactggtgacatttggtattgtgcctaccggtccggaaacgggatatggttatattcaccgtgggcaggaagaaacgcttgatgagcagatcgcgtatcaggttagccgattcgtagaaaaaccgaataaagaaacagcggagtcttatattgcctccggtgaatattactggaacagcggaatgttcatgttccgggcgaaaaaatatctcgaagagctggaaaaattcagacccgatattctcgacgcctgtaaagcggctattcagggttgcaaagaaagcgacgaatttatcaaagtcgatcgcgatctgtttattgcgtgtccggatgagtcggtcgattacgcggtgatggaaaaaaccactgatgcagtcgtcgtcggccttgatgcagactggagtgatgtgggctcctggtccgccctttgggaagttagcccgaaagatgacaaaggcaatgtgctcaccggcgacaccttcctgcataacgccaacaattgctatatcaatacggatgaaaaacttatcgcggcgattggtgttgatgatctggtgattattaatactaaagatgctgtgctggtggtgaataaagaccaggttcaggatgttaagaaagtcgttgaatatctgaaagcaaatcaccgcagcgaatacaaacgccaccgcgagatttaccgtccgtggggccggtgtgatgtggttgtccaaaccgaacgctttaacgtcaatcgcattacggttaaaccgggcgctgcgttttcaatgcagatgcatcatcaccgtacagaacactgggttattctctccgggacaggtgaggtaactattaaagatcagaaattcctgttaacggaaaatcaatcgacctttatcccaataggcgctcaacaccgactggaaaaccctggcaaaatcccattggaattgcttgaaatccagtcaggttcctatttaggggacgatgacattatccgtattaaggaccaatatggccgttgctaa

SEQ ID NO: 27600 - DNA, 1641 bp, Escherichia coli
atgaatacaactccctcacagcgattaggttttttgcatcacatcaggttggttccgttatttgcctgcattctaggcggtatcttagttctattcgcattaagttcagccctggctggctatttcctctggcaggccgatcgcgatcagcgtgatgttactgcggagattgagattcggaccgggttagcgaacagttcagattttttgcgttcagcccggatcaatatgattcaggccggggctgcgagtcgtattgcggaaatggaagcaatgaagcgaaatattgcgcaagccgaatcggagattaaacagtcgcagcaaggttatcgtgcttatcagaatcgaccggtgaaaacacctgctgatgaagccctcgacactgaattaaatcaacgctttcaggcttatatcacgggtatgcaacctatgttgaaatatgccaaaaatggcatgtttgaagcgattatcaatcatgaaagtgagcagatccgaccgctggataatgcttataccgatattttgaacaaagccgttaagatacgtagcaccagagccaaccaactggcggaactggcccatcagcgcacccgcctgggtgggatgttcatgattggcgcgtttgtgcttgccctggtcatgacgctgataacatttatggtgctacgtcggatcgtcattcgtccactgcaacatgccgcacaacggattgaaaaaatcgccagtggcgatctgacgatgaatgatgaaccggcgggtcgtaatgaaatcggtcgcttaagtcgtcatttacagcaaatgcagcattcactggggatgacagtagggactgttcgacagggcgcggaagagatttatcgtggcaccagcgaaatttcagctggcaatgcggacctgtcatctcgcaccgaagaacaagcggcggctatcgaacaaactgccgccagcatggagcaactcactgcgacggtgaaacagaatgcggataacgcgcatcatgccagcaaactggcgcaagaggcttctattaaagccagcgatggcgggcagacggtttccggtgtagtaaaaacgatgggcgctatctccacgagttcgaagaaaatttctgagatcaccgccgtcatcaacagtattgctttccagacgaatattctggcactgaatgctgccgttgaagccgcgcgagcgggtgagcaagggcgtggatttgccgttgtcgccagcgaagtacggacactcgcaagtcgcagcgctcaggcggcgaaagagattgaaggcttgatcagtgaatcagtcaggttaattgacctggggtcggatgaggtggcaacggccgggaaaaccatgagcactattgttgatgccgtcgcgagtgtcacacatatcatgcaggaaatcgccgccgtctcggatgaacaaagtagaggcataacgcaggttagccaggcgatttctgaaatggataaggtgacgcaacagaatgcttctctggtagaagaggcctcagcggcggcggtgtcccttgaagaacaggcggcacgattaactgaggcggtggatgtattccgtctgcacaaacattctgtgtcggcagaacctcgcggagcgggtgaaccagttagtttcgctacggtgtga

SEQ ID NO: 27601 - DNA, 609 bp, Escherichia coli
gtgaccgccgccgctgacatccagatcgccgtcctgaatcaccttcccgttattgccagcaatttccgtaccggtggaatccttgccgtcaacggtggttttgccgttgttgtttgccgtggcgtcatcaccattaatctgggtgccggtgccaccgttggtgatggtgctctcgccttcgttattgacgatggccttgtcaccgtcgatctggatacccatggactccggatcggtgacggtcatggtgcccttgttatccaccgtcgcgctgtcaccggtgatatcaataccgtgaccgccgccgctgacatccagatcgccgtcctgaataacttttccgttattaccgttgatttccgtaccggtggaatctttaccgtcaacggtggttttgccattgttgtttactgtggcattatcacccgtaataacaagctcaccgttgtgattatattgccacttcgttgcgccatctgcgctcaccccttcaagggcaacagtgttattcgcttcatcaatctgccaaagattaatcgttgccttacgaccattgctatcttgcagagatatagtcccgtcagcattctcggtataagtaaaaactga

SEQ ID NO: 27602 - DNA, 1305 bp, Escherichia coli
atgcacgcgcgttcagcgagagagattaatcaatgctaccggacattacgtccacgattgctgatgtgcatgattattggctacgccgcattttatctgacgcgaaaaagcgtgaattacgtccttccggcgctgcaaaccgacctcggactggataaaggcgacattggcctgctgggttcactgttttatctcagctacggattgtcgaaatttaccgccggactgtggcatgacagccacggacaacgcggttttatgggtatcggcttgttcgccactgggctattgaacgtggtgtttgcctttggcgaatcacttacgcttctgcttgtgctctggacactgaacggattttttcaaggctgggggtggccaccgtgtgcccgcttactgacccattggtattcccgtaatgaacgtggtttctggtggggctgctggaatatgtcgatcaacattggcggagcgattattccgctgattagcgcctttgccgcccactggtggggctggcaggccgcgatgctgacaccggggataatcagcatggcattagggatctggttaacgctacaactcaaaagcacgccccaggaagagggattaccgacagttggtcactggcgtcacgatccgctggagttacgtcaggaacaacaaagtccgccgatggggctgtggcaaatgttgcgcaccaccatgctgcaaaatccgctgatctggctactgggtgtctcttatgtacttgtttatgtgatccggattgcgctaaacgactggggcaatatctggctgacggaaagccacggcgtcaacctgctcagcgccaacgccacggtaatgctgtttgaagtaggcggcttactcggcgcgttatttgccggatggggttcggatttgctgtttagcgggcagcgagcccccatgattttgctgtttacccttgggttgatggtttcggtcgctgcactctggttggcaccggttcatcactatgcccttctggctgtgtgcttttttactgtgggcttttttgtctttggcccgcaaatgctgattggacttgcggcagtggaatgtggacacaaagctgcggcgggttcaatcaccggatttctcggcctgttcgcctatctcggtgcggcgctggcaggctggccgttgtcgctggttatcgaacgctacggctggtcgggaatgttcagtttactctcggtcgccgcagtacttatgggtttactgctgatgccgttactgatggcgggcatcaccaccactcacgctcgaaggataaaacaatga

SEQ ID NO: 27603 - DNA, 900 bp, Escherichia coli
atgcggccatgtatcgaaacatacggtgccgacattgtaacaagctactggcacgagccagcttcagttatctggaagttaaatgtccgcgctgtaaaaccctcaatcaaatcacatctcagagcgccacagagcaccccacatacacaaggaaatcctgtcgtggggaacagaaagcaagttacatcccgtatcatcagcacgcctgaacttattcactataacgacaatatcgtcggttatggctcccgtgagttacgggttgagacaataagttgctggctggcccggctggtcgtcgtcaataaacattacagccatcgtttcgtaaataattcctaccttcatctgggcatattttcagaacgggagctggttggcgtaatgcaatggggttatgcccttaatccaaacaatggtgcacgcgtcgtaactggcacgcagaaccgcgaatatatggagcttaaccggttatggctgcatgactgtatgccgagaaactccgaatcaagggcaatcagttacgcgctcaaactaatcagacaactttatccgcaggtgcagtgggttcagtcgtttgcagatgagcgttgtggctgtcttggtgtcgtgtaccaggcaagcaattttgattatgtaggcagtcatgaaacaacattctatgaacttgatggcgagtggtatcacgagatttgcaagaatgcaatcaaacgaggaggacagcgaggtgaacatctgcgggctaatatcgacagagccagtgttcataaattccgtcagtttcgttacatccggtttctggacaagagagccagaaaacgccttaacacaaagctattcaaagtccagccttacccaaaaccacaaacagttaaaactggtttgaaagagagtgaatga

SEQ ID NO: 27604 - DNA, 294 bp, Escherichia coli
atggacaatcatgtaacgacgagaaatcgaaaaatgattgaaaatgcggaaatctataatgattatttttccgattattcagatgcctgcaaatacagttcgagtgcgggagagttcatatgcttcaacttttttattaaatcttatgtttttcctccacagcaagaagatggaggtgtgccacctcctgaaatcactttgcaccgtatagcctccgtctcaatgatggagcaacaggctaatgagctgtatagcattctgggaacgattctacaaaagcgtgaatcggactaa

SEQ ID NO: 27605 - DNA, 255 bp, Escherichia coli
atgccagaaattaaaggcaccgtcactgaagacctggtaaaacaggcactgtattccggtgaagtaaataagttgctgaaagcgcaggtccgcaaggattttgaggcacaaatcgacacttacgttgatgaagtgctggcaaaacttattgggccagcagttgcggccagtgatgctgataatgagccgaaaaccgacgcgcagccagagcaaccagacccggctcagcccggaactgacagtaccatgatgtaa

SEQ ID NO: 27606 - DNA, 183 bp, Escherichia coli
atgacatttttacagcttattttattgtatttctgcacggcagtatgtgcgttatatctggtgagtggtggttataaggccatcagaaattatgttcgccgcaaaattgaggacgcagcagctgaaaaactcagtaaaacagcgcaggtaactccgctcccaaaagacccgacccagccctga

SEQ ID NO: 27607 - DNA, 252 bp, Escherichia coli
atgggcgcgctggcggaaatggagcgggaactcattattgaacgtacacgcgcgggtcttgctgctgcccgtgctcaggggcgtcatggcggcagacctcagaaactgacagagaaagagcgggagcaaatcgcccgtttgctggctaatggcgagtcccgtaaacaaatcgcactgatatttgatattggcctttccaccctttatcgttattttcctgcctcaccagctccgtcaccaaaagtaccgtga

SEQ ID NO: 27608 - DNA, 321 bp, Escherichia coli
atgctgattgggtatatcagggtgtcaacaaatgaccagaatacggcgctacaaagaaatgcgctggaatgtgcaggatgtgagctgtttttcgaagacagaataagcggtaagacaagggagcgtcccggacttaaacgcgcattaaagcgactccggccaggggataccctgctggtctggaaactggatcgccttggacgcagtatgcagcaccttgtccttttaacagaagaactccggcaacgcggcgttaacttccgcagcattacggacaatattgatacatccactcccatgggacgtttcttttccatataa

SEQ ID NO: 27609 - DNA, 150 bp, Escherichia coli
atgtacggtggggcatattactctgcgtacggtaatgttatggcaggcctgcagattgacagtaaagttgatgcttcaaacgattttatagcattcagacccctgcaaaaattagtcggaggtacatggattacggtatctcagttataa

SEQ ID NO: 27610 - DNA, 882 bp, Escherichia coli
atgtttcatgttgataataattccggcgtggcgaatatgcctgcgctggcaccagcgcagagtaataccaccacctggtttaccgaaggtgacggacaaaaaggtatcagctggattggtcaggactggctgaatattctccaggccgaactgctgaatattctggctgaagccagtattcagccggataaggcgcagttaaaccagcttacgctgtccattaaagccattatcgctgcgaatgccttttcccggaaaaataacctgaaagaaattgctgatgccggtgcggaggcccagcgtctggcccgtggttatcttggtctggggacgcttgccacaaaaaacagtcttggtcccgctgacgttaatgccctggcgaaggatcagaatctcgccgacctggagaataagggaaccgcccgtaataatctggatgtttacagcaaaagcgaaggtgataaccgttacctgcgcagggagcagaacggcgcagacattccggataaaggggcttttatcgataacgtcggtttacgggaaacggtaaacagggcggcgaatgccctgccatcggacggcaccgccgttgccgcgaacaggctggcaaatgcccacacaattaatggtgttccctttgacgggacgcaggatatcactatctcatcaggaacagtaaccgccataagactggggtcggtgaccgcacatatgcccggaacatgggaaagctgggatctgaatctggggggcggcaatgttcttaccggaattaaagtacaggatgtcggtaagaatacggcagataacgtcggcggcgtgtattaccggccgttgcagtatctgttaaatggagcatgggtgacggctgcaagtatataa

SEQ ID NO: 27611 - DNA, 330 bp, Escherichia coli
atgaccggcgcaaccattcaggagcgtcagcgttatgccgggaataaataccggatgaaaccctctcttaaccgtgaattttatatccggtttgcggcagagtttggttatgaaatagatattcagccatcaccggattcacagtgggtcagtattgtcacgattaacagtgaaaccggctaccggaatatgaatgtgctggatgatattctcacgccgctgcgtatttatgaaggcggtgcgctggaatgtattctgaaccgttataagcctgcatggcagacgtttatttacgtgtatgcaaacagccatgaagaggagactatttaa

SEQ ID NO: 27612 - DNA, 1623 bp, Escherichia coli
atgattaactttgattatatcggcgataacaatcgcattccgctggtacagattgaaatcaataattcaatggccgtgaccggcactccaccacagcgtcaggcggtactgttgtttggtcaggctgcaatgaaagacaccaccattcaggggcgcggtcagcttgatgtaccagtacgtattacccgagcttcacaagcaagagaactctgggggcgaggttccatgattgcactgatggtagaggaatttatcgccattaaccctgacacagagttatatgccattgcacagggggctggaacaggtcagtccagggcatgcgtgatgaatatcattggaacagcattggcagacggggtgttaagtgtttacatcggcggtcgccgttacctcctgcccgtcagtaaggggaaaaaaggtaaagagcttgtggaagagctggctaaggtcattaacgctgacactgatgcgccattcactgctatcgcagctgaagtcagtggtgataatgctgaaggacttaaaggcagcatgggggttaacgcccgctttatcggtgaatgctcagctcatgatttacgggtgaactattatgacggtgaaactacaccggccggtcttacgctggagctcgtcgcgccaacacagaaggcaacaaaccccgatatcacccgtagcgtctcagggatggggaatcgtcagtacaactacatcgtcatgccctataaggatgcggcaaatctcaaaattctggcggatgaactgctgaaacgctggggaccggtaaaaatgtcggacggtatggtctggatggcgcataccggcaccttcggtacggcaaccagttttggtgaatcccgtaatgacttcctgtttacctgcacttctattcctaaagcaccagagccggattatgtctgggcggcctccatttgtgcggtctgtgcgccctccctgtcaacggatccggcccgaccattacagacactggcgctgcctgcccgtatggcacctgaagcaccagctcgtctgacgcgggaagagcgaaacagcctgctttataccggcatgtccacggtgaccgtcgcggccgctgacatggtgcagattgaacgtcaggtgacgatgtaccgtcagaatgcatacggcgaaagcgatcccagctatctggatgtggaaaccatctacaccctgtcatatctgcgttattccctgcgcacctttatcacgcaacgttttccgcgccataaactggctgatgacgggacgcctgttcgtgcaggtcagaatatcgtgacgccggagatcatgaaacttcagttaatttcgctgggtgaagaatgggtggagctgggactggtcgaaaatctggacacctttaaaaagaatctgctcgtggagcgcaacacaaaagaccgtaaccgtctggatgtgatgtgtacaccggatctggttaaccagttccgcttcatggccgcgcacccggattacggcacgttaaatgtgctgataaacagctttgaaagtcgttataacgctgctgaacagggcgtggttgagttcaccattaatgtcacgccggtaagtgatgatatctggggttaccggaatgtgatatga

SEQ ID NO: 27613 - DNA, 279 bp, Escherichia coli
atgacaaccatttttattaaacctgcgccgggatgcctgatccgcgatcccgacacgatgactccgctctctcaggacggggaagagaaacccttcactccgttctggtgccgccgtcttaatgatggcgacgtcattgtggtggataaaacggcggagcctgccccggctgccacaacaggtaataccggcgcggcggcaaaaccagcgggagcggcagcagaaaaaactgcggcggtggctgaaaaaaccgcagcatcagataaggggacgtcctga

SEQ ID NO: 27614 - DNA, 360 bp, Escherichia coli
atgaatgaacatcacactgtggcagcaacagatgattcaggccttcaggtcagtggtgacagtcctgtcacggtactggcagaagtgcgttgcagtcgtgcgcagtttcgtcgtgcggggttcctgttcatgcggggacgccagcaggttgacgtcaccccggagcagcttgcccgactggaagcggagccatgcctcactgtacgaatactacagacgcctggtgatgatgcgggagccgtggcgggtgtggttcatgcagagaccggtgcagatttagccgaagccgaaaccgtacaggatgctccccggaaaaagaccggcaataacgccagacaggcgaaaaaggcgcgcgcatga

SEQ ID NO: 27615 - DNA, 222 bp, Escherichia coli
atggcggtatttaatattcctgatatttacggacgcttttacctggttaatttcgataacgtgaaggtgatttcactggccgaaaataaagaatgtggcgatttactttttgaatttaatgaccgcacacgaatggtgatatctgccggacttgatcgcgaaggtgcgacagaagtttacagcggaatatgccgttctgttggtgcgaaacaagtcagctaa

SEQ ID NO: 27616 - DNA, 531 bp, Escherichia coli
atgtcgcagggaaaagaacctgttattgaacgtattggaatgcttacaaagcgctacccttcaagaagtgcagctgccagagcgtggggaatcaatatcaacacattaaacagctatttcaagggaggacaaacacaaccagcccccagagaaagtatccttatacgaatttctgaaagtgaaggcgttagtcttgagtggcttaaagagggcaagggtgaattaccaaacgatattggtatttatggtaattttggttgttctggtgataagggagatcagcttacacagatgctttcattccttacgaaagacgaacgagaacagttaaccaatctccttgctcgcaaaggtgtagagacggttctgacactgctgaataaagaaaaccaggatttattacaactagaaggcaggaagcgcctggctgcgttgatgattgtagatatgccagacgattgcgtcagagagattttggaaaaaaccgagacaagtaggcaatcaaatccggtagaatctaaagcgggttag

SEQ ID NO: 27617 - DNA, 240 bp, Escherichia coli
atgagtattgatgggtttaatctggctgcaatagaagatgtgccacttacggcagtacatgtacctcgcgatgaactgggtactgaagcggtacatatgttacaacaaagacttgtacgtcctgatgcaactgttggtgcattacttttgtatgggaaactggtaatacgagaatctgttcgccgtatacggccagggaaagagccaactccgattaaaggagatggactgtatgactga

SEQ ID NO: 27618 - DNA, 486 bp, Escherichia coli
atggcctctaaaggtattaacaaagttattctgatagggtatctgggtcaggacccggatattcgctatatgccaaacggcggcgctgtggccagcattgcgctggccacctccgaaacctggcgggacaaacagacaggggagatgcgggaacaaaccgaatggcaccgcgtggtgctgttcggcaaactggcggaagtagccagtgaatacctgcgcaaaggagctcaggtgtacatcgatggtcagctgcgtacccgaaaatggaccgaccagaccggccaggaacgctacacgactgaagtggtggtgcataccggcggtaccatgcagatgctgggctcccggcagaatagtgcacagggtggccggggacagcctcaacaaccacaacagggcagacagttttcaggtaattcgccatctccgggcaataccgccatgtccggcagtttcagcgacgatgacgacagtatcccgttctaa

SEQ ID NO: 27619 - DNA, 1392 bp, Escherichia coli
atgcaacacaaagtcaacgagcagtttatacgccgcagcgcgtggcactcccccgtcacctcgctgctgcagaatcccgacttctttggccctgccatcatggcaatgatgatactcccgctctttctgccgttactgaccccgctcagtatcctgggcatgctctttacaggcgtcatcttcaacaaccaccgctggcgctgtcccatgagaatgcccgccacgctgaagtgtgacgaccccagcgaagaccgtgaggagacagcccgctttcttggtgcgtggaattacacacgcatcaggccgggtaaagcacggggagtattcttcctcggcacacaacgtggcagtgatgtcggtcgcgagctctggttatcccaggcggacctggtccggcacatcatgttcttctccacgacagggggcggtaagacagaaacactgttctccctgatgctgaactcactctgccatgcccggggcttcaccatgatggacggcaaggcacagaacgacacggcgaggaccatctggtatctggccctgcgcttcggtcgtgaagatgatgtggagttcatcaactatatgaccggcggacgctcccgcagtgaactgctccatgccggcgacaaatccctgccggaatccaactccttcaatccctttgtctacgccacggagacactggtcaccgaaacgcttcagtcgatgctgccccagaacgttcaggggggcgaatggcagtcccgcgccatcgcaatgaacaaggctctggtgtcgggtgttaaatacctgtgcgtcgcagaaaaaaggtgcatgtcaatgcagctgctgcgcgaatacatgcctctggaaaagatggccgcgctttacgtgaccggcgtcgatacccgctggccggaagaggcgctttcccccctgaaaaactatctgcaggagctgcccggcttcgacatggcacatgtcaggacaccggccatgtggaccgaagaaccgcgcaaacagcacggctacctgaccggtcagttctcggaaacatactccacctttaccgaaacctacggccacatttttgcccaggatgcgggtgatattgacctgcgggacagtattcacagtgaccgtatcctcatcacaatgatcccggctcttgagctgtcctcgtataccgcatccgcgctggggaaaatcatggtgacgcagcagagcatgatcctcgcccgtgacctgggtcaccggattggcgggacggatgaagaggcactcgaagtcaaaaagtacgcaacgacgtttccttatatcaactatcttgatgagattggtgcttactacgcagagcgaatcaccgcaatggcacccggccttcccctgagcagcttttctctgcgatga

SEQ ID NO: 27620 - DNA, 153 bp, Escherichia coli
atgatgcaggcagctacacgctcaggcgaagatactgcggatgctgacatgcagaatgccggtactgacgctggcgcgacgccctcagcagacgaggcctcatccggtgaggaccacgacgaactcttcgacaaagtgttgtcagggtgctga

SEQ ID NO: 27621 - DNA, 186 bp, Escherichia coli
atgagcattaccgtcctgctgttgctcttcccgatccagttgttccgccaggtactctgcaacatactgccagttgcacgcatcccgttcggatttttcaacccgcttctggtgtctgctcacagcggcctgacgataatcatcggcatcttttctgctaataatacggatatgtgtaagcgttaa

SEQ ID NO: 27622 - DNA, 375 bp, Escherichia coli
atgccagttcaagacgttattcccccctatgagcagatgtacctgctaaatcagcagttgatctgcaacgctgaccagctcaaacatgccgttatcacagttggcggccaggctgtgcaatattggatatcctattatcatgcacaatacggcgacagattgcctgatgagcgtctcaccacttctgttgactgcgactacagtgcccggaaagatgatattgcggctatagcaaaaacgctcaacgtgaaaacgtgggaaaacaaagacggtcagcccccatcccttgcgcagtttatgcttatcgatcaggacacacacgatatcaaacgggatgatggacgtttatttgccgtaccggatgcgcctgactag

SEQ ID NO: 27623 - DNA, 156 bp, Escherichia coli
atgtctcccgcacaagctaaacaaaagcagcatgaacgttacgaagccgtagcggtgcaggttttgcgtggtcgtgccggttacaagcctgccgtgaaaagccgtttcagtaagtcagccaatagcaaattctcccatactatcgcttttgcctga

SEQ ID NO: 27624 - DNA, 546 bp, Escherichia coli; identical to SEQ ID NO: 11402

SEQ ID NO: 27625 - DNA, 333 bp, Escherichia coli
atgttttctataaaaccaggacccagaaatttacctatcgacaaccccacattgttatcatggaacattactgacggggatctaaattccaaattaaatacattagaatatctaaactgtataacaaatattattaattcttgtggagtttaccctcaaggattaaaagacagagaaattatatcaacttttcacgcagaaaaagttattaatgatctgttaaaaaacgattataaaatttccctttctccagatacaacttaccgagagttgaataaagcagcacagcgtagcattacagcgccagacaggataggagaaagaaaaacatag

SEQ ID NO: 27626 - DNA, 1152 bp, Escherichia coli
gtgggatttatcttatgtcaaaaatgccgtggcagaggaaaaggaacgttcgattgccaacattgcgcaggcacaggccgagatccggggaaatttaaatcctatggagaatgccatacttgtgacggtgttggcgagttttaccaaaaatgcccagattgttttggtattggagagatttattctcctgtcgagcaaaatgaagaatcacaatatttaaacggtctaaataaaatgaaaacatctgatattattgaaattgcgactgatcaattattaaatcttgaaagccgtgaatttgatgttatatctgtttcgaaacctacttcccccgaagctgctgttaatcttgcaaagattatatcaaagctctctccaattgtaggtaatttaattgagtttcatacttgtgaatatctcaactctcaggatacatataaagaactgggccaatggatacgtcaagacccgggtttccccgatacgatttttgtaagcgaagaaataacacctacaccaggctttgaaataaaagcatggtttccattagcaacagagataacagccagatttaaagatagtcaaaaccatttcactgaagatcaaacttatgtagcaatgctggcatggctaccggaccatttaatttttggaaagccaaaagttattgatactgtaattgtttctgcaatgtctgttgcaaaagcaagagaccaacattaccatcgcccaccagattacattgttcttgaaccggaagataccacatcaagaacaggtaatttacagcaaacaaatactaatggttacaaattccaaggcaccgcagagcagttcattgaagcccagcagctagtagcatcatgggatgaaaatgccacacaatacagcccgtcacctgagtatcaggaattactaagaacactcatcgcaaaatatccataccgtttagatacaaatttcgcaaaaatggatagaatagttcacccacaaatagaaagttttaaaacacgcgtacataatacattattccatggaaaaaccattggcgcctggaacagacttctatcgagaggaaatgagtcagaaatacttatagcactttctgagacatttggaatatccgacgacggagaaaccgccgtcgaataa

SEQ ID NO: 27627 - DNA, 1062 bp, Escherichia coli
atgactgacaatagtagttctaatatcaataaattaatacccggaagtactgttggaaggggaagaagtttcacgcttgaagcactacctgaagtaaatgaatggagtgatggtcgtgctaaaattcagtatggaaatagtatggatttctatcgttcatgggaggaaccaacagttattatttcagatggcgcatacgggatattaggatttgaaggtgatactgctgatcattcttccattgctgattggtatgaacctcatattgaagagtggagtaagagagccacagcacaaacaacattatggttttggaattctgaaataggttgggcgtcagtgcatcctatattagagaaacatggttggcgatatgtaaatgcaaacatatggaataaaggaaaaggccatattgcaggtaatgtaaatacggctaaaataaggcgcttccctgtggttacggaagtttgtgttcaatacgtatttgaaccaaaaatcgatgatctaactttacagcgttggctttatcgcgagtggaaaaggaccaaactagccctaaagaaagcaaatgatgcatgcgatgttaaaaacgttgcgacgagaaaatatttggatcaggggcatttatggtacattccacctccagatatgtttgagaaattagccaattatgctaatgaacacggtgacgtgtcgggtaaaccatatttttctcgtgatggtcttgttccaatgaccgctcaagattgggaaaaaatgagagccaaattctattgtccgatgggatttaccaatgtttgggaacgaaatacccttaaaggagcagaaagaattagcgttcctggacaggcggctaaagctgcccatttaaaccagaaaccattggaccttatgtctctgattatagaggcgtcgagtgatgttggggatgttgtttgggagccctttggtggtttattttcagcgtcaattgctgcgcatagtctaggaaggcgatcttttgcgggagagatagatccaacttattttcaagtaggaatgaatcgttttctctccctctaa

SEQ ID NO: 27628 - DNA, 1284 bp, Escherichia coli
atggtaggaaaacaagagggaaagccactttcgtttaaagcggtagaaatgatgaagccaggcgacaaagataaggctgacatcggcgaaaatcgtggcttacgtgtctcctgtggtgccactggcgttaagtcttttttctaccgttacacaagtcctctgactggcaagcttgctcaggttaaaattggtaacttcccgcagacttctctcgctgctgcacgtcttaaactccacgaattaaaactccttcgccaagaaggtcggtgtcctgcatcagaacttaagcaagataagctcaagcgtgcgattgaagctgaacaagctaagatccctgaattgaccgtacagggattagttgaactgtatcttaccgaacgtattgaggatcgtaaaacgaaggacgggaagatcattcccggtgccagaaagccgaaagggcaggctgaggttcgtcgtactctctatggtgatgccgttaaaaccttaggaacacgaaatgctgctgagattacgcgccaggatatcattaatttaatcaatggcattgtagcccgaggtgcaactgtacaggctggtaatgttctgagggaactttcactcgcttatgagtttgcaattggccttggacgttttgatgatagttttgcgaatccggcgctgttagcaaaatccagcttacgacagactaggatcaagcttacaaacggacgtggtacacgagttctaagcgaggacgagcttacaaaattccttaaatggattccaggatctgcttatacgcctacgataaaaaatgtattacgtctgactctatggaccgggtgtcgtaccggtgaaatctgcaatatggcatggaaagatgttgaccttgcaaaaggcaccattcatctgaaagaaaccaagacaggcattgagcgctatgtgcagttatccattcaagccgtcaattttttgaaggttctgcgacttaactctgatacctatcttttcccttcttctcgtacaaaactgcctatacagcagaaatatctcaccgagaatgcttggcgtatgcgtgagcagggacaaatgctggatatagccagttggacgcctcatgatctgagacgaacggtgcggacagggttatcacgattgcagtgtccaaatgaagttgcagaggctgttcttgggcataccaagggcggagtagagggtatttataatctatataaatatgacgcagagtgtaagaaatggttgcagatatgggctgattatttagataagcttcagagctaa

SEQ ID NO: 27629 - DNA, 456 bp, Escherichia coli
atgcttactaaccaagcaatagtaaaaattaatatagccacatggggtgtaagcattcttactgctgttatttttactctcattgcggtgttttgtgaaaaccaatacatagagatagaacctgaaggtataattggcatcgctacactattaggtacttttagtttcacaatgacaggattcattgctgcaattggtgcttatatcatatcagtgtctgataaaacttcttttctaaagtggcgacagcaaggatatataaatatcttctaccatctatatgggcagagcattgtttttttattggtcacatttttattatgcatggtggctatcataatgccatttaatgttgcattgacaattttgaaatgtggtttatacattctcattcttaatattattcacatcatattaataactgtaattacactcggtcaaatgcagaaaaaataa

SEQ ID NO: 27630 - DNA, 942 bp, Escherichia coli
atgaagttaaattattttacttacacaataaccgacaatagaaatcaaaaagtttattttgataacatttcagatattatcaaaaatttttgtttgcatagaaaaaaatctctttttgagaaaaacaaagggttaaaaagactgtacctagccatgcccacctcatttgatggcatatactatttgaccacgccagcaattactacagcatttaaagctgtagatagagcaactggtgtagtaaatgatttggcttctgtacttggtaaagatagtctagagaaagttacttacttttttattgaccctaaacattcaataatcggagtaaccgagggtaaaggtaatgctgacattgatgatttgcaattcttcattaacgaaataattaatcaagattttcaatcacatatttataccttcgagctttgcacattaaaaatagaaatcaaatctacatcggctacaaaattcaaactcatcactgaagcacgagtgaagttaaataatgattctgttggggatgtaataaatggattgtttggcaaggccccatcagacaatatggaagtgcaaattatcgtaaaaagaaaaaatagaaaagagaatgtgaaagattatatacaaccattactctcaagtttatcttcatctgaagataaagagtatgcagaaatttatttcagagccaaggcagatgaatttcaatcaaatgtaaaagagtttattttagataagaatcagaatatttttgatataataaaccctcatctcaaagtaaagattgaagatcaaatacttgaaaaaagatacaaaaaccaagttgtgataagtgaattgagtacatacgcacaaaattttactggacgcatacattcaggtattattgatccagtgtggaatgatctaaaaacagaaagttaccacaaagcaaaaagttga

SEQ ID NO: 27631 - DNA, 411 bp, Escherichia coli
atgtacgcggcaaaaggcacccaggcctatgcacaaattggcgtcgaaagcgccgtaatgagcgccagccaacagcagctggtcaccatgctatttgatggagtgctgagcgcactggttagagcgcgcctgtttatgcaggacaacaatcagcaaggcaaaggcgtctctttatcaaaagcgatcaacatcattgagaacggactgcgggtgagtcttgatgaagagagcaaagacgaactaacccaaaacttgattgctctttatagctatatggtcaggcgcttgctgcaagccaatttacgcaacgatgtctccgcagtcgaagaagtggaagcattaatgcgcaatattgccgatgcctggaaagagtctttactctccccttctttgattcaggacccagtctga

SEQ ID NO: 27632 - DNA, 366 bp, Escherichia coli
atgaaccacgcaccgcatttgtatttcgcctggcaacaactcgtcgaaaaaagccagctcatgttacgcctggcaacggaagaacaatgggacgaactcatcgccagcgaaatggcgtatgtgaatgcggtgcaggagattgcacatctgactgaagagattgacccgtccatcacgatgcaggagcagctccgcccgatgctgcgcctgattctcgataacgaaagcaaggtaaagcagttattacagattcggatggatgaactggcgaaactggtcggtcagtcatcggtgcaaaaatcggtgttaagtgcctatggcgatcagggcggctttgtgctggctccgcaagataacttctcgtga

SEQ ID NO: 27633 - DNA, 1488 bp, Escherichia coli
atgcgtaatcccacgctgttacaatgttttcactggtattacccggaaggcggtaagctctggcctgaactggccgagcgcgccgacggttttaatgatattggtatcaatatggtctggttgccgcccgcctataaaggcgcatcgggcgggtattcggtcggctacgactcctatgatttatttgatttaggtgagtttgatcagaaaggcagcatccctactaaatatggcgataaagcacaactgctggccgccattgacgccctgaaacgtaatgacattgcggtgctgttggacgtggtagtcaaccacaaaatgggcgcggatgaaaaagaagctattcgcgtgcaacgtgtaaatgctgacgatcgtacgcaaattgacgaagaaatcattgagtgcgaaggctggacgcgttacaccttccccgcgcgtgccgggcaatactcgcagtttatctgggattttaaatgttttagcggtatcgaccatatcgaaaaccctgatgaagatggcatttttaaaattgttaacgactacaccggcgaaggctggaacgatcaggttgatgatgaactcggtaatttcgattacctgatgggcgagaatatcgatttccgcaatcatgccgtgacggaagagattaaatactgggcgcgctgggtgatggaacaaacgcaatgcgacggctttcgtcttgatgcggtcaaacatattccggcatggttttataaagagtggatcgaacacgtacaggaagttgcgccaaagctgctgtttattgtggctgaatactggtcgcatgaagtcgataaactgcaaacgtatattgatcaggtggaaggcaaaaccatgttgtttgatgcgccgctgcagatgaaattccatgaagcatcgcgcatgggtcgcgactacgacatgacgcagattttcacgggtacattagtggaagccgatcctttccacgccgtaaccctcgttgccaaccacgacacccaaccgttgcaagccctcgaagcccccgtcgaaccgtggtttaaaccgctggcgtatgccttaattttgttgcgggaaaatggcgttccttcggtgttctatccggacctctacggtgcacattacgaagatgtcggtggtgacgggcaaacctatccgatagatatgccaataatcgaacagcttgatgagttaattctcgcccgtcagcgtttcgcccacggtgtacagacgttatttttcgaccatccgaactgcattgcctttagccgcagtggcactgacgaatatcccggctgcgtggtggtcatgtcgaacggggatgatggcgaaaaaaccattcatctgggagagaattacggcaataaaacctggcgtgattttctggggaaccggcaagagagcgtagtgaccgacgaaaacggcgaagcaaccttcttttgcaacggcggcagcgtcagcgtgtgggttatcgaagaggtgatttaa

SEQ ID NO: 27634 - DNA, 231 bp, Escherichia coli
gtgagaaataacgattattcgcttgtctatacagtagaaaacaatcagttaggtctctacaaactgacggatctacagcaaaaagataaccttgccgccgccaatccgcaggtcgttaaagagatgcaaggcgtggtaagagagtttatcgacagcagccagccaccgcttagcgaggtaaatcaggagaagtttaacaatatcaagaaagcactaagcgaagcgaaataa

SEQ ID NO: 27635 - DNA, 219 bp, Escherichia coli
atgcatctccggatcgcgttgctgctctttgttcttggtagagctgggtgcctcaatgatggtggcatccaccaaagtgccttgggtcatcatgacgcctgcttcggccagccagcgattgatggtcttgaacaattgacgggccagttgatgctgctcgagcaggtggcggaaattcatgatggtggtgcgatccggcagggcgctatccagggataa

SEQ ID NO: 27636 - DNA, 1398 bp, Escherichia coli
atggggagtaagtggaaacaaacaaccttaggtgatctggcgctgggctttgatggtgcggtagatgggccttttggttcaaatttaccggctgcagcttatacagacagtgggtatccaattattcgaggaagtaacttatctatcggattagatgatttcaaagataatgattttgtatttgtaccggagcacatatttcaaaaactttcacgtagcgagtgtagggctggcgacattatattcacaaaaaaagggacgttggggcaaactgggcttattagtactaaacatcgtttcgaaaaatatttgctatcatcaaatcaaatgcgtcttcgcgtagatcctgaaaaggcattgcccgaatatgtttattattgtgtttcctcacaaaaagcaattaacaaaataattcaagattcagagtgtacaggcgtccctaaaataaatctcgcttacttgaaaagcttccctatttcattacctagtttaagcgaacaacaagatataattgatattttagggagccttagtacaaaaatcacgctcaatcgccaaatcaaccaaaccctagaacaaatgtcccaaaccttgttcaaatcctggtttgtggattttgatccggtgattgataacgctctggatgcaggaaatctaatcccggaagctctgcaatctcgcgccgaattgcgtcaaaaagtacgtaatagtacagatttcaaaccacttccggcggaaatccgctcgcttttcccaagtgaatttgaagagacggagttgggttgggtgccgaaaggatggtgtattaaagacttttccgtcattgcgaaattaataaaagacaatgttaagtcgaaaaacatttgtgatgacattcattacattgggttagagcatttggaacgcaagcatatttttatcaccaattatgggaatggtggtgatgtatccagtaataaatcagctttcgataaaaacgatttattattcggaaagttacgcccttattttcacaaagttgcactagctccattttcaggaatatgctcaactgacatattggttttccgtgctaaagagaacatctatagatcgttaatggcaatgtatgcttttacagacgattttgtagcatatgcaaatttgcgttctacaggcacaagaatgcctcgagcggaagctaaagatctgcttaactataaaattgttttacctaataaaaatgttttagaaaaatttgaagagctattagaaaattattggataaaagggcaacttaataattacgaaaatgaaaagttaaccgccctccgcgacaccctgctccctaaactcatctccggcgagctatccgtggaagatctccccgatctcatcaaacaaaccgaagccgcataa

SEQ ID NO: 27637 - DNA, 162 bp, Escherichia coli
atgggtaatgccagcgttgccagccgtgatttaaaaattgagcaatctccggaactgagcgccaaagtggtagaaaaactgaatcaggtttgcgctaaagacccgcaaatgctgttgatcacggcaattgatgacaccatgcgtgctatcggcaaaaaataa

SEQ ID NO: 27638 - DNA, 918 bp, Escherichia coli
atgagaatatctcttgtggtgccagttctgaatgaagaagaaatgctaccattgttttataaagaaataagagggtttgaaccgttcaaatcatttgaagttgaaatagtcttcgttaacgatggcagcacagataacacagcacaattaattaatgatattaaaaatcatgatagcttagtacaagacatttgctttacccgtaattttggtaaagaacctgctctatttgctggtttggaagcatccacaggggatgttgttattcccattgatgttgacttacaagatcccattgatgttattcctcaaatgctcgaaaagtgggaaaaaggtgctgacattgtacttgctaaacgagttgatcgtagttcagatggttatctgaagcggaaaactgctcagtggttctatcgtttccataatatgatcagtaagccagctatagaggaaaatgttggcgattttcgtttgatgagccgtgaagttgtcgataatattatcctattgcctgaaagaaacctctttatgaaagggattcttagttgggtaggaggcaagacggatattgttgagtattctcgtgcggaacgagtagctggttcaacaaaattcaacggttggaagttatggaatctggcacttgagggtttaacttcattctcaacgttgccgcttcgcatctggtcatatattggcttctttgttgcgggcatatctttcatgtatggattatggatgattattggtaaaatcatctggggtaaccctgtagcaggttatccttctattctggtgtccatactctttcttggtggtgtgcaattaattggcattggtgttttaggtgaatatattggcaggatttatcttgaaaccaagcaaaggccaagatacattgtaaaaaaagataaatag

SEQ ID NO: 27639 - DNA, 1167 bp, Escherichia coli
atgaaaatcaccatttccggaaccggatatgttggcctatctaacggtctgcttatcgcgcaaaaccatgaagttacagcattagatattgtgcctgcgcgcgttgacatattaaataagcggatctctcctattgtagatagcgaaattcagcattttttacaatcaggtgatatgcagtttaaagcgacattagataaaaaaattgcctaccagaatgccgattttgtgatcattgcgacacctactgattatgatcctaaaacgaactatttcgatacctcaagcgtagagtcggttatccgggatgtcatcgagctgaactccgatgcggttatggtcatcaagtccacggtgccggttggttttacgcaagccatgaaagagaagtttaacacccagaacctgatcttctccccggagttcctgcgtgaaggtaaagctctttacgacaacctccacccttccagaattgttatcggcgagcgatctgagcgagcaaagcgtttcgcctcgctgttacaggaaggcgcaattaagaaagatatccccactttatttactgactccactgaagcagaagccattaagctttttgccaatacctacctggcaatgcgagttgcttattttaatgagctggatagctacgctgaagccctgggattgaattcccgtcagataattgaaggcgtctgccttgacccgcgtatcggtaatcactataacaatccttcctttggctatggtggatattgtttaccaaaagataccaaacaactgctggccaattaccattcagtgccaaacaatattatttctgctatcgtcgatgcaaaccgtacgcgtaaagattttattgctgatgccattttggcgagaaaaccccgagtggtgggtatttaccggctgataatgaaaacgggatcagataacttccgcgcgtcctcaattcagggaattatgaagcgtatcaaggcgaaaggcgttgaagtcattatctatgaacctgttatgacggaagaactattttttaactcccgcctggagcgcgatctcacggaatttaaaaaacaggctgatgtcattatctcaaatcgcatggcgagcgagctgctcgatgtcgaagataaggtctatactcgagatctgtttggcagtgactaa

SEQ ID NO: 27640 - DNA, 177 bp, Escherichia coli; identical to SEQ ID NO: 27493

SEQ ID NO: 27641 - DNA, 528 bp, Escherichia coli
gtgaacaccacgctgggcgagacctgggaagaggccgtgggcgaaaaactcgatcaccaggtgctgatggataaggttgtgcgttacacggcggcggtgcctgcccgggtggtttatctgacggcgggcattgactcgcagcgaaaccgttttgagatgtatgtctggggatgggcaccgggagaggaagcttttctggtggataaaatcatcattatggggcgtcctgatgaggaagagacgctgttacgtgtggatgcggcgatcaacaaaaaataccgccatgcggatggcaccgaaatgaccatttcccgtgtctgctgggacaccggggggatcgatggtgaaatcgtctaccagaggtcaaaaaaacacggtgttttccgtgtgctgccggtaaaaggcgcgtctgtctatggcaagccggtgatcaccatgccgaaaacccgcaatcagcggggcgtttatctgtgtgaagtggggacggacaaccgtgggcaaccacccgctgttaaccggcgacgataa

SEQ ID NO: 27642 - DNA, 219 bp, Escherichia coli; identical to SEQ ID NO: 27635

SEQ ID NO: 27643 - DNA, 219 bp, Escherichia coli; identical to SEQ ID NO: 27635

SEQ ID NO: 27644 - DNA, 195 bp, Escherichia coli
atgattattttacttttttttcatatatttaataaaaactacgattccgagtccggcaccaaattcatatcaacggacctccacggaggtccgtttttcattccaggacgccacgatttaagcgtcctgcctccaaatcaattctaccgaactcaaccagattccccccacatcaacctcattgtgtgggtataa

SEQ ID NO: 27645 - DNA, 1263 bp, Escherichia coli
atggcactgactgacgcaaaaatccgggcagcaaagcctactgacaaggcttataaactcactgacggggctggcatgttcctgctggtacatcctaatggttcccgttactggcgtctccgttatcgtattctgggtaaggagaagactctggcacttggtgtgtatccagaagtttctctctccgaagctcgtacaaaacgggatgaggcccgaaaactgatttcagaggggattgacccttgcgaacagaaaagagttaaaaaagtagtccctgatttacagctctcttttgaacatattgcacgacgctggcatgccagtaataaacaatgggcacaatcacacagcgataaagtactcaaaagcctcgagacacacgttttcccctttatcggcaaccgggatatcacaacactcaataccccggacctgcttatccctgttcgtgctgcagaagcaaaacaaatttatgaaatcgctagtcgtctgcagcaaagaatatctgctgtaatgcgttacgccgtacagtctggcatcatcagatataacccggctctggatatggctggtgcattgaccacggtaaaacgccagcatcgccccgctctgaatctttcacgcctgcctgaacttctgtcgcgtattgacggttataaaggccagcctgtcacccggcttgccgttatgctgaatttactggtttttattcgttccagtgaactcagatatgcccgctggtctgaaattgatattgacaatgccatgtggactattccagccgaacgcgaacctctgcctggcgtaaaattctcacaccggggctccaagatgcggacaccacatcttgtgccactcagtaaacaggctgtagccatactgacagaacttcagacatgggcaggtgaaaatggtctgatatttacgggtgcacatgacccgcgtaaaccaatcagtgaaaatactgtaaataaagccctgagggtgatggggtatgacacaacccaggaagtctgtggccatggattccgggcgatggcgtgcagtgcattgattgaatcaggtttgtggtcccgcgatgctgtggaacgtcagatgagccatcaggaacgtaacggtgtacgtgctgcttacattcataaagcagaacatctggaagaacggcgactgatgctacagtggtgggccgattttctggatgcaaacagagaaaaatttatcagtccatttgaatatgcaaagattaataacccattaaaataa

SEQ ID NO: 27646 - DNA, 1221 bp, Escherichia coli
atgcttttacatattatattcatcatattcttattttgctactatcttatttcaaaaggtaaatttaaattatctttattttttgtttttatctattcttttcttttatcactcgagatagcgaatgaatattttttttcattgggtcctccagttcatttcaaccaaataatctttttatatgtagtggcatacaatattctgatgtttactatgtatcactatatatcagggaaaggaatttttggatgtgttatatacgctgcacttgtaacctttatttcggcattaaagatctcgatcccattgaatccaatcatattatattataaatatagtttgttatttttgccgcatacgaatatacctttatttaatttatatatcataaacttatttccggctctgcttttttcttgtgattttaaaaaaataataatattactggtttgctatatgtctacgatattacccatctgtacattaatttcagacaaagcaccaaagattaatatagctattattcaggtcggcctttattacaaaaacggtggaaccacagaacagttttacgatgatatggttaggtttataaaaagtcataacgttaatcttgttgttttctcagaaaatgtttattttggttataaaaatttatttatcaaagggaatacagatagctttttgttaaagatcaaatctgatccaagtcttaaaaaatatgcattcttattcaatttttttggttacaaacaatttaataatgttatatcaatgtttctctataatgatcgcttgcaattgcatcagaaaactatattaattccatttatcgaaaagaaaagtgtgtttaatacttcagaaagtctctcatcagaatatcttaatatagataataaaataaaaaatagtgatacttttcagatccatgatttttcttttaaagcatacatttgctatgaggcattatttcctgtaacaacagtgtataacggtgtggtaattgcacaatcggattatgtgcgtcttaacaaaggaaaagaatataaaaaaactctggttaatggtagtttgcttggcaaattttccgttgcaccaaatactacgttaataaatatacagaattatggtggaaccattgtacttaacaaatattgggaaattgactgggatatttataatagatcaaaaaaagagcctttccttgtgattaaattataa

SEQ ID NO: 27647 - DNA, 630 bp, Escherichia coli
gtgatcaaattagatatttatgataaacaattcaaggataaaaaaatccttaattctgtatctttgtatgttgaagaaggttcttttcatgttattaccggtccttccggtgtcggaaaaagttccctgttgaacatacttggcttgttggacagcgaattttatgggagttatgagttttgtggtaagaagatcaatccaaaagattacaacacaacggcaaggataagaaaggagtattttggttttatatttcaagactctcttattaatgagaaacaaagtgtaatacgcaatcttctttgctccgtagactatcctgacttgaaatcagcagaggaagttgcacatgctatgcttgaaattgttgggcttccggtgtcagctatgaaagctattaatctatctggtggcgagaagcaacgacttgcccttgccagagctctaataaagaaacctaaaattcttttggctgatgaacctaccgcaagcctggatagaaataacaaaataataattatgagtattttatccgaatataataagtccggagggagtgtcatcatggttacacatgatcttgaacttattacaagcaatatgagtgtaattaaactggaaaattgctaa

SEQ ID NO: 27648 - DNA, 780 bp, Escherichia coli
atgaacttatgtattatgaactttatctttattttcttggctagtcttttttcaccaaaagctttttgtgacatatattacggtgtattacatgggaataaagttattcattttaaaagtccataccctgggattataaagttatccgatattgaagaaggtgaaataaaacaaaatatcaccttgtttaaggtattaaatcatgagtataactccaagaaccttttgattgagaaaaaactacaagctgaaagaaaaaagaaacatcggcttcaaactgattataaagagagtaaatatgcctatgagtcaggatatatctctaaggatgaactacttgacatagaagataaaataaatgactctaatatgactattataaatcttaatgtagagcaggataacattgctaatatgttaaaacttgcaaagccttttgtttattcaccatttattataagaaatatttttgtaaacaatgaacaatatgtcaactctggagatgatattatagatattgaacttcttgataaattttttattgatgtaaaaattgatccagtttctttacatggtaacataaaagaaaagaaaatagaatatcgttctttggtcaatggtttatctggttttgcatcggtgattcgtgtcacccgtacgactgaaagtggtcaagatgataagtcttctggtttaagggttgtcacattgaacatcactggagatcataaaaaactatctgaattactcgatactgcatttgagattgaaataaagtga

SEQ ID NO: 27649 - DNA, 1023 bp, Escherichia coli
atgggtatggggcaatacattaataataaaaagagactgtctacttttggtgatagtaatgtatatttttctctttcacaggatgtgtttgctgcatataaatataaaaataataaagataagttagcgatccaaaaaaccttacaatatctagagttgcaaagaaaaaaatatgagtatttactgaatttttattacgataatataaattacttatataaacttaagcgaattgaattaactaaaaatctaattgaaaaattagagacggattacaacatgtctaaggtattatttaatatggggaaaataccttatcttgacacagaaataaaacgaaataatcttgataagatgaaaaatacacttaacgaggtcgaactggaaagacgatatactcttatgaagatcaatagtgattatgccgtcccggaaaagttacttcacgaaatctcacttacagatataaaatcgtgtaaaagatcaagtattatggaattagtcagagatatttatctgaaaaagaatgaatctgttgagattgataataaaatcagcgagtcatcacttttaccatcattatatttttctgttggtttgactcctaaaaatggtggaacattgagcgatatatccctgagagaaatggattataatgctagcataagtatagatataccgttgagtgattttttttcatcgtttaatagtaagaaaacgaacgcaatgaatttagtaagaaacggtattgataaccttagtgatttcagagaaattgagctgttacgttttgatattagcaacaagcttcatataatgaagaaaaaagattcaatgttgaaaaaagacttatatataaagcggaaagaattaagctacatttcagaaagagtgaaaaataagaaagaaagtgtacttacatattattctttacaggatgacatttatgacactgagcttgaaatcaaaaggagtgagaatgaacttatgtattatgaactttatctttattttcttggctag

SEQ ID NO: 27650 - DNA, 1869 bp, Escherichia coli
atgaaaagacgctattttttaagctttttttttgttcctggcatattgatggcccatccctttaagcaaggggatatggtaatggatgtcaggaaaagcgatgtatctgaaggtactgatattatcatgtactcaccacatggtggagataatcagaatttcatttatgaaaatggaaatattaagctggcatcaaatcagaactattgtgtggatgtaagcagaaaaccgaattataaggagaacagcataatcctgtggacgtgtaatggcggagacaatcagaaatttaccattacagatggaacaataaggccaagggacagagcgaatgagtgtattaccgtaaaatcagaaggatttttgaaatctgaacaatgcgtatcttctccgcagcaaagattcgatattccgaaagtgtgtacatataaagatgcttattacaggaatatgacggagtgtgctgatagtgatattcctatggtaaaggataatgatacgttatcttctttaagcgttgttaattcttctggctcgatgtttgaacatcgtgattttaaagggggtaaagtaagatttgataaaaatattccttttatcgatgatgtgaaaaaagggtttaatgataaagtatcaagtcttaaaatttcatctgaaaaaacatttttaattacttccgatccgcagttggtttgtgagaaaaactgtaataatatttctgctgacacatcaaaaagaaacatcagagtacagtatgagatgtttaatgaacaataccctgatgctgatgccgttatcattaatggtgatttgacggaatttggtcatgccgggcagtggggggattttgagtcaattgtcagcagactaaaaattccttattattacggtctgggcaatcatgatatatataataattataatgattgctgggagaataattgtgtgattcgaagtgttactaagctgtttcatcatgtaaatagcaaagacaatatctctgattttgatgtgaattatacgcacgggtatgtattcccggaagttaaagaaacgataaaaggatctttgtcatattctgtcgatttcggaaatgtattgctcattcagctcaatgattatgagaaagggaaaaatccattaaaaataaatcaatatacttctggtgcctggggcgggggagccatgcgacacgaaatagacaggtatcaggatgcagaatattcatggcttgaacgacagctctactccgcatataagaataatcaggtggtcatcgttaaccagcatcgctttgatgctgatgccgggaatctgaaaaaactacttgataaatataatgtacagttgcgttttgccgggcatcatcataacgcaattggtgaaaaatggggtggttttcgactctcaggctcaagcgctttagggtcttatcttaaggtggatatcgataccagcaaaaagatcgcaaaagtttataaaggcgtgaataatacagccacaccagaactgattgaaaccatttctctggagctaccgaaagggaatatcacacctccgcctccggggccggtttatcttcgtgtcaaaacgtccggcggttatgaagcttttgtttctcttgtatacagaaccaaagacgggcaacagaaaacaattaattccggcaaactacttgccggtaattcatgggaatacaatgttcctggcggttcgacgattgaatacctggaagcaagaaataataccgggctggtctgggaaccccagagaagaatattcagagtcaataatatcaggaatgatgcctgtttttccacctggggaaccacactgaactctgcctggcagcaggttagttgtcgctga

SEQ ID NO: 27651 - DNA, 783 bp, Escherichia coli
ttgtttccttatatttgtattgttatggggcttattaccggcagttttctgaatgttgtgatccgacgctatccagttatgctccggcaacagatagctgaatttcagggtgaaacccagaatgtgccccccggaataaacctgatacggccacgttcgcactgcccacattgccggaagagtattcgcattcgtgacaatataccgctgatttcctggctgatactcaaagggcgatgcagtgactgccatggaaaaatcagtctgcgttacccgctggttgaattattgacggcactatcatttttactggcaggcattgtctggccggacagcgggtggggtgtggctgttatgatattatctgcctggctgattgccgcaagctttattgatcttgagcatcagtggttacctgatattttcactcagggcgtgttgtggaccgggcttattgtggcatgggggggactgagtcctttgcccctgcatgatgctgttagcggggggctggcggggtttgtgtctttttatactctccggtggctggccggtgttgtcctgcgcagggaagcgctgggtatgggcgacgttttgttgtttaccggcctggggagctggaccggtcctttgttactgccggatgtggcgctcgtggcgtcattctgtgctctgatatatgccatcacgacagggaaatatgcaagtacagtgcctttcggcccctttctgagtctgggaggaatggtgacgttatatacaggcattgatgtaatgctttaa

SEQ ID NO: 27652 - DNA, 411 bp, Escherichia coli
atgttagaaaaacagataccagggaaaagcgttattccggtactgctgagtattgttgcatccttaagtggatgtgcgggataccagagtgaagcggacatgctggcaaaagaacaggcacgcaatatcagcaggaatctgccggttaaatcggcgaattatacactgatatcagcgcagaacagtggagcgctgataaaaatggttgttatcagcgaaggcactggacaactcactctgaatccggatgttttcttaacgcagtttcagtaccagatatgcacggatccggcaatgaaggcgatgatgaataaaggcgtttattatataataaaaattaatgaaatgcgtacaggtaatcagtatcaacgaaaatttgatcgtgccgcttgtggaataataaaaatataa

SEQ ID NO: 27653 - DNA, 864 bp, Escherichia coli
atgtataagaagtggctgttaaaatttatacattatattttctgtataatactgttttttatttttataaaaatcatcatttcagtctggcattatgccactttttcagctgtgcaggtgaaacattctccggtacaggataaagaaagacaacagaacgccggaatgacggggagtgagtgctgccagttaatcagccagcaaaactggtttggtgagtatcaccccgttactgtgccggagtacagtccgttgacattgatggtgaaagaaaaactgcccgatattgtgcttcgtggggttgcgtcgggagcaaggcctggtgtggtgcttgaggagaaggggaggcagcagttttatttgcagggagagagactctcatccggtgatgctgtgattgaacgtatttttcctgagcaggtgatgttgcgttaccaggataacgttatttacctcacactgaccgatgaagaaggtgcccctgagccagagaaaaaagatgagcagccagagatatcttctccgccggaaacatccgctgttgctgatactttttcccgtttaccgtccgcagttcagcaggcactggccatcgatcctcaaaaatttttcgaatacatccgctttacccccgtatataaggatggtgttgccggttacgctgtgatgcccggggtagatcgctccctttttgatatcagtggtctgaaagttggtgatattgcggttgccctgaacggacaggattttacgcagccgggagcaacaagcatctttatgcaacaaatttattcaatgagtattgtcaggctgaccattttacgaaacggggagcgccacaacatatctgttgcattgcgttga

SEQ ID NO: 27654 - DNA, 564 bp, Escherichia coli
gtgcctgaacgcggattcactcttctggaaatcatgctggtgattttccttatcggccttgccagtgcgggcgtggtgcagacttttgcgagccgttctgaaccgcccgcgaaaaaagcggcgcaggattttctgagccggtttgaacaactgaaagataaagcggtgactgaagggctggctgtcggtgtgttaatcgagccgtccggctaccagtttatgcagcgtcgtcacgggcagtggctacccgtttctgcgacccggttatcggcacaggttacggtgccagaacaggtgcagatggtgctacaacccggaagtgatatctggcagaaggagtatgcactggaactgcaacgtcaccgtctgacgctgcatgatattgaactggagctgcaaaaagaggagaaaaagaagacgccgcagatccgtttttttccctttgagccggccacaccatttacgctgcgcttttattctgcagagcaaagcgaatgccaggcggtgaaactgatgcatgatggcacattattgcccggttcgtgtgatgagaggatgccatga

SEQ ID NO: 27655 - DNA, 606 bp, Escherichia coli
gtgaaaaggactcgcgctggttttacgttactggaaatgctggtggcgatagccatttttacctcgctggcgttaatgacacagcaggtgacaagcggcgtcatacgtgcgaacaatatcgtcgccggacatgataaaaaactacacatcgtgcagcagacgatgagttttttaaatcacgatctgacacaaatgatgccgcgtccggtaagaggcgagcagggccagcgggagcccgcgttgctggcaggggccggcgtactggcgtctgagagtgaaggagtacgttttgtgcgcggcggcgtggtcaatccgttgatgcgtctgccgcgcagtaatctgcttaccgtgggttaccgtattcgcaatggttatcttgaacgtcttgtgtggccgctgacggacgcagcggacagtgtggagccgacaatacaaaaacttttccaggcggatttgctccgtttgcagttccacgacggcacgcgctggctggaggactggtcgtcacagcagacgatccctgcagctgtacgtatgatcctgcattcgccgcaatggggcgagattgaacgtatctggttgttacgcgggccgcaattatcatga

SEQ ID NO: 27656 - DNA, 963 bp, Escherichia coli
atgatcaccttaccaccaaaacgcggaatggcgctcgtgatggtgctgctgttactggcagtgatggcatcagtgagtgtcggcctctctcagcgcatatcgcggcagacagacagaatgcgtagcctgcaggattatcaacaggcaacatggtatgccgtcagcgcagaaagcctggcgctgagcatattaaatgaaaatctgaaaaatgaagaacatacaccgatatattcgtggagtatcgggtcacatttatttccactgtcacaggggaaaatggccgtcacgctacgcgatgcacaggcctgctttaatctgaatgccctcgctcagccggcgaaggtgtcaggggagggggaaggacaacttattactctgatttctcgccttgatgtgcctgcccggcgggctgcgcagattactgaaagtcttcaggcctttatcggtggaggtcgtgacgggcagaagcagaaggacagtgaatatctttcccgccccgtgcctttctggccggcaaagcaaccgctgacggatatcagcgaactacgtgttgtacagggaatggatgccgcgctctatcagaaaataaaaccacttgtctgcgtgctaccgatgaacaggcagcgaattaatatcaattcgcttgatgtctcacaaagtgtgattcttgaggcactgttcggcccgggattaagccccgctcaggcacgggcattactgcaacagcgtccgggaaaaggatggcgcaatgtcggacagtttcttgccagtccataccttaaacgggttgacgagaatgtcagaaagcaggccggggagtttctgactgtgaacagtcgttatttctggttgcgttcagatatcaccgtgaatgagactgaactgacgatgaactcgttaattgcccgcacggggccgcaacacttttctgttctctggcatcagacaggagaaagtgagtga

SEQ ID NO: 27657 - DNA, 285 bp, Escherichia coli
atggtggtgctcaatacgccgggtaaatatcaatacgatttgaggaaccatttgctggttaatctctttccgatagcattggatgcagaaataactacatccaatgtaaataagcatcaattgcacagaagcaatatacctgcggccctctccggaaattccggtatcactgactacgtaccgttttcagcggaacgaaatgcggcgatggtcatttggcggacagccatagatagccgtccggctgtgtgtaacgatgaggaaggaaccccgggaacgttatga

SEQ ID NO: 27658 - DNA, 354 bp, Escherichia coli
atgttcagtatcggtaatgtttctattaactgcacgattaatccagaagacaacaatttgctaccacactatgtgtggatttacggtcatacctccacccagctaaatcagtacgattctgatattatttttatcatcaacgataaaaagtatccggccccatctgtcgacggaatacgaatgaataagaatgcatgggtatactttatcgatgctatcagtgaagccacgcaattcgacgttttagtaaacggtaagaaagtcgacagctataccgcaaatatcaaaaatgtgaaaaagactttgggtaacaaattctacgacaactgctggaacacctggttccaggaataa

SEQ ID NO: 27659 - DNA, 276 bp, Escherichia coli
atgaataattcaatcatagtaccagaagataaagattttgtatgtgcgtttgcgacttcaccgaatagcttttatgaggctattgaatcctatcgtaattatgtagatctagtccaagagatagagttcgagcacgtctttctttatttattgttttctatagtggtcaatggtagtacagatattacgattaatgatgaagtacgaatgtgtattgagcagcttgtctatgaaaaaaatagtatcagaaataataatgcagataaaaagatgtaa

SEQ ID NO: 27660 - DNA, 300 bp, Escherichia coli
atgactatcgaagaatttgtgaatgaagaaaaccatatgtgtaatctgggccaggaactattctttaaaattttcgagcctgaatcgatttataatttacccaataacgagtttaataaagaaataatatattggctcagtcagtatcttgtcggaaatttgatacaacctttagacgcgatctcagagcttaatgcttccaaacaaatatatgtttacgagacttggttttcgctaattaaatgccctgatgaaatgaaactcttggcgaagcggataattgaatatttattggattaa

SEQ ID NO: 27661 - DNA, 207 bp, Escherichia coli
atgaaaaatcaagcaacccgcctcatacgcttaccagaagttctcgaacgaactggctacggaaaagcctggatctatcgtctgatcaacgatggcaagtttcctgctcctgtcaaaattggaagtcgtgcaatagctttcgttgaaagtgagattgatagctggattcagtctgttatcgaaacaagtcgaaataatgttgcttaa

SEQ ID NO: 27662 - DNA, 153 bp, Escherichia coli
atgattgatatagttgcatgtgtaatggattctgattttgataatataatcaaaatagcctcagatatggatttaagcctaataaaagatattgtacgagaggctcaggaggatatcaatagcaatggacctgcatggagttcttggtcataa

SEQ ID NO: 27663 - DNA, 540 bp, Escherichia coli
atggagaatgttattttaattgactataatgattgtgaaacggggattgccgaaaaattatacacccacaaaaaaggtattttacatcgggctgtttctgtttatatatgtaatagcgatggaaaattattgttacagcaaagagcacttggaaaatatcattctcccggcctttggagcaatacctcttgtacacatcccttcccgggagaatcgaacttatctgcagctaaaagaagattaagggaggaaatgggaatagaatgccccttatctaaactattaaagatctactataatgtttatgtcggcggtgatttaacagaacatgagattgcacatattttctacggtattagtgatgatgaaccagttttaaatagtttggaagctatgagttataaatatgtttccttgacagagttaagttctgaaataaaattcaataacgatactttttctcgttggttcgtctattgtttcccatatattaaaaatgctttcctgaatgagggtaattataccaatttattaatttag

SEQ ID NO: 27664 - DNA, 1029 bp, Escherichia coli
atgaaagtagtatctgatagttttaatgacatgcataaacgtcgttattttaatgacacaatggatattattaattataatcaaaaaacaataagatatactgacataattttttactttaggactctgaaagaaattagattaaaatatccattcaaagaattagaatcattatttgatcctttgaatatttatcctttttactattttatgccatttctattcataagtgatctccatgataaaggacagtatattgaaaggataaggtacgtcggtattatatcaacgcttatagctcgaagagcaatcctcacagacctctttgtcgatgaacagtacgagcaactaatttcaagaaacatgggagatttaaaaaaagaatatcttgggtattatttgcaaataatagatgtggaaattaataatattgcttcaaaaatatttatagagcctagtagtttctatgctttttataatcgtcgttttaacgagtatgttaacaccatgttaatggaaaaggatatttcaccattaataggcatggatgaggaggcgtttaaaaagtacgcagttggaaaatctatactgcatttacttgttagcgatatggttcttcatattataaaaaaacaagagttaacacatcagtttgataatatgatgaaaagctttattatgtatcttacccttcaggatgatgttctcgatataatggaagatatacaaaagcagcaaccatcgcatttctacccttggatttctgatggtaagatcattgaaagtattgatgaaaatgttgaaaaagctgtgctccttaagttttatctcggtggaggtattgaaagatgcgaggatctcattaataaatatgttaaagatatcattactgctgtaaaaaaaataaatcatcctctaaaatcatggttagaagttattgaaagaatgtcattaaaaacaaaagacaaattggattcatttaaagtagttagagataagttacatttttttctgtcacaacaggggtaa

SEQ ID NO: 27665 - DNA, 234 bp, Escherichia coli
atgagcctgaaaacggagaaaatccttaccggcgagaatgttctgcgagccgccaccggacgcattgaatggctgttcgatacattttcgtcagtctgcctctccttttccggcggcaaggattccacagtgctgtttcaccttctggcggaagaggcccgtcggagaggtcggcgtgtcccagtaccagccggaatgggtctgctgggagccgggtgtggcccgggtccgtga

SEQ ID NO: 27666 - DNA, 315 bp, Escherichia coli
gtgctggatataaaaaatgagtatttcaccctgtcggtggacctgtcggactgcacgctgaccccgaaggaaaaggaggttatacgcctgctgctggcagggtatgacgtgatggctattggcaggatgaagcagcgttcagtgaagacggtatcatcgcaaaagctgagtgcgtataaaaaactgggggtgaggggggatatcaccctcttcccggatctgatacaacggcggggcatgcaggtaatctgcagaacagatggttatctgtcgacaccggataatattaacatcagtgcagaccaggttggctga

SEQ ID NO: 27667 - DNA, 495 bp, Escherichia coli
atgagaaggtggcaggtggaggattttgatgaccacggcaacctgcgtgtcaggaagggaatgtggctggccctgtttttgctggcccatccgtggtggctggttgctctggagatgtctgttgagaaatgggaggggcgggtactgtcggcgatatacccgaccatggagctgctgtatgccggactggctggtagcgtgagtgtgtttgtttttttatttatttgcccgtttcgccatgcggctccgcggctgatggcggcggcgtatgctctggttctgatgacctgtgtcctgatgctggtccggacgggtatacagctgtaccacacggccgggacggatgatgtaaatctgtggctgtcgttgttctttctgactctaggatgtctggttgaactctggccggatgagcgcaaccgggagacctattacttttttgtaccggaaaaagagcatctgacgggaggtctgtgtgctggatataaaaaatga

SEQ ID NO: 27668 - DNA, 1515 bp, Escherichia coli
gtgactgaccctctgaccctgaacggggaaaatctgcgcctgttctgcttgagttactacccggattcgcagatagtcctgcagccggatgcgctgtggcagtatgacaggcacactgtggtcaggctgtttttcgccctgctgagcgggcgcgccctgccgacgccggctgcgcatcagaagcgtgaacagctcctggcctggctgccggagaagatgaaggagattgattcgctggcgttcctgccgcagcaggtactgcacgatgtgtatatgcactgctcttatgcggacttaccggaaaaacaccgtatcaagcgggaaattaaccgtctgacctccagtgcgctgacacaggggtatgccgactgtctgccagtgcgggcgccggagccaggtcgtaaaaaaccggtgctggccgtggtgctggagtggtttacctgccagcacagcatttaccggacccactccacctccatgcgcgccctgcgggagcatttccacctgctggggattgcacagccgggggcgaccgatgagataacccggtcggtgtttgatgagttccgggagctgtcggcagataacatagtcggggatgccatccgttacctgagtgaggtgcgtccggacgtgatttattatccgagcgtggggatgttcccgctgacggtatacctgacggccctgcgtctggccccgctgcagctgatggcactgggacatccggccaccaccgggtctgagcatattgatggtgttctggtagaagaggactatctgggcgacccgggctgcttcagcgaaccggtctgtgcggtgccgaaagatgccatcccgtatattccgccggtcagcacagagcgggtactgccggagcgcattcccttccgtgagcgggcaaaagcggtctggccggcagcgctgccggtgcgggtggccgtgtgtgcatcggttatgaaaatcaacccgggcttcctggacaccctgaaggaaatcagtaacagaagtcaggtaccggtacagttctgcttctatatggggtttgcgcagggactgaccctggattatctgcgtcgggcaatccgtcaggtgctgccgactgcggaggtgaatgcgcatatgccggtgcaggtgtaccagcaggccctgaacagctgtgagctgtttgtgaacccgttcccgtttggcaacactaacgggctggttgacacggtccgccaggggctgcccggtgtgtgcatgaccgggccggaagttcacacacacatcgacgaggggttgttcagacgtctggggctgccggcgtcactgatagcccgcacccgggaggagtacgtcacggcggtgctgtccctgacggagacgccgcgcctgcgtgagcgtctgcagaaatacctggcagaaaacgacgtggagaaggtgttgtttgaaggctgtccggagaaattcgcagagcgggtatggacattacgggaagcacagcgctgtcgcgaagaggaggcggcggaatga

SEQ ID NO: 27669 - DNA, 1101 bp, Escherichia coli
atgcataaaaattggaattattcaaacaaaccacttgctaatttagagtctctattcaaaatgctggaaacaaatgaagagaggctcacttatcttttaaaaaacaaaaaaaattatttcaaaacggtgccggtaataagaaaaggcaaaaaaagaacgacgtataaagtggttggtgaattattaaagatacatgagcttattaaacagcgtattttttctaagatatcacttccagagtatattactggaggtaggaaaggagtcagttatatagatgattgtaaatcccatcttaataagtcaattatcattcaagaagatatgaaggatttctttccttctataaaacaagatctgatagctaaagcatttcaatattacatgaacttctcccctgaagtttcatcattaatagccaatctatcaacacttgaaggctcacttgttcaaggaactaagttaagtactgatattgccaacttaatatttttagaagaagaggctcttatcagtgaggaagtcggaaaattaggtggaaattacacgagatatgtcgatgacataactattagtttcgaatcagaagttaataatgaagatatttcaaaaataaaaacaatgattttgtcaatggcgctcaaaagtggggttagattaaataggaagaaatcaagggttttgaggaatggtcagtccaaaatcgtacatggtgtaaaagcaatcaaagagattagaccaacacaaaaaagaaaacataatataaggatgtgtctttttaatttgaagaaaaaagtgattgaaagagaaaatgttatggatgttctcacaatgtattttaagattaggggattagtaaatacattaaagcagcaaggtgataagaatcatgctgagtatataaaacaagctaatcagttagttgctggcattgataaaaaggatgcaataaaatcaatcaggaaaatgaggaaagttaaagatatcaggaaattaagatcgttatattcaaagttaaaaccattagggtattcatctaaaagtgtttctgccattttggatgttgaatataaaacctgtaaatgtaaaattaataactaa

SEQ ID NO: 27670 - DNA, 555 bp, Escherichia coli
atgcgtaaatttttactcatagcaggtcttgctgctcttttatcgggatgcggtgaaaaaggggattttgagaaagtgatcaacgcgaaaatatcgcaatcaaagctgtgctactccttgcaggacaatgacattgtgttcaataaaggcttccccatccgggtgaatcatggctaccgttcagcggggtatagtgccagtgatgaaatcttaaaaggtctggttaatcagggactgcttgatgtctcccaacagcctaatggttttagcagtgttgatattctggaagtcactgataaaggacaagaggttgagttttgggatcgcaaagatggtgcctgtgttggtcatcgggcagttgctgaggttaaaagctggactgaaacgagtgagggtaatggcgttaaaatgacgcaagtgacctatacgtggaaactggatggtgtgccgggctgggttgataaaagtgccttctctggcgtgaaagggatgtctgaaccagaagaagccaaaattgttctggtgaaaaccaataacggttggcaagcgcggtaa

SEQ ID NO: 27671 - DNA, 2682 bp, Escherichia coli
atggtcacgatttgtgttgacggtgaaaataagactcataaaattaccgactggacgctgtgggctggaaatgacgacagagaggttatgctgacctgtcattttcgcagcgggagaaaatatactcgtccgctttctgtatgtcagataacgccaactgtaaatttgcgaaatgttttcctcgaaaggaaagggaacgctgtaacatcccgggctgaactggttattatatatggtgataaatatgctgctgtttattaccgcgagggtgaacgaccctacatcatgaaaacgaccggccttgactttcaacagtgttcagcatttacagagcatgccgtgtttaattacttgtgtagggtggctaatgaacgtattttttatgcccgtggtaataacagaaatatcgatgagaatatccttaggcagataaagaaaatagttcctcatccggataccgccttgcatgcatactgttcaggacagagtaaaaaacgtgattcgccatggggtttgatttttccgtttggtcttaatgaaagtcagttgctggctgtcgaacgggcattttcctcacagatttcagttattgaaggaccacctggaacaggtaaaacacagactatactcaatattgttgctaatatattaattcagaataaaacagtggcaattttgtccaataataactcagctgtcagtaatgtttatgaaaagatggacaaacagcaactgggatatgtgatggcacgactggggagtacggagaacaggcaacagtttttttcaacgtcgatttcgcgttctgaggaagtcttacctgactcaccgtctgcaaatgcgattgatgatgtacttcaacaagtgaaaaaacacctgaatgccattaaccaggtcgcttcgttaaaagcagaaattaatgagctgaatattgagtataaatacctgcagcaatggcagagtcagaatcttcgaccggaggagcttttttctcacaaataccgattttcctcacaaaaaacaaccgacctgatggcttatattcattacctttctgacaggcggattggattcagaaacagaattgatttgttgttaaacttcatgatactgaaagtcaaaccattgatgattccggagagaaggctggcgctatttacttctcttcagctttcttattatgaaaaaaatatccgggaaaaacaaatttctctgaatgaatatgaggaagtatttaaaaaatctgattttaaaattttactggggcgcctgacatcatggtctatgctttatttaaagcaacatctgcgaagaaatgtttcaacaagaagttcattctcggcagagacatacagggatgaatttgaccgttttataaagcgttttccgattattggtagcagtacgcattcgattattaactctatcggcaagggggcccttcttgattatgttattattgatgaagcctcgcagcaggatattgttccgggcattctgggactgggatgtgcccgtaatgtaatcgttgtaggggatcgtaagcaacttccacatgttcctgtattactcccgaacagcccatctccaccggcagaatactataattgtgagaaatatagtctacttgattcggtttgtatgttgttcaggaacatggtgccagtaacccttcttaaagagcattatcgttgtcatcctaaaatcattcaattttgtaataagcagttttatgataatgctctgataccgttaacggttgattccggtgaagcctcattatctctggtcatcacggcaaaaggaaaccatacccgtaatttttcaaatctcagggagcttgaatctctggaaggtcattactgggatgaagaaagtagcaggggatacattgccccatataatgcacaggttaatctggctgaaaaagtgctgcctgctgattttgtgaaatcgacggtgcataaatttcagggacgggagtgcgatgaaattgtgttttccactgtgctggataagaagcgcagcagccagcacagtcggaacatcgcgtttgttgataatcctgaactggtgaatgtcgctgtttcaagggcccgaaataaatttacgctggtgactggtaatgatgtatttgaacgccacgctggacatattgcggcgctgattcgttacatcaaatactacgctgatgacggagagattttcgagagcccggtcatatcagcatttgatttgctgtacagtgagtatgacaaatcactggaacgactgaatagtagattgaattcaaatgattcacactttaagtcagaacagattgtggcctgcctgttgcgggatatcctgtcgcaggatagttatcggagtatgatgtttcattcacaaatagcgctgaatcagttggtgttgctggagcggggggattttacacaccgtgaacagttattcatgcgtaaccgggccagttgtgactttgttgtttactataaggtcgggaagactccattaggggttattgaagtggatggaggttatcatctgaccagtgttcaggctgaacgtgatgaacttaaaaacagtatactgaagaaatgcggcctgccattgctaagattacgtactatagacagtgatatagaagggaagttgggagcgtttctgtcaggcctgacaggctaa

SEQ ID NO: 27672 - DNA, 1071 bp, Escherichia coli
atgagtacagaaatgaaaacggggctggtgctgtccggtggcggggcggtgggcgcttatcaggcgggagtggttaaggcactggcagagtgtggtacacagatcagcatggtttcagggaccagcattggcgcattcaatggtgccattatcgcggcctctcccgatctgtcagaagctgccgtacgcctggaggcgctctgggagcatctggggaataatcaggtgctgtcggtaaacagattggtttacttttcattgctgaaaaaattgttccaggcaatgaacctctgccagatccccggacgtgcaggagcactgcttacgacgcttcttcgccatatatcgacaatcaacgggtttgacaatctgatggctcagccgttgttgtcagatgagcccctgacagcgctgatggatcattatcttgatactgatgctctggcagacgggctaccgctgtatgtgtcgctgtaccccacagaagggggcatgcaggatattattgactgcattcgtgctgaactgggtgtcggaaccacgaaaaacgccgtttttcagcatatccagagcctgccccgcggacagcagaaagaggctctgcttgcgtcagccgcgctgcccctgctgttccgtccccgtgaggttcaggggacaatgttcggtgatggtggtatgggaggatggcgaaatatgcagggaaatacccctgtgacgcctctggtcgatgccggatgcaatatggtgattgtgacgcatctgagtgacggttctttatgggatcgccaggcttttccggacaccacaatccttgagatccgtccccggaaaaggctgaaatatgcaggtgatggtggcaacagcggcggtctgctcagttttacatcggcacataccgacgcctggcgtcagcagggctatgaagacacgatgctggcgatggagcatatccggaaaccgctggcagcacgtcaggcactgacccggtcagaggcggtattgcagaaaagcctggatataacggaagaggcagatttggcactgagaaacgcgatggcccggattaaataa

SEQ ID NO: 27673 - DNA, 1053 bp, Escherichia coli
atggctggttatgggctgagacgtcttttagtagacgaaaatggcatagctaaagaaatattgaatttccgcaaaagaaagagtattcaaacagatagggtaatattaattccgggaccaaaaaatgaaataaaaattgtaaatagaatctatgatctctttatagatagtaacgtcccagaattcattattgctgagagattaaatgaacagagcatacctgcagaaaatggaacatcatggactcgtgcaaaaatacatcaaattttgacaaatgaaaaatatattggaaacaacatatataacaaaacctcatctaaactaaaaagtaagcttgtaaaaaaccccaaacatgaatggattagatgtgacaaggcatataaaccaattatttcaaagaaaaaatataataaagctcaagaaataattcagctccgatccattcatttgactaatgaagatctattagaaaagctaaaagaaaaattagaatctaatggaaaactatcaggctttatcattgatgaagatgatacaggcccttcatcttctgtttatagaacccgatttggtggtcttttaagagcatatactttgattggttataagccagaacatgattacagctatctccaaataaatgaagcactaagatcattttactcagagataattgaggattttaagggcgaaatattaaaaagtaactgtcatatagacgagtataaatattacccaatgctttacatcaatgatgagtttttaatttccgtccttgttactaaatgcatacatatgaaatcaggtaaacttagatggaaagtccggtttgataactcacagaaagcagacataacaattgttatacgaatgaattcacaaaatatttcacctcttgatttttatatcataccaaagattgaaaacgaatatagtaaaatgtgtatgatggaaacaaacaacattcggttagatctctatagatttgataatcttgataaatttctacaaattattactcgcatgaaagtgagggaactatatgctgcctga

SEQ ID NO: 27674 - DNA, 564 bp, Escherichia coli
atgtcaatcacaagtgttgtattaactaaagaacaaaaatccattattgcagaagcattagaggttatgcccgaagatctagaagaaataaaaattaaagcaaccagctataaaaagacgtccttcaaggacgatttctcaatggtatttaaaggtaatatggcgacactcgccagaatggatttgacgcctacagcatttagaattgtgatttatctcttctcagccattgattacggtaatattattcctgatttttcacagtcacgtactgccaaagagcttgggctgaataaatcaaatgtttcacgtgcattcaaagagttatttggaaaaaaaatacttattcgtgacaccatagataatcaggtatatctgaattcaaacttgtgcgttaagggaattcctcgtcgtttcaatgaagatctgatggataaattcagaaaatccagactggagacagaagattttgccaattcgtttaatttttatcgtgccgggagtaaaacaaaatcagttaaaaactccagaagacgaaatcctgcagacggcattccattttaa

SEQ ID NO: 27675 - DNA, 135 bp, Escherichia coli
atggtgttggtatttaaactcagtaggtatagtaacactcgcatcaatcagttctgtgatagcctgataaaattgagtgggtgtaatatgtatcccttcttgctgtgctatgggcgtaacacgatgaaaaattag

SEQ ID NO: 27676 - DNA, 360 bp, Escherichia coli
atgaaaaaatatattttggtagcacttgcaggattaagtcttaacgcgtttgcaggagggagtggatggaatccagacgaagtcgatccaagtcgttgtgttatggctatgggggcaggctctacctctgcaggttatattggataccgacaggataactcagagtgcatgcagggtataaatgaaggaaaagtaaaaggtgtaaatgtcgaaggtcatcatgagttcaaagatggaactagggatacgttcagtggattcgtatccccgacatcacctctggtgctaaaaacggatatctcaaaagttaataaggtaggtataaagaattggtcgtacaaagggacttgggttaaataa

SEQ ID NO: 27677 - DNA, 885 bp, Escherichia coli
atggagaaagactatttatcaaaaagagatgcaataaaggctacctcttcatggacacataaagatgtaaatagtgaaagaggtagtgaacaatttattgagctgggattcgaaaaagaagttttttcaagacctaaacctttgggtactcttttacgtatagtagaaatagctacacacccaaatgaaaaaggtatagcacttgatttttttgggggatcaggtacttttggtcatgccgttttcatggccaatgcaacaaagaatagaaagataaattttatcattacgcaactaccagaaccagttgttccagaaacaaaggagcagattgttgctgcaagcttcttaaataaaaatggaatgccattaaaaatttctgaaataactaaagaacgccttcgccgagcaggtaaaaaagttcgtgaagacaatccagaatggaaaggtgatgttggctttcgtgtgtttaaacttgatacatctaacatccgtccgtgggaagcgactgctgataccctttcacaacagattgatgcctatgtaagtccaatcctcgaaggccgtagtgaagaagatttactcacagagttgatgcttaagcgtggcattgacctgagtgtagacattgaaacccgtcagtttgatggattaaccgtttcttgcgttgacggtggcaaattgtttacctgctttgctaaacaaatccctgcatcttcagtagaagaactgaccaaggggatcatcgactggcataagagtttaaaagttgggaaagatacggtctgctatttccttgatgatgcgtttgaaaataacgtcgctaaaacaaatctttgcgccattctggaacaacacggcctgactaacctgcacagcctgtaa

SEQ ID NO: 27678 - DNA, 405 bp, Escherichia coli; identical to SEQ ID NO: 25332

SEQ ID NO: 27679 - DNA, 1539 bp, Escherichia coli
atgagcagctcacttcctgacgatatcaatgcactgaaacgtctccttgccgaacaggaggcgctgaaccgtgccctgcaggaaaagctgaacgagcgtgaacgcgaaatagaccatctgcaggcacagctggataagctgcgccggatgaacttcggcagccgctcggaaaaagtctcccgtcgtatcgcacagatggaagctgacctgaaggcacttcagaaagaaagtgatacccttaccggtcgggttgacgacccggccgtgcagcgcccgctgcgtcaaacccgcacccgcaaaccgttccccgaatcactcccccgcgatgaaaaacggctgctgccggcagcgtcatgctgcccggaatgtggaggctcgctgagctatctgggtgaggatgccgccgaacagctggagctgatgcgcagcgccttccgggttatccggactgtacgtgaaaagcatgcctgtactcagtgcgatgccatcgtgcaggcccccgcgccttcacggcccatcgagcggggtatcgcaggaccggggctgctggcccgcgtgctgatctcaaagtatgcagagcacaccccgctgtaccgccagtctgaaatgtacggccgccagggcgtggagctgagtcgttcactgctgtcgggctgggtggatgcatgctgccggctactgtcaccgctggaagaagcgcttcaggactatgtgctgactgacggtaagctccatgctgatgacacgcctgtcccggtgctgttgccaggcaataagaaaacgaagaccgggcggttatggacctacgttcgtgacgaccgtaacgccgggtcaacgctggcgccggcggtgtggttcgcttacagcccggacagaaaaggcatccatccgcagacccatcttgcggggttcagtggtgtactgcaggcggatgcatacgccgggttcaacgagctgtaccgggatggccggataacggaagccgcctgttgggctcacgcccgccgtaaaatccacgatgtgcacgttcgcaccccgtcagccctgacggaggaagcgctgaaacggatcggcgaactgtacgccatcgaggcagagataaggggaatgacggcggagcagcgccttgccgaacgtcagttgaaaacgaaaccgctgctgaaatccctggaaagctggctgcgtgaaaagatgaaaaccctgtcgcgacactcagaactggcgaaagcgttcgcatacgccctgaaccagtggccggcgctgacgtactatgcagatgatggctgggctgaggcggacaataacatcgctgaaaatgcgttgcggatggtcagtctgggccgcaaaaactacctgttcttcggttcggatcatggaggagagcggggagcgctgctgtacagcctgatcgggacgtgcaaactgaacggagtggagccagaaagctacctccgctatgtccttgacgtcatagccgactggccgataaaccgggtcggcgaactgctcccctggcgcgtagcactgccgactgaataa

SEQ ID NO: 27680 - DNA, 336 bp, Escherichia coli
atggcgtctaaaaaattttactcagatgatgacatccagctggcaaaagctgctttatcggaattgccggacctcaccgctcaacggaaaacattgcgtgattttcttgatgccattcgtgatgacattattgtcctggtaaggacaaagggttatacactggcagatgttcgtgacacgctcaaaaatgcagggtatgaagtaggagagaaggcacttcgtgacattattcgggaagcagaatcgaaaaaactatcccgccgttcttcctctaaaacagcacctaaaaagacagattcaggcagtaaagatggcatcgatatgaacaacaattga

SEQ ID NO: 27681 - DNA, 786 bp, Escherichia coli
  misc_feature (773)..(782): n is a, c, g, or t
atggatatgctgcattttatcgatgggattaataaaccctcaatagtaagctaccattctgatatcgtcaaacagaaatcttttttacgtctgtattcccccttaatgaatcattttttggctgctgtagattatattgttactgcttctccaaattatgcacaaacaagtccagtactacaaaaattcaaaaataaagttaaagtcatcccatacggtttaaatgaaagttcttattcacttatccctgctgaaaaactggaatattggagacagaaagttggtgataagttttttctttttataggtgcattccgttattacaaaggattgcatacattattagatgcagcgtacacgacatcgctaccaattgttatcgttggcagcggtggaatagagaaggaaatacgattaagagctaatcagcttaacctttcaaatgttcattttgtaggtgcattacctgaagatgataaagctgctttattacaactttgctatgcagttgtgttcccatcacatcaacgttctgaggcttttggaattacgttgcttgagggggctatgtatggtaaacctttaatctcttgtgagatcggaacaggaacgagttttattaatattgatggtcaaacaggattggtagtgcccccttctaattcttacgcgctcagagaagctatgttgaaattatgggattcaccgttactagctgagatctatgggcaaaatgcgttctatagatttaaggagttatttacttctaacannnnnnnnnnttga

SEQ ID NO: 27682 - DNA, 492 bp, Escherichia coli
atgaatataaaacatgtgcgtgaatattataattttgaatacgcaattccctttttcgttggtatgattttttttggtgttgcttttaattatgatataatttcaccatctaatattagctggttagtaggagatcgtcttcaatcttatctaggttgggaatacttccgacatgctccttggcaatttccagtggtaggccgtacaaactacggaatggaattgtcttcatcgattgtttttaccgattctaatccgtggctatcgattctacttaaacctttttcttcttttttgccatcgactttccagtttggcggtgcttggttattattatgtgttatagcacaagccataatattatggaaaattatttctatatatactcaaaacaattgcattaaaacaattgcattagtatttatgttatttaatcctgcatggataaatagaactgggcatttaatgttgatgtctttttttatattatag

SEQ ID NO: 27683 - DNA, 651 bp, Escherichia coli
  misc_feature (635)..(644): n is a, c, g, or t
atgattagccggggtgtaccagaatcgacaataaacgttatttttaatcccgttgaggcgaaaaattcagtcattcctgcacccggggaaggcgaaacggcaacattcatttatgttgggcgcatgaaatttgaaggccaaaagcgcgtaaaagatctgcttgatggcttatcacaagtgcaaggtgactggaaacttcatgtattgggagatggctccgatttcgaaaaatgccaggcttatggtagagaattaaatattgatgatcgaattgtctggtatggttggcaacaacatccctggaaattagttcagcaagatattaaaaaagtgagtgcattattactcacgtcatcttttgaaggtttcccaatgactctacttgaagccttgtcgtgggggatcccttgtatcagtgcagattgtgtctccgggcctgttgatatcattcagcctgatgttaatggtcatttatatcaaccgggggatatgaccggttttgttgctcttctcaataaatacatagccggtgaaattcacatcgcacatgaaaaaattccggcgtcgatcgataaattttatcaaccgaaatattacgacagattgcaaaagataattatttctgttatttcccnnnnnnnnnngaaataa

SEQ ID NO: 27684 - DNA, 369 bp, Escherichia coli
  misc_feature (331)..(340): n is a, c, g, or t
atgaaaatagcctttattggcgaagctgtttctggatttggcggcatggaaacagtcattcgtgatgttattactaccttcaggcaacaacatatccaaagtgaaatttttttcttttgtcgtaatgacaaaatggataagggatggctggaaggtattaagtactcgtgttcattttccaatattcgcttaggttttttgcgtcgcgcgaaacatattcatgctttaagcaaatggcttcatgattatcagccagatgttgttatttgtattgacgtgatctcgtgtttgtatgcggccaaagctcgtaaaaaatcggggattgatgtannnnnnnnnnatatatcacctgtgccgactatcatttag

SEQ ID NO: 27685 - DNA, 492 bp, Escherichia coli; identical to SEQ ID NO: 21665

SEQ ID NO: 27686 - DNA, 645 bp, Escherichia coli
atgggggattctgtgacacctgaagtggaggtactgagtgacatgattcgtcagtacttcagccaggaacgaccagaagaagaggccatacaggcccttaatcacctgcgcagggtgcttcatgaggtcagtccttttgcacaggagcctgtggactgtgtgctgtgggtgaaagcggatgaggtggtggctaacgattataaccccaatgtcatggcgccgggtgagaagaaactgctgaaacattcactggagcaggatgggttcacgcagcctgtggttgtctcggaagagaaagagcattatctggtcgtggatggttttcatcgtcagttactgggcagggaagcaggtacgggagaacgtctgaagggctggttgccagtgacctgtattaatccggaaagaaagggacaggcttcacgtattgcagcgaccattcgacataaccgggccaggggtaaacaccagataacctctatgtccgatattgtcagggatctttcacgcctgggctggatggatgaacgcattggcactgagctgggtatggaccaggatgaagtactgagactgaaacagattagcgggctgacggaattgtttcaggaagaggacttcagcccggcatggacggttcgctga

SEQ ID NO: 27687 - DNA, 843 bp, Escherichia coli; identical to SEQ ID NO: 11338

SEQ ID NO: 27688 - DNA, 243 bp, Escherichia coli
atgagtaaagcaataacagaagtccacgaaatcaaagtttacaatgaatctaccagattattccttgtgaagtcattttattgctatgagctttatatcagtaatatgctagaaaacagtaaggaaggatttaataagtttcttaaggagtgtaaaagctcaggctctatcagagatgttttattcgatgaggtcaaagtaaatctgagacatatgcacaacgttatttttaactcaaactaa

SEQ ID NO: 27689 - DNA, 537 bp, Escherichia coli
atgttacgcgataaatttattcactattttcagcaatggcgtgaacgccagttaagccgtggcgaacactggctgacacaacacttggcggggcgttctccgcgtgaaaagggcatgttactggcagcggtggtgttcctgtttagcgtcggatattacgtccttatctggcagccgttgagcgaacggatagaacaacaggagacgatgttgcagcagctggtggcgatgaacacccgactgaagaacgctgcgccggatattattgcagcgcgaaaatctgccacaacaacgcctgcgcaggtatcgcgggtcatcagtgacagtgcttccgcgcactcggtggtcatcaagcggatagccgagcgtggggagaatattcaggtctggatagaacctgtggtgtttaatgaccttctgaaatggttaaacgcactggatgaaaaatatgcgctgcgggtaacacaaattgatgtcagtgctgctgagaagcctgggatggtgaatgtgcagcggctggagtttggacggggataa

SEQ ID NO: 27690 - DNA, 498 bp, Escherichia coli
atggatggcgagcctataagtcgtcagcaaatgagaaattgtctttttagtgggcccggaacgattctgctgaaaaaaattgctgctagtgaggattttatccgagtaacagggaaggggctagattcgaaaacaatgcgtgatcgagaagttattaacagattttatgctttttatcttctgggatatgagtcgtataatggtgatatggatgatttcctagctaaagcattattaataatgaataaaatggatgttgttgaattaaatgaactgaaagaagtgttttttaaaacattaaaaaataactatacattgttccaacaacacgcctttagaaaatcgttagcaaataaaggcctagcggtaaaccgatcggcagagttattatctgattcttcctttgatgatgccgttactattggtacgaatagtagaagtaaagttaatacgcgctttcagttagcgaatgaaatattatgggggttggaaaaatga

SEQ ID NO: 27691 - DNA, 258 bp, Escherichia coli
atgcttaagaagacattttcattatttctctggttttttgtttctgtcttcgttctgtctgtttgctatgttatcggcgtgttcagaaactggacagatactacaactgcactttactggatttctgtgattcttgttactctttcctttaaatttattatggagaggttccttggttcttacttacgggagattcagaaaaaaacaactctttgcttgaagatatcaatcttcctgtctttcaccgtaattgtgtaa

SEQ ID NO: 27692 - DNA, 309 bp, Escherichia coli
atgatggagctgctggacaaactcccgcaggtcatggtggagatttcagacgagcaggtgcgtgttctgattcattacatcgttaacgcaggggacactgtatcaccggaatttatgcgggcgctggccgagcgcctgccgcagcatgaggataaactgatgacaatcgcagaacgtcttgagcagaaaggtgcgcttgaaaaggccctggccattgcgcgtcagcttcagaaaatggggatgacacctgagcagattaagcaggctaccggactgtccgaagctgaactgaaaaaaatcattcactga

SEQ ID NO: 27693 - DNA, 321 bp, Escherichia coli
atgaaaacatatgcatttaccacactcattgcgtccatttttttgctgaccggctgcaccagtgaaccgtctgagcaggatatttacactgcgatgaataaggtcgtggagcagacgaatgccatcgttaaatccatagcgagaaacgatatcacgcctgacatgctgcggaagttaaaatcagtcaaaaaacacgactgcgaaaaactatcggataaaagctataaatgcaatgtaacagctgttgtcgataacgaaaaacgcacagcggctgtcaagctggtcaaaacagatgatggctggcaggtcgttgataagtaa

SEQ ID NO: 27694 - DNA, 132 bp, Escherichia coli
atgaaatttcatctaaacgttgacctggaagccagtcttcaatttgtggttcatgaattcttattcttatcacatcaaaatcttcttgatgtgatgctatccactgatggaattcatctccgtcaaatatag

SEQ ID NO: 27695 - DNA, 153 bp, Escherichia coli
atgcaacaagatacaagtggaaatattgagcatctacgcaaaaaaactactaatcaacaagatgatggtgttgattacgagtgtgtaatcaagtctggcactgactattttaaatatttgcgaaagttaaaaaatggaggagaaaatgactaa

SEQ ID NO: 27696 - DNA, 240 bp, Escherichia coli
atgatgccggatggcgaccgtttccacatggtgaacggtgcaaactggtttgaccgtaccgtgagtgctgatgccgcaggcatcatccttacctcccttgtgattaaccgccagttgtggctgtaccacgacagcggggatgcagggttgacacacctgtacaggatgcgtgatgcgcagttgtggagccacatcgaatttcaccccgaatgcaacgcgatttacgcggcacttgactga

SEQ ID NO: 27697 - DNA, 627 bp, Escherichia coli
atgaacgttagaatttactgccgagcatcaactgaggggcaacacgctgatcgagcacttaccagcctacgtgaattttcaaaatcaaaaggctggcagattgcaggagagtatatagaaaatgctagcggggcgaagcttgagcgcgtagagcttatgcggctattgtctgaagcccagtccggcgatctgttgctagtggaagctatagatcgtctgagtcgcctagaacatagcgcatgggtcgaactgaaagatacgctcaaccgaaaaggattaatcatcgtatcaatggatttaccaacgagctggcagatggtcgagatggcaggcaatgacctaaccagcggcatcctgagagccgtaaatgccatgttgattgatatccttgccacaatggcacggcaggattacgaaacacgtcgtaaacgccaacagcaaggcattgagcgagctaaaagcgaaggaatatacattggcagggagaaaaatcaggaagcccgagagatcgttagagagatgttggagcaaggagtaaaacctgaactcatcatgaaggcagcaggaatcagccgagcgacttactaccgtataaaaagtgagctgtcagtcgtaaaatcagaataa

SEQ ID NO: 27698 - DNA, 177 bp, Escherichia coli
atggaaaaagatctgaaagcgttgcgggaatacctgttactctcccctgactatcctgaagttaacgattctctggctaatttctcaactgaagacatgaccaacgaagagatagcggaacgtttgggaattgctccagattggatggaaaccgtagaccccagcaaacttacctga

SEQ ID NO: 27699 - DNA, 2328 bp, Escherichia coli
atgtcttttgcgttggtaggtttaaaaaatttgttatgggtcatattaacgttatttgcactgggttttgttgaagattatattcggaataatacgattttgcttcatcctcttagctatgatgaaaaaaaatttaatattgatcaacttaggttgtacgcacagatacttaccgctatattttcaatatactttgctacaataggtatcattctaagtacaggatataccagacttcggcgagatattatacaaatgcttactaccgagcaggtaggtaatgtgtattcgcggactttagtgctttctgcggtgttttgtcttagtgcaactgctctccacttgttcggggttgaacccggtcttttcgtttatgcaatgggaacattgctgacacttgttagttccttagctctgttcccattaggtcaaagattattcaatttttttgacctaaatcagttagcccgaagtgaaatactcccacgaattgcacgacacatcgaaggtgcgtctaatcccaagaattcagtatctttagctaatcatcactctaaagccgcacatttggcctttgagcagttaaactacattgatgatcgcctgatatgtgaaaaagtaggactcggagataatttacctgctctcagtaatgtttattcggcattacttcttcattaccttaatcagaaacacagaattgattatcaaagttactggttccctagacgaataaaacataagcaatggttcttagctggcgacagtgtaacatccattgctttaaaaacaaggagccaattaacggttgaagaagaaccaaattatctttggttagagaatgaaattatcaataggttggtaggccatattgaacttgcattcaaagccggtgatttcaagctcgggttggatctcatcagtctattctcatctcgtatattaacttatgcacaacagtttcagttcgatattggtatacgtgaacttcggaaaatgaagacgatcattgaaaaagcctttacaccgtctgatgtcgttaattattttgaggaaaaggtgataaaagttggaattgcggatgcatgggctgcattaggcagcaatctttgccttgaaatgttacgccgcatgattacttttgagaaagaattggagcagttctttaaagatgatatctggacagagacctctctacacactttgcctgcttttctgcaggttgagttggcctttatcgtagaacgtatcgaattcgaaaaagagattgaaggacagagattatccaaaccaaagtacgtccagcagttggcggttcagaagttattacaacaatattctaaaattctgccagaagtatgcgattttcacgtaaacatggttccagatttcgttaactcactgataaacatgaagatgccggaagccgcaacgcaagtcgttctcgctagcctacataatcatttgaagtttccccattggtttaatgaactttctctgctcttggagagatacagaaagtacgagcactactctgaaaagctatacgcattaccagaaattaatattgctgaaatgctcaaacagtttgtcgttacacaggatgaagctatagctattcttggtagggtggaaattgtgggacatatcattgaacaagagcaagatgatgaactaccggatcattttggacagatatattttgagttggctgaggaatgtatacatgcgcttgaacagaatgatgaaaataaactgagcaaggtattccctatgttcatggttctctcattgctggcatcagataccaaatttgtagatccgaaactcgatataaacaacgagtttcgactgcatctcctttcatccgcgatcaacgatctgatgtcagttctaggttttgctatcctttacagtgcttatttcgataatgcaaaactatctaaaacagtacttgataggtttaagtcttggctcgagtctgttcccaacaaacagcagtatttgaagagaatgatgattctttcaaatccgcgcaatttcagcttgtgcgcatcaccgagagatatgattcgtcttaactggaaaatggaatttgagcgccgcgcaagacatgatggctttagcgatcaaatgggaatgaatcgagggaaatctcatacgaacaaagttgtcagagagttcttaaactcccattcagatgcatcgcatctcttttgtgctctcgaaattttcccgcaactcgagcaaattgacttcaagatcgattaccatgttagtgagttggctcgtcgttttggcgtggaatacgataaggattttgaatga

SEQ ID NO: 27700 - DNA, 993 bp, Escherichia coli
atgaaaattatcaagaatatacccctttacggttatagcgtcgatcctgagcaattaagttttgttgatagactattgaccaagtctaagaatgaacgaccaggtttctatcaaaggatgttttatgaggattttgctagagtttttaattttgtaaatcacggtgataccaatttgtttcaagtcgaaactaacgacgaagaactcatacgtaaaatgtttggaaatttacaagctagatataggaaatactcggtagatgaaacaatacgtgaattggtggaggcagtagcgcaatcgttgatttggcaaggaacggcatactattttgttcaaaacgttcctgagcaagaaaaaatacatattactcctctcgtttctgataatatattttgttttttttcagtgtattttcagtatgtgccgaaacggtgtgaaagatatttagaacgggatcatgagatgcttccaagagaattaagaatcttggataaaaacaaactaatgcgtttcgaaattcctaggtccttaaggcggatgttgtctgaacaaaatcggactttaaagatcattgacaagcatcaatttggtgttactaatttttatcctcaagcaacatacgaaaatcctaacccgaaaagtcactttgattttagcatttggaaaaatacgcaagagcaagcattattccgagctacgaggaaaaccgggtggaatggtagaaattatgattcatcaaaatgttctgatttcttccattactatcgtcttattcgatttagacggaatcaacttattttacgtgattatatattgttgcaattaggtaaagagctcacaagggtaggtcaccgatataatgaggactttaatgttgtgatttcaccaacaagtgttttgcctcaaatcgataaactagatgagatggaatcattactttctagggaggaaatagattttactgaggtgtcggattactattacgaacgttga

SEQ ID NO: 27701 - DNA, 387 bp, Escherichia coli
atgagcactcttacacgctctcaggtcgccgcgaatatacgcgatatcctactaagtggcaggaagcttaccccaaaagagtttgacgacatattaaggaaagccggaaatcacgaacgtagtcgcgttttaacgctgttacgcaacgattggggaattcctgttgagcagtttaaaacagaggcgtatcacgtcacagaacgcaatttagaagcataccacagcgataaagacgaaacattgaagatctggaggacgaacgccagatatgtaaagacattgcgtaaggtaaacataacgttgtcgttgttgcgtgggctggtgggtaaagtgcctgaagacacgcttagaactgtttacaagggtattgaaaccaaatacctgtga

SEQ ID NO: 27702 - DNA, 195 bp, Escherichia coli
atgattaattacctgaccgctaaagacgcagcagaatatcttggcgtctgtctgtcacgcttctatcagttaaagcgatatatccgaagctttcctccctatataaatcagaccatcaatggacgcaagcgccgggtgtggcttgcctccagccttgatcaatttgccgacagatttctggggggacgaaaatga

SEQ ID NO: 27703 - DNA, 192 bp, Escherichia coli
atgcagttgaaacctaccaatcaaaagctgaacgtaacccatgttgattttgaaaccttcgcggcactgattagatcagagccacaaaaggtgagcaccagcacctgggtttatgatgtgaaatccaccagcggtggaaaagctatcggcattgcctctggcgatgattacttagtaatagatctgatttaa

SEQ ID NO: 27704 - DNA, 192 bp, Escherichia coli
atgaaaaagtcgctgattcggctatctgaggttttgaaacgcactggctatagcaaggcgtgggtatatgctctgatgagccgaggacaattcccccaatcagtcaagattggtgctcgcgcaatagcttttattgaaagcgagatcgatgactggatcgatcaacgtatagccgaatcgcgtagtaactaa

SEQ ID NO: 27705 - DNA, 756 bp, Escherichia coli
gtgactaagatgacaggactagatgcgttttataacgagtcagaagataaaatctggtttggtaatctgatcagcgaactggcaagactaaacaatgaaaatgaaagaatgatcgctgccgctatcttaagtaactacagattgagcaaagctaaaccagatactttaggggggctgggcttttatcagttcgattgggtatcaggttttacaactaatgacgactttgaaaagcagtgtgtggagtttttaggtcttctggctatggggcatgaatacagggagagcccgataccgggggaagaagggactttcaacgttaggaaaggggaagactttttatatcacgatgatgaggatgattggtatgggtcttacgattcgttttatttcaagcgctccgaggttgtgaacttcttcccagaactggatatgaatgttccagataacgaaccagaaattggagcactgtcaaaaaaagtagaaagagaacaaaactggagaggaaaagatacggctttaaagatgatcgccggaatggcgattgccttatttgaatcaagcaaagatttccatagtggaggaaaccttagtatcaatagggttagtgcccaagtaatagaaaacaacataatattcgggaacgatgaagacagcgatacccacccagatacatttcggagattgctaacgaacgctttggataagtacgcccccaaatttaagaaaaaagcaaccaaaaagcgtccaaaataa

SEQ ID NO: 27706 - DNA, 1287 bp, Escherichia coli
atgtccagaaataccctcaacaaattaacagaccgtcagtgcaaagcagctaagccacgagacaaaacttataaattgtctgatggtggtggtctttatcttgaagtatcccagaccgggtcgaagtattggcgaatgaagtatcgccgcccatcagataagaaagaagacagacttgcttttggtgtatatccaaccattagcttacaagacgccagagaaaaacgagacaacgccaaaaagttgttagtcaaggggatagatcccaaagcagagcaaagagcagcaaaagcagaagaaaaaggcgcattcacttttgagacaataggacgtcaatgggttgaaagccaccagatgtggaacgaagaccaccgaaaacgcgtacttagaagccttgaaatgtatattttccctcacattggcacttcggatattcgcaaactggaggcgatgacaattttacctttgtttaagaaggtagatgacgccgggaaacacgatacagccaaccgacttaaacaacgagttaaggacatcatacatagcgcccgtctgagcggcattaagacagaaatcatcacgaatgatctcgatgtccggttaatgcaatatgaaactaagcatcatgccgcactacatcccagagatttaccagactttttcactcgattgggcagctttaaaggtaatcctcttacccgccttgccattgagctaaccatgttgacatttgttcgttcaagcgagttaaggtttgcccgttggaaagagtttgaccttgatcgggctgagtggattatccctaaaaaaagagagcctatcgatggtgtgaggttttccacccgtggcacaaaaacgggaaaagacgaacatatcgtgcttcttagccgtcaggctgtttctattgtaaagcagttgagagaactaagcggaagctacgatgttgtgtttccgaatgaaagaaacaccaaaggcgtgatgagtgaaaacacggtaaacaaggcattacgcttaatgggctataacacgcaagaggacgtaactggacatggattccgtgccacagcctgtagttccctgatggagtccggtttgtggcaggaggacgcagtagagcgccagatgagccacaaagaatataaagacgttaaaagagcctacaagcacaaggctgattacttagaagagcgcaaactaatgcttcaatggtgggcagattatctggacgccaatcgagaaatacatataagcccttacgagttcggaaggagaacacgccgtgactaa

SEQ ID NO: 27707 - DNA, 762 bp, Escherichia coli
atgaataacatggatattgtgaaagctgtaaaagatggaatgaaaaagtcagccgacgcaacttatttaatggatttcaggtctggtgcaaaaataaacactgaatatgtagctaccgtatctataggtctatcgttgttagaaataaaatcttttcgccatggtgattacaaagttatatttgagtaccatacaaataaattcattaatgcaacagttcctttatcgaaacggtctgatccccaaaaaatattctcaaaaaaaactgtcagaaaaaacacaaacacaacaagatcaggcagaattgatattgccatattggacagcagaccatttttcgacattccaatatgtgcaatagaagttaaaggaaatgccccctgtaaaagtcttttattttctgacataagaagaaatcttgaatactttaaacacacaggccctacaggaaattcaagtcttggcctagcattaaactgttcattccattcatacaatgattcaactaaaaaaaattactgcactacaatccaccataaggaagacatgataaggaaattaaaaaacaaatataaaaaatacatatccgaattaaatgaagaaattccagacgatatatctgttacaattgatgtttttacagcagcagagcatttactatctcctgatgctgaccaatatgaatacgaatcacatatagatgacttacatttgacgcttggcgttatggttatattcgaacgaaaatcgatactcaattga

SEQ ID NO: 27708 - DNA, 1761 bp, Escherichia coli
atgactgtacgtcttgcttcagtttcaattagcaactttcgttcttgtaagtcaacatcggctattttgcgccccttcactgctttagttggttataataacgcaggaaaatcaaatattatcttagcaattaagtggctgttagatggctctttgatttcagaatcagatgtgtacgatcctacacaccccgtatccgttgaaggcgttattcaaggtataacagatgatactctgtctttgttaacagaagagaatcaacaaaaaatagctccgtttataattgacgggactcttacctttgcaagaagacaggaatttaataaggaaacaggaaaagccaaaaaaagtctggatgtatatgacggtaccacgtggaagaaaaaccctggcggcatagatggtgcaatctccaatatatttccggaaccaattcatatccctgcaatgtctgacgctgtcgaagactcaacaaaatgcaaaaacacgaccacaataggaaagatactttccgcaattgtttctgaaataaaacaagaacacgaagaaaaattttcaaaaaacatatcagaaataggtaaatatctttctcacaacggtgagaacagattagaaagccttaataaaatagactcaggtgtaaataaaaaagtaaaccaattttttcctgacgtaagtgtaaagttacactttcccacaccgacattagatgagatatttaaatccggcactctgaaagtttttgagtctcgggaagatgaaccggtaatgagagatatcagccgatttggtcacggaacacaacgttccattcaaatggcattaattcaatacctggccgaaataaaaaaagaaaacagcgaatcaaaaaaatcaaacactttgattttcattgatgaacctgagttatatttacacccttcagccattaattctgtcagagaatcacttgtcacattaagtgaatcagggtatcaggttataatatcaactcactcagccagtatgctttctgcaaagcatgcagcaaatgcgattcaggtttgtaaggattctaatggaaccatagcaaggaagactatatctgaaaaaatcgaagaattatataaatcttcatcaccgcaattgcactcagcattcacgctttctaattcatcataccttttattttctgaagaagttttgcttgttgaagggaaaacagagacaaacgttctatatgcactttataaaaaaattaacggacatgaactcaacccgagtaaaatctgcattgttgccgttgacggtaagggtagtttatttaagatgtcacaaatcatcaatgccatcggcataaaaacaaggattctagctgattgtgatttcttatcaaatattctattaacagagcataaagacttacttagtactgaatgtgataatctattgactgctttgattgaatcaatcaactcaggagagcttagtttaaatacaaaagttactacttttgagtcattcaaaagcatttcaagcaaagacttcatcaaaatatgtaaccatgaaaaaacacaaaagcatatacatgaaatacatcaaaaattgaaagataacggaatctatatatggaaatccggtgatatagaggctgtttatggatttggtaaaaaacaaactgaatgggatagtcttttagattgtttatgtgatgaaagcaaagatgttagagcagtaataaaaaaatatgatgaaatggaagatttcataaaatggatttaa

SEQ ID NO: 27709 - DNA, 156 bp, Escherichia coli
atgttttatatgtcatccaactcagatgaattattgattctggataataaccacagagcggcatataccctgacaggcaaatgtccgcttcttgctcaaagcagactgtcagatttgataacttttgggctatgtaaactgtcagtcggaaaatga

SEQ ID NO: 27710 - DNA, 1251 bp, Escherichia coli
atgagtttattaaaaaatagtatatggaactttggtggatacattattccaaccattgtcgctttgcctgcattaggatatatagctcgtgaattgggagcagaaaggtttggcttgtttgctctttgtacagctattgttggttatgccagtatttttgacgcaggattaacaagagctgttattagagaaattgcgtttaatagaactaataaatctgaattaaataaaattattgcaacatctaattttgctataattatactgggtttagttggtgcagctcttttgtttatgaacattgataacctagtgtctttgttaaaggttagccctagatataaggatgatgttgtatcttcgtttaagatactgactataactatacctttatttttgctaaatcagatatttgtatcatatttggagggcatggaagatttttttaatataaatattcaacgatgtattagtagttcattagtagcggggcttccagcttttttcatcattctacatccaaccctgacatgtgcaatgattggattagtttgtggtcgaatggtttcgttaattatttcatattattgtgcaaaagaaatagtattaacagcgggtattagatttcataagcaagttttgtttcgactgttaaagtttggtggctggattactgtaagtaatattattagtccggtcatgagttattttgatcggtttatattatctaatcttctgggggcaaaaagcgttgggttttatatagcgccttcagaatttattaatagattgattaatattccctgggctttggcaagagcattatttccaaaattaagtgctgcaaagacactttcggaaagaaaaaaaaatgaaacaatagcctatattatgctcagcatggtttgcatacctgctgtaattattggagtgggattatcgtatacaatcctaaatatatggttaggtaaagaatatgctgaaaattcaacttatattttgcaagttcttctgataggatttttatttaattcatatgctcagattccatttgctacaatccaggctgcaggtaaagcgaaaatcacggcattaatacattgcattgaaataattccttaccttgttggattgtatttctttattatacattttggtgtaataggggctgcatatgcgtggacaattagagtcagtttagatttcgttattttacttgtagcatctcggggcatatataaatcatggtaa

SEQ ID NO: 27711 - DNA, 522 bp, Escherichia coli; identical to SEQ ID NO: 25587

SEQ ID NO: 27712 - DNA, 201 bp, Escherichia coli
atgactacgactattgataagaatcaatggtgtggacaattcaagcgatgcaatggatgcaagctgcaatcggaatgcatggttaagcctgaagaaatgtttcctgtaatggaagatgggaaatatgtcgataaatgggcaatacgaacgacggcaatgattgccagagaacttggtaaactgaacaacaaggctgcctga

SEQ ID NO: 27713 - DNA, 417 bp, Escherichia coli
atggaaattacagatattctggttaatccagataattacgaccaattcaatatccctactcaatcagttgatttaggttgtgcaactgtcagtgcatggctacttaatggtaaacagttggataaatgccttgatgcacatatgacggttaacagcttccttgcagaaaaaacacactggcaagatgctggagggaaatatgctggatggcttgaaagcatgggatttgaatatcaatctgatgaaggttggtggagccttatagctgtaacgcctgagacaatagaatgcttcgttaaatactcaaacgacgatgactataaacaccaggtagattctgcgatagaaagatataaaagaaaatcattcagccacgaaatatcatcagttcttgatttcatagaagtcttcaaataa

SEQ ID NO: 27714 - DNA, 939 bp, Escherichia coli
atgagcactattcttcttccgaaaacgcagcacctggtagtctttcaggaagtcattagaagtggctctatcggctcggctgcaaaagaattagggttaactcaaccggccgtcagtaaaatcattaacgatattgaagattattttggcgtggaattagtggtgcggaaaaataccggtgtaacattaacacctgccggtcaattgttactctcccgttccgaatccattacccgtgaaatgaaaaatatggttaatgagataagcggtatgtcttctgaggcggtggtggaagtctcatttggttttccttcattgattggttttacttttatgtcagggatgatcaacaagttcaaagaggtgttcccgaaagcgcaggtttctatgtatgaagcgcaactgtcttcgttcttaccggcaatccgcgacggtcgactggattttgcgattggtacgttaagcgcagaaatgaagcttcaggatttacatgttgagccgctgttcgagtccgagtttgtgctggtagccagtaagtcccgaacatgcaccggtaccaccacgctggagtcgttgaagaacgaacagtgggtgttgccacaaaccaatatggggtactacagcgagctacttactacgttacaaagaaatggcatcagtattgaaaacatcgttaaaaccgactcagtcgtgacaatttataatcttgttctcaatgctgatttcttaactgtaattccttgtgatatgacatcaccttttggttcaaatcaatttattactattccggttgaagaaacattacctgtggcacaatatgccgcggtatggtcgaaaaattatcgtattaaaaaagcagcatcggttttggtggaattagccaaagagtattcatcttataatgggtgtagacgaaggcaattaattgaagttggttag

SEQ ID NO: 27715 - DNA, 153 bp, Escherichia coli
atggccactaacaataacaaacgtgacacttttgactccagtgaaaagcctgagggcctggttgttgcaactgtcatcaactcgcgcaagaaaaagagttcgtcagacacatcaaacaagccagagcaatcgtcactcaaagataagaagtag

SEQ ID NO: 27716 - DNA, 624 bp, Escherichia coli
atgtttgatgcatccctgctgaatctgccctgggcaacactggtgacgctgaccagtggttatatcgggtattttattgctaacgtggggctgaaggaccatcacaagcccatcgaggtgaccttttcggcgctggtttttggtctgctggcaatgatggtctatcaggttgttatgtgggcaggtctgaattcgtggcttgcaacgccaccagcgcttctttgcgcttttatttacggtgcgttgtggcgcagatacggtcgcaaatggatgtatgaatttctgcataagcaaaacatctcatggtctgatgatactcattcagcgtggcagtcattgttcaatcagatggatttcactttttctgaaatctatgtatatcttaaggatggctctgttttactttcacgagcacccgggcgatttgcaggacggcctaacggtcctgtcacgttaggtaataagggagatataatcttatacgtcacgcaccggactacagtcgggagcaatatctggacagaatgcgatagtggtgtggcagatgacggatggggaactctggcaacctatatacctgcagaacagattgccagagttgatatccgacgagtttgtcggtaa

SEQ ID NO: 27717 - DNA, 237 bp, Escherichia coli
atgcgctataaaacccccaacagcgcctccctgaagaaggcagaccatgcagatatggcgatggaaattatccggcatttttttgacggtctgacttctgctgaggcgagatatgttctccgggaatgcgacagactgattgacaactcgcgcctgcatatcgagcctgatgaaaagtgtgttttgtattacgggaaagttttacgtaacccaccaccaccgccaccaaagtgttaa

SEQ ID NO: 27718 - DNA, 387 bp, Escherichia coli
atgagcgacctgaatcagtttcgaagtaaagggccggaactcctggtggaactggcacagcatacctctgagaccgttcgcgagattattgatattgagcccgcaattgccgaccagattggtcaggccgtcgcgaaccgcatgatgcaggtctggggcgggcaaaacgtttattttccgatggggatgagatggaagataagccagcgtgaccgtgaaatctatgaggcgtttaacggacgcaaccaccatgaactgtcccgcagattcagggtttcagttccctggatttacaacctggtgaagcgcgtaagaaaggaagaaatcagccggttgcaggggcagttattcgaagacgatgatgaaccggatgacagccgggattaa

SEQ ID NO: 27719 - DNA, 204 bp, Escherichia coli
atggctgaaactattgcctgttttcttttctggtacacatatgcaggattatgcagtgcccggcttcattatgcactgggcttcggtaaccactatgacaccgcgtattacatcctgtatatgacagctgtcatactgttctggcctgtgaccctgccggctgcaactgacattgctgctggcagactgaaaaagcggggctga

SEQ ID NO: 27720 - DNA, 408 bp, Escherichia coli
atggataacgacagcgataacattattcatttgcttcagccagctcctgatgcaggagccaaaaaactgctgaacgtggttatttctgaacgaaagaataacgaacaaaacctgtgccggcatgcccggacaacagtctctgaaatcatccggacgctgacctgttcactgtgcggggctgtactggatccatttgaatttatccttgaccgtgcccgtaatgctgaaaatatcgtgcatgaaattaatcgtcttcataaaaagcgagaagctcttcgtgaatctgtcgctggccttgaacgtgaagaaaaaaatgcgaaagcacgattgcggagtgccagaacagcaatcctgtttgcggaaaatgacctgaaaaatattgaactggagaaaaaatataatggctga

SEQ ID NO: 27721 - DNA, 216 bp, Escherichia coli
gtgactgacaccattatggaaattgtggtatgggctttcctgcttactggtatagccgtgtgcatctgcgccggattcgccctggttgccctgctgacccacgtggtgacgcagtggttatgggaaaagcttaaagcagcatacagcctgaaagagctgtccgacgctgttcgggcatgggaacagcaaaaaaataccggagatactgaacaatga

SEQ ID NO: 27722 - DNA, 384 bp, Escherichia coli
atgaaccgcaccgaacagacgccacaactgacgccggaagatgctgcacagcgtattcgggtactggaagacgaaaacgaatacctgcgcaagagatttgaagaggtggacctgtacttcgggcgcaatctggtcgtcatgaaagctgcagtgattgagtggcgggccaccggtgatgccaggaacggcatggcgtggatttacaacaccctgtgtgggccgggcgaactgccgccgcaagaggagaaagaggcacaggaatacttcaacagggaaactgaagttatcgacagaaaactggctgccctgtaccactggttcaggaaataccacaggacacacgccgcacctgaccagaccaccacaggaggtaccagtgactga

SEQ ID NO: 27723 - DNA, 411 bp, Escherichia coli
atgagtataaaagagagattgcgcgaagcgatggtcgctaagagtctgacaatcaaggcattatctgatttatcgaaaattccatatcgctcacttcaaaactatctacgtggagagcgagagcctaatgcagaagctcttgttgcattgggcactcatttgaacatatcaatagattggctacttactggtaaaggggaaactgtgggagtagagaaagtacagttggctaatcaagagcagcatttcaaccaatctgacctgaagttattggagttgctcaaccaactggatccagaggtgcgaaaagagttactgcgaggcgctgaagaaaaacagcgaatgattaatatggaaaaacagcttaaggagctgtctgcagagttcgagagattaaaaaatacgggttaa

SEQ ID NO: 27724 - DNA, 528 bp, Escherichia coli
atgcgtaaattatttataccgttgatatttgttttatctggctgtggagataatactgccccagctgatatgtccaccacaactaaagagcacgaggtttttagcgttgaaacagataattctgttgtaaatcgtgaattaccgtttattcgccaacaactccccggcctagataagtacgcgggcagctttgaaaaaattgaagtatccaaggatagcgaacgcccggtgacaactgtgcagtttcatatcaaagatgaaaataacattccaagtgactacatagcctctggcaataattgttatttgttcatatccaataatgcccatgaagtgaaaatacctaaatcagcatgtcaggctgttttttttgataaaacggatgttcccggtggagacttgattgtgaaactggataaagaaaatcttccgatgacagatgatgataagcccccgcgagcgggttgtttgaaggtctattcaccagatccagataatgattattgggcttgtccaaggctggattaa

SEQ ID NO: 27725 - DNA, 822 bp, Escherichia coli
atgagcgtgacaacggctgaactggcgtactgcatgacgcttcccccgaagcgggcaatcagctacctgaagtccaaagggtatcagattacctgggaccaggaagaaatgtggcaggaagcccatgccagcgcctttaccgtcgctaaagtgacccgcctggatattctggaagatattcgcggggcactgcagcaggctgtcgatgaaggaaaaaccgatcgctggttccggcaggagctggagccggcgctgaagcgcaagggatggtggggaccgcgtgacacgactgacccggtaacgggtgaaccggtcaccattcagcagggcagtccgtggcggctcgataccatctttcgcaccaatatgtccgtactctacagcgccggtcgttgggcggaacagatggaaaacgtcgacgacaggccgtactggatgtataccggcatcaacgacagccatacccgcaggagccatctggcgctgcatggtctggtgctgcgctgggatgacccgttctggcaggcattttacccgccgaacggctggcgctgccgctgtagtgtgattgccctgagtgcggcggatgtacgtgcccgtggcctgaaggttatcagctccggctctgccatgggccaggaactgaaactggtctcagagaaaaccggcgaaatgcggaacgtagccacttttaataccggcatcacgaaggtggccaccgacgtcggctggtcttatgcgccgggggctgcataccgtcctgaccttgcccgttatcagggtgctcttcagccactggcacagcaggaactgagaggataa

SEQ ID NO: 27726 - DNA, 561 bp, Escherichia coli
atggcttccgataaactggtcgatatcaccattaacgataaatccctgcgccggagtctccgcgcactggagctctctgccacagatctggaacccgcgatgcgcaaaattgccggtgcattgttaacagaaacccagatcaattttatggatgaagggcgtccctcctggctcccttcgctggcagcagaagaacgtggtggacagacactgcaggatacaggacgtctgatgagctctgtcaccacacattatgaccaccatcgggctgtcatcgggactaatgtgatctatgcggccatccatcagtttggaggggagattaaacataaagagcgacagcagagtatccactggcgtcaggacaaagagggaaacctgcgtatgtctgaacgaagccgggcgcatatctcgcagtcgtatcatgtggacgcgtacacatcagaaatgcccgcccgtcctttcctgccactgaaaagcgatgggggtttgcagccagaggctgagcgtgccgtactggacacgattgtccgccatcttgaatcagcggcccgtcgctga

SEQ ID NO: 27727 - DNA, 267 bp, Escherichia coli
atgttcgccgtcgacggcgggtttaaccgacataagctggcagcggggctcccagcgccggatggcatcgacagattcgcgcaccacatgcggaatggcccggtcgacaggccagtcgatataaaggtgcagattgctgccgaattccgggcgatgcgggtcactgccgcggggagtccgcaggatgatttgaatggcctgactgatatcatccagcccccggacgatttcgccgggagcctgaagggccggttgccagaatactga

SEQ ID NO: 27728 - DNA, 1167 bp, Escherichia coli
atggcaaatctacccgaaaccccgcagtgggaagatggcatttaccagattgaggtttctgaccctgtggtgggcggacctgatggaatatcaaaccgccaggccaggcaactggccagccgcacgtcataccttaaacaaaaggtcgaaaaaggtggaaaagaccttgatgaacatataaaagctgcagacccacatacacagtatgcacagaaagaaagtccggtgtttaccggaattcctaaagcgccgacgccagcggcgggaaataacaccacacagcttgcgaccaccgcgtttgtccaggcggcgctgaaggctcttattaatggcgcgccagccacgctggacacactgaaagaaattgccgcagccattaacaatgacccgaaattcagcaccaccattaacaatgcgctggcactgaaagcgccgctgtcgagtccggcactcaccggaaccccaactgcgcctactgcggcacagtcggtcaacaatacacagattgccaccacggcttttgtgaaatcggcaattgcggcaatggttgcatcagcacctgcggcactggatacactgaacgaactggccgtagcgctgggaaatgacccgaattttgcaaccaccatgactaacgcgcttgcgggtaagcaaccggcagacgccacgcttactgctctggcggcactggccacatcagcagacagacttccttatttcacaggggttgatcgtgccgcgttaaccgcactgacaagtgtcggacgcgccattcttggtaagaccagcactcagggagttcttgattaccttggtttgggagaagcggcaaaacggaatgtgggaacaggttcaggtcagataccggatatgagttctttttctggcagcattgccagcaagggatatcagaagttaccgggaggattgattatccaatggggggcaggaggcgcaggtacgggttatgtagcctcgacaggcaatgagatgaatttcccaatcgcttttccgtcgcaatgttttcaggtggtgacatcctacgataatggtagcggaaaaattgttgccggggcagcagggaatatgaccagaacaggatttcttctacgctgtgatgcttctggtggcaattataattttcgctggtttgcaatagggtgctga

SEQ ID NO: 27729 - DNA, 234 bp, Escherichia coli
atggaacgagagttgattgtggaacgcacgctggcaggactggcagcagctcgcgcgcagggacgtattggtggtcgtcgccctaaactgacgaaagaacagcacgaacagatcgcaagattgattcaaaaaggatacgacaggaagaaactggctatcatttatgacattggtctgtcgacaatctaccgttatcacccagtagtagataccacagtgcagcctaaaatgtaa

SEQ ID NO: 27730 - DNA, 150 bp, Escherichia coli
atggtgggatatctaatagtagtattattgaaactggtggacatcaagaggtatctggtcatggctcttatcaggggcaagctaataatacaaccattaatggaggcagacagtcaattgagtacggaggaatttctactggcacgataa

SEQ ID NO: 27731 - DNA, 4146 bp, Escherichia coli
atggagaaaccggcgtcgggaatgtcagcatcaccacggggggggatgtgggaggtcaataagaatgtctataccaccattggtgttgcgggtgtcggaaacctcaatattagcgatggcggtaagtttgtatcgcaaaatattacttttttgggcgataaagcaagcggtatcggcacactgaacctgatggatgcgacatcattgttcgatactgtaggtattaatgtcggtaattttggtagcggcatcgtaaatgtcagtaatggtgccactcttaattcaacgggctatggatttatcggaggaaatgcctccggtaaggggatagttaatatttcaacggatagtctctggaatttaaaaacgtcatctactaacgcccaattgctacaggtcggtgtattaggcgcgggtgaactgaatattaccaccggaggtatagttaaagcgcgtgatacacagatagctctcaatgacaaaagtaagggcgacgtgcgggtggatgggcagaactctcttcttgaaacattcaatatgaatgtagggacgactggcacaggtacgttaacactgacgaataacggtacgctgaatgtcgaaggtggagaagtttacttaggtgtttttgaacctgctgtaggaacgctaaacattggtgcagctcacggtgaggcggcggcagatgccggatttatcaccaacgcgacgaaaatagagtttggctctggcgaaggtgtttttgtctttaatcatactaataacagtgatgccggctaccaggtcgatatgctgattacaggtgacgataaagacggaaaagtgatccatgatgcaggccatacggtgttcaatgcagggaatacttatagcggtaaaacgctggtcaatgacggcctcctgaccattgcgtctcatacggcagatggggtaacgggcatgggttcgagtgaagtaaccattgcaaaccccggtacgctcgacattctcgcatcaacgaacagtgcaggagattacacgctgaccaatgcgctcaaaggcgatggcttgatgcgagtgcagctgtcatcctccgacaagatgtttggctttacccatgcaacagggactgaattcgccggtgttgcccaactgaaagatagtaccttcacgctggaacgcgacaacaccgctgcgcttactcacgcgatgttgcagtctgacagtgaaaataccacatcggtaaacgtgggagagcaatccattggtggactggccatgaatggcggtacgctcattttcgatacggatattcctgctgcgacgctcgcggagggatatatcagcgtcgatacgctggttgtcggcgcgggtgactacacctggaaaggccgtaactatcaggtaaacgggacgggcgacgtgcttatcgacgtgcctaaaccgtggaatgatcccatggcgaataaccctctgacgacgctcaatttgctggaacacgatgatagtcatgtcggcgttcaactggtgaaggcgcaaacggttattgggtcgggtggctcattaacgttacgtgatttacagggcgacgaggtggaagcggacaaaacgttacatattgcacaaaacgggacagtggtcgccgagggtgattatggattccgcctcacgaccgcaccaggtgatggtttgtacgttaactatgggctgaaagcgctgaacatccatggtgggcaaaagctgacgttagccgaacatggcggagcctatggcgcaacggccgatatgtcggcaaaaatcggtggtgaaggggatctggcaatcaatacggtgcgacaggtttcgctttctaacggtcagaacgactatcagggggcaacctacgttcagatggggacattacgtaccgatgcggatggcgcgctgggcaatactcgggaactgaacatcagcaacgcggccatcgtcgatcttaatggatcggcccagacggtagagacattcaccgggctgatggattcgactattttgtttaaagaggggtcgctgacggtgaataaaggtgggatcagtcagggcgaactgacaggtggcggaaacctgaatgttacagggggaacgctggctatcgaggggcttaatgcacgctacaatgccttaaccagcattagctcaaatgcggaagtcagcctcgataatacgcaggggttaggcagaggaaatattgccaatgacggtctgttaacgctaaaaaatgtgaccggcgaactgcgtaatagcataagcgggaagggtatcgtgagcgcaaccgccaggacagacgtagagctggatggcgataatagccgctttgtggggcaattcaacattgatacaggcagcgcgctcagcgtcaacgagcagaaaaacctgggtgatgcttccgttatcaataatggcctgctcaccatctccactgagcgtagctgggcgatgacgcacagtatcagcggtagcggtgatgtgacaaaactgggtaccgggatcctgactcttaacaaagattccgcggcgtatcagggtacgacggatatcgtgggtggtgaaattgctttcggttccgactctgccattaatatggcaagtcagcacattaatatccataacagcggtgtgatgtcgggaaatgtcaccactgcaggtgatgtgaacgttatgccaggggggacactgcgtgtcgctaaaaccactgtcggcggtaacctggagaatggtggcacggttcaaatgaacagcgaaggggggaaaccggggaatgtactgaccgttaacggtaactataccggaaacaatggcctgatgacgttcaacgcgacgctgggcggcgataattcgcccaccgataagatgaacgtgaaaggcgatacccaagggaatactcgcgttcgggttgataacattggcggcgtcggtgcacaaacggtcaacggtattgaactcattgaggtcggcggtaattctgcaggtaacttcgcgctgaccaccggaactgtcgaagctggggcttacgtctacacgctggctaaagggaaggggaatgacgagaaaaactggtatctgaccagtaaatgggatggcgtaacgccagcggatacacccgatcccatcaataatccccctgttgtggatccggaaggcccatcagtttatcgcccggaggccggaagctatatcagcaacattgccgcagccaactcgctgtttagccatcgcttacacgaccgtctgggtgagccgcagtatacagattcactgcattctcagggttcggcaagcagtatgtggatgcgtcatgtcggggggcacgaacgtttcaggaccggtgacggccagctaaatactcaggctaaccgctatgtattgcagctaggcggcgatttggcgcagtggagttgcaacgcgcaggatcgctggcatcttggcgtgatggcaggctacgccaatcagcacagtaatactcagagtaatcgtgtgggttataaatcggatgggcgcatcagcggttacagcgcaggactgtacgcgacctggtatcagaacgatgcgaataagaccggcgcttatgttgacagctgggcgctgtataactggtttgataacagcgtcagttccgataaccgttctgctgacgactatgattctcgcggtgtgacggcctctgttgagggtgggtatacctttgaagcgggaacttttagcggcagcgaagggacgctgaatacctggtacgtccagccacaggtacaaatcacctggatgggtgtgaaagattctgaccatacccggaaagacggaacacgcattgaaacggaaggcgacggaaacgtgcaaacgcgacttggggtgaaaacctacctgaacagccatcaccagcgtgacgatggtaaacagcgtgagttccagccttacattgaagcgaactggatcaacaacagcaaagtctacgcagtgaagatgaatggtcaaaccgtaagccgtgatggtgcgcgtaatctcggtgaagtacgtaccggggttgaggcgaaagtaaataacaaccttagcctgtgggggaatgtcggtgtgcaactaggtgataaaggctatagcgatactcagggcatgctgggagtgaaatatagctggtaa

SEQ ID NO: 27732 - DNA, 162 bp, Escherichia coli
atgttccttaccgacgcaaaaatccgcaccctcaagccttctgataaaccctttaaagtctccgattctcacggtctgtatctgctggtcaagccgggtggctcccgccactggtatctcaaagctggaggttgcgtcccgcacacggcagcacctgagtaa

SEQ ID NO: 27733 - DNA, 555 bp, Escherichia coli
atggatgtacagggagaacggctggatatggaggtcggttttgataatcggcaggccgcttttgacatggtgtgtaccatgctggagaagcgagtcaggcacaaaattctgtatctcggttccaaagatgacacccgcgatgaacagcgttatcaggggtattgcgatgcgatgatgctgcataatctttccccattacgcatgaatccacgcgccatctcatccattcatttaggaatgcagttaatgcgtgatgcccttagcgcaaacccggatttagacggtgtattttgcaccaatgacgatattgcgatgggtgcgcttctgctgtgccgcgagcgaaacctcgccgtgccagaacaaatttccattgcgggttttcatgggctggagattggcaggcaaatgatcccaagcctcgccagcgtaattactccccgttttgatattggtcggatggccgcccaaatgttgctgagcaaaattaaaaataacgatcacaaccacaacactgttgacctcgggtatcagatttatcacggcaacacgctttag

SEQ ID NO: 27734 - DNA, 174 bp, Escherichia coli
atgacccgttctgatgatacccatgaaaacgaggcaaacatgacgccggaagagatgaagaatgagctgcgttatcttcgcgcagaaaatgcatatctgaaagccatgcaggagcacctcctggaaaaaaagcgccaggagctggagaaaaaacgaaagtcatccggagcctga

SEQ ID NO: 27735 - DNA, 1512 bp, Escherichia coli
atgtctatgcgtaaacatattgctttcgccagtatgtgtatgggattatttattgctcagcttgatattcaaattgtatcgtcatccctaaatgaaataggtggtggtctgtccgcaggtaaagacgaaatggcctggcttcagaccagctatttaattgctgagattattgttattccgctctctgggtggctgtcacgggtattttccactcgttggctttttactctatccgcgggaatatttactttaatgagtatcgcgtgtggacttgcatggaatattcagatcatgattttgtttcgtgctttacagggagcggctggcgcatccatgatccctttagttttcacgacggcgtttatttattaccagggtaaagagttggggttggctgctgcggtagtcagtgcgctggcctcactgtcaccgacgctagggccaactctggggggctggatcactgataacctcgactggcgatggctattttatatcaatatattacctggcatatatttagttttgagtattccttttctggttaattttgataaacctgatctctctttactgaaagttgctgattatccgagtattatcctgttggccatgacactgggatgtctggaatatacccttgaagaaggagcgcgctggggatggctggatgataatactattttgctgacatcagttctggcattggtgagttttattttatttgctgcgcgtacacttacaatatccaatccgataatggatcttcatgcttttaaggataaaaatttcacgctgggatgttttttttctttttctggaggggttgggatattctctactgtatatttaatacctatgtttttggggcaggttcgcagattaaatgccgaagagataggttttgccgtttgcacaacaggtattttccagttattttctgttcccttttacttctggttaagtaaaaaaataaatctgcgatggctgttgatggcggggctgggtgggtttgtgttttcaatgtatctttttacccctataacccacgaatggggatggcaggagttactgtttccacaggcaattagagggatttcgcagcagtttgcgatggcccccatcgtaacattaacgctggggggaactccaaaagaacggctgaagttagcctctggtgtatttaatttaacacgtaatcttgggggcgcgattggtattgccctgtgtggctctattctcaataatcgaactaattttcatttttcgagaatgggtgaaaaaatggtttctgttccccatacggtgaatgacttcatttccagaagtgctttgttttttaatcgcagtggaagtgaccagacatcggaaatactagcttcaaccaaattattgagtcaattgatgctgagggaggcgcaaactatggcattttcggatacctttctgctaatcagtggtctgttatttatcgcatttttgttggttcctgctatgaataaatcatcctga

SEQ ID NO: 27736 - DNA, 825 bp, Escherichia coli
atgtcagaaaatgaaaacctgctgctgagactgcgccagagcgttaatggatatagccgaacacaacagaagctgggagagtttgtacttggcgatccggcaaaagttgtctacctgacgattaccgaactggcgcgtgaaagcggcaccagcgaggctagcgtcacacgtctgtgccggacgctggggtgtaagggctataacgaattcaaaatggcgctggcactcgatctccgacaagtacagtctgtagagcacggcggtgatgagattggcaatgtggtcaatgaatccgtgcaagcactacaggacacagcaaaattactcgacaggacttttctggaagcagccgcgcttgcactgcatcaggctcagtcagtgcagatttatggcgtagcggccagtgccattctgggggagtatttacattacaaactcctgcgtctggggaaaaccgcacaattgttcagcgacatgcatcgtgctgccatgaacgccacaacgctgagtaaaaatacgctcgtggtggcgatttccagttcaggctccacgcgcgatctgctgcatgtcgtgaaactggcacgtaagcaaggtgtgcgcgtactggcgctgagtaatacgccgcgcagcccgttagcgtcgctgagtgatattcaactggtcgcggccaaaccagaaggtccgttgagtgccggcgcgctaaacgccaaggtgggcgtgatgctgttgatagaactgctcaccacatcgctgattgcgctggatgaaaagtacagcgatgtgagtcagcaaacggccagcgcgaccctaccactactgctttaa

SEQ ID NO: 27737 - DNA, 279 bp, Escherichia coli; identical to SEQ ID NO: 14868

SEQ ID NO: 27738 - DNA, 2955 bp, Escherichia coli; identical to SEQ ID NO: 14722

SEQ ID NO: 27739 - DNA, 258 bp, Escherichia coli
atgctggcgttttacagtggtcaatgcgccagccatatccagagcaggattatatctgatgatgccagactgtacggcataacgcattacagcagatatcctttgctgcagacgactggcgatttcataaatctgtttagcctttgcagcgcgaactgggataagcaggtccggagtgttgagttttgtgatatcccggttgccgataaaagggaaaacatgcgtctcgaggcttttgagtactttatcgctgtgtga

SEQ ID NO: 27740 - DNA, 1020 bp, Escherichia coli
atgaaattgcttgtaactggtggattagggtatataggttctcatactgtcgtgtcgttattagatgctggctacgaagttatcataattgataatttatctaactcgcatttatcagtattaaaaaggattaacaatatttgcttaagaaaggcatcatttatagaaggtgacattagaaatagaacagtacttaatcaaatctttaatagttataatattgatgctgttatacattttgccggtttaaaatcagtagatcaatcgattagttcacctataagttattatgataataatgtcgtcggaactctagcattgcttgaagagatgttacgacatgatgtaatgagatttatttttagttcatctgctacagtatatggatcaccaaagagtattcctataaaagagtcaaatgaagttggacatacaactaatccatatggtacatctaaactaataatagaaaaaattctatcggatatatgttattcgaatagttcatttcggtgtactattttgcgttattttaatcctgttggggctcacacatcaggattattaggggaagatccaagaggaaaacctaataatcttatgccatatatttgccaaaccgcaataggtaaactcaatgaggttcatattttcggtaatgattataatacccatgatggtactggtgtgcgtgattatattcatgttatggatcttgccgaaggacatgttgcagcggtaaaggcatcgaatgaaggggagaattgtaagatctataatttaggtactggaaaaggttattcggttcttgacttaataaaaacttttgaacaaataacaaatgtcgctgtaccacatatatttgttggtaggcgtcccggtgacatcgctgaatgttggtcagatccttcaaaagcttatgaagaattaaattggagagctaaaaaagatttagctgatatgattcgagatgcttggaaatggcaagtgcaaaaccccaatggatattcagatgattaa

SEQ ID NO: 27741 - DNA, 660 bp, Escherichia coli
atgacgcaggatgaattgaaaaaagcagtaggatgggcggcacttcagtatgttcagcccggcaccattgttggtgtaggtacaggttccaccgccgcacactttattgacgcgctcggcacgatgaaaggccagattgaaggggccgtttccagttcagatgcttccactgaaaaactgaaaagcctcggcattcacgtttttgatctcaacgaagtcgacagccttggcatctacgttgatggcgcagatgaaatcaacggccacatgcaaatgatcaaaggcggcggcgcggcgctgacccgtgaaaaaatcattgcttcggttgcggaaaaatttatctgtattgccgacgcctccaagcaggttgatattctgggcaaattcccgctgccagtagaagttattccgatggcacgtagtgcagtggcgcgccagctggtgaaactgggcggtcgtccggaataccgtcagggcgtggtgaccgataatggcaacgtgatcctcgacgtccacggcatggaaatccttgacccgatagcgatggaaaacgccataaatgcgattcctggcgtggtgactgttggcttgtttgctaaccgtggcgcggacgttgcgctgattggtacacctgacggtgtcaaaaccattgtgaaatga

SEQ ID NO: 27742 - DNA, 522 bp, Escherichia coli; identical to SEQ ID NO: 25587

SEQ ID NO: 27743 - DNA, 780 bp, Escherichia coli
atgactgatctgaaagcaagcagcctgcgtgcactgaaattgatggacctgaccaccctgaatgacgacgacaccgacgagaaagtgatcgccctgtgtcatcaggccaaaactccggtcggcaataccgccgctatctgtatctatcctcgctttatcccaattgctcgcaaaacgctgaaagagcagggtaccccggaaatccgtatcgctacggtaaccaacttcccacacggtaacgacgacatcgaaatcgcgctggcagaaacccgtgcggcaatcgcctacggtgctgatgaagttgacgttgtgttcccgtaccgcgcgctgatggcgggtaacgagcaggttggttttgacctggtgaaagcctgtaaagaggcttgcgcggcagcgaatgtactgctgaaagtgatcatcgaaaccggcgaactaaaagacgaagcgctgatccgcaaagcgtctgaaatctctatcaaagcgggtgctgacttcatcaaaacctctaccggtaaagtggcagtgaacgcgacgccggaaagcgcgcgcatcatgatggaagtgatccgtgatatgggcgtagaaaaaaccgttggtttcaaaccggcgggcggcgtgcgtactgcggaagatgcgcagaaatatctcgccatcgccgatgaactgttcggcgctgactgggccgatgcgcgtcactaccgctttggcgcttccagcctgctggcaagcctgctgaaggctctgggccacggcgacggtaagagcgccagcagctactaa

SEQ ID NO: 27744 - DNA, 1167 bp, Escherichia coli
atgaatatcacaattgtaggcacaggttatgtcggtctttctaatgcggtattactggctcaacaccatcaggtgcttgccctagatgtagtaccggaaaaagtcgaacttattaatcgccgtcaatctcccattgcagataaagagctggaggcctatctggccaacaaacatctgaatcttaaggcgacgctggataaattcgaggcgtatgaggcggccgaattggtgattattgctacccccaccgattatgatcccgagaccaactactttaacaccggctcggtcgggggggtgattcgcgatgtgatcagtatcaaccctaatgcactgatggtgatcaagtctaccattcctgtaggctttaccgaacggatgcgtagtgagttcggcaccgagaatctgatcttctctcccgagttcttgcgtgagggcaaagcgctgtatgacaacctatacccttcccgtattgtggtgggtgagcgtagtgagcgggccaaacgatttgctgagttgttgcaagaaggggcgatcaagcagaacattccggtactgctaactggcagcaccgaggcagaagccatcaagttgtttgctaatacgtatctggcaatgcgggtggcctatttcaatgagttggacacctatgctcagttgcatgacttggacagtcgtcagattatcgaaggggtcggcttggatccgcgtatcggtagccattataacaacccctcatttggttatggtggctattgcctgcccaaagacaccaagcagttgctggccaactacaacaaggtgcccaacaatctgatccgcgccattgtcgatgctaattgcactcgcaaagactttattgctgatagcgtattgcgtcgtaaacctaaggtggtgggaatccatcgcctggtgatgaaggctggctcagataatttccgctcttctgcgatacagggagtcatgaagcgtattaaggccaagggtattgaggtggtggtctttgaaccgactattcatgaagatacattcttcaattcccgagtgattcgggaactggctgagtttaaagcgctgagcgatgttattctctgtaatcgcatggcttctgaattagtcgatgtagctgaaaaggtttataccagagatctttttggagctgattaa

SEQ ID NO: 27745 - DNA, 186 bp, Escherichia coli
atggctgtcatttatgttctggccaaatcgccacttatgaagtctggcggtcaattacattggaatattgattcgccattagaacaacaaccactaaagatcgtcaatggccggttgtacttcgagggtggttattggcagaaggataagtcgctccccatgtcgctgttaaaattgaacatatga

SEQ ID NO: 27746 - DNA, 1197 bp, Escherichia coli
atgttaaatgggaaaagattgatttataaagggcagcatatagctttatatattgatgatgtgtcaacatcaaatgtaatatttaccttttcagggcatggtgcaaatccaaaggatttgtatggtgatggattcattcaatctctggggtttagcggcgttttttttgttgcgcttgcaaaccattggtggcaaacccgtgagttagatgaagctattaatattgctaatgcaaatacagaaaatcatactaataggatcgtatacggacaaagtatggggggatatggtgcacttttgtgtgctgccaagttaaaaagccgtgctgtcgttactgctcctcaaacaacactaaatgctaaaaatgcaaaaatacctcagtcatggatgaaagatattaaccaatatccagttataagagataatcttgcaagtgagttaatcagtgtcgaatcaataaaaatcatatatgatgtaaaagatcggtgggatgttagtcatgttaattatttgaaatcacatataaaatggattgatgagtatactataccatatgctacacataacctacccagaacacttcgagaaatgggcattatttcatctgtaatatcatcagcgtttaaaggaaaaaataataagaatgatttcaggaaactaattaataaaaataaaaagaagtctatctcatatatttcgaatcttggacattttgttgagaactcaaaaaataaatggttgtattcttattataagaggattgtggctttttactttgatgatttaatgtccagtatcaaaagagattcatgggtcctacaaaataacacacttgatgcttttaataataggttgatttatattaacaatcatgttgaggttttcgacaccaataagttgatttttttatctagaggcaacgatcctcaacttgaattaggttgtcttccggatggtaatttggagtgtaatttttcgtttttttctaatgttgcatcatttggaaatgttttcttttctagagactcaaatactgcatttacacctaaagatgccataagtttttctgtttctccaggaattacacatgtaacttttattcttccgggttcaagtgaagatcggttgcggaaaataaggattgaccctatttcatgtcctgggttttttcaggttctagattttagatttgtgtaa

SEQ ID NO: 27747 - DNA, 1494 bp, Escherichia coli
atggtgcctgtagcacaggaaaccaccgctaacaccgtgcgtctgccctacagtttcagccgtcggtttagcctggtggcatggtgcgaagcgtcgctggagatcctccatgttcatccgttgtcgctctctgttttgcaggagctgcagcgggggctgaacgcgccctttacgctgcggcaaatcgacgaagccgaatttgaacagcggctgaatgcggtttggcagcgtgactctaccgaggctcgccagctgatggaagatctcggttctgctgaggacttttttactctcgcagaagaactaccggaaacggaagatctgctggaaagtgacgacgatgcgccaatcatcaaactgatcaacgccatgttggcagaggcgattaaagaaggcgcttcggatatccacatcgagacgtttgaaaagagtctggtgatccgttttcgtgttgacggcacactacatgaaatgctgcgtccggggcgcaaactggcctcgctgctggtatcgcgtattaaggtgatggcacggctggatatcgccgaaaaacgcgtaccgcaggatgggcgcattgcgctgctgctgggcggtcgggcgattgacgtgcgtgtctccaccatgccttccgcctggggggaacgggtggtgctgcgactgctggacaaaaaccaggctcgcctgacgctggagcgtctgggtttaagtctcgaactgactgcgcagttgcgccagctgttacacaaaccgcacggcatttttctggtgacggggccgaccggttccggcaaaagcaccacgctgtacgctggattgcaggagctgaacaaccactcgcgtaacattctcacggttgaagaccctatcgaatacatgattgaagggatcggtcagacgcaggttaacacccgcgtcggcatgaccttcgcccgtggcctgcgcgcgattttgcgtcaggacccggatgtggtgatggtcggtgaaatccgcgataccgaaaccgcagaaatcgccgttcaggcttcactgaccggacacctggtactttccacgctgcataccaacacggcggtgggggcgatcacacgtttgcaggatatgggcgtggagcctttcctgctctcttccagtctgacgggcgtgatggcgcagcgactggttcgcacgctgtgtcccgattgccgccagtccgcgcctgccaccgacgaagaaaaacgcctgctggggattaccgatgcgcatgccgtcactctgtaccatccacagggctgtcccgcctgtaatcacaaaggttttcgcggacgtactgccatccatgagctgatcgtggtggatgccacattgcgtgatttgatccaccgtcaggccggggaactggagctggaacgttatgtccggcaacactctgcgggtatccgcagcaacggcattgagaaagtgcttgccggagaaacctctctcgatgaagttctgcgggtaaccatggaggcgtaa

SEQ ID NO: 27748 - DNA, 522 bp, Escherichia coli; identical to SEQ ID NO: 25587

SEQ ID NO: 27749 - DNA, 522 bp, Escherichia coli
atgaaacattcatttgaagtaaaacttgccgctgtaaatcattacctggctggtcatgcaggcatcatttctacggcaaaactctttcaactttctcacaccagcctctcacactggattaatctttttcttcttcacggtcctcgggcactggattgcagacacaagcgtagctattctcctgaagataaactttgcgtggttctttatgctctcgggcattctgagtctctaccccgggtagctgcccggtttaacattcccagccacaacacggttaaaaactggataaaaggctaccgcaaatctggtaatgaggcctttatcaggcgcaggaaggagaaaagcatgacccgttctgatgatacccatgaaaacgaggcaaacatgacgccggaagagatgaagaatgagctgcgttatcttcgcgcagaaaatgcatatctgaaagccatgcaggagcatctcctggaaaaaaagcgccaggagctggagaaaaaacgaaagtcatccggagcctga

SEQ ID NO: 27750 - DNA, 1248 bp, Escherichia coli
atgatgccatcaaaatttaccagtcactttgagcagcaactgattatgacatctccgaattcttcatcctcaatatctcgccttgcgcgaaagttaagaaaactgagcaataatccaaaactatttttgattgattcgagaggatatcaaattgtacaccgctcgtggaagaaaagtttacagctaggcagttttctttgggtagttatctgcttttctatcgcagtgctctattttggcttcattgcttccgatcgttatgtgagccgggctgaattaatgattaaacaagccgatcaagttaaaatgttgcctgatgcgttatcaatgttagggatcggtggtagtaatcatcaggatatattactcgttcaggattatatgaagtcatgggatatgctggccaagttgaacaaagaacttgcacttaaagcacatttccagagtgatagtgcagattatttctcgcggttgcataagggagtcagtagggaagattttcttgattattaccgcaaacatttgacgttacaccttgatgaattatcaggagtacttaccgttgagttgcagacatttgatccccaatacggtcagcgagttgttgagttaatgctcaaagaatcggagcgttttattaacaaattaggtcatcaggttgcgctcgaacaattggcctttgttgaaaaagaagtaaatagagcatatcaacgcttacaggatgaaaaagctaaagtattagcatttcagaatagccaccaacttctcagccctgaatctaccagcagcgcacgcttgggagtggtcagccagattgaaggagagttggtgcgtcaacaggcggagctaaaacaactgcgcagctatatgaaggaaaccgcaccggccgtagtctcattacagagcagagttgacgccctaactaagcagcttgaacaggagcgtgctaagctgactggtcaagataacgatgccatgaatgaaatcaccgccggttacatggatgtgcaaacgcaggcaaccttggcagcggatctctataaaactggccttatcagcttagagcagacgcgggttgaggcatatcgtaaacttaagcacctattggttatcacccaaccaactttagcggaagatgccgaatatccacggcgattctataatcttgcgactgtgggtgtattactttgcttgttctatggtcttattattatggggttggcaactttacgtgagcaccaggattga

SEQ ID NO: 27751 - DNA, 2730 bp, Escherichia coli
atggatagtcaaaaaattagtcagttagtagaaaatcgtgagttatatcccatcaccgatattggcggggaattgaatttcattttcaaatcatctctttttttgcgtcctacatatcttgcacaatctgcttggctagaacatattccttttgctttctggttagttgacacactgcggccaagaaatattgttgagctgggaactcattatggaagttcttatttctcattttgccaggcagtctctaaactagatttagaaacatgctgctttgccgttgatacttgggggggagatgaacatgcggggctgtatggcgaagaagtttacaggcaagtatcagaatataatcaacagcactattcaggtttttctactctcattcgcagtacatttgaccaagcgttagagcatttttcacaaggtagcattgatctgcttcatattgatggtttgcatacgttcgaagcggtacgccatgattttgaaagctggctgccaaagctttctgaaagggctgtggtcattatgcatgataccaatgttagggaacgtggttttggcgtatttcaacttttggatgaattaaaacgacaatatccacactttgagttcgctcatgggcatggactagggatagttggtgtggggtgtgaacaatctccagaacttaataatttgtataaaatctcagaaaatgctcgtgtaaccaaacaagtccaagacatcttttgtcgtttggggaaatcttgtagcgagagttgggagaattcccagttaaaacgtcagttgtctacacaacaagatgacattcaggctgaacggcagctattggtagaacagcaggcattggaaagggggcgtcttgccgagcgcatcactgcacaacataacagcatagtagaaatggaaaagcagcttgcacatgctcaagtgcaatctgatgagctctcttttgcccagcaacatatcaattcgctgacatctgaggtggcattattgcaagaacagttcaatgaggcccaaacaaacttgagtgtatggtcgcaggagcgaatacaagccaacgatgagttgcatacagctctgcatcaactagagcagcaacagagtcgcatcacgagccaggagcaagctcgccatcaactggagcaacaggtcaataccctgacgttacaattgagtgaagaaacacagcgtgcatctcaccttactctcgcgctcagcaagagtaacagagcattgagcgaacattcgcggcaaattaccgaattacagcttcagttggaacaagcgctacatgtccaggatacacaggttcgtacactggccgagcgagacaatatggtgaacttgttgcaacagcaggctaatgcattgcagcaacagcttgacggtgagcagcaaactaaaaaccagttgcagcatgcttatggattactggaagcacagcacgatacgttaggcttggaatatgatgcactgaaaaaggtaagtgcaaatctacagcaacagctggaagaagggcaacttgtgcaacaaacattgcagcaaagcatagatgagcaaactcttgctttggctgcggcttctaaacaatgtgatgaactgactcaactaatagcagtgcacgagtctaatattgcgtcacaaagcgacgtaatggctgctcaacaagcagagtataagcaactcacagaggcgctatcagcattacaacaacaactggcagttgaacagaccacacatcagcaacagattagcgaacgggacttggcattagccgagcgctttagtgaaacggtaactctaacacgtctattagaagagcgcaagcagattatcactgaactagagattgaaaaacaattgcttaccaccaagttgtctggcgtagagcagcagttaagggctgagcaagagtcgcttcagcaggcccagtctgcattgctctcagcagcaaaagaaaagcaacatcaacttgatgagttggaatcggtgctcaatgagcggtacagcgagattgcaaccttaacccgttggctggaagaacgtgatcaggcactccttagcgcagcaagtgaacaacaacagaccaatgaaacatatagagctcagcagcaagcctggaaagaagagaaggaggccttaatccgggaacaaaccttgctgcagagccagcagtctgtactgcaagaccaggtaagagaactaaccacactcaacggaaggttggaagctaatattgcagagcgtttccaggagttggcagtcatgacgcggcatatggagcagcttagctgtgagttaaaacaaaaagagcggcaattgaatagaacaaaagaacgcgctcagaatttgaagagaaccttctcttggaagattacagccccagttcgtgctcttggcagaacatttaaggagactccatccagaacaacagctacagagagtgccgcggagcgtattgccgcttcaggattgtttgatgaactctggtatcaacatcgctacccagaggttgcagacactgggctctcagctcttgagcattttattagcgtaggggcggataaaggttatagccctagtgagcagtttgatactcgctggtatttgcaaacctatccggatgtggcccaaggaggcattaatccgctgcttcattacattatgtacgggaagtttgagcagcgcagttgcctgcctgtcaataagggagaataa

SEQ ID NO: 27752 - DNA, 1866 bp, Escherichia coli
atgcagaccgaattaataaaagaacttaacaaggttttaaaagcgttcccgcaattctggaatggagaggaattacaacgttcaatggtgagtgacgctatcagtcaaaagcagccagatcttatcaaggcattagtcgataatgaaaaagtccgctctgtttatggtgtggatattgatggcatttttatctttgattttgacaaattatgtggtcttctaaaatacaaagaatattgggctaatagctttactaaataccggaacaaagtgggattaactagcgaaggtaaataccttgattacagttctgatgtggtgctggattttcctttcaaggattgtattcttgaaggtggaatgaccaaagaaaatcagggaaaagatgagatttattataatgaaatcatagcaatggatgaagttgactctttgctttctcccaaggcgttcactaatgctaagcgatataccaaagagggggtaaaagaaaatatcactaaatttaacgatgatgaaaatttaataattaagggaaacaatctcattgcactacattcaataaaaaaactttacgcaggaaaagtaaagttaatttatatagacccgccttacaatacagggagtgatagctttaagtataatgatcgattcaatcgctcaacatggttgacattcatgaaaaataggcttgaggtggctaaagaaatgctttccgatgatggctttatttttattcaatgcgatgataatgaatcagcatatcttaaagttttatgtgattcaatttttggagaagagaattatagaaactcaatctattggcatagaacctacgcagggaaaactgtaaaaagtaagttgccatggaatacagatacaatattgttttattctaaaaaagaaagttcattattagagccatatacagcagaacttagtgctgctgacattaaatcctataacaaggatgattttgatggaaggggtaaatacaacactgttagcttgcaaaaaacaagctctccagggccgcaaacaacttatgattatatagataatacaggtaagaaatggagttgccctgaaaaagggtggagaatgacaaaggaaaagttaaaggctttggaaaacgacaataggctatatatcactgacaaaacaatacgagaaaaatattatcttaaagaaagaaaagagatcgggaaacaaatagataatttttggcatgacattgggaatttaaatagggtttccgatgttgcttttattgatggacaaaaaactgaaaaattaatgcaacggataattagccttgcttccaaagaaaatgatatcgtcttggactttcatctcggcagcggaactagcgcagcagcagcccataaaatgggacgtcgctatatcggtattgagcagatggattacatcaatgagatcaccgtgccacgtttgcaaaaagtcattgagggtgagcagggaggtatctcaaaagacgtcaactggcaggggagcggcagctttgtctacgttgaactagtggaactgaacgcttacttcatacatgaaatccagaaagcgcagtccacggaagaactcgaaaaactctttgccgtgatgaagacagaggcatatctcaactatcaggtggctctggaaaatgtgctgtccgctgagtacgaagtggatgggatcctccataaggtagcattcagtgaactggaactgcatgagcagaagcagcttttgattgaaatcctagataagaaccagctctacgtgaatgtctctgatatggaggacagcgacctgaacatttcagagagtgataaagcctttacccgcagcttctacggaatggagtga

SEQ ID NO: 27753 - DNA, 2637 bp, Escherichia coli
atggcgaagaaaccgaagtcagcaggtagagagaagctgctgtttaacaagctgaagcagttcgatgaaccaggactgttccacgataactatcagacgccggactatattcaggcaaacctgaaagatatcctgcgtccctatcagcacagcgcactgcgttacctgcattacacgcaacgtaaacgtgatgacgcgcttctgcattaccgtcacctgctgtttcacatggcaaccggtgcagggaaaacgatggttatggcaggaacgatactctatctatttaaagagttcgggtatcagaacttcatctttttcgtacataccgacgcgattatccagaaaacgcgagagaacctacttaacccgcaatcgccgaagtacctgttcagtcatgagctggaaatcgacggggaaaaaatcaccatcgcaccggtagatatattcccgtccgtaccggaacgcaacacgatttacctcaagctctcgactatccataagatgcacgatgagctgaacagctatcgagagaacagcattacctacgaggatttaaaagaaatcccgcttgtgctactcggtgacgaggcgcatcacttcaacgccggcaccaaagctagaggcaagtcgaaaacctcaccggagaacgaggagcagacttgggagcgtacgattgagaacatcctcgacctgcgaccggataaccgcctgttcgagttcaccgctaccattgaccttgcaaacaaagatatcggacagaaataccgtgacaaggtggtatatcagtatgatctgaagcagttcatgtcagacggttactcgaaaaaggtcatgctgttggaagcaaaccagaacgacagcgacaagatgctcgatgcggtactgttaagccagtaccgtaaactgacggcagcagatcacggcatcaccggctttaaaccggtcattctgttcaagtcgaataagattgcgatatcaaaggcgaagcaggaggagttttcgcaactgattgccgccatgacacctgagagcatcagacgtcatctggctaacaaaaaactccagctcagctctgacaccagtatctggcataaagtgattcagcgttacgctgacagtgatttagtgacggtgactggacaaattcaggaggactttaacgactttaacctgctgaacgtcaacaagtcagacctgctggaggaaaaccccgtcctgctgaatacactggaagaagtcgataatccagtgagagccgtctttgctgtcgcgaaggtgaatgaaggctgggacgtacttaacctctacgatattgttcgcataagcgagcaggcgagcagcagcaaaaccagcacggacagcgaagcgcagcttattgggcgaggtgcgcgttactacccgttcatttatgacggtcaacgtagcttcacccgccgttttgataacagtacgaaggatttgagcgtactggagcaactgcactatcacaccatcaatgaaccggcgtacatcaaaacactgcacgcctctctggagcaggcggacattgacgtgcatcaggatggcggaggtacggttgaacacgccagattgaaagaagactttaaaaagtccgccgtgtatcaggcgggtaagctgtactttaacgaagtggaagagattgagagaagcagccgaaactgggaaacctactcgctggaaacacgctttgaaatacagtatcagatcgcttgcgaggagtcgctggacaacctgacaggcacaaagggggggatcataaaaccggaaccactggtactggacgagcgtttttaccgcaaggcgatgcaaagaatcagcttttacgcgctagataacctgaaacgcttcttcccgaaactgacaggtattcgggagttcatacgcagtgacgcctatcttggtaagctgaaaatcaccgtcagcgtaccgcagtcactggatttcaccaccgtaccggcaaaagataagctgcacctactggaaaacgttttgctgcgtatctcagagaatgtgcgtcgcaatgaccagaaggtaaaaggcacgtaccgatttatcagccagccggtgaaagaggtgattaaagattacagtttgcatattgacccgtcggtagccattaaccagaaaatcaccgccgctcccaccattggtaaaaaatggtacgtgtacgataatgcgatactaaatcagcttgagcatcgtctgataaaaatgctggaagcattcatgccgaagctaaaagcgcgttatgacgatatttacgtactgcgtaacgacgagcagtcaacgcgctttaagctcacggagttcggcggcgtgcgtgggtttatgccagatttcatcatgatactgacgcgccattcagacaacacttactggcaggtgttccttgaaccgaagggggatgaccgtctgctggatgacgcatggaaagaacggatgctcgaaacactgaatgacagggagcgcattgtaattgatgaaaatgagcacgtcagactggttgggattaaattctttgccaatagccagatggacgtttttgtcagcgacatgcagaacaagctgaatgatggagaatcgctcgaaacctcctcgctctccctaccactgtaa

SEQ ID NO: 27754 - DNA, 234 bp, Escherichia coli
gtgaaacaggaacataacgaagctgacggaggcggtcacggctttcccgtgggcgttttcgtcagcagacaagcccgtcagggcgcgtcagggggttttagcgggtgtcggggcgcagccatgacccagtcacgtagcgatagcggagtgtatactggcttaactatgcggcatcagtgcagattgtatgaaaagtacaccataaccgatgtgaaatgccgcacagatgcgtaa

SEQ ID NO: 27755 - DNA, 432 bp, Escherichia coli; identical to SEQ ID NO: 10632

SEQ ID NO: 27756 - DNA, 507 bp, Escherichia coli
atgcgctacttgttaattgttattactttttttatgggttttagttcattacctgcatgggcaatggactgctatgctgaacatgaaggtggaaataccgttgtcattggttacgtaccaagaatctctatccccagcgatggtaaaaaaggtgataaaatctggcaaagcagtgaatattttatgaatgttttctgtaataatgcactaccaggcccatctccaggagaagaatacccatctgcatgggcaaatataatgatgttgttagcatcaggtcaagacttttataatcaaaactcttatactttcggtgtaacttataatggggttgattatgattctacatctccactacctattgcagcacctgtatgtattgatataaaaggagccggaaccttcgggaatggctacaaaaagcccgcagtctgtagtggcggtcctgaaccgcaattatcagtaacttttccagtacgagtgcagctatatattatagctagctaa

SEQ ID NO: 27757 - DNA, 537 bp, Escherichia coli
ttgcagagcttcaatctgtttgatcgggccaacaacacctggctggtctggctcgatgccttcacgggcgtttttcagcatcgccagcgcgtgcagtgggatatccgggcgcgaccacgcatccggtgccggagagaggtcatcggtgttggtttcgccggtcactttgaagacggtaacggtcagtttttcagccagtgccgggcgattcaggaaccattcggcatctgcccaggactgcattacctgcttcgcatattcgttacctgctttcgctttctcttctacgtcatagaagttatcgaacatcagcagcgtgtgagaaagtgctttggcagcgatcggtgccagtttggcatcatccagcgcgtcgatcagcggatgaatattataaccaccctgcatggtgcccagcagttcgatggctttttccggagtcagcagtggggatttagcttcgcctttggcgacagcagccaggaagcctgctttgacataggcggcttcatcgacgccagggggaacacggttggttaa

SEQ ID NO: 27758 - DNA, 1452 bp, Escherichia coli
atgcgcatccagcagtttacccgcagcacggaagtgaccgatgttagtcatgcaagaaccgataaatacttcgtcgatcttctcgccctgtaccgcagacagcggacgtgcgtcatccggatcgttcggtgcacagaggattggctctttaatatccgccagatcgatgtcgatcactgccgcgtattcagcatctgcatcggcttccagcagctcaggattcgccagccatttttccatgccctgaatacggcgttccagggtacgacgatcgccgtaaccttccgcgatcatccacttcagcaggacgatgttggagttcaggtattcgatgatcggttctttgttcagcttgatggtacaaccagcggcagaacgctcggcggacgcatcggtcagctcaaaggcctgctcaactttcagatccggcagaccttcaatttccaggatgcggccagagaagatgtttttcttgcctttcttctcaacggtcagcagaccttgtttgatcgcatacagcggaatggcgtgtaccagatcgcgcagggtgatgcccggctgcattttgcctttgaagcgcaccagaacggattccggcatatccagcggcattacgcctgttgcggctgcaaatgccaccagaccagaacccgccgggaaagaaatgccgatcgggaaacgggtatgggagtcaccaccggtaccgacggtatccggcagcagcatacggttcagccaggagtggattacgccgtcacccggacgcagcgacacaccaccacggttcataatgaagtccggcagcgtgtggtgcgtgttcacgtcaactggcttcggatacgccgcggtgtggcagaaagactgcatcaccaggtcagccgagaagcccaggcacgccaggtctttcagttcatcacgggtcatcgggcctgtggtgtcctgagagcctacagaagtcattttcggttcacagtacgcgcccggacgaatgcctttcacgccacaggcacggcctaccattttttgcgccagcgagaagccgcgatcgctctcagcgacatctttcgcctgacggaacacatcactgtgcggcagaccaagtgcttcacgcgctttggtggtcaggccacgcccgataatcagcggaatacggccgccagcacgcacttcatcaatcagcacgtcggttttcagttcgaaggtcgccagcagttcgccggtttcgtggttacgcacttcacctttgtacgggtaaacgtcaatcacgtcgcccatgttcaggttagagacgtcgacttcgattggcagtgcacccgcgtcttccatcgtgttaaagaagatgggtgcaattttaccgccgaggcacaaaccgccgccgcgtttgttcggcacatgtggaatatcatcgcccataaaccacagaacggagttcgtggcggatttacgcgatga

SEQ ID NO: 27759 - DNA, 906 bp, Escherichia coli
gtgacttcaccatttattcaacaaattgctgataaccgggtatgtcaggtactcacctgtcttcctgaaaaatttgtggttgatttcgcaaacggaatcgatgttgcacaggagcatatccgcacggccggagagcgcacgttcttccggcgtttaaaagagggactgaccggcgaaggcgctgcacggcagaatgccatcaatgcttcgcttgcacagggcgttgaggcgtccctgcgctggctgacggagctgacaacgtcacttgccaccacaaactacgcgattacccgggtaaacgacagggtcagttcactggtcagtgatactgccaggctggcgcattattccgcagatacacgggagcagttactcaccctggccgatcaggttcaccataaactgaatcatcttgaagaaaaactccaccgtgttgaccaggttcagcgggcgcagttacatcttgagcagatattctcatggtggagcgccgggcgatatgcgtcattttcccctgccggacgttgttatgtggcgcttgaagagcttcgatggggtgcgtttggtgatgtgatacgtcagggcgaaacaggccaggttaaccagttactggatattctcaggcataaagcattaacgcagatggcacaggagagtggcggtagtgctaccgtgcgtctgaacactctggactggcttggtggtcagggccgggatcaggcagataacgagtggcatgacgcgattaactggctgggggactggtgcagtgaagagcagcatccggtgatctggtcaaccacgcaggctgcagaacacttaccggttcgcatgcctcgcctctgctctgcagaacgcctctctgaaagtatggtcgatgaaatatttcagaagggggctgcatga

SEQ ID NO: 27760 - DNA, 987 bp, Escherichia coli
gtgaccgctgatgtcagaatggccatggaggagatcgatactaaaacccgggaattactgacgggggtctgcacctcactggaagaggagctgaatgactatttcagaagcggtaaacgcaaagaacagcaaatgctggaggaagaagacgcagaacaacgaaggtctcagtccggattatgggggaaaatttctcaatggtccggtatcaacaaccagggccgggaggattacaggaaacgagattttgccccggacagccccgaaataaaattcagtgatcgcagggaagcccttgaactgatgacgcaaatcgaatcgaccgtgaccagcctgcaccgtgaggctgaagcacagttccggcctgagctggagaaaatcgtcagcgggattgaaacaggttttcgtggcacggccctgtacgccacagaaaacattgccggtcgcatcaatgcccgcctggaggatgagggctttaccgtaaaaatcagttttccggcagtcagccagttacagacccggctcgcggtaaaaataaatctgagtgcgcttatggaggaaagaacggagaccgtcacccgtcgccgtcggcagagtggcgtatggggaaccgtttgtcgatggtttggcaccagtgacctgggctgggaaaactatgacgaggatgtgagtcgcagcgtgatcaatatcaacaaggtcagagaggaagttatgtcactgacccgggcatatttcggggagctgcaggcatccattgagcaggatattaaccagcccgtccgccaggaaatcgatgcctttttctgcgcattcagggagaaagttgaacaactgcgtaacacgctgattcagagctctgaagatcataaacgcgatcagcaggcgcaggaacggcttaccgggcgacttcaggcattaaatgaaagggttcctgagctcattactgacagtaaggcgctgagggaagagctggagacaatgctgtga

SEQ ID NO: 27761 - DNA, 1002 bp, Escherichia coli
gtggttaaggcactggcagagtgtggtacacagatcagcatggtctcaggggccagtatcggggctctcaatggtgccattatcgctgcctctcccgatctgtcggaagccgccgcacgcctggaggctctctggaagcatctgggagagagtcaggttctgtcggtaaaccgatcggtttacttttcattgctgaaaaaactgctcccggccatgaacttctgccagctccccggacatgcgggcacactgcttacgacgctttttcgccatatatcgacaatcaacgggttcgaaaatccgatggctcagccgttgttgtcagatggacccctgacagcgctgatggatcattatcttgatactgatgctctgtctgacgggctaccgttgtatgtgtcgctgtaccccacggaagggggaatgcaggatattatcgactgcattcgtgctgaactgggtgccggaactacaaaaaactccgtttttcagcatatccagagcctgccccacgggcagcagaaagaagccttactggcgtcagcagcactgcccctgctgttccgtccccgtgaggtacagggaaaaatgtacggtgatggtggtatgggcggatggcaaaatatgcaggggaatacccctgtgacgccactggtggatgccggatgcaatatggtgattgtgtcgcatctgagtgacggttctttatgggatcgccgggcttttccggacaccacaatccttgaaatccgtccccggaaaaagctgaaacaaacaggggaagaaggcaaaagtggcggtctgctcagttttacatcggcacatatcgacacctggcgtcagcagggctatgaagacacgatgctggcgatggagcatatccggaaaccactggcggcacgtcaggcactgacccggtcagaggcggtattgcagaaaagcctggatataactgaaggtgcagattcggcactgagaaacgcgatggcccgacttaaataa

SEQ ID NO: 27762 - DNA, 351 bp, Escherichia coli
gtgtgcgctgccgtcactgccgcgggtgacttccgtggtgcggatccatccctgaactggtctgaactctttgcgatccttcagccgctggaaagccgtgttcatccggctcagcgtatcgcccagctccccgatcgcacagttgcgcacggtcagggtcaggaacatccagcgggaatcggggtaatccgccacgatacgcggcagggactggtagaaacgggcttgccacatcagggagcgcctccactggcagacaggacagtgccggacacggcagaaatgcgcctcacgcagcctcaggcgcgtttctccggtttctttgagggtagaccacccgaaacgcagtaa

SEQ ID NO: 27763 - DNA, 1098 bp, Escherichia coli
atgaggcgcttcgcaggcgcatgtcgtttcgttttcaatcgtgctctggcgcttcagaatgagaatcatgaggccggtaataaatacatcccttacgggaaaatggcttcctggctggttgagtggaaaaatgccactgaaacgcaatggcttaaagatgccccgtcacagccattgcaacagtcactgaaagaccttgagcgggcttacaaaaacttcttccagaatcgggctgcttttccccgattcaaaaagcggggacagaatgatgcattccgctacccgcagggcgttaagctcgatcaggaaaacagccgtatttttctgccgaaacttggctggatgcgctaccggaatagccgtcaggtcacgggagttgtgaaaaatgtcactgtcagccagtcctgcggtaagtggtacatcagtattcagaccgaaagtgaagtatccactccggttcacccttcagcatcaatggtcgggctggatgctggcgtggctaaactcgccacgctgtcagatggcacagtctttgagcctgtaaacagttttcagaaaaaccagaagacgctggcgagacttcagcgacagttaagccgcaaggtcaaattcagcaacaactggcagaagcagaaacgcaaaatacagcgactgcattcccgtatcgcaaatatccgcagggactaccttcacaaagtcacaacgaccgtcagcaaaaaccacgcaatgatagtcattgaggatttgaaggtcagcaacatgtcaaagtcagcagcgggtacggtcagccagccggggcgcaatgtccgggcaaaatcaggtttaaaccgttcgatactggatcagggctggtatgaaatgcgccgccagcttgagtacaagcagctctggcgtggcggtcaggtgcttgctgctccgccagcgtacacaagccagcgttgcgcgtgctgtggtcatacagcgaaagaaaatcgcctgtcacaaagtcaattcagatgccaggtatgtggatatacagcgaacgccgatgtaaatggcgctcgtaacattttagcggtggggcacgccgttcttgcctgtggagagatggtgcagtga

SEQ ID NO: 27764 - DNA, 273 bp, Escherichia coli
atgaaaaaagaaaccgatatccggcgtggaaagcattgtgttttcctgatgcatgttcacctggtctttgtcaccaaataccgacgccagatttttgaccatgacgcgacagaaaaaccacgcacttacttttcagatgtatgtgctgattttgaagctgaactggttgaaatggatggcgaaccagatcacgtccatttgttaattaactatcctcccaaactggcgatatccagtctggtaaacagcctcaaaggcgtattgggtaggtga

SEQ ID NO: 27765 - DNA, 669 bp, Escherichia coli
atgggcattcaggtcggtacgcctgtcactctgtataacccgccgcaactcctggcaaacgatctggtgtgcagtaaagcactagacgatcgtctaggctgtactgccctgctcggtgtagcggatgctatcagtactatggagcttgatatcgccgtttatctggtggcttcggtacaggaagaatttaatatccgcggcattgttcccgtattacgccgtgtaaaacctgacctggcgattggtattgatatcactccatcgtgtgacacccctgatttacacgattattccgaggtcaggattaatcagggcgttgggatcacctgcctgaactaccatggtcggggaacgctggccggattaatcacgcctcctcgcctgatacggatgttggaacagacggctcttgaacacaacattccggtgcagcgagaagtggctcccggcgtgataacagaaaccggttatatccaggttgagcaggatggtattccctgcgccagtctctctattccttgtcgctatacccattctccggcggaggttgccagcctgcgtgatttgactgattgcatccgcctattgaccgctctggcaggtatgtcagcagcacatttccccgttgagcctgattcaggcactacacaagaggcacatccattatga

SEQ ID NO: 27766 - DNA, 669 bp, Escherichia coli; identical to SEQ ID NO: 27765

SEQ ID NO: 27767 - DNA, 312 bp, Escherichia coli
atgggagttgagcagaatgatttcagggacatgttgtccgtttatctctccggcccgccgcagacgcagcatatgttttgtgtatccccggcggcccgggtcacgtacgcgggtctggcaggcgaagaagggctgaaagccctcccgctgcagactttccaggacggtgatggtggggatgtacgtataccgctcactgcgggaggtatgccggtcttcaccgaaaatacccggtacatggtgcatcagttcttcgtgtgtcagcggacggtcacggcgtatctggtttacataaccaaaacgactggttaa

SEQ ID NO: 27768 - DNA, 237 bp, Escherichia coli; identical to SEQ ID NO: 14871

SEQ ID NO: 27769 - DNA, 231 bp, Escherichia coli
atgaccagtgagcccgatgggcagggacagcggtttattccctccatgtgcgagaaaatccaaaaagtacgcacggcttttcctcagaccgagtgctgggccgacggtggaattacgctggcagctgcacagcaactggcagcagctggggcgcaacatatggtgattgggcgcgccctgttctcttcatctgactatcgcgcgaccttagctcaattcgccaccctgtaa

SEQ ID NO: 27770 - DNA, 123 bp, Escherichia coli
atgatttacacctcagattttaagcgcgctttcagctacaacaactttaccttcagaggtatcgtggataccaactgttggattaccatttttgaccttgaagaacggttcgttattacctga

SEQ ID NO: 27771 - DNA, 123 bp, Escherichia coli
atggtttactccttagattttaagtttgtcctgggctacaacgacaggttttccggatgtgtcgatgactcctaccgtcggtacgccatttttgatttcgaagaacggtttgttgctacctga

SEQ ID NO: 27772 - DNA, 1002 bp, Escherichia coli; identical to SEQ ID NO: 14640

SEQ ID NO: 27773 - DNA, 984 bp, Escherichia coli
atgaaactgaaaaaactccccgggtttagtttaggacttattgctttggcggtgggtaatgcatatgcaacacaattgttggatgattatagtatactttcctatataactgatgaagaatcgccgattgaaatcaaagataataattcgataagtaatggagagtatctaaccactaaagacgaaagccatgctgtgaaagtggatgacggtgtaactggatatataaataatgccagtgtgatgactagtggtgatggatcttatggtatttctgttgatagtcataacaaagtattatatataagcgatagcgatattaagacctctggaagcgtatctgacaaaggaaataaccaagatgttaatggagggataacagccagcgcagtagtcagtgaatttggtggcaccatcgttatgaatggtgataattcagtcgagacgaggggggcatattcagcgggacttttaagtcaggttaatgattctgggattgtggaaaataacacccgtcttgaaaccacagataaaacgaacattgttacctatggggaaaatgcagtaggtgttcttgcatgttcaagtcctggagagtctcgaacatgtgtcgatgctgtagatgatgaagttagtgattctaacagttacgaagttattagccgtgctgatttaaaaatgaatggtggttccataacaactaatggcactaatagctatggtgcttatgctaatggggaaaaagcatatattaatttagattatgtggcacttgaaaccggggagcatggaagttatgcagttgctattcgacaaggtaacattgatataaaaatagttctattacaacaaaaggcactaaagcccccattgcaaaaatatacaatggtggagagttatttttttccaatgtcaccgcggtatcagaacaagataaaggaatatcaattgatgcatcaaatatcgattctcaagccaaaatag

SEQ ID NO: 27774 - DNA, 2256 bp, Escherichia coli; identical to SEQ ID NO: 15723

SEQ ID NO: 27775 - DNA, 447 bp, Escherichia coli
gtggtgaatatcatcgtgtttgatccgaaaggctgggcgctgttccgttccttcaaagccgtcagggagaagctggatactcgtcgcggctctcattccgagctggagacagcggtaaaagatctgggcgaagcggtgtcctataaggggatgtatggcgatacggcgatcgtcgtgtattccggacagtacgtggaaaacgacgtcaaaaagaacttcctgccggacaacacgatggtgctggggaacactcaggcacgcggtctgcgcacctatggctgcattcaggatgcggacgcacagcgcgaaggcattaactcctctgcccgttacccgaaaaactgggtgaccaccggcgatccggcgcgtgagttcaccatgattcagtcagcaccgctgatgctgctggctgaccctgatgcgttcgtgtccgtacaactggcgtaa

SEQ ID NO: 27776 - DNA, 396 bp, Escherichia coli
atgacgaaaggtgaactgattgtccgtctccggtcgctgggtgagcaactgaaccgtgatgtcagcctgacggggacgaaagaagaactggcgctccgtgtggcagagctggaagaggagcttgatgacacggatgacgctgccggtcaggatacccctctcagaccggaaaatgcgctgaccggacatgaaaatgaggtggtatcagcgcagccggataccatgattgatacggctgctctggtcacggtcgtggcactggtgacgctgcatactgatgcacttcacgccacgcgggatgaggctgtggcatttgtgctgccgggaacggcgttccgtgtctctgccggtgtggcagctgaaatgacagagcgcggcctggccagaatgcaataa

SEQ ID NO: 27777 - DNA, 384 bp, Escherichia coli; identical to SEQ ID NO: 15198

SEQ ID NO: 27778 - DNA, 927 bp, Escherichia coli
atgatgaaaatagagccttcaattttgccttctcttgcctggtttgcgctgattgttcgtgccggcagtttttccagagcagcctctgaaatgggtattacgcgggccgcattgtcccagaatttaaaatctcttgaggaacgtcttaacaccaagctgatataccgtacgacccgcaatatgtcgcttactgaggaaggacagcatctgtatgaagtgctggtgtcggctttggggcaaattgatgatgcgttgaaagatgtcggtgatacccaacttgaacctacaggactgttgagaataaattcctcccgtgttgcagcaaggatgcttgttgaacctcatattggcgagtttcttactcgttaccccaaaacaaagatagaactcattatggatgacggtttatctaacattattgcggacggctgtgatgtgggcatacgtcttgagcaaggactggatgagcatatgactgccgttcctgtttctccgcttattaaactggttactgtggcatcgccagattatttaaaagaacacggtattcctgaaactcctcaggaattgagtaaccataattgtcttcggttgcggcataaaagtagcggtgcactctcagcatgggagttttcgaatgttgtggggggtaatgaagagttcgaaatagaggtgtcaggtaagtatatttctaatgatgacgaaagcatgatacgaatggcgctgaatggaacgggtatcattcaacatctggattttgcaatcgctgaacatatcaatgcgggcaagttacagccgattcttgaggattgggccgtttcatttcctggattttatatatatgtttcatcacgggtgagaatgccctctaaagttcgtgcttttattgattttatggtggagaaaagagtaaaaatagaaagttaa

SEQ ID NO: 27779 - DNA, 588 bp, Escherichia coli
atgcattatggcaaagttaaaattgtcgatataagccattctatagtaagtcaatatctggaaagccagcataagctgacgagaggtcctctgactgacattccgctttacttgttgctggaacccaacaatcctgcgttgactgtggctttaattaccagtcagagactttccggagaaaccacggatatgtttcttatgatggcctgcctgtcgctgtttgaatcagatgaacggatgtcattatttttaagtggatgtgtatccagtataagtgccaaagtcagagcgataattcaaacagatatatcagcaagctggacgcttggtgcgattgctctacagttgcatatgagtgagagcttgttaaagaaaaaactcaaggatgaaggtctcaggttcagtaatttgttacttgaggaacggatgcgggttgctgtaaatatgttatgttcccggcatggatatggacaggctgtagcagcaaaatgcggttattcaagtagatcctactttatctctgtatttcaccgctattatggcttcccgccagacagatatgtatctatgcaagggcttgatttttga

SEQ ID NO: 27780 - DNA, 333 bp, Escherichia coli
gtggtcagcattgccgttgatcctgagtctccggaatctttcatgaaacgacctaaacgtcgccgctgggttaacgagaaatacactcgctgggtgaagacacagccgtgtgcgtgttgtggtaagccagccgacgatccccatcacctgattggtcatggtcagggcggaatggggacaaaatctcacgatattttcacgctaccgctgtgtcgggagcatcacaacgatcttcatgcggatccgctggcgttcgaagaaaagcatggttctcaggttgatttaatttttcgttttcttgatcacgcctttgcaactggcgtgcttgggtaa

SEQ ID NO: 27781 - DNA, 186 bp, Escherichia coli; identical to SEQ ID NO: 9133

SEQ ID NO: 27782 - DNA, 534 bp, Escherichia coli
atgaacgcaaaaatcagatacggcctgtcggctgccgttctggcgctgattgccgctggtgcgcctgcgcctgacattctcgaccagtttctggatgaaaaggaaggtaaccacaccacggcataccgtgatggcgcgggtatctggaccatctgccgcggtgccatcctggtggatggcaaacctgtcgttccgggcatgaagttgtcgaaggaaaaatgcgaccgggttaacgccattgagcgtgataaggcgctggcatgggtggagaaaaacatcaaagtgccattgaccgaaccccagaaagcggggatcgcgtcattctgtccgtacaacattggtcccggtaagtgtttcccgtcgacgttttacagacgaattaatgctggcgatcgcaggggagcatgtgaggcgattcgctggtggattaaggacggtggcagagactgccgtattcgttcaaataactgctatggacaggtctcacggcgtgaccaggagagcgcgctggcgtgctggggaattgacaaataa

SEQ ID NO: 27783 - DNA, 132 bp, Escherichia coli; identical to SEQ ID NO: 6019

SEQ ID NO: 27784 - DNA, 837 bp, Escherichia coli
ttgcagattttccacgccggtaataaagccatcccggagcttgtgccaaataacgatgttattagtgccagcgcatcaagcgtaaaatctggtgactttatgaagagagtggtacaaagcagggaaatgactgaaaacgaaattcaggaaaccattagagcattcggagatgtcacaaaaagggcgattaaagcaggttttgatggcgttgaacttcatggtgcgcacggattccttctgcagaatttcttctcccctctatttaaccagcgtaatgaccgatggggaggagatcttgaaggacgtatgcgcttcccgctggccgtattacaggaagtaaaaaatgtagtctatgaatatgcgacaaagccctttgctatcggttacagaatatctcctgaagaatctgtaacaggggggctgcggatagaggatacttataaactccttgatcggctcatttcatccggtatttcgtatatacatacctcgctggtcagtattaacgatagctaccctgttgagtcgccaaatggcccccgaactattgaattgattttaaatcatattgcaggcagagtgccggtaatcgccgcaggtaaaatacgcacaccgtctcaggctcaagaagcaatttccgctggcctgccacttgttgcgatcggtaaagggctggtgataaatccagaatgggtgactttagctgaatcaggtagaagtcatgaaattcaaacagcccttaatccacaacgcgttcctgaattaaccattccggataaactatgggatcaaattcaggcatcgaaaggaactggctggtttccgttaatggattaa

SEQ ID NO: 27785 - DNA, 330 bp, Escherichia coli
atgcgtcggatcaaacgtatcacggtcctgctcagaccattttttaccgtcagcctgctcaatgttatttccttcagagcgcccgaaatccacctcgacagtatcaaactgatccccttccatggtgtatttgccatacagcacggcattcaccgcctgcatttcttccacctggacaatggcgtgctcttcctgtttgaggttatcggtaatgatacgcagacgacggtaggccgggtcgttcagctgagccggatcttcaccaggaaggcgctcaaccgcctgctggtaattaaattcgtgtttgggcttgacgtagcccggacgtaa

SEQ ID NO: 27786 - DNA, 7782 bp, Escherichia coli
atggcagatgtcatattgtcaccagactggcgtccgggtacgaataactcgggtgttggggctgcaacagtaagtggtaaaaccgaatacatcactggtccaaatgtcgtccagtctggtgggtcaggtcttatctggatgactgtagaacaggcaattttaaatggctacaccactggagataatttatccggattgatttacgtcaataccggagaaaaaacaaaaaccattacagtgaaggatgaggttactggcgcttctcaaacacttcaagtgtttgatactgactctttctcacaacgcgatgcggggactgggggaaatgaaaccattcctggttttagtggcactgcggattttttcaatgcgacacgttttgtaacagccaataatggcggtacagctattttggatgtgggttcaccagcaatcggtaatttttttaaaaatacacagcttgctgtagctgatggagaaggttcctctgttgtatggaactcggtcaatgatttttattttcagcctggtgcaaccatgcaggggggcggcgttactcaaaaaatcattgactcaatgaaatatgctggaacaattactgattgggcgggaaaagtacaccatattaactctcttgatgatttaaagcaatataatcaatatttgataaagtcactagaggacaaaacgctttcttataagcagtatgatgctgaatttaataaggcccttattgtcaccaagcataattacaatgtggatatgaccgctgggggacgtatagactcaactccttacaaagaaaatgtagggctgcttgctgttctccatgcaaccaataacgcacgagcaatattaggtaaaacgggtaaattaactggagttcttcctgcctatgggaatggaggagggatcgttgcaactaatggtgggaccggtgttaatgaaggggtcattgatgccattggtactgaaatgattgcctatcaagacagtaccattgttaacgatggtacactttttgtttgggataataatgataaatatgctctccaggcagaggggatggttgccggtagtaatggttcttcagccattaataatggtgttattaatattcgcccatttaaaaatgctttcgctccagaggggattaacaccgcaattgttgttagtaatgggggcatggcaacaaataaaggcacaataaatattactgccgatgcatcaactaatgataataatggcaaaacacgaggtgtaaatgttggagctggaggctcttttattaactcggccttcgggagcatcaatgtaggtattgcggaggataaaactgcgactcattcggctgtgggttctgttgcgattgaagtacaaaatggtgcaaacaaagtcgttaatgaaggtactatttttttgggcaggggggctcaggggaactacggaatcctggcaaaggatgccgggactgttgatgtggtaaataaagggactatcactattgacggtcatgacagtgatgcacctgcactgaatgttggcatgctggcaaataatagctccgggatgaaaaactccgggattatcaatgttaatggtctgaacagcaccgggctacaggtaatcaatgcaggacagttgaattctgacggtacgataaatgttggcggcaagggtatcagtagtggtttccgtaactatggtgcctgggtggaaggtgccggaagcaatgttaatgtatccggaaaaatcagtcttgccggtacgggggctgtgggggtttttgctaaagatggcggcagtctgaccctgtcaggcaatggtgcagtgctatttggcagcagcgatcagataggcttttatgtctatggaaaggactctgccattcataataccggaagcggtgttatggatgtgtccactgaaaactcaacattattccgtattgccagtggtgcgacattccagggaactgcagatgcttcttctgcacttacggcgtctggtaagaactcttatgcacttattgccacggggaaatcggatggcggtgtggcctcgacagtaacgtctggaggaatgaccatcaacctgacgggtgagggggctacagcgactttaattgaagggggagcgcagggcacaattgaaagtaatgccattatcaatatggataatgccagtgcgatagccggtattgcggatggcaatggctatgatatttccggcaaactcattaatccgaaggacaagaccacactattaacggcgggggctcagttaagttccacccaggataaagtgaccgggtatatcgcccgtaatggggccactctaaataataccggtaatatcatctttactggaaagaatacagtgggcgtccgggttgaggagggggctgttggtaccaacagcggaaatattacagttcaggatggtggtgtgggactaattgctaatgccacacaagatgttacaacgattaataactcgggaaatctcgttctcaagggaggagataatgctaaccgtacaacgggtataaaagcatctggtacaacaacaacggttaatatgaccgcgggtactatatctttgcagggacagggggcgattggcgttgaggccagcaataaagggactgttaaccttgatggttcggcagtaccgaactttgctgctgacggctctggtattaccgatcagattgcttttcgtattatcggagatggtgcaaccattaagacgaatattgcaccgggaactctgctggatgccagtggggaacgttctgtacttttccgtattgaagatggggcaaaacaggccggctctctgctgatgaaaacctccgggacaggcagccgtggtatctgggccacagggaaagggagcaatgtcctggctgatgctggcagtgatttccagatcctgggcgctcaggctcagggattatatgtaactggtggtgcgacagcgacgctgaaacagggggcatcagttaaccttgtaggggatggcgctgttgtcgcggaagttgacggaaatgaatacgctctggatggcagtattacacaaacgaatactggctcggttattaccaatgaggcagatatctcttcgccgctgaataatgccaagggctttattacgcgtaatcagggactgttgattaacaacggcaacattgatttcactaccggtacagataatatcggcgtctgggttgataacggccgctttgaaaatacaggaagccgtattgcggtcaatggcgttgcattatttgttgaaggtgcacagtctcagattaccagcacaggaggggatatcgtcgctgtggatggtgaggctgccattaagctgggggcgggcgcgtcactgaacctggcagggagtggcttgggtacgatcgaaggtcagaaaaatgcgcatggcatcctgctggatacaggggctgtggggctggttattgatggtgcgaaaatcaatgttaatgctgcaggtgcggtcggtcacgggattgagaaccgcgcagaaattgaaggcattcagttaaccaatacgactgaaattaatgtggctgatggcattggtgtacgtacttctgcctccctggccaagaccaacagcggcactattaatgtagacggcagtggaattgcactggcgttccagaaagctgacggaagtgaaaccgataataacctggatatgtctgactccgctggattggtcattaacctgaagggtacggacggcacgggtattttcgccaacactaaagatggtgctgtcgtgaagagtggtgcaagtgtcaatgttatacaggccgatggcggttccgctctggtggttaacaatgcagccagtgaagtggttcagagcggtaatctcatctctgcttctctgagtcatgccgtagtggatgcttcaaaagcacaatcctttaccaataaaggtcagattaaagctgcgtccaccaccgggactgcaatggcgtttgatgacgccgtgaataccaccgtactgaatgacagcggtgctgaaattcagggggttgtggctctgaacggcggtgataacacattcaccaataaaggcagtattaccggaaccgtcagtgcgaaagagggtaacaatacatttttatttgatgatggcagcacactgacaggagaagtgactgcaggaaatggcaataataatgtaacactcaatggtaagactcatgttgatcaggttactgccggtaccgggaagaacaccttcaccattaaaggtgaaggggcaacctggaacctgctggatggcgggcagggagattctgattccctgatttttgataacgccattcatacgctggattctgttgtaaaactacagaatttcgaacatgtcgggctgaagaacagttcacttgtcactctgaaggaagctcttgtgctgaccgatggggggaacggtccgggttccgtcgatattgaatcgggcagcgaactggccattattcccgcagttgcaggcaactttacctttgatccactgttaacaggcaaaggaacactgtctgcccgtcttgatgccgacacatctgcttttgaattcagccataacgtcggggatcaatttgccggaactctgaagctgggtactagtagctttgctctggaagggctgaatacgagcgggttaacccatgcaatgctgatgtctgaaaccgggaatatcacaacggttggctccggtgttcagcagattggcggtcttgggttcaatggcggaacgctgatttttggttccgttatgccgggcgataccattgccagcaacagtattgaaacctctgctgcaggtacgctggatatccgggggaaaggcacaattcaggtcaccatgccagatgaagtgattaatgatattccggctgttgatacccgtaagaatttgctggagcaggatgatgcgcagaccctggtcacgctggtgaatgcagcgggtaccgtcaccggtactggcgggcaactgcaactggtggatgaaaacgggcaggctatttctcacagtcagacgtttgatgtcactcagggcggtgaagttgtagctcagggaaattatgactataagctgctgggaagctccgacggtattaaaggtgacggactgtacataggctatgggctgaagtcgctggatttacagggaaccggtgataaagcgctggtgctgacaccgagagcgaatgcccagggactgcagacagatcttggcgcacagttaacgggggcaggggatctggccatcgaagctgcggggcaggttgtcacactgtctaacggcggtaataactacaccggggatacgctggtgcgcagcggcacattacagatggcaaatgataatgtacttggcgcaacaggtaatctgaacgtcgccagcaatgccgtcttcagaacaaacggatacagccagactgtcggtgcactgcagacagaaacgggagcgcacattcagcttgatagcggtagtgtactaacggtcagcggcacgcagcgtcagccgggggatgataatggtggcatcattgaaaacaacgtgctgtccggtgagggaacgctggctgtcacgggcagcaatctgacggtacatggcaccaatatcgggtttaccggtaatgccagccttacccagggggcgctggttgaaatgaacggcgcacaggggctgggaagccagggctccatcagctttgaaagccttaatgatcgcctggcgattgatatcgccgacggtagcggagtcagcagtaacctgagtaaatcgctttccggagaaggttcagtgggtatactgaacaccactgatctgacgctttccggggataacagtaatttcagcggtgaattccgtgtgcagaaagatgctgctctgcgggcttcagatgaaaaacacctgggcaccgggctgattgacagtgatggtgtcacctggcttaccgccagtggaaactggttactgaagaatgatattactggctccggcgctctggtgaaacagggggcgggtaatctgatcattaatcatgagctgacttataccggtgataccacggttgagagtggcgttctgattgtcggtgatgattcagtcacccgtgccgctggcgcgacgttgtcaggatccaaaaacattcatgttcttaatggcggcacactgagtgggctggggaccgtttcgggtcaggttaataaccagggaacactggcatcactgaatgctctctcaggttatgaaacggcagaggtgggcaattttaccgttggctcactgaccaataccggcgtcattcgtctggccggtggtaagacaggaaataccctgaccgtaaatggcgattacaccggtggcggtacgttaattatcaataccgtgctgggggatgatacttctaccactgacaaactgattgtcacgggtaacacctccggtgataccggcgtggtggtgaataatgtccggggccagggggctcagaccgctgacggcattgagattgtgcatgtcggtgggcagtctgacggtaacttcagactgcagaaccgtgcggtggcaggggcgtgggaatatttcctgcataaaggtaatgcgggtggtactgacggtaactggtatctgcgttctgaattgccgccagaaccacaaccgcagccgcagccacaaccgcagccacaaccgcagccgcagccacaaccgcagccacagccacaccccacgccggataaacctgtacagaaggtctatcgtccggaagcgggctcttatattgcgaacatagcggcagccaacacgctgttcaacatcagaatgcacgatcgtgagggggaaacttactataccgatgtgtttactggtgagaagaaagcaacaagtatgtggatgcgtcatatcggcggtcataatcgctggaaggacagcagttcacagctgaatacgcaaagtaaccgttatgttgtgcaactgggtggcagcattgcgcaatggactgacggtcaggaccgtctgcaacaggggattatggccggttatggaaatgagaagagttccacgacatcctcgctttcgggatataaatctaaaggtgcgatcaatggatacagcaccggtttatacggaacgtggcagcagaatgacggtaatgacaacggggcttatgtcgatacctggatccagtacggatggtttaataataccgttaatggtgaaaaactggctgcggagtcctggaaatcccgtggatttaccggttcagtggaagcgggttatacctttaaagccggcgaatttaccggtagccagggtagtcactatgactggtatattcagccgcagtcccagatcacgtggatgaatgtaagagccagtgagcatacggagaagaatggcacgaaagttcagctcagcggagacggtaatatccagagtcgtctgggcgtcagaacttacctgaaaggtaagagtgcgtctgatgataataaggcgcatcagtttgagccatttgtggaagttaactggatccataatacacggagctggggtgtcaaaatggataatacggcactcagtcaggacggagctacaaatattgctgaagtcaaaacgggtgttcagggtaaattgtcagataacctgaatgtctggggcaatgttggtgttcaggctggcgataaagggtacagtgatgcccaggcaatgctgggtattaaatatatattctaa

SEQ ID NO: 27787 - DNA, 519 bp, Escherichia coli; identical to SEQ ID NO: 9002

SEQ ID NO: 27788 - DNA, 933 bp, Escherichia coli
atggacaacgacaaaattgatcaacacagcgacgaaattgaagttgagagcgaagaaaaagagcgcggtaaaaaaatagaaatagatgaagaccgactcccctcccgggcgatggcaattcatgagcatatccgccaggatggtgaaaaagagctggaacgcgacgcaatggcgctactgtggtcagccattgcggcgggcctgtcgatgggcgcttcgctactggcaaaagggatatttcatgtcgaactggaaggcgtgccgggcagcttcttgctggagaatctcggttatacctttggttttattatcgtcataatggcccgccagcaattatttaccgaaaacaccgtaactgcggtactacccgtcatgcaaaaaccgacaatgagcaacgtcggcttacttatgcggttatggggcatcgtgctgctgggtaatattatcgggacaggtattgctgcgtgggcatttgaatatatgcctatcttcaatgaagaaactcgcgatgcatttgtcaaaatcggcatggatgtgatgaagaacacccccagcgagatgtttgccaacgcgatcatttccggctggctgatcgccactatggtatggatgtttcctgcagcgggtgcggcaaagattgtggtgattatattgatgacctggcttattgccctgggtgacaccacccacatcgttgtcggttctgttgaaatcctctatctggtgtttaacggcacgctgcactggagcgatttcatctggcccttcgcactacctactttagcggggaacatctgcggcggcacctttatcttcgcgttaatgagtcatgcacagattcgtaacgacatgagcaacaagcgcaaagtagaagcacgtcaaaaagcagaacgtgcggaaaacattaagaaaaatgataaaaacccggcataa

SEQ ID NO: 27789 - DNA, 756 bp, Escherichia coli
atgaagcttcgcctgtcggcgcttgctctgggaactacgcttctggtggggtgtgcgagttccggtacagatcagcaagggcgttctgacccgttagaagggtttaaccgcactatgtacaacttcaacttcaatgtattagacccgtatattgttcgaccggtcgctgtcgcctggcgtgattatgttccgcaacctgcgcgtaacggtttgagcaactttaccggcaaccttgaagaacctgcggtgatggttaactacttcttgcagggcgacccttatcaggggatggtccactttacccgctttttcctgaataccattttgggaatgggcggctttattgatgttgcagggatggcgaacccgaaactgcaacggactgaacctcaccgcttcggtagtacgcttggtcattatggtgtgggttatgggccgtacgttcagttaccgttctacggtagcttcacgctgcgtgatgacggtggtgatatggcggatagtctttacccggttctttcctggctgacctggccgatgtctgtgggtaaatggacgcttgaagggatagaaactcgtgcgcagttgttggattccgacggtctgctgcgtcagtcctccgatccttatattatggtgcgtgaagcgtacttccagcgtcatgatttcatcgctaatggcggtgaactcaaaccgcaggaaaatccgaacgcgcaagcgattcaggatgatttaaaagatatcgattctgaataa

SEQ ID NO: 27790 - DNA, 1341 bp, Escherichia coli
atgagccagaaaaccctgtttacaaagtctgctctcgcagtcgcagtggcacttatctccacccaggcctggtcggcaggctttcagttaaacgaattttcttcctctggcctgggccgggcttattcaggggaaggtgcaattgccgatgatgcaggtaacgttagccgtaaccccgcattgattaccatgtttgaccgcccgacattttctgcgggtgcggtttatattgatccggatgtagatattaccggacattctgatttaaccggtcagagtgcaaatgctaaaaatatcgcaccgacagcatgggtacctaacctgcactttgttgcgcctattaacgatcagtttggttggggagcgtcaataacttccaactatggcctggctacggaatttaccgacaactacgctgctggtatctatggcggtaaaaccgatctgcaaacaatcaaccttaaccttagcggggcttatcgccttaacaatagctggagttttggtcttggttttgatgcagtttatgccaaggcaaaaattgagcgttacgccggttcgctggggccattgttgtctcaacagttgattgcccagggtgtacccgcttcattaaccaatggtattaatactccggactctcaaattgctcatttgaaaggtgacgaatggggctttggctggaacgcgggtattctttatgaactggataaagataaccgttgggggctgacatatcgttcagaagttaaaatcgacttcgatggggattacaaaagctccattaacccaaatctgaacaatattttgggtaacatgggcttaccgtatggcacgatgggggcaacccaaaatggatccttaacgctgaacctgcctgagatgtgggagatttctggttataaccgtgttgcgccgcagtgggcaattcactacagcatggcctataccagttggagccagttccaggaattgaaagcgaaaggcgatagtggtcagactctgttctataaagatgaaggattccgggacgcgtatcgtatcgcgttgggtacaacctactattatgataaaaactggaccttccgtaccggtatcgcttatgacgacagcccggttccggcagataaacgttctatttccattcctgaccaggatcgtttgtggttaagtgctgggttaacctacgcatttaatgaagatgcatccattgatgttggcgcatcttatatgcatggtcagaaagtgaaattcaccgaaggtgaaggagcggcagcttattccttcgagtctgaaggtaaagcctggctgttcggtactaactttaactacgcgttctga

SEQ ID NO: 27791 - DNA, 285 bp, Escherichia coli; identical to SEQ ID NO: 672

SEQ ID NO: 27792 - DNA, 1311 bp, Escherichia coli
atgggtcaggttttaccgctggttacccgccagggcgatcgtatcgccatcgttagcgggttacgtacgccttttgcccgccaggcgacggcttttcatggcattcctgctgttgatttggggaagatggtggtaggcgaactgctggcacgcagcgagatccccgctgaagtgattgaacaactggtctttggtcaggtcgtacaaatgccggaagcccccaacattgcgcgtgaaattgttctcggtactggaatgaatgtgcatacagatgcttacagcgtcagccgcgcttgcgctaccagtttccaggcggttgcaaacgtcgcagaaagcctgatggcgggaactattcgcgcggggattgccggtggggcagattcctcttccgtattgccaattggcgtcagtaaaaaactggcgcgcgtactggttgatgtcaacaaagcccgcacaatgagccagcgcctgaaactcttctctcgcctgcgtttacgcgacttaatgcccgtaccgcctgcggtagcagagtattctaccggcttgcggatgggggacaccgcagagcaaatggcgaaaacctacggcatcacccgagaacagcaagatgcactggcgcaccgttcgcatcagcgtgctgctcaggcgtggtcagacggtaaactcaaagaagaggtgatgactgcctttatccctccttataaacaaccgcttgccgaagacaacaatattcgcggtaattcctcgcttgctgattacgcaaagttgcgtccggcgtttgatcgtaaacacgggacggtaacggcagcaaacagtacgccgctgaccgatggcgcagcggcggtgatcctgatgaccgaatcgcgggcgaaagaattagggctggtaccgctggggtatctgcgcagttacgcatttactgcgatagatgtctggcaggacatgttgctcggtccggcctggtcaacgccgctggcactggaacgtgccggtttgacaatgagcgatctgacattgatcgatatgcacgaagcctttgcagctcagacactggcgaatattcagttgctgggtagtgaacgttttgctcgtgatgtactggggcgtgcacatgccactggcgaagtggacgatagcaaatttaacgtgcttggcggttcgattgcttacgggcatcccttcgcggcgaccggcgcgcgaatgattacccagacattgcatgaacttcgccgtcgcggcggtggatttggattagtgaccgcctgtgctgcgggtgggcttggcgcggcaatagttgtggaggcggaataa

SEQ ID NO: 27793 - DNA, 2145 bp, Escherichia coli
atggaaatggcatcagcgtttacccttaatgtccgtctggacaacattgctgttatcaccatcgacgtaccgggtgagaaaatgaataccctgaaggcggagtttgcctcgcaggtgcgcgccattattaaacaactccgcgaaaataaagatctgcgcggtgtggtgtttatctccgcgaaaccggacaactttatcgctggtgcagacatcaatatgatcgccaactgcaaaacggcgcaagaagcggaagcactggcgcggcagggtcaacagttaatggcggagattcatgctttgcccgttccggttatcgcggctattcatggcgcttgcctgggcggcgggctggagctggcgctggcgtgccacggtcgcgtgtgtactgatgatcctaaaacggtactcggtttgcctgaagtacaacttggattgttacccggttcaggcggcacccagcgtttaccgcgcctgataggtgtcagcacagcattagagatgatcctcaccggaaaacaacttcgggcgaaacaggcattaaagctggggctggtggatgacgttgttccgcactccattttgctggaagccgctgttgagctggcaaagcaggatcgtccatcttcacgccctctacctgtacgcgagcgtattctggcggggccgttaggtcgtgcgctgctgttcaaaatggtcggcaagaaaacagagcaaaaaactcagggtaactatccagcgacgaaacgcattcttgacgttattgaaaccggtttagcgcaggggaccagcagtggctatgacgccgaagctcgggcgtttggtgaactggcgatgacgccgcaatcacaggcgctgcgcaatatcttttttgccagtacggaagtgaaaaaagatcccggcagtgatgcgccgcctgcgccattaaacagcgtggggattctaggtggtggcttgatgggcggcggtattgcttatgtcactgcttgtaaagcggggcttccggtcagaattaaagatatcaacccgcagggcataaatcatgcattgaagtacagctgggatcagttggagggcaaagttcgccgtcgtcatctcaaagccagcgaacgtgacaaacagctggcattaatctccggaacgacggactatcgcggctttgcccatcgcgatctgattattgaagcggtgtttgaaaatctcgaattaaaacaacagatggtggcggaagtggagcaaaattgcgccgctcataccatctttgcttcgaatacgtcatctttaccgattgccgatatcgccgctcacgccgcgcgacctgagcaagttattggcctgcatttcttcagtccggtggaaaaaatgccgctggtggagattattcctcatgcggggacatcggcgcaaaccatcgctaccacagtaaaactggcgaaaaaacagggcaaaacgcccattgtcgtgcgtgacaaagccgggttttacgtcaatcgcattttagcgccttacattaatgaagctatccgcatgttgaccgaaggtgaacgggtagagcacattgatgccgcgctggtgaaatttggttttccggtaggcccaatccaacttttggatgaggtaggaatcgacaccgggactaaaattattcctgtactggaagccgcttatggagaacgttttagcgcgcctgcaaatgttgtttcttcaattttgaacgacgatcgcaaaggcagaaaaaatggccggggtttctatctttatggtcagaaagggcgtaaaagcaaaaaacaggtcgatcccgccatttacccgctcattggcgcacaagggcaggggcgactctccgcaccgcaggttgctgaacggtgtgtgatgttgatgctgaatgaagcagtacgttgtctggacgagcaggttatccgtagcgtgcgtgacggggatataggcgcggtatttggcattggttttccgccatttctcggtggaccgttccgctatatcgattctctcggcgcaggcgaagtggttgcaataatgcaacgactggccacgcagtatggttcccgttttaccccttgcgagcgtttagtcgagatgagcaagcgtggggaaagtttttggaaaacaactgcaactgacctgcaataa

SEQ ID NO: 27794 - DNA, 486 bp, Escherichia coli
atgcaagtttttatcatgcgtcacggcgacgcagccctcgatgccgccagtgattcggttcgtcctctgactactaacggttgtgacgaatctcgcctgatggcgaactggctgaaaggtcaaaaagtggaaatcgaacgcgttctggtgagcccgttcctgcgagccgagcaaacactggaagaagtaggggattgtctgaacctgccttccagtgcagaagttctgccggagttaacgccctgcggcgatgttggtctggtcggcgcctatttgcaggcgttgaccaatgaaggtgttgcttcggtactggtaatctctcacttaccgttagtcgggtatctggttgccgagttatgtccgggcgaaacgccgcctatgtttaccacttcagcgattgccagcgtaacgcttgatgaaagcggaaaaggccaattcaactggcaaatgagcccttgtaatttgaagatggcaaaagcaatttaa

SEQ ID NO: 27795 - DNA, 567 bp, Escherichia coli
atgagtaagtttgccaaaacagccattgctgcggcgatggtcatgggcgcagttgtttccagttctgcttttgcagcaggcaacaacggtaccgcgcgcttctacggcaccattgaagactccccgtgctctatcgttccagacgatcacaaactggaagtcgatatgggtgacatcggtgcggctaaactgaccggcggtggcactaccacaccgaaagatttccagatccgtttacaggattgcgtgtttaccactgaaacaaacatggagaccacgttcaccggtactaactacgcggggccagccaacacggataactatgcgttattcaatgttgacagcggtgttgccatgaaccacgtgagcctggtaatcggcgatacccatggcaaaggttataaagtgggcgaaaagattgttcagccaatcgtgatggatacttcaaccagcaagggtaaagacaagcaaacgctgaactttaaagcctggctggtgggtgaaaccgatgcgccggatctcggccagttcgaaaccctgaccacattccagattacttatctctga

SEQ ID NO: 27796 - DNA, 582 bp, Escherichia coli
atgcctaatcactcaaattttcggctgcggggaatcgcctgctatattgcgctggcaatctctggtgggtcagtcaatgcatgggctgatgattcaattcaatttgacccccgtttccttgagttaaagggcgatacgaaaattgatctcggtaagttttcaaaaaaagggtatgtcgacgcgggtaaatataatttacgtgtatttataaataaacaacccctttctgatgaatacgacattaactggtacgtctctgaaaacgatccaacaaaaaactatgcctgcctgacacctgagttagtggcggcgctggggctgaaagaagggatagcaaaaagcctgcagtggacgcacaacgatgaatgccttaaaccaggtcaattagacgggatggaagtcgagaatgatttaagccagtcggcgttgctgctgacagtgccacaggcttacctcgaatataccagcagcgactgggaccctccctcacgctgggacgacggtattcctggcctgattgccgactacagcctcaatgcgcaaactcgccatcaggagcagggggggcgaggactcacatga

SEQ ID NO: 27797 - DNA, 504 bp, Escherichia coli
atgaaagcgttctttctgaccggatctgccgcgctattgctggcctgtggcgtgaccgttttcccggcaatggcgggcggcaaaatcgtcaatctgacgttgcgcgtgctggtggatggaccgccgccctgttcggtaaagggaagcgcggtggagttcggcaatgtgattattaaaagcattgatggtgccaactaccgtcaggcagtgggctacaccctgaactgctcaaacagtgtcagcgacgacctgcaaatgcagcttcaggccaccaccacgaccatcaacggcgaaacggtgctgagtactggaatcagcggttttggcattcgtattcagaatgccgctgaccattcgctggtggcagtgggtaacagtagctggctgccgttcaacatcaatactcagccagacttcgaagccgttccggtgaagcagagcggtgtggaactgatggcatcggagtttaatgcgaccatgaccatggtggtggactaccaatga

SEQ ID NO: 27798 - DNA, 480 bp, Escherichia coli
atgaaacgactcgcatggtgcttaatttacggttttgctggcctggcgcaggccgcgattaacgacgttacttttcacggcacgctggtttcgccacccgcctgtactatcagcgatggtaagacgatcgaagttgagtttcgcaacgtcattatcgacaacattaacggcgataatttccgtcaggatgtgccttacaccatcacatgtgaccccgatgtgcgcgacgacgcctgggagatgagcctgacctggacgggcagccaaaccccttatgatgattccgccattgaaacggacgttagcggcctggggattgagctacagcaaaacggccagccgtttaagctgggaacaccgttgaaaattgacccgtcaacgccgccaacgctgcaagctgtgccggtgaaagccaatgatgcggcgctcagcgacggaaccttttctgcctacgcaacattacaggtggattaccaatga

SEQ ID NO: 27799 - DNA, 528 bp, Escherichia coli
atgaacctaaaacggatatctcactgcgcggctgtactggcgacggtgctgctgacgccccatgttcaggcggctgacaacctgcatttctacggcaatttactcagcaagtcctgcacgttagtcgttcagggcgagtcgctggcggaggtgcattttcccaccgttagccgtaaagacctgatggtgaccgggcagtctgcgcgggtgccagtggtgtttcagctcaaagattgcaaagggccagctcagtatgaagtccgggtgacgctgaccggtacagaagacagtgaacagccgggctttctggcgctggatgtatcttcggcggcgcaaggtgtcggaattggcatggaaaaaaccgatggaacaccggtgccgattaacaataccagcggcgcgacctttgtgctgagtaacggcaataacaatctgaattttaatgcctggctccaggcgaaaagcgggcgggaagtgacgatgggtgagtttaccgcctccttaaccgcaacgtttgagtacatataa

SEQ ID NO: 27800 - DNA, 858 bp, Escherichia coli
atgaaaaaaactaacttgctgtttcgtcttttgatcctgatggtttttatgctcggtagtcgggccgggatggggcagacatttcgtaatgtgtatatctactatgctacgtttggctggaatagtcaggtcgaactgtatcttgatgttgctgaggtttcgagtgtttactacggtacctattatcaaagtaattatgttatgacgcttggcaacttacccaatcgcacatggacaggaacgggcagttctcctgcgccgacgattacggtaaaagatgggacaattgtaaataattcattttgtccgggcatggaggcactggaagccaaagacagccgctgggaatgtctcaagctgcctctggatattaccgtcgatggtgatgtgggaggctgcccgtggttagtgagtatcagagccaccagccaggttgtggtcggttctgttgataaagatatctattatggaccaaatgcaaccgtgtccgtgtgcccaaccgtgtcagttacgccgtatgatgtttcgtgggatgaaaactatatcaataaaacgaaaacactgtctttgcaatcgacggggggtgtgattgaaaaaacgctttcaacctatctgatgaaagacggcaaactatgtgatggctcgcaaatgaatgaagagggcgcttactgtcgctgggttgcgcaaatgatcacgttttcatcatcaggctgtgataatgctaatgttacggtggcgccaaacaggcatcccatcactgacaagcaactgcacgacatggtggtgcgtgtcgataccagcagccgccagccgattgattccacctgccgcttccagtacacgctcaacgagctgtag

SEQ ID NO: 27801 - DNA, 552 bp, Escherichia coli
atgaaaaagaaaacaacacttagcgaggaggaccaggcgctgtttcgccagttgatggcggggactcgcaagattaagcaggacacgattgtccaccgaccgcagcgtaaaaaaatcagcgaagtgccagtaaagcggttgattcaggaacaggccgatgccagccactatttttcggacgaatttcagccattattgaataccgaaggtccggtcaaatatgttcgcccggatgtcagccattttgaggcgaagaagttacgccgtggcgattattccccggagttgtttcttgatttacacggtctgacgcagctacaagccaaacaggaactgggggcgttgattgccgcctgccgccgtgaacatgtgttttgcgcctgtgtgatgcatggtcatggtaagcatattttgaagcagcaaacgccactgtggctggcgcaacatccgcatgtgatggcatttcaccaggcaccaaaagagtatggtggcgatgcggcgttgttggtgctgattgaagtggaagagtggttgccgccggaattaccctga

SEQ ID NO: 27802 - DNA, 933 bp, Escherichia coli
gtggataaaattttcgttgatgaagcagtaaatgagctgcaaaccattcaggacatgttgcgctggtcggtgagccgcttcagcgcggcgaatatctggtacggccacggcaccgataacccgtgggatgaagccgtgcaactggtgttgccttcgctctacctgccgctggatattccggaagacatgcgcaccgcgcgtctgacctccagcgaaaaacaccgtattgttgagcgcgtgatccgccgcgtcaacgaacgcattccggtggcttacctgaccaacagagcctggttctgcggtcatgaattttacgtcgatgaacgcgtgctggtgccgcgctcgccgattggtgaactgatcaacaataaatttgccggactcatcagtaagcaaccgcagcacattttagatatgtgtaccggtagcggctgcatcgccattgcctgtgcttatgccttcccggaagcggaagtcgacgcggtggacatctctccagacgcgctggcggttgctgaacagaacatcgaagaacacggtttgatccacaacgtcattccgattcgttccgacttgttccgtgacttgccgaaagtgcagtacgacctgatcgtcaccaacccgccgtacgtcgatgcggaagatatgtccgacctgccaaacgaataccgccacgagccggaactcggtctggcatctggcaccgacggcctgaaactgacgcgtcgcattctcggtaacgcggcagattacctcgctgatgatggtgtgctgatttgtgaagtgggcaacagcatggtacatcttatggaacaatatccggatgttccgttcacatggctggagtttgataacggcggcgatggtgtgtttatgctcaccaaagagcagctgctggcggcccgtgaacatttcgcgatttataaagattaa

SEQ ID NO: 27803 - DNA, 1086 bp, Escherichia coli
atggctggaaacacaattggacaactctttcgcgtaaccaccttcggcgaatcgcacgggctggcgctcggctgcatcgtcgatggtgttccgccaggcattccgcttacggaagcggacctgcaacatgaccttgatcgtcgtcgccctgggacatcgcgctataccacccagcgtcgtgagccggatcaggtcaaaattctctccggtgtttttgaaggtgttactactggcaccagcattggcttgttgatcgaaaataccgaccagcgttctcaggattacagcgcaattaaagatgtcttccgtccaggccatgccgattacacttacgaacaaaaatacggcctgcgtgattatcgcggcggtggacgttcttccgcccgtgaaaccgctatgcgcgtggcggcaggggcgattgccaaaaaatatctcgccgagaaatttggcattgagattcgcggttgcctgacccagatgggcgacattccactggaaatcaaagactggtctcaggtcgagcaaaatccattcttctgcccggacccggacaaaatcgacgcgttagatgaactgatgcgcgcgctgaaaaaagaaggcgactctattggtgcgaaagtcaccgtcgttgccagtggcgtacccgccggacttggcgagccggtctttgaccgcctggatgccgacatcgcccatgcgctaatgagcatcaacgcggtgaaaggcgtggaaattggtgatggttttgacgtggtagcgctgcgtggcagccagaaccgcgacgaaatcaccaaagacggtttccagagcaaccatgcgggcggcattcttggtggtatcagcagcgggcagcaaatcattgcccatatggcgctgaagccaacctccagcattaccgtgccggggcgcactattaaccgctttggcgaagaagttgagatgatcaccaaaggccgtcacgatccttgtgttgggatccgcgcggtgccgatcgcggaagcgatgctggcgatcgttttaatggatcacctgttacggcaacgggcgcaaaatgccgatgtgaagactgatattccacgctggtaa

SEQ ID NO: 27804 - DNA, 825 bp, Escherichia coli
atgaacaaaaccgcgattgcgctgctggccctgcttgccagtagcgccagcctggcagcgacgccgtggcaaaaaataacccaacctgtgccgggtagcgcacaatcgataggcagtttttctaatggctgtatcgtcggtgctgacacgttgccgatacagtccgaacattatcaggtcatgcgtaccgatcagcgtcgctatttcggtcacccagacctggtgatgtttatccagcgtctgagtcgccaggtgagcaatctgggcatgggtacggtgctgattggcgatatggggatgcctgctggtggtcgtttcaacggcggtcacgccagccaccagaccggactggatgtcgatatcttcctgcaactgccgaaaacacgctggacctccgcgcagctcttgcgcccgcaagcgttagatttagtttcccgcgacggtaaacacgttgtccccgcgctgtggaagccagaaattttcagcttgatcaaactcgccgcccaggacaaagacgtcacgcgcatttttgttaatccggcgattaaacaacaactttgccttgatgcgggcaccgatcgcgactggttgcgcaaagtgcgaccctggttccagcatcgcgcgcatatgcatgtacgattacgttgtcctgccgatagtctggagtgtgaggatcaacctttaccgccaccaggcgatggttgcggggcagaactgcaaagctggtttgaacctccaaaaccgggaacaacaaagcctgagaagaagacaccgcctccgttgccgccttcctgccaggcgctactggatgagcacgtgatctaa

SEQ ID NO: 27805 - DNA, 810 bp, Escherichia coli
atggaaacgtttaatagcctgtttatggtttccccgctgctgctgggagttctcttttttgtcgccatgctggcggggtttatcgactcgattgccggtggcggtgggttactcaccattccggcattgatggcggcggggatgtctcccgctaacgcgctggcaaccaataaactgcaagcctgcggtggctctatttccgccactatctactttattcgccgtaaagtggttagtttaagcgatcaaaaactcaatatcgccatgacctttgtcggctcaatgagcggcgcgctactggtgcagtatgttcaggccgatgtcttacggcagattttaccgatcctcgtaatttgtatcggtctttatttcttactgatgccaaagctgggtgaagaagatcgccagcgccggatgtacggtttacccttcgcgttaattgcaggtggttgcgtcggtttttacgatggattttttggcccggctgccggatcgttttacgcgctggccttcgttacgctgtgcggattcaacctcgccaaagccactgctcacgccaaattacttaacgcaacgtcaaacattggcggtttgctgctgtttattctcggtggcaaagtgatttgggcgacaggatttgtgatgttggtaggacagttcctcggcgcgcgcatggggtcaagactggtgttgagcaaaggacaaaagctgatccgcccgatgatcgttatcgtctcggcggtgatgagtgccaaattactttatgatagccacggacaggagatcctccactggttggggatgaactaa

SEQ ID NO: 27806 - DNA, 549 bp, Escherichia coli
atgaacagtacacaccactatgagcagttgattgagatttttaatagctgctttgccgatgaatttaatacccgtctgattaaaggcgacgacgaaccgatctatcttcctgctgatgcggaagtaccgtataacagaatcgtcttcgctcatggcttttatgccagcgccatccacgagatttcgcactggtgtattgccgggaaagcgcgccgtgacctggttgatttcggttactggtattgcccggacggacgcgatgcccagacgcaaagtcagtttgaagatgttgaagtgaagccgcaggcgctggactggttgttctgcgtggcggcgggatatccgtttaatgttagctgcgacaatctggaaggggatttcgaaccggaccgcgtggtgtttcaacggcgggtacatgcgcaggtgatggattatctggcaaacggcattcccgaacgtccggcacgcttcattaaagcactacaaaattattatcacacgccggaacttacggcggaacagttcccgtggccggaagcgctcaactga

SEQ ID NO: 27807 - DNA, 279 bp, Escherichia coli
atgatcgcggagtttgaatcacgcattctggcattaatcgacggtatggttgaccatgccagtgatgatgagttgtttgccagtgggtatttgcgtggccacctgacattagccatcgcagaactggaaagtggtgacgaccactccgctcaggcggtacatacaaccgttagccagagtctggaaaaagccattggcgcgggtgaattgtcaccgcgtgaccaggcgctggttaccgatatgtgggaacacctgtttcagcaggcctcacagcagtaa

SEQ ID NO: 27808 - DNA, 2007 bp, Escherichia coli
gtgaaacactactccatacaacctgccaacctcgaatttaatgctgagggtacacctgtttcccgagattttgacgatgtctatttttccaacgataacggactggaagagacgcgttatgtttttctcgggggtaaccatctagaggcacgttttcctgaacatccacatcctctgtttgtggtagcagagagcggcttcggcaccggattaaacttcctgacgctatggcaggcatttgatcagtttcgcgaagcacatccgcaagcgcaattacaacgcttacatttcattagttttgagaaatttcccctcacccgtgcggatttagcgctggcgcatcaacactggccggagctggccccgtgggcggaacagcttcaggcgcagtggcctttgcccttgcccggttgccatcgtttattgctcgatgaaggccacgtgacgctggatttatggtttggcgatataaacgaactgaccagccaactggacgattcgctaaatcaaaaagtagatgcctggtttctggacggctttgcgccagcgaaaaacccggatatgtggacacaaaatctgtttaacgccatggcgcgactggcgcgtccgggcagcacgctggcgacctttacgtctgccggttttgtccgccgcggtttgcaggaagccggattcactatgcaaaaacgtaagggctttgggcgcaaacgggaaatgctttgtggggtgatggaacagacattacccttcccctgctccacgccgtggtttaaccgtatgggcagcaacaaacaggaagcggcaattattggaggcggtattgccagcgcgttgttgtcactggcgctattgcgtcgcggctggcaggtaacgctttattgcgcggatgaagcccccgcgctgggtgcttccggcaatcgccagggggcgctgtatccgcttttaagtaaacacgatgaagcgctaaaccgttttttctctaatgcgtttacttttgctcgtcggttttacgatttattgcccgttaaatttgatcatgactggtgcggcgtcacgcagttaggctgggatgagaaaagccagcataaaatcgcacagatgttgtcgatggatttacccgcagaactggctgtagccgttgaggcaaatgcggttgaacaaattacgggcgttgcgacaaattgcagcggtattacttatccgcaaggtggctggctgtgtccggcagaactgacccgtaatgtgctggaactggcgcaacagcagggtttgcagattcattatcaacatcagttacaggatttatcccgtaaggatgacggttggttgttgaattttgcaggtgatcagcacgcgacgcatagtgtggtggtactggcgaatgggcatcaaatcagcggtttcagccaaacatcatctctgccagtatattcggttgccgggcaggtcagccatattccgacaacgccggagctggcgaaactgaagcaagtgctgtgctatgacggttatctcacgccgcaaaatccggcgaatcagcatcattgtattggtgccagttatcatcgtggtagcgaagagacggcgtacagtgatgaagatcagcagcagaatcgccagcggttgattgattgtttcccgcaggtacagtgggcaaaagaggttgatgtcagtggtaaagaggcgcgctgcggtgtgcgttgtgccactcgcgatcatctgccaatggtaggcaacgtgcctgattatgacgctacactcgtggaatatgcgtcgctggcggagaagaaagatgaagcggtaagcgcgccggtttatgacgatctctttatgtttgctgctttaggttcgcgcggtttgtgttctgccccgctgtgtgccgagattctggcagcacagatgagtgaagaaccgattccgatggatgccagtacgctggcggcgttaaatccgaataggttatgggtgcggaagttgttgaaaggtaaagcggttaaggcggggtaa

SEQ ID NO: 27809 - DNA, 1221 bp, Escherichia coli
atgaaacgtgcagtgattactggcctgggcattgtttccagcatcggtaataaccagcaggaagtcctggcatctctgcgtgaaggacgttcagggatcactttctctcaggagctgaaggattccggcatgcgtagccacgtctggggcaacgtaaaactggataccactggcctcattgaccgcaaagttgtgcgctttatgagcgacgcatccatttatgcattcctttctatggagcaggcaattgcagatgctggcttctccccggaagcttaccagaataacccgcgcgttggcctgattgcaggttccggcggcggctccccgcgtttccaggttttcggcgctgacgcaatgcgcggcccgcgcggcctgaaagcggttggcccgtatgtggtcaccaaagcgatggcatccggcgtttctgcctgcctcgccacgccgtttaaaattcacggcgttaactactccatcagctccgcgtgtgcgacttccgcacactgtatcggtaacgcagtagagcagatccaactgggcaaacaggacatcgtgtttgctggcggcggcgaagagctgtgctgggaaatggcttgcgaattcgacgcgatgggggcgctgtctactaaatacaacgacaccccggaaaaagcctcccgtacttacgacgctcaccgtgacggtttcgttatcgctggcggtggcggtatggtagtggttgaagagctggaacacgcgctggcgcgtggtgctcacatctatgctgaaatcgttggctacggcgcaacctctgatggcgcagacatggttgctccgtctggcgaaggtgcagtgcgctgcatgaagatggcgatgcacggtgttgataccccaatcgactacctgaactctcatggtacttcgactccggttggcgacgtgaaagaactggcagctatccgtgaagtgttcggcgataagagcccggcgatttctgcaaccaaagcaatgaccggtcactcactgggcgctgctggcgtacaggaagctatctactctctgctgatgctggaacacggttttatcgccccgagcatcaacattgaagagctggacgagcaggctgcgggtctgaacatcgtgaccgaaacgaccgatcgcgaactgaccacagttatgtctaacagcttcggcttcggcggcactaacgccacgctggtaatgcgcaagctgaaagattaa

SEQ ID NO: 27810 - DNA, 1179 bp, Escherichia coli
atgactgctgtaagccaaaccgaaacacgatcttctgccaatttttcgctctttcgcatcgcttttgcggtttttctcacctacatgaccgtaggtttaccgttgccggttatcccgctgtttgttcatcatgaactgggctatggcaacactatggtcggcattgccgtcgggattcagtttctggctacggtgctgacgcgtggttacgccgggcgactggccgatcaatatggcgcaaaacgttcggcgcttcaggggatgttagcttgtggtctggcggggggcgcgttgctgctggcggcgattttgcccgtccccgcaccgttcaaatttgctctgttggtcgtcgggcgtttgattcttggctttggtgaaagccagttactgacgggcgctctgacctggggattaggcatcgttgggccaaaacattccggcaaagtgatgtcatggaacggaatggctatttacggtgccctcgctgttggtgcgccgcttggcctgttgattcatagccattacggttttgccgcactggcgctcaccacaatggcattacccttactggcgtgggcctgtaacggcacagtgcgcaaagtaccggccctggcgggggaacgtccatcgctgtggagcgttgtcgggcttatctggaaaccagggttaggtctggcactacaaggcgttggttttgcggttatcgggactttcgtttcgctctactttgccagcaaaggatgggcgatggcgggctttactcttaccgcgtttggcggcgcatttgtcgtgatgcgcgtcatgtttggctggatgccggaccgttttggcggcgtgaaagtggcgatcgtctctctgcttgtagaaaccgtgggcttgttgctgctctggcaagcaccaggggcgtgggtcgcattagcgggcgcggcgttaactggagccggatgttcgcttatctttcctgcgctgggcgtggaggtggttaaacgcgtcccctcacacgttcgcggcaccgcactgggtggttacgccgcgtttcaggatatcgccctcggcgtctccgggccgcttgcgggaatgctggcgaccacgtttggttactcttcggtatttcttgccggggcgatctctgcggtgctgggaattattgtcacgatactgtcgtttcgtcggggttaa

SEQ ID NO: 27811 - DNA, 996 bp, Escherichia coli; identical to SEQ ID NO: 19119

SEQ ID NO: 27812 - DNA, 1137 bp, Escherichia coli
gtgaaaatccttgttgatgaaaatatgccttatgcccgcgacttatttagccgtttgggtgaggtgaccgcggttcccgggcgtccaattcccgtcgctcaactggcagacgcggatgcgcttatggtgcgttcggtcacgaaagtgaatgaatctttgctggcaggaaaacccattaaatttgttggcactgccaccgcggggaccgaccatgtcgatgaagcatggttaaagcaggcgggaattggtttttccgctgcacctggctgtaatgcgattgcggtagtggaatatgttttctcctccctgctgatgcttgccgaacgcgatggattttcactgcacgagcgtaccgtggggatcgttggcgttggtaacgttggtcgtcgtttacaggcgcgactggaagctttagggatcaaaaccttactttgcgatccgccccgcgccgaccgtggggatgagggggatttccgctcgctggatgaattagtccagcatgcggatattctgactttccatacgccactctttaaagatggtccgtacaaaacgctgcatctggcggatgaaaaactgatccgcagcctgaaaccgggagcgatcctgattaacgcctgccgtggcgcagtcgtcgataataccgccctgctgacctgcctgaacgaaggccagaagttaagcgtagtgctggatgtctgggaaggcgaaccggaacttaacgtggaattgctgaaaaaagtggatatcggcacgccgcatatcgcaggctataccctggaaggtaaagcacgcggtactacgcaagtgtttgaagcttatagcaagtttattgggcatgaacagcacgttgcgctggatacattactgcccgcgccagagtttggtcgcattacgctgcatggcccgctcgatcaaccgacgctgaaaaggctggtgcatttggtgtatgatgtgcgccgcgatgacgcaccgctgcgtaaagtcgccgggataccgggtgagttcgataaactgcgcaaaaactatcttgagcgccgtgaatggtcatctctgtatgtgatttgtgatgacgccagtgcggcatcattgctgtgtaaactgggttttaacgccgttcatcatccggcacgttaa

SEQ ID NO: 27813 - DNA, 1014 bp, Escherichia coli
atgtctgaaggctggaacattgccgtcctgggcgcaactggcgctgtgggcgaagccctgcttgaaacgctggctgaacgtcagttcccggttggggaaatttatgcactggcacgtaacgaaagcgcaggcgaacaactgcgctttggtggtaagacaatcaccgtgcaggatgccgctgaattcgactggacgcaggcgcagctggcgttttttgtcgcaggcaaagaagctaccgctacctgggttgaagaagcaaccaactcaggttgtctggtgatcgacagcagcggattgtttgctctcgaacccgacgtaccgctggtggtgccggaagtaaacccgtttgtactgaccgattaccgcaaccggaatgtcatcgccgtaccagacagtctgaccagccagctgctggcggcactgaaaccgctaattgatcagggcggtttatcacgtatcagcgttaccagcctgatttcagcctccgcccagggcaaaaaagcggtcgatgcgttagcggggcagagtgctaaattactcaatggcattccgattgacgaagaagatttcttcgggcgtcagctggcgttcaacatgctgccgttactgccggatagcgaaggtagcgtgcgtgaagaacgtcgtatcgttgacgaagtacgcaaaatcctgcaggacgaagggctgatgatttcggcaagcgtcgtccaggcaccggtattctacggtcatgcccagatggtcaactttgaagcactgcgtccgctggcggcagaagaagcgcgtgatgcgtttgctcagggcgaagatattgtgctctctgaagagaacgaattcccgactcaggtaggagatgcttctggtacgccgcatctttccgttggctgcatacgtaatgactacggtatgccggagcaagttcagttctggtcggtggccgataacgttcgctttggcggcgcgctgatggcagtaaaaatcgccgagaaactggtgcaggagtatctgtactaa

SEQ ID NO: 27814 - DNA, 813 bp, Escherichia coli
atgtccgaccagcaacaaccgccagtttataaaattgcgctgggcattgagtacgacggcagtaagtattacggctggcaacggcagaacgaagtccgcagtgtgcaggagaagctggaaaaggcgctctcccaggtggcgaacgaaccgatcaccgtcttctgcgccgggcgtactgacgcaggggtacacggcaccgggcaggttgtgcatttcgaaacgaccgcgcagcgcaaagacgctgcgtggacgttgggcgtaaatgcgaatttacctggtgacatcgccgtgcgttgggttaaagctgtacctgatgattttcatgcccgatttagcgccacggctcgccgttatcgctacatcatctacaatcatcggctgcgcccggcggtattgagtaaaggggtaacccatttttacgaaccgctggacgctgaacggatgcatcgggctgcgcaatgcttgctgggcgagaatgatttcacctcgttccgtgcggtgcagtgccagtcccggaccccgtggcgcaacgttatgcatattaatgtcacgcgtcacggtccttatgtggtggtagatatcaaagcgaatgcctttgtacatcatatggtcaggaatattgtcggcagcctgatggaagtcggtgcccacaaccagccggagagctggatagcagagttgctggcggcaaaggacagaacgctggcggcagcaacggcaaaagcggaagggctatatctggtcgcggtggattaccctgaccgatatgatcttccaaaaccgccaatgggcccgctatttctggcggactaa

SEQ ID NO: 27815 - DNA, 660 bp, Escherichia coli
atggacctgatttatttcctcatcgattttatcctgcacattgacgtgcatctggcagagctggtcgcggagtacggcgtctgggtttatgccattttgttcttaattttgttctgtgaaaccggtctggtggtaacgccgtttttaccgggtgattcattgctgtttgttgccggagcgttggcatcactggagaccaacgatctcaacgtccatatgatggtggtgctgatgctgatcgccgcgattgtgggtgacgcggtcaattacactatcgggcggttgttcggtgaaaagttattcagtaatcccaattcgaaaattttccgtcgcagttatctcgacaaaacccatcagttttatgagaaacatggcggcaaaacgattattctcgcccgttttgtgccgatcgtcagaacgttcgccccgtttgttgcgggaatgggccacatgtcgtaccgtcatttcgccgcttataacgtgattggcgcactgttgtgggtactgctttttacctacgcaggctatttcttcggcacgctccccttcattcagagcaaccttaaactgatgattgttggcattatttttgtttcaatattgccaggtgttttcgaatttattcgccacaaacgcgctgcggcacgcgccgcaaaataa

SEQ ID NO: 27816 - DNA, 915 bp, Escherichia coli
atgagctggattgaacgaattaaaagcaacattactcccacccgcaaggcgagcattcctgaaggggtgtggactaagtgtgatagctgcggtcaggttttataccgcgctgagctggaacgtaatcttgaggtctgtccgaagtgtgaccatcacatgcgtatgacagcgcgtaatcgcctgcatagcctgttagatgaaggaagccttgtggagctgggtagcgagcttgagccgaaagatgtgctgaagtttcgtgactccaagaagtataaagaccgtctggcatctgcgcagaaagaaaccggcgaaaaagatgcgctggtggtgatgaaaggcactctgtatggaatgccggttgtcgctgcggcattcgagttcgcctttatgggcggttccatggggtctgtggtaggtgcgcgtttcgtgcgtgccgttgagcaggcgctggaagataactgcccactgatctgcttctccgcctctggtggcgcacgtatgcaggaagcactgatgtcgctgatgcagatggcgaaaacctctgcggcactggcaaaaatgcaggagcgcggcttgccgtacatctccgtgctgaccgacccgaccatgggcggtgtttctgcaagtttcgccatgctgggcgatctcaacatcgctgaaccgaaagcgttaattggctttgccggtccgcgagttatcgaacagaccgttcgcgaaaaactgccgccaggattccagcgcagtgaattcctgatcgagaagggcgcgatcgacatgatcgtccgtcgtccggaaatgcgcctgaaactggcgagcattctggcgaagttgatgaatctgccagcgccgaatcctgaagcgccgcgtgaaggcgtagtggtgccaccggtaccggatcaggaacctgaggcctga

SEQ ID NO: 27817 - DNA, 1269 bp, Escherichia coli
atgattatcaaacgcactcctcaagccgcgtcgcctctggcttcgtggctttcttatctggaaaacctgcacagtaaaactatcgatctcggccttgagcgcgtgagccaggtcgcggcgcgtcttggcattctgaaaccagcgccatttgtgtttaccgttgcgggtacgaatggcaagggcaccacctgccgtacgctggagtcgattctgatggcggcagggtacaaagtgggcgtctacagttcgccgcatctggtgcgttataccgagcgcgtacgtgtgcagggtcaggaattgccggaatcggcccacaccgcttcttttgcggagattgaatcggcacgcggtgatatttccctgacctatttcgagtacggtacgctctcggcgttgtggctgttcaagcaggcacaacttgacgtagtgattctggaagtagggctgggcggtcgtctggacgcaaccaatattgtcgatgccgatgtcgcggtagtaaccagtattgcgctggatcataccgactggctggggccagatcgcgaaagtattggtcgcgagaaagcaggtatctttcgcagcgaaaaaccggcaattgtcggtgagccggaaatgccttctaccattgctgatgtggcgcaggaaaaaggtgcactgctacaacgtcggggcgttgagtggaactattccgtcaccgatcatgactggacgtttagcgatgctcacggcacgctggaaaatctgccgttgccgcttgtcccgcaaccgaatgccgcaacggcgctggcggcactgcgtgccagcgggctggaggtcagtgaaaatgccattcgcgacgggattgccagcgcaattttgccgggacgtttccagattgtgagcgagtcgccacgcgttatttttgatgtcgcgcataatccacatgcggcggaatatctcaccgggcgtatgaaagcgctaccgaaaaacgggcgcgtgctggcggttatcggtatgctacatgataaagatattgccggaactctggcctggttgaaaagcgtggttgatgactggtattgtgcgccactggaagggccgcgcggtgccacggcagaacaactgcttgagcatttgggtaacggcaaatcatttgatagcgttgcgcaggcatgggatgccgcaatggcggacgctaaagcggaagacaccgtgctggtgtgtggttcgttccacacggtcgcacatgtcatggaagtgattgacgcgaggagaagcggtggcaagtaa

SEQ ID NO: 27818 - DNA, 663 bp, Escherichia coli
gtggcaagtaagtttcagaatcggttagtgggtacgatcgtgctggtggcgctgggggtgattgtacttccagggctgctggacgggcagaaaaagcattatcaggatgagttcgctgctatcccgctggtgccgaaagcgggcgatcgcgatgagcctgatatgatgccagccgccacccaggcgttgccgacgcagccgccggaaggcgcagcggaagaggtacgggcaggtgatgccgcagcaccgtcgctcgatccggccactattgcagccaataacaccgagtttgaaccggaacctgcaccggtcgccccaccgaagccgaaaccggtggagccgcttaagccaaaggttgaagcaccacctgcgccgaagccagaaccgaagccggttgtggaagaaaaagcagcgccaacgggtaaagcttatgttgtgcaactgggcgcgctgaaaaatgccgataaagtgaatgagattgtcggtaagttgcgcggtgccggttatcgggtttatacgtcgccatccacgccagtgcagggtaaaattacccgtattctggttgggccggatgcttccaaagagaagctgaaaggatcgctgggtgagctcaagcagctttctggcttaagtggcgtggtaatgggctatacaccgaattaa

SEQ ID NO: 27819 - DNA, 489 bp, Escherichia coli
atggtctggattgattacgccataatcgcggtgattgctttttcctctctggttagcctgatccgcggctttgttcgtgaagcgttatcgctggtgacatggggttgtgctttctttgttgccagtcattactacacttacctgtcagtctggtttacgggctttgaagacgaactggttcgaaatgggattgccatcgcggtactgtttatcgctaccctgatcgttggtgctatcgtgaacttcgtgataggccagttggtagagaaaacggggttgtcaggcaccgatcgggtgctgggcgtctgtttcggtgcgttgcgcggtgtgttgattgttgccgccattctcttctttctcgactcctttaccggggtgtcgaaaagcgaagactggagcaaatcacagctgatcccgcagttcagttttatcatcagatggttttttgattatctgcaaagctcgtcaagtttcttgcccagagcgtaa

SEQ ID NO: 27820 - DNA, 1518 bp, Escherichia coli
atgtgcggtattgtcggtatcgccggtgttatgccggttaaccagtcgatttatgatgccttaacggtgcttcagcatcgcggtcaggatgccgccggcatcatcaccatagatgccaataactgcttccgtttgcgtaaagcgaacgggctggtgagcgatgtatttgaagctcgccatatgcagcgtttgcagggcaatatgggcattggtcatgtgcgttaccccacggctggcagctccagcgcctctgaagcgcagccgttttacgttaactctccgtatggcattacgcttgcccacaacggcaatctgaccaacgctcacgagttgcgtaaaaaactgtttgaagaaaaacgccgccacatcaacaccacttccgactcggaaattctgctcaatattttcgcaagcgaactggacaacttccgccattacccgctggaagccgacaacattttcgccgccatcgctgctacaaaccgcttaatccgcggcgcgtatgcctgtgtggcgatgatcatcggccacggtatggttgctttccgcgatcctaacgggattcgtccgctggtactgggaaaacgtgatattgacgagaaccgcacagaatatatggtcgcttccgaaagcgttgcgctcgatacgctgggctttgatttcctgcgtgacgtcgcgccgggcgaagcgatttacatcactgaagaaggacagttgtttacccgtcaatgtgctgacaatccggtcagcaatccgtgcctgtttgagtatgtatactttgcccgcccggactcgttcatcgacaaaatttccgtttacagcgcgcgcgtgaatatgggcaccaaactgggcgaaaaaattgcccgcgaatgggaagatctggatatcgacgtggtgatccctattccggaaacctcgtgtgatatcgcgctggaaattgcgcgtattctgggcaaaccgtaccgccagggcttcgttaaaaaccgttatgttggccgcaccttcatcatgccgggtcagcagctgcgtcgtaagtccgtgcgccgtaaactgaacgccaaccgcgccgagttccgcgataaaaacgtcctgctggtcgacgactctatcgtccgtggcaccacttctgagcagattatcgagatggcacgcgaagccggagcgaagaaagtgtacctcgcttctgcggcaccggaaattcgcttcccgaacgtttacggtatcgatatgccgagcgccacggaactgatcgctcacggtcgcgaagtagatgaaattcgccagatcatcggtgctgacgggttgattttccaggatctgaacgatctgatcgaagccgttcgcgctgaaaacccggatatccagcagtttgaatgctcggtgttcaacggcgtctacgtcaccaaagacgttgatcagggctacctcgatttccttgatactttacgtaatgacgacgccaaagcagtgcaacgtcagaacgaagtggaaaatctcgaaatgcataacgaaggatga

SEQ ID NO: 27821 - DNA, 570 bp, Escherichia coli
atgaaacgactcattgtaggcatcagcggtgccagcggcgcgatttatggcgtgcgtttattacaggttctgcgcgatgtcacagatatcgaaacgcatctggtaatgagccaggcggcgcgccagaccttatccctcgaaacggatttttccctgcgcgaagtgcaggcgttagctgatgtgacacacgatgcgcgcgatattgctgccagcatttcttccggttctttccagacgttggggatggtgattttaccctgttcaatcaaaaccctgtccggcattgtccatagctatactgatggcttactgacccgtgcggcagatgtggtgctgaaagaacgtcgcccgttggtgctctgcgtgcgtgaaacgccactgcacttaggccatctgcgtttaatgactcaggcggcagaaatcggtgcggtgattatgcctcccgttccggcgttttatcatcgcccacaatcccttgatgatgcgataaatcagacggttaatcgtgttcttgaccagtttgcggtaacccttcctgaagatctctttgcccgctggcagggcgcataa

SEQ ID NO: 27822 - DNA, 207 bp, Escherichia coli
atgaagaagtcgattctcgctctgtctttgttagtcggtctctccgcagcggcttccagctatgcggcgctaccggagacggtacgtatcggaaccgataccacctatgcgccgttctcgtcgaaagatgctaaaggtgattttgttggctttgatatcgatctcggtaacgagatgtgcaaacggatgcaggtgaaatgtacctag

SEQ ID NO: 27823 - DNA, 459 bp, Escherichia coli
ttgtacgccgcagattctcgtttgattgccgccaaaggttcaccgattcagccaacgctggattcactgaaaggtaaacatgttggtgtgctgcagggatcaacccaggaagcatacgctaacgagacctggcgtagcaaaggcgtggatgtggtggcctatgccaaccaggatttagtctattccgatctggctgcaggacgtctggatgctgcgttacaagatgaagttgctgccagcgaaggtttccttaagcaacccgccggtaaagatttcgcctttgcaggcccatcagtgaaagacaaaaaatacttcggtgacggcaccggtgtagggctgcgtaaagatgatgctgaactgacggctgcgtttaataaggcgcttggcgagctgcgtcaggacggtacctacgacaagatggcgaaaaagtatttcgactttaatgtctacggtgactga

SEQ ID NO: 27824 - DNA, 783 bp, Escherichia coli
atgaaaaaactggtgctatcgctctctctggttctggccttctccagcgcaactgcggcatttgctgcgattccgcaaaacatccgcatcggtaccgatccgacctatgcgccatttgaatcaaaaaattcacaaggtgaactggttggcttcgatatcgatctggcgaaggagttgtgcaaacgcatcaatacgcaatgtacgtttgtcgaaaacccactggatgcgttaatcccgtccttaaaagcgaagaagattgacgccatcatgtcatcgctttccattacggaaaaacgtcagcaagaaatagccttcaccgacaaactgtacgctgccgattctcgtctggtggtggcgaaaaattccgacattcagccgacagtcgaatcgctgaaaggcaaacgggtaggcgtattgcagggcaccacccaggagacgttcggtaacgaacactgggcaccaaaaggcattgaaatcgtttcttatcaggggcaggacaatatttattctgacctgactgccggacgtattgatgccgcgttccaggatgaggtcgcagccagcgaaggtttcctcaaacaacccgtcggtaaagattacaaattcggtggcccgtctgttaaagatgaaaaactgtttggcgtagggaccggcatgggcctgcgtaaagaagataacgaactgcgcgaggcactgaacaaagcctttgccgaaatgcgcgctgacggtacttacgagaaattagcgaaaaagtacttcgattttgatgtttatggtggttaa

SEQ ID NO: 27825 - DNA, 687 bp, Escherichia coli
atgttgtatgggttttcaggtgttattttacagggtgcgctcgtcacgctggagctggctatcagctctgtagtgctcgctgtaatcatcggtttaattggcgctggcggtaagctctcacaaaatcggctttcgggccttattttcgaagggtacaccacgctgattcgaggcgtgccggatttagtattgatgctgctgattttctacggtttgcagattgcgctaaacacggtgacggaggcgatgggcgtcgggcagattgatattgatccgatggtcgcaggtattatcactctcggttttatctacggtgcttattttaccgaaacgtttcgtggcgcgtttatggcagtgccgaaaggacatatagaggcggcgacggcgttcggttttactcgtgggcaagtgtttcggcggatcatgtttccggcgatgatgcgttacgccctgccaggcattggcaacaactggcaggtgatcctcaaatctaccgcactggtttcgttactcggcctggaagatgtggtcaaagccacgcaactggcaggcaaaagtacctgggaaccgttctatttcgctatcgtctgtggcgtgatttatcttgttttcaccaccgtttccaatggtgtgctgctgttccttgagcgccgctactccgtgggtgtgaagagggctgacctgtga

SEQ ID NO: 27826 - DNA, 717 bp, Escherichia coli
gtgatcgaaatcttacatgaatactggaaaccactgctgtggactgacggttatcgctttactggcgtggcgatcaccctgtggctgctgattttgtcggtagtgataggcggagttctggcgctgtttctggcgattggtcgcgtctcaagtaataaatacatccagtttccaatctggttatttacctatatttttcgcggtacgccgctgtatgttcagttgctggtgttctattccggcatgtacacgctggagattgttaagggaaccgagttccttaacgccttttttcgcagtggtctgaactgtaccgtgctggcgctgacgcttaacacctgcgcttacactaccgagatttttgccggggcaatccgttcagtgccgcatggggaaattgaagccgccagagcctatggcttctcgacctttaaaatgtatcgctgcattattttgccttctgcgctgcgtattgcgttaccggcgtacagcaacgaagtgatcctgatgctgcactctactgcgctggcatttactgccacggtgccggatctgctgaaaattgcccgcgatattaacgccgccacatatcaaccttttaccgctttcggcattgccgcggtgctctatttaatcatctcttatgtcctgatcagcctctttcgtagagctgaaaaacgctggttgcagcatgtgaaaccttcttcaacgcactga

SEQ ID NO: 27827 - DNA, 774 bp, Escherichia coli; identical to SEQ ID NO: 8824

SEQ ID NO: 27828 - DNA, 894 bp, Escherichia coli
atgaacatagtgatcaccggagggacgggattaattggtcgccatttgattccacgtttgctggagctgggccatcaaatcacggtaatgacgcgtaacccgcagaaagccagttctgttctcggccctcgggtgacactatggcaagggcttgccgatcaaagtaacctcaacggcgttgatgcggtaatcaacctggccggagagccgattgctgataaacgctggactcacgagcaaaaagagcgtctctgccaaagccgctggaatatcacgcaaaaactggtcgatttgattaatgccagcgacacgccgccgtcggtactcatttccggctcggcaacgggctattatggcgacttaggtgaagtggtggttaccgaagaggaaccgccgcataacgaatttacccataaactctgcgcccgctgggaagaaattgcctgccgggcacaaagtgacaaaacgcgagtgtgcctgctgcgtaccggcgtagtgctggcaccggatggcggtattctcggtaaaatgctgccgccatttcgttttggcctgggcgggccgattggctctggtcggcagtatctggcctggattcatattgatgatatggtcaacggtattctctggctgctggataaagagctgcgcgggccatttaatatggtttcgccctacccggtgcgcaatgaacaatttgcccatgcactgggtcatgcgctgcatcgcccggccattttgcgcgtccctgcgaccgccattcggttgttaatgggcgaatcttcagttctggtattaggcggtcaacgcacgctgccaaaaaagctggaagaagcgggttttgcgtttcgctggtacgatttagaagaggcgctggcggatgtcgttcgctga

SEQ ID NO: 27829 - DNA, 363 bp, Escherichia coli
atggcacaacctgccgctattattcgtataaagaaccttcgtttgcgtacgtttatcggaattaaggaagaagaaattaacaaccgtcaggatattgttatcaatgtgactatccactaccccgccgataaagcgcgcactagcgaagatatcaacgatgcgctgaattatcgcaccgtaacgaaaaacattattcagcatgtagagaataaccgtttctctttgctggaaaaattaactcaggatgtgctcgatatcgcacgtgaacatcactgggtgacgtatgctgaagtggagatcgataaactgcacgcgctgcgctacgccgattcggtatccatgaccttaagctggcagcgttaa

SEQ ID NO: 27830 - DNA, 648 bp, Escherichia coli
atgatcgatctctatttcgccccgacacccaatggtcacaaaattacgctgtttctcgaagaagcagggctggattatcgcttaataaaggtagacctggggaaaggaggtcagtttcgcccggaatttttgcgcatttcgcctaacaacaaaattccggcaattgttgatcattctccagccgatggcggcgaaccgctaagcctctttgagtctggtgccattttgttgtatctggctgagaaaacgggactcttcttgagtcatgaaacgcgtgaacgcgccgtcacattacagtggttattctggcaggtaggcggactggggccgatgcttgggcaaaatcatcattttaatcacgcaaccccccaaaccattccttacgctattgaacgttatcaggttgaaactcagcgtctgtaccatgtactgaacaagcggctggaaaattcgccctggctgggaggcgagaactacagcattgcggatattgcctgctggccgtgggttaatgcctggactcgccagcgaattgacctcgcaatgtatccggcagtcaagaactggcatgagcggatccgttcgcgccctgccaccgggcaggcactgctaaaagcacaacacggtgatgagcgttcggatagttaa

SEQ ID NO: 27831 - DNA, 645 bp, Escherichia coli
atgagtaaacccgctatcacgctttggtcagatgcccattttttctccccttatgtgttatccgcctgggtggcgttgcaggagaaaggcctgtcgtttcatatcaagaccatcgacctcgacagcggtgaacatttgcagccggcgtggcaaggttacggtcagacacgccgtgtgccgttattacagatcgatgattttgagttgagtgaatcttctgccattgcggagtatctggaagatcgatttgcgccaccgacctgggaacgtatttatccgcttgatttagaaaatcgtgcgcgtgcacgacagattcaggcttggttgcgcagcgatctgatgcccatccgcgaagaacgcccgacggatgttgtctttgcgggggcgaaaaaagcgccactaacggccgagggaaaagccagtgcagagaaattgttcgcgatggcagaacatttgttagcactgggtcagccgaatttatttggtgaatggtgcattgctgatactgatctggcgctaatgattaaccgcctggtactacatggcgatgaggtgccggaacgcctggtggattatgcgacattccagtggcagcgagcgtctgtccagcgttttattgcactttcggcgaagcaatctggctga

SEQ ID NO: 27832 - DNA, 552 bp, Escherichia coli
atgaaactgatgtttgcatcggacattcatgggtcgttaccggcgacggaacgtgttctggagttgtttgcccaaagcggtgcccagtggctggtgatccttggcgacgtgttgaatcatggcccgcgtaatgctttaccggagggttacgcgccagccaaagtcgctgaacggcttaatgaagtggcacataaggttatcgctgtgcgcggcaactgcgacagcgaagtggatcaaatgctgctgcatttcccgataaccgcgccgtggcaacaggtattactggaaaaacaacgtctgtttttgacgcatggtcatctttttggcccggaaaatctacctgctttaaaccagaacgatgtgctggtgtacggtcatacccatctgccagtggcagaacagcggggggagattttccacttcaaccccggctcggtgagtattccgaaaggcggtaatccggcgagttatggcatgctggataatgacgtacttagtgtaatcgcactcaatgatcaaagtatcattgcgcaggtcgcgattaatccgtaa

SEQ ID NO: 27833 - DNA, 543 bp, Escherichia coli
atggaacagcgtcgtttggcaagtactgaatgggtggatattgtcaatgaagagaacgaagtcattgcacaagccagccgggaacaaatgcgggcacagtgtctgcgtcatcgtgcaacttatatcgtcgtgcatgatggcatgggcaaaattctggtccagcgtcgtaccgagacaaaagactttttacccggcatgttagatgcgaccgcaggcggtgtagtccaggccgatgagcaactgctggaatccgcgcgtcgcgaagcggaagaagagttgggcattgccggggtcccctttgctgagcacgggcagttctatttcgaagataaaaattgccgtgtctggggcgcgttgttcagctgcgtctctcacggtcccttcgctctacaggaagatgaagtcagtgaagtttgctggctgacgccggaagaaatcaccgcacgctgcgatgagttcactccagactcgctgaaagcgctggcgttgtggatgaagcgcaatgccaaaaatgaagccgtagagactgaaacggcagaatga

SEQ ID NO: 27834 - DNA, 1479 bp, Escherichia coli
atgcccgatacgttggtgattatcttttttgttgccattttaaccagccttgccacctgggtagttccggtgggcatgtttgacagtcaggaagtgcagtatcaggttgatggtcaaacaaaaacacgcaaagtcgtagatccacactcatttcgcattctgactaatgaagcaggcgaacctgagtatcaccgcgtacagctgttcacgacgggcgatgaacgcccgggtctgatgaacttcccgtttgaagggttaacctcaggatcgaaatacgggacagccgttggcatcatcatgtttatgctggtgattggcggcgcgtttggcattgtgatgcgtacaggaaccattgataacggtatcctggcgcttattcgccatacccgcggaaatgaaattctctttattcctgcgctgtttattctgttttcacttggcggcgcaatatttggtatgggagaagaggccgtcgcctttgccattatcatcgcaccgctaatggtccggctgggctatgacagtattaccaccgtccttgtgacctatattgccacgcaaatcggttttgccagttcgtggatgaacccgttttgtgtggttgttgctcagggtattgccggcgttccggtgctttctggctccgggttgcgcatcgtggtgtgggttatcgccactctgattggcctgatctttaccatggtgtacgcctcacgagtgaaaaagaatcctcttctgtcacgcgtgcatgagtccgaccgcttctttcgtgaaaagcaggcggatgttgaacaacgtccgtttacctttggtgactggctggtattgattgtcctgaccgccgtaatggtctgggttatttggggcgtgatcgttaatgcctggtttattcctgaaattgccagccagttcttcaccatgggtctggtgattggcatcatcggcgttgttttccgccttaacggcatgacggttaataccatggcttcatccttcaccgaaggggcgcgaatgatgatcgcccctgccctgctggtaggtttcgccaaagggattttgctgctggtcggtaatggtgaagcgggtgatgccagcgtgttaaataccatcctcaacagcattgccaatgccattagcggtctggataacgcggtcgcggcctggtttatgttgctcttccaggcggtatttaatttcttcgtgacgtccggttctggtcaggcggcgttaaccatgccgttactggcaccgcttggcgatctggtcggtgttaaccgtcaggttaccgtgctggcgttccagtttggtgatggcttcagccacatcatttacccaacctcagcttcgttaatggcgacgctcggtgtttgccgggtggacttccgtaactggctgaaggtgggtgcgaccctgcttggactgctgtttattatgtccagcgtcgtggtgatcggcgctcagttgatgggctaccactaa

SEQ ID NO: 27835 - DNA, 2145 bp, Escherichia coli
gtgtcccgtattattatgctgatccctaccggaaccagcgtcggtctgaccagcgtcagccttggcgtgatccgtgcaatggaacgcaaaggcgttcgtctgagcgttttcaaacctatcgctcagccgcgtaccggtggcgatgcgcccgatcagactacgactatcgtgcgtgcgaactcttccaccacgacggccgctgaaccgctgaaaatgagctacgttgaaggtctgctttccagcaatcagaaagatgtgctgatggaagagatcatcgcgaactaccacgctaacaccaaagacgctgaagtcgttctggtggaaggtctggtcccgacacgtaagcaccagtttgcccagtctctgaactacgaaatcgccaaaacgctgaacgcagaaatcgtcttcgttatgtctcagggcactgatactccggaacagttgaaagagcgtatcgaactgactcgcaacagcttcggcggtgcaaaaaacaccaatattaccggcgttatcgttaacaaactgaacgctccggttgatgagcagggtcgtacccgtccggatctgtccgagatttttgacgactccaccaaagcaaaagtgaacaacgttgatccggcgaagctgcaagaatccagcccgctgccggttctcggcgctgtgccgtggagctttgacctgatcgcgactcgtgcgatcgatatggctcgccacctgaatgcgaccatcatcaacgaaggcgacatcaatactcgccgcgttaaatccgtcactttctgcgcacgcagcattccgcacatgctggagcacttccgtgccggttctctgctggtgacttccgcagaccgccctgacgtgctggttgccgcttgcctggctgccatgaacggcgtagaaatcggtgccctgctgctgactggcggctacgaaatggacgcgcgcatttctaaactgtgcgaacgtgctttcgctactggcctgccggtatttatggtgaacaccaacacctggcagacttctcttagcctgcagagcttcaacctggaagttccggttgacgatcatgagcgtatcgaaaaagttcaggaatacgtggctaactacatcaacgctgactggatcgattctctgactgccacttctgagcgcagccgtcgtctgtctccgccagcgttccgttatcagctgactgaacttgcgcgcaaagcgggcaaacgtatcgttctgccggaaggtgacgaaccgcgtaccgttaaagcagccgctatctgtgctgaacgtggtatcgcaacttgcgtactgctgggtaatccggcagagatcaaccgtgttgcagcctctcagggtgtagaactgggtgcaggcattgaaatcgttgatccagaagtggttcgcgaaaactatgttggtcgtctggtcgaactgcgtaagaacaaaggcatgaccgaaaccgttgcccgcgaacagctggaagacaacgtggttctcggtacgctgatgctggaacaagatgaagttgatggtctggtttccggtgctgttcacaccaccgcaaacaccatccgtccgccgctgcagctgatcaaaactgcaccgggcagctccctggtatcttccgtgttcttcatgctgttgccggaacaggtttacgtttacggtgactgtgcgatcaacccggatccgaccgcagaacagctggcagaaatcgcgattcagtccgctgattccgctgcggccttcggtatcgaaccgcgcgttgctatgctctcctactccaccggtacttctggtgctggtagcgacgtagaaaaagttcgcgaagcaactcgtctggcgcaggaaaaacgtcctgatctgatgatcgacggtccgctgcagtacgacgctgcggtaatggctgacgttgcgaaatccaaagcaccgaactctccggttgcaggtcgcgctaccgtgttcatcttcccggatctgaacaccggtaacaccacctacaaagcggtacagcgttctgctgacctgatctctatcggaccgatgctgcagggtatgcgcaagccggttaacgacctgtcccgtggcgcactggttgatgatatcgtctacaccatcgcgctgactgcgattcagtctgcacagcagcagtaa

SEQ ID NO: 27836 - DNA, 1203 bp, Escherichia coli
atgtcgagtaagttagtactggttctgaactgcggtagttcttcactgaaatttgccatcatcgatgcagtaaatggtgaagagtacctttctggtttagccgaatgtttccacctgcccgaagcacgtatcaaatggaaaatggacggcaataaacaggaagcggctttaggtgcaggcgccgctcacagcgaagcgctcaactttatcgttaatactattctggcacaaaaaccagaactgtctgcgcagctgactgctatcggtcaccgtatcgtacacggcggcgaaaagtataccagctccgtagtgatcgatgagtctgttattcagggtatcaaagatgcagcttcttttgcaccgctgcacaacccggctcacctgatcggtatcgaagaagctctgaaatctttcccacagctgaaagacaaaaacgttgctgtatttgacaccgcgttccaccagactatgccggaagagtcttacctctacgccctgccgtacaacctgtacaaagagcacggcatccgtcgttacggcgcgcacggcaccagccacttctatgtaacccaggaagcggcaaaaatgctgaacaaaccggtagaagaactgaacatcatcacctgccacctgggcaacggtggttccgtttctgctatccgcaacggtaaatgcgttgacacctctatgggcctgaccccgctggaaggtctggtcatgggtacccgttctggtgatatcgatccggcgatcatcttccacctgcacgacaccctgggcatgagcgttgacgcaatcaacaaactgctaaccaaagagtctggcctgctgggtctgaccgaagtgaccagcgactgccgctatgttgaagacaactacgcgacgaaagaagacgcgaagcgcgcaatggacgtttactgccaccgcctggccaaatacatcggtgcctacactgcgctgatggatggtcgtctggacgctgttgtattcaccggtggtatcggtgaaaatgccgcgatggttcgtgaactgtctctgggcaaactgggcgtgctgggctttgaagttgatcatgaacgcaacctggctgcacgtttcggcaaatctggtttcatcaacaaagaaggtacccgtcctgcggtggttatcccaaccaacgaagaactggttatcgcgcaagacgcgagccgcctgactgcctga

SEQ ID NO: 27837 - DNA, 456 bp, Escherichia coli
atgtcaacgccggataatcgttctgttaatttttttagcttgttttgccggggacagcattactcaaagacgtggccgctggaaaaacgccttgccccagtctttgtcgaaaatcgcgttatcaagatgacgcgttatgcgatccgttttatgccgccgatcgccgtatttactctctgctggcagattgccctgggcggtcagcttgggccggcagttgccactgcgctgttcgccttaagtttacccatgcagggattgtggtggctgggcaagcgttctgtaacgccattacctcctgcaatcctcaactggttttatgaagttcgcggtaaattgcaggagtctggacaggtgttggcacccgttgaaggcaagcctgattaccaggcattagctgacacgcttaagcgtgccttcaaacaactggataaaactttccttgatgatttgtaa

SEQ ID NO: 27838 - DNA, 495 bp, Escherichia coli
atggaaatgaccaacgcgcaacgtcttattttgtctaaccagtacaagatgatgactatgctcgatccggcaaatgctgaacgttaccgtcgcctgcaaacaatcattgagcgtggttatggattacagatgcgtgaactggatcgcgagtttggcgagctgaaagaagaaacctgccgcactatcatcgacattatggagatgtatcatgcgttgcatgtttcctggtctaatttgcaggaccagcaatccatcgatgaacgtcgtgtcaccttcctcggctttgacgctgccactgaagcacgttacctcggttatgtccgctttatggttaatgtggaagggcgctatacccattttgacgctggaactcacggttttaacgcccagacgccaatgtgggaaaaatatcagcgcatgcttaatgtctggcatgcctgcccgcgccagtaccatttgagcgccaacgaaattaatcaaattattaacgcctga

SEQ ID NO: 27839 - DNA, 651 bp, Escherichia coli; identical to SEQ ID NO: 623

SEQ ID NO: 27840 - DNA, 1833 bp, Escherichia coli
gtgaacggtgaattgatttgggttctttcattactggccgttgccatcgtcttgtttgcgacgggcagagtgcgtatggatgcggtcgctttgtttgttattgtcgcgtttgcattaagcggaacgctgacggtccccgaagtattttccggcttttccgatcctaacgttgtcctgattgccgccttgtttattattggcgatggtttggtccgtaccggtgttgccactgtaatggggacatggctggtcaaagtggcgggcaacagtgaaatcaaaatgttggttttgttgatgctgaccgtcgcggggcttggcgcgtttatgagttcaaccggcgttgtcgctatctttattcccgtggtgttaagcgttgccatgcgtatgcaaacgtcgccgtcgcgcctgatgatgccgttaagttttgccgggctgataagcggcatgatgacgctggtggcgacgccgccgaacctggtagtcaacagtgaattgctgcgtgaaggctatcatggttttagtttctttagcgtaacacctattggcctggtcgtgctggtgctgggtattttgtatatgttagtgatgcgtttcatgctgaaaggggatacccagaccccgcagcgcgaaggctggacgcgccgaacctttcgcgatcttatccgtgaatatcgactgaccgggcgtgcgcgacgtctggctattcgccccggatcgccaatgattggtcaacgactggacgatctcaaattacgtgaacgttatggtgctaacgtcatcggtgttgaacgctggcggcgttttcgtcgcgttatcgtgaacgttaatggggtttctgaatttcgcgcgcgtgacgttttgcttattgatatgtctgcggctgatgtcgatctccggcaattttgtagtgagcaattgctggagccgatggtactgcgcggcgagtatttttctgaccaggctcttgatgtgggcatggcagagatttcattaattcctgagtcagaacttattggtaaatcggtgcgcgaaattggttttcgtacccgctacggattgaatgtagtggggctaaagcgcaatggcgtggcgctggaaggttcgctggcggatgagcctctgctgctgggcgatatcatcctggttgtgggtaactggaaactgatcggtatgctggccaaacagggccgcgacttcgtagcgctgaacttaccggaagaggtgagtgaagcatcgcccgcgcacagccaggcaccccatgcgattttctgtctggtgctaatggtggcgttaatgctgaccgatgaaattcctaatcctgttgccgctattatcgcctgcctgctgatggggaaattccgctgtatagatgctgaaagcgcctataaatccattcactggccgagcattattttgatcgttgggatgatgccatttgctgtggcattacagaaaacgggaggtgtcgcgctggcggtgaaagggctgatggacattggcggcggttacgggccacatatgatgctgggttgtttgtttgtcttgtcggcggttattgggctatttatttctaataccgcgacggcggtgttgatggctccgattgcgctggctgctgccaaaacgatgggggtgtcgccttatccatttgcgatggtcgtggcgatggcagcatccgccgcctttatgacaccgatatcttcacctgttaacacactggttttaggtccggggaattacagcttcagtgactttgttaagttgggggtaccgttcaccattatcgtgatggcggtttgtgtggtgatgatcccgatgctgtttccgttttga

SEQ ID NO: 27841 - DNA, 600 bp, Escherichia coli
atgaaacagagccatttttttgcccatctctcccgcctgaaactcattaaccgctggccgctaatgcgcaacgtgcggacggaaaatgtgtccgaacacagtttgcaggtagcgatggtcgcccatgcgctggcagctatcaaaaatcgtaaatttggcggtaatgtcaacgccgaacgtatcgctttactggcgatgtaccacgatgcttcagaagtgctcaccggagatctccctactccggtgaaatacttcaattcgcaaatcgctcaggaatacaaggctattgaaaaaatcgctcagcaaaaactggtcgatatggttccggaagagctgcaggatatctttgcgccgttaattgacgagcatgcatatagcgatgaagaaaaatcgctggtgaaacaggcagatgcactgtgtgcatatctgaaatgcctggaagaacttgcggccggaaataatgaattcttgctggcaaaaacgcgactggaagcgacgcttgaagcgcgccgcagccaggagatggactacttcatggaagtatttgttcccagcttccatctttcgctcgatgagattagccaggattcaccgctgtaa

SEQ ID NO: 27842 - DNA, 1218 bp, Escherichia coli
atgtcccccattgaaaaatccagcaaattagagaatgtctgttatgacatccgtggtccggtgctgaaagaagcaaaacgcctggaagaagaaggtaacaaggtactgaaactgaacatcggcaaccctgccccgttcggttttgacgcgccagatgaaattctcgttgacgtgatacgcaacctgcctaccgctcaagggtattgcgattccaaaggtctttactccgcgcgtaaagccatcatgcagcactaccaggctcgtggcatgcgtgatgttaccgtggaagatatttacatcggcaatggtgtatcggagcttatcgttcaggcaatgcaggcattgctgaacagcggggacgaaatgttggttcctgcacctgattacccactatggaccgcagcggtttcgctctccagcggtaaagcggtgcattatctttgcgatgaatcctctgactggttcccggacctcgatgatattcgcgctaaaattacgcctcgtacgcgtgggatcgttattatcaacccaaataacccaaccggcgcggtatattccaaagagcttttaatggagattgtggagattgcacgtcagcataatctcattatcttcgccgatgaaatttatgacaaaattctctacgacgacgctgagcatcactccattgcgccgctggcacctgacctgctgaccattacctttaacggactgtcgaaaacgtaccgcgttgcaggcttccgtcaggggtggatggtgttgaacgggccgaaaaaacacgccaaaggttacatcgaaggtctggaaatgctggcttcaatgcgcctgtgtgctaacgttcctgcgcaacacgccattcagaccgcactgggtggttatcagagcatcagtgaatttattacccctggcggtcgtctttatgagcagcgtaaccgcgcgtgggaattgatcaacgatattccgggcgtttcctgcgtgaaacctcgtggtgcgctgtatatgttcccgaaaatcgacgccaaacgctttaacattcacgacgatcagaaaatggtgctggatttcctgttgcaggaaaaagtcttgttggtgcaagggacggcattcaactggccgtggccggatcacttccgcattgtcacgctaccgcgtgtcgatgatatcgagctgtctttgagcaagttcgcgcgtttcctttctggttatcatcagctgtaa

SEQ ID NO: 27843 - DNA, 939 bp, Escherichia coli
atgataagtgcaaatcgtccgataattaacctcgacctcgatctgctgagaacatttgttgctgttgccgatctgaacacttttgctgccgcagctgccgctgtgtgtcgtactcagtccgccgtaagtcagcaaatgcagcgtctggaacaactcgttgggaaagaactgttcgctcgtcacggtcgcaacaaactgttaactgaacatggcattcaacttcttggttacgccaggaaaatcctgcgttttaatgatgaggcctgctcatcattaatgttcagtaatcttcagggcgtgttaactatcggtgcttcagatgaatctgccgatacgatcttacctttcctgttaaatcgcgtgagttcggtttatccgaaactagcgctggatgtccgcgttaaacgtaatgcctacatggcagaaatgctggaatcccaggaagtggatttgatggtaaccacccatcgtccttctacctttaaggcattgaacctgcgtacctcgccaacacactggtactgcgcagcggaatacgtattgcaaaaaggtgagccgatccctcttgtgttgctggatgatccaagtccgtttcgcgatatggtgctggcgacgcttaataaagcagatattccctggcgactggcttatgtcgcctcgacgcttccggccgttcgtgcggcagtgaaagccggtcttggcgtgacggcaaggccggtcgagatgatgagtccggaactgcgtgtgctgagtggagtagatggcttaccgccgctacctgataccgaatatttgctgtgctatgacccgtccagtaataatgagctggcccaggtgatctatcaggcgatggagagctaccataatccgtggcaatacagcccaatgtctgctccggaaggagatgactcattgttgattgaaagggatatcgagtaa

SEQ ID NO: 27844 - DNA, 165 bp, Escherichia coli; identical to SEQ ID NO: 618

SEQ ID NO: 27845 - DNA, 444 bp, Escherichia coli; identical to SEQ ID NO: 617

SEQ ID NO: 27846 - DNA, 663 bp, Escherichia coli; identical to SEQ ID NO: 616

SEQ ID NO: 27847 - DNA, 1803 bp, Escherichia coli
atggtgaacaatatgaccgacttaaccgcgcaagaacccgcctggcagacccgcgatcatcttgatgatccggtgattggcgaactgcgcaaccgttttgggccggatgcctttactgttcaggcgactcgcaccggggttcccgttgtgtggatcaagcgtgaacaattactggaagtgggcgatttcttaaagaaactgccgaaaccttacgtcatgctgtttgacttacacggcatggacgaacgtctgcgcacacaccgcgaagggttacctgccgcggatttttccgttttctaccatctgatttctatcgatcgtaaccgcgacatcatgctgaaggtggcgctggcagaaaacgacctgcacgtaccgacctttaccaaattattcccgaacgctaactggtatgagcgtgaaacctgggatctatttggcattacattcgacggtcacccgaacctgcgccgcatcatgatgccgcaaacctggaaaggtcacccgctgcgtaaagattacccggcgcgcgctaccgaattctcgccgtttgagctgaccaaagccaaacaggatctggagatggaagccctgaccttcaaaccggaagagtgggggatgaagcgcggcaccgaaaatgaggacttcatgttcctcaacctcggtccgaaccacccgtctgcgcacggtgctttccgtatcgttttgcagcttgatggcgaagagattgtcgactgcgtaccagacatcggttaccaccaccgtggcgcagagaaaatgggcgaacgccagtcctggcacagctacattccgtataccgaccgtatcgaatacctcggcggctgcgttaacgaaatgccttatgtgctggcggtagagaaactggctgggatcaccgtgccggatcgcgttaacgtcattcgcgtaatgctctccgaactgttccgcatcaacagtcacctgctgtatatctccacctttattcaggacgtcggcgcgatgacgccagtgttcttcgcctttaccgatcgtcagaaaatttacgatctggtggaagcaatcactggttttcgtatgcacccggcgtggttccgtattggcggcgtagcgcacgacctgccgcgcggctgggatcgcctgctgcgtgagttcctcgactggatgccgaaacgtctggcgtcttacgagaaagcggcgctgcaaaacaccattctgaaaggtcgttcccagggcgttgccgcttacggcgcgaaagaggcgctggagtggggcaccaccggcgcgggcctgcgtgccaccgggatcgacttcgacgtgcgtaaggcgcgtccttattctggctatgaaaacttcgacttcgaaattccggtgggcggtggtgtttctgactgctacacccgcgtaatgctgaaagtagaagagttgcgccagagtctgcgtattcttgagcagtgcctcaacaacatgccggaaggcccgttcaaagcggatcacccgctgaccacgccgccgccgaaagagcgcacgctgcaacatatcgaaaccctgatcacccacttcctgcaagtgtcgtggggtccggtgatgcctgccaatgaatccttccagatggttgaggcgaccaaggggatcaacagttactacctgaccagcgacggcagcaccatgagttatcgcacccgtatccgtacgccgagttatgcgcatttgcagcaaattccggcggcgatccgcggcagcctggtgtctgacctgattgtttatctgggcagtatcgattttgttatgtcagatgtggaccgctaa

SEQ ID NO: 27848 - DNA, 501 bp, Escherichia coli; identical to SEQ ID NO: 4576

SEQ ID NO: 27849 - DNA, 1338 bp, Escherichia coli
atgaaaaacattatccgtactcccgaaacgcatccgctgacctggcgtctgcgcgatgacaaacagccagtgtggctggacgaatatcgcagcaaaaacggttacgaaggcgcgcgtaaggcgctgaccgggttgtctccggacgaaatcgttaatcaggtaaaagactctggtctgaaagggcgcggtggcgcaggcttctcgactggcctgaagtggagcctgatgccgaaagacgaatccatgaatatccgttacctactgtgtaacgccgatgaaatggagccgggcacctataaagaccgtctgctgatggagcaactgccgcacctgctggtggaaggcatgctcatctccgcgtttgcgctgaaagcttaccgtggctatatcttcctgcgcggcgaatatatcgaagcggcagtgaatctgcgtcgtgccattgccgaagccaccgaagcgggtctgcttggcaaaaacattatgggaacaggtttcgatttcgaactgttcgtccataccggggcagggcgctacatctgcggtgaagaaacagcgttaatcaactccctggaagggcgtcgcgctaacccacgctcgaaaccgcccttcccggcaacctccggtgcatggggtaaaccaacctgcgttaacaacgtcgaaaccctgtgtaacgttccggcgatcctcgctaacggcgtggagtggtatcagaacatctcgaaaagtaaagatgctggcaccaagctgatgggcttctccggtcgggtgaaaaatccgggtctgtgggaactgccgttcggcaccaccgcacgcgagatcctcgaagactacgccggtggtatgcgtgacggtctgaaattcaaagcctggcagccaggcggcgcggggactgacttcctgaccgaagcgcaccttgacctgccgatggaattcgaaagtatcggtaaagcgggaagccgtctgggtacggcgctggcgatggcggttgaccacgagatcaacatggtgtcgctggtgcgtaacctggaagagtttttcgcccgtgagtcctgcggctggtgtacgccatgccgcgacggtctgccgtggagcgtgaaaattctgcgtgcgctggagcgtggcgaaggccagccgggcgatatcgaaacacttgagcaactgtgtcgattcttaggcccgggtaaaactttctgtgcccacgcacctggtgcagtggagccgttacagagcgccatcaaatatttccgcgaagaatttgaggcgggaatcaaacagccgttcagcaatacccatttgattaatgggattcagccgaacctgctgaaagagcgctggtaa

SEQ ID NO: 27850 - DNA, 2727 bp, Escherichia coli
atggctacaattcatgtagacggcaaagaatacgaggtcaacggagcggacaacctgctggaagcttgtctgtctctgggccttgatattccttacttttgctggcatccggcgctgggaagcgtcggtgcttgccgccagtgtgcggtgaagcaataccaaaacgcggaagacacgcgtggtcgcctggtgatgtcctgtatgacaccggcttccgatggcacctttatttccattgacgacgaagaagcgaaacagttccgtgaaagtgtggtcgagtggttaatgaccaaccacccgcacgactgtccagtatgtgaagaaggcggtaactgccatcttcaggatatgaccgtgatgaccggacacagcttccgtcgctaccgtttcactaaacgtacccaccgtaatcaggatttggggccattcatctctcacgaaatgaaccgctgcatcgcctgctaccgctgtgtgcgttactacaaagattacgctgacggtacggacctgggcgtttacggtgcgcacgacaacgtctacttcggtcgcccggaagacggcacgctggaaagcgaattttccggtaacctggtcgaaatttgcccgaccggcgtattcaccgacaaaacgcactccgagcgttacaaccgtaaatgggatatgcagtttgcgccgagcatctgccagcaatgttccatcggctgtaacatcagccccggcgagcgttatggcgaactgcgtcgtatcgaaaaccgttacaacggtacggtaaaccactacttcctctgcgaccgtggtcgtttcggttacggttacgtcaacctgaaagatcgtccgcgtcagccagtacagcgtcgtggcgatgatttcattaccctcaacgccgaacaggcaatgcagggcgcagcagatattctgcgtcagtcgaagaaagtcatcggtattggttctccgcgtgccagcgtggaaagcaactttgcgctgcgtgagctggtgggcgaagaaaacttctataccggtatcgctcacggtgagcaggaacgtctgcaactggcgctgaaagtactgcgtgaaggcggcatttatacgccggcactgcgcgaaatcgaatcttacgatgcggtactggtgctgggcgaagacgttacccagaccggcgcgcgcgttgcgctggcggtgcgccaggcggtaaaaggtaaagcgcgcgaaatggcggcagcacagaaagtggctgactggcagattgcggcaatcctcaacatcggtcaacgtgcgaagcatccgctgtttgttaccaacgttgatgacacccgtctggatgatatcgcggcgtggacttaccgcgcaccggttgaagatcaggcgcgtttaggttttgccatcgctcatgcgctggataactctgcaccagcggttgacggtattgaacctgagctgcaaagcaaaatcgacgtcatcgtgcaggcactggctggtgcgaagaaaccgttgattatctccgggacgaacgctggtagcgctgaagtgattcaggctgcggctaacgtggcgaaagccctgaaaggtcgcggcgctgacgtcggtatcaccatgattgcccgttccgtcaacagcatggggctgggcattatgggcggtggatcgcttgaagaagcgttaaccgaactggaaaccggacgcgccgacgcggtggtggtgctggaaaacgatctgcatcgtcacgcttccgctacccgcgtgaatgctgcgctggctaaagcgccgctggtgatggtggttgaccatcaacgcacagcgattatggaaaacgctcatctggtgctttctgctgccagctttgctgaaagcgacggtacggtgatcaacaacgaaggccgcgcccaacgtttcttccaggtttacgatccggcttattacgacagccaaactgtcatgctggaaagctggcgctggctgcactcgctgcatagcaccctgctgagccgtgaagtggactggacgcagctcgaccacgtgattgacgctgttgtggcgaaaatcccggaactggcaggtatcaaagatgctgcgccggatgcgacattccgtattcgtgggcagaaactggcccgtgaaccgcatcgctatagtggtcgtaccgccatgcgcgccaatatcagcgttcatgagccgcgtcagccgcaggatattgacaccatgtttaccttctcgatggaaggtaacaaccagccgaccgcgcaccgttcgcaagtgccgtttgcctgggcgccaggctggaactccccgcaggcgtggaacaaattccaggacgaagtgggcggcaaactgcgttttggcgatccgggcgtgcgtctgtttgaaaccagcgaaaacagtctggattacttcaccagcgtaccggcacgcttccagccgcaggacgggaaatggcgtatcgcgccgtactaccacctgtttggcagcgatgaattgtcacagcgtgctccggtcttccagagccgtatgccgcagccgtacatcaaactcaacccagcggatgccgcgaagttgggggtgaacgcaggtacacgcgtctcctttagttacgatggcaacatggtcacgctgccggttgaaatctccgaagggctgacggcagggcaggtgggcttgccgatgggtatgtccggcattgctccggtgctggctggcgcgcatcttgaggatctcaaggaggcacaacaatga

SEQ ID NO: 27851 - DNA, 978 bp, Escherichia coli
atgagttggatatcaccggaactgattgagatcttgctgaccgtccttaaagcggtggtgatcctgctggtggtagtcacctgtggggcattcatgagctttggcgaacgtcgcctgctgggtctgttccagaaccgttatggacctaaccgtgttggctggggcggttcgctccagctggttgcggacatgatcaaaatgttctttaaagaagactggatcccgaaattctcggatcgcgtcatctttaccctggcaccgatgattgcctttacctcgctgctgctggcctttgcaattgtgccagtcagtccgggttgggtggttgccgacctgaacatcgggattttgttcttcctgatgatggcaggtctggcggtttacgcggtgctgtttgcgggctggtcaagtaacaacaaatactcgctgctgggtgcgatgcgtgcttctgcgcagaccctgagctacgaagtgttcctcgggctttccctgatgggcgtggtggcgcaggccggttcattcaacatgaccgacatcgtcaacagccaggcgcatgtgtggaacgtcatcccgcaattctttggttttattacctttgccatcgcgggcgtggcggtgtgtcaccgtcacccgtttgaccagccggaagccgagcaggaactggcggatggttaccacattgaatattccggtatgaagttcggtctgttcttcgtgggcgaatacatcgggattgtgaccatctctgcactgatggtgacgctgttcttcggtggctggcaaggcccgttgttaccgccattcatctggttcgcgctgaaaaccgcgttctttatgatgatgttcattttgattcgtgcgtcgttaccgcgtccgcgttatgaccaggtaatgtccttcggctggaaaatctgcctgccgctgacgctgatcaacttgctggtaacggcggctgtcattctctggcaggcgcaataa

SEQ ID NO: 27852 - DNA, 543 bp, Escherichia coli
atgaccttaaaagaattgttagtaggtttcggcacccaggttcgtagtatctggatgatcggcctgcacgcgttcgccaaacgcgaaacgcgaatgtacccggaagagccggtctatctgccgccccgttatcgtggtcgtatcgttctgacccgcgatccggacggcgaagagcgttgcgtagcctgtaacctctgcgcggtagcctgcccggtcggctgtatctcgctgcaaaaagcagaaaccaaagacggtcgctggtatccggaatttttccgcatcaacttctcacgctgcattttctgtggtctgtgcgaagaagcctgtccgaccacggcgattcagttaaccccggatttcgaaatgggggaatacaagcgccaggatctggtttacgagaaagaggatctgctgatctccggtccgggcaaatacccggaatataacttctaccggatggcaggtatggcaatcgacggcaaagataagggcgaagcagagaacgaagccaagcctatcgacgtcaagagcctgttaccgtaa

SEQ ID NO: 27853 - DNA, 555 bp, Escherichia coli
atggagttcgctttttatatctgtggcctgatagccatacttgcgaccttgcgagtgatcacccataccaatccggtacacgcactgctgtacctgattatttcgctgctggcgatttccggggtgttcttctcgctgggcgcttacttcgccggtgcgctggaaattatcgtctacgcgggtgccattatggtgctgttcgtgtttgtggtgatgatgctcaacctgggcggttcggaaatcgaacaggaacgccagtggctgaaaccgcaggtgtggattggtccggcaattttgtcagccatcatgctggtggtgattgtttacgccattctcggtgttaacgatcaaggtatcgacggtacgccaatcagtgctaaagcagtgggtattacgctgttcgggccttacgtactggcggtggaactggcttctatgctgctgctcgcgggtctggttgtggccttccacgtcggtcgtgaagagcgtgcgggtgaagtgctgagcaatcgtaaagacgacagcgcgaaaagaaaaacggaggagcacgcatga

SEQ ID NO: 27854 - DNA, 303 bp, Escherichia coli
atgatccccttacaacatggactgatcctcgcggcaatcttattcgttcttggcttaaccggtctggttatccgtcgcaatctgctgtttatgctgattggtctggaaatcatgattaacgcctctgcgctggcctttgtggtcgccggaagctactggggccagaccgacggtcaggtgatgtacattctcgccatcagcctcgcggcggcggaagcgagtatcggccttgcgctgctgctgcaacttcaccgtcgtcgccagaacctgaacatcgattcagtaagtgagatgcgcggatga

SEQ ID NO: 27855 - DNA, 1842 bp, Escherichia coli
atgaacatgcttgccttaaccattattttgccattgattggcttcgtcctgctggcgttctcccgtgggcgctggtctgaaaacgtctcggcgatcgtcggcgttggctctgtgggcctggcggcgctggtaactgcctttatcggcgttgacttcttcgctaacggtgagcaggcatacagccagccgctgtggacgtggatgtcggtaggcgactttaacatcggttttaacctggtgctggacggcctgtcgctgaccatgctctcggtggtcactggtgtgggtttccttattcacatgtacgcctcctggtatatgcgcggtgaagagggctactctcgcttcttcgcttacaccaacctgttcatcgccagcatggtagttctggtgcttgccgacaacctgctgctgatgtacctcggctgggaaggcgtgggcctgtgctcctatctgctgatcggtttctattacaccgatccgaagaatggcgcagcggcaatgaaagcgttcgtcgtgacccgtgtgggtgacgtcttcctcgctttcgcgctgttcattctttacaacgaactgggcaccctgaacttccgcgaaatggtggaactggcaccagcgcactttgctgacggcaataacatgctgatgtgggcgacgctgatgctgctgggcggtgcggtcggtaaatctgctcagttgccgttgcagacatggcttgccgacgcgatggcgggcccgacgcctgtctccgcgctgatccacgccgcaacaatggtaaccgcgggtgtctacctgatcgcccgtacccacggcctgttcctgatgacgccggaagttctgcatctggtgggcattgttggggcggttacgctgctgctggccggttttgcggcgctggtacagaccgacatcaaacgtgttctcgcttactctaccatgagccagattggctacatgttcctcgcgcttggcgtgcaggcatgggatgcggcgattttccacttgatgacccacgcgttctttaaagcgctgctgttcctggcatccggttccgtcattctggcctgccatcacgaacagaacatctttaagatgggtggtctgcgtaaatctattccgctggtttatctctgcttcctggtgggcggcgcagcactgtcggcactgccgctggtcactgcgggcttcttcagtaaggatgagatcctcgcgggtgcgatggcgaatggacatatcaatctgatggtggcaggtctggtcggtgcatttatgacctcgctttacaccttccgtatgattttcatcgtcttccacggaaaagaacaaattcacgctcacgccgtgaaaggggtaactcacagcctgccgctgattgtgctgctgatcctttccaccttcgttggcgcactgattgtaccgccgctgcagggcgtgcttccgcaaacgacggagctggcgcacggcagcatgttgaccctggaaattacctctggcgtggtcgcggtggtcggcattctgctggctgcctggctatggctgggtaaacgtactctggtgacctccatcgccaacagtgcgccgggccgtctgctgggtacctggtggtacaacgcctggggctttgactggctgtacgacaaagtgttcgtcaagccgttcctgggtattgcctggttgctgaaacgcgatccgctgaactcaatgatgaacatcccggctgtcctttcccgctttgcaggtaaaggtctgctgttaagcgagaacggttatctgcgctggtatgtggcatccatgagcatcggtgcggtcgtggtgctggcactgttgatggtactgcgttga

SEQ ID NO: 27856 - DNA, 1530 bp, Escherichia coli
atgttactaccctggctaatattaattccctttatcggcggcttcctgtgctggcagaccgaacgctttggcgtcaaggtgccgcgctggatcgcgctggtaaccatgggattgacgctggcgctgtcgctgcaactgtggttgcagggcggttattcactgacgcaatccgccggaattccgcagtggcagtctgaattcgacatgccgtggatcccgcgttttggtatctctattcatctcgccattgacggtctgtcgttgctgatggtcgtgctgaccggtctgctcggtgtgctggcggtactctgttcgtggaaagagatcgaaaaatatcagggcttcttccacctcaacctgatgtggatcctgggcggcgttatcggcgtgttccttgccatcgacatgttcctgttcttcttcttctgggaaatgatgctggtgccgatgtacttcctgatcgcactgtgggggcataaagcctctgacggtaaaacgcgtatcacggcggcaaccaagttcttcatttacacccaggcgagtggtctggtgatgttgatcgccatcctggcgctggttttcgttcactacaatgcgaccggcgtctggaccttcaactatgaagagctgctgaatacgccgatgtctaacggcgtggaatacctgttgatgctgggcttcttcatcgccttcgcagtgaaaatgccggtggttccgctgcatggctggttaccggatgcgcactcccaggcaccgaccgccggttccgttgacctcgcggggatcttgctgaaaaccgccgcttacggtctgttgcgtttctccttgccgctgttcccgaacgcgtcggcagagtttgcgccaatcgccatgtggctgggtgttatcggcatcttctatggtgcgtggatggccttcgcccagaccgatatcaaacgtctgatcgcctacacctcggtttcccacatgggcttcgtgctgattgctatctacaccggcagccagttggcctaccagggcgcggtaatccagatgattgcgcacggcttgtcggcggcgggtctgtttattctttgtggtcagctttatgaacgtatccatacccgcgacatgcgcatgatgggcggtctgtggagcaaaatgaaatggctgccagcactgtcgctgttctttgcggtggcaacgcttgggatgcctggcaccggtaacttcgtcggcgaatttatgattctgttcggcagcttccaggttgtcccggtgattaccgttatctctacctttgggctggtctttgcatctgtttattcgctggcgatgctgcatcgcgcttacttcggcaaagcgaaaagccagattgccagccaggaactgccagggatgtcgctgcgtgagctgtttatgatcctgttgctggtggtgctgctggtactgctgggcttctatccgcagccgattctggatacctcgcactccgcgattggcaatatccagcagtggtttgttaattccgttactactacaaggccgtaa

SEQ ID NO: 27857 - DNA, 1458 bp, Escherichia coli
atgacaataactccacaaaacctgatcgcactgctaccgttgctgatcgtcggcttgacggtggtggttgtgatgctctccattgcgtggcgacgcaatcatttcctcaacgctacgctctcggttattgggcttaacgcggcgctggtttcgctctggtttgtcggccaggcgggcgctatggacgttacgccgctgatgcgcgttgatggtttcgccatgctttacaccgggctggtattgttggcgagcctcgccacctgtactttcgcctacccgtggcttgaaggctataacgacaacaaggacgagttctacctgttggtgttaattgccgcgctgggcgggatcctgctggcgaatgccaaccatctggcgtctctgttcctcggtatcgaactgatctctttgccgctgtttggcctggtcggttacgctttccgccagaaacgttcgctggaagccagtatcaaatacaccatcctttctgccgcagcgtcttctttcctgctgttcggtatggcgctggtgtatgcgcagtctggcgacctgtcgtttgtcgcactgggtaaaaacctcggcgacggtatgctcaacgagccgctgttgctggcaggttttggcctgatgattgttggcctcggtttcaaactctctctggtgccgttccacctgtggacgccagacgtataccagggcgcgcctgcgccggtttccactttcctggcgacggcgagcaaaatcgctatcttcggcgtggtgatgcgtttgttcctttacgcaccggtgggtgacagtgaagcgattcgcgtagtgctggcgattatcgcctttgcctccatcatcttcggtaacctgatggcgctgagccagaccaatatcaaacgtctgctcggttactcatctatctctcacctcggctatctgctggtggcgctgattgcgctgcaaaccggcgagatgtcgatggaagcggtaggggtttacctggtcggttatctgttcagcagcctcggcgcgttcggcgtggtcagcctgatgtccagcccgtatcgtggcccggatgctgattccctgttctcttaccgcggtctgttctggcatcgtccgatcctcgcggcagtgatgacggtgatgatgctttcactggctggtatcccaatgacgctgggctttatcggtaagttctacgtgctggcggtcggtgtccaggcacacttgtggtggctggtgggtgccgtggttgttggttcggcaatcggcctttactactacctgcgcgtggcggtgagcttatacctgcacgctccggaacaaccgggtcgcgatgcaccatcaaactggcagtacagcgcaggcggtatcgtggtgctgatctctgcactgttggtactggtgctgggtgtatggccacaaccgctgattagcattgtgcggttagcaatgccgctgatgtaa

SEQ ID NO: 27858 - DNA, 819 bp, Escherichia coli
gtgcatccacgtagcgccgacaatattgataatctgaataggtccgcagagtatataaaagaggtctttatcagtaacggtgccagagttaccgcgcaggatgtccccattacgggtggcccctacaaaaacattgttgctaattatggtcctgccgatggaccgctgattattattggtgcgcactatgactctgtcagtagttatgaaaacgatcaattgacctatacgccgggcgcggatgataacgccagcggcgtggcaggattactcgaactggcacgtttgttacagcagcagactccagggattggcgtccaactggtcgcctatgcgtcggaagaaccgcccttctttcgtagcgatgaaatggggagcgcggtacatgcagcttcgcttgagcgtccagtgaaattaatgatagcgctggagatgattggttattacgactctacgcctggtagccaggattacccttacccggcaatgtcctggctttatcccgatcggggagactttattgccgtggtcggcagaatgcaggatatcaacgccgttcgtcaggtaaaagcggcattgttgtcatcccgggatttatctgtttattctatgaatgccccaggttttattcccggtattgatttctctgatcaccttaattattggcaacacgatattcccgccgtaatgattactgacaccgctttttatcgtaataaacaataccacttgcccggtgatatcgcagacagattaaattatcagaaaatggctcaggtagtggatggagttacaaccttgttatacaacagtaaataa

SEQ ID NO: 27859 - DNA, 1743 bp, Escherichia coli
atgcgaaataaaaatataatcatgttgcttataagtagtttgattttgtcaggatgtgggccggaacctgaggataagaaaagtcagcaacaacaatctactacacccactgaccagcaagtgcttgccgcgcaacaagcggcaacaaaagtggctgagcaaagcgccgccaaagccgctgcagacgcgaaagccttagcccagcaagaagtgcaacaatattcagacaaacaggctttgctggggcgattgcaggcggctccaaaatatcaacatgcagccagagaaaaagcagcctcccaaatcgcaaatccaggaaccgctcgctaccagcagttcgatgataatccggttaagcaggtagcgcaaaacccgttggcgacgtttagccttgacgtcgataccggcagttatgcgaatgtgcggcgtttccttaatcaagggctgttacctccgccagacgctgtgcgggtggaggagatagtcaattatttcccgtctgactgggatatcaaagacaaacaatctattccggcctctaagccaatacctttcgctatgcgctacgaattggcacctgcaccctggaatgaacagcgaacattgctgaaagttgatatcctggcgaaagatcgcaaaagtgaagagttacccgcttctaatctggtctttcttatcgacacgtctggttcaatgatttctgatgaacgtttgccacttatccagtcttcgttgaaattattggtcaaagaacttcgtgagcaggataacattgccatcgtgacctacgctggcgactctcgtattgcgttgccttctatctccggtagtcacaaggcggaaattaatgctgcaattgattcgctggatgcagaaggcagtaccaatggcggtgccgggctggagatggcttatcagcaggcagcgaaggggtttattaaaggtggtatcaatcgcattttattggccactgacggtgactttaacgttggcattgacgatccaaaatcgattgaatcaatggtcaaaaaacagcgtgagtccggtgttactctgtcgacgcttggcgtgggggatagcaattataacgaggcaatgatggtaagaattgccgatgttggtaacggcaactatagctacattgataccctctcagaggcgcagaaagtgttgaacagtgaaatgcggcagacgttgattaccgtagcaaaagatgtcaaagcgcaaattgagtttaaccccgcgtgggtaacggaataccgtcagataggttatgaaaagcgccaacttagggcagaggattttaataacgacaacgttgatgcgggtgatattggcgcaggtaaacatataacatttttatttgaattaacgctgaaagggcaaaaagcatcaattgataagttacgctatgccccggataacaaatcagcgaaatcggacaaaacaaaagaacttgcctggttaaagattcgttggaaatccccacagggaaaagaaagtcagttagttgaattcccgttggcattcgcaataaaggcaccttcagaagatatgcgttttcgcgcagcagtggctgcatatgggcaaaagttacgcggttctgaatacctgaataatacctcctggcagcagatcaaacagtgggctcagaaggcaaaaggggaagatccacagggttacagagcggaatttattcgcctgattggactggcgaaagatctggacaattcacaaaactaa

SEQ ID NO: 27860 - DNA, 918 bp, Escherichia coli
atggaattaatttttttaggtacttcagccggtgtgccaacccgtacgcgtaatgtcacggcaatattgcttaacctgcaacatccgacccagagcggactttggttatttgactgcggtgaaggcacccagcatcagctactgcataccgcctttaaccctggaaaactggacaagatttttatcagtcaccttcatggcgatcatctctttggtttacccggcttactgtgcagtcgttctatgtcaggcattatccaacccttaacgatttatggtccgcacggtatccgtgaatttgtggagaccgcgctgcggattagcggctcatggaccgattatccgctggaaattgtcgaaattggtgctggcgaaattttcgatgatggcctgcgcaaagtgaccgcttatccgatggaacacccactggaatgttatggttatcgtattgaagaacatgataaaccaggtgcattaaatgcccaggcattaaaagctgctggcgtgccgcctggcccgctgtttcaggaattaaaagcgggcaaaacaatcatgctggatgatggaaggcagattaatggcgcagattacttagccgttccagtgccgggtaaagcgctcgctattttcggcgataccggcccctgcgatgccgcgctggagctggctaaaggcgtcgacgtaatggttcacgaagcgactctggatatggcgatggaggccaaagccaacagtcgcggccatagttctacacgccaggcggcggcactagcccgtgaggctggagtcggtaagctaatcattacccacgtcagctcgcgctatgatgacaaaggttgtcagcacctgttacgtgaatgtcggtcaattttcccggcgactgaactggcgaatgatttcgcggtgtttagcatttaa

SEQ ID NO: 27861 - DNA, 462 bp, Escherichia coli; identical to SEQ ID NO: 601

SEQ ID NO: 27862 - DNA, 306 bp, Escherichia coli
atgtctaatcagtttggtgatacacgtattgatgatgacctgacgctgcttagtgaaacactggaagaggtgctccgctcctctggcgatcccgccgatcagaaatatgttgagctgaaagcgcgtgcagaaaaagcgctggatgatgtgaaaaaacgggttagccaggcttcagacagttattactatcgggcgaagcaggctgtttatcgtgctgatgactacgtccacgaaaaaccctggcaaggaattggtgtgggtgcggccgttgggctggttctaggactgttgctggcacgccgttaa

SEQ ID NO: 27863 - DNA, 1296 bp, Escherichia coli
gtgcaatcacttactacggcgctggaaaatctactgcgccatttgtcgcaagagattccggcgacacccggcattcgggttatcgatattcctttccctctcaaagacgcttttgatgccttgagctggctggccagtcagcaaacgtacccgcaattctactggcaacaacgtaatggtgatgaagaagctgccgtcctgggtgcgataacccgttttacgtcgttggaccaggcacaacggtttcttcgccagcacccggaacacgccgacttacgcatctgggggttgaatgcgtttgacccgtcgcagggcaatttacttttaccacgcctggaatggcgacgttgtggcggtaaagccacgctgcggctgacgctattcagcgaaagctcccttcagcacgatgcaatcaaggcaaaagaatttatcaccacactggtgagtatcaagcccttgcctggattacattttaccaccacgcgagaacaacactggccggacaaaacgggctggacgcaattaatcgaactggcaacgaaaaccatcgccgaaggcgagctcgacaaagttgtgcttgctcgggcaaccgacctgcatttcgcaagtccggtcaatgcggcagcgatgatggctgccagtcgtcggctcaatctgaattgctaccatttttacatggcctttgatggcgaaaatgcttttcttggttcttcaccggaacggttatggcggcggcgtgacaaagcgctgcgtaccgaagcgctggcgggaacggtagcaaatcatcctgatgataagcaggcgcagcagttaggtgagtggctgatggcggatgataaaaaccagcgcgagaacatgttggtggtggaagatatctgccaacgattgcaggccgatacccaaacgctggatgttttaccgccgcaggtactgcgtctacgtaaagtacagcatcttcgccgctgtatctggacttcactcaacaaagcggatgatgtgatctgtttacatcagttgcagccaacggcagcagttgctggcttaccgcgcgatctggcgcgacagtttatcgcccgtcacgaaccgttcactcgagaatggtacgccggttctgcgggctatctctcattacagcaaagtgaattctgcgtttccctgcgctcagcaaaaatcagcggcaatatcgtgcggctatatgctggcgcaggcattgtccgtggttccgaccccgagcaagagtggcaggaaatcgacaacaaagcggcagggctgcgtactttattacaaatggaatag

SEQ ID NO: 27864 - DNA, 1671 bp, Escherichia coli
atgtcagtaagcgcatttaaccgacgctgggcggcggtcattctggaagcattaacgcgtcacggcgtcagacacatctgtatcgcccctggctcgcgttctacaccgttaacgttagcggcggcggagaattccgcatttattcatcatacccatttcgatgagcgtggactggggcatctggcactggggctggcgaaagtcagcaagcagccggtggcggtgattgtgacctccggcacggcggtagcaaatctctatccggcactgattgaagctgggttaaccggagaaaaactgatcctgttaaccgccgatcgcccgccggagctgattgactgcggcgcgaatcaggcgattcgtcagccgggaatgttcgcctctcaccccacgcacagtatttcactgccgcgcccgacccaggatatccccgcacgttggctggtttctaccatcgaccacgctctcggtacgcttcatgctggtggagtccatatcaactgcccgtttgctgaaccgctgtatggcgaaatggacgacaccgggattagctggcaacagcggctgggcgactggtggcaggacgacaaaccgtggctgcgtgaagcgcctcgtcgggaaagtgaaaaacagcgtgactggttcttctggcgacaaaagcgcggcgtggtggttgccgggcgcatgagtgcggaagagggcaaaaaagttgcactgtgggcgcaaactcttggctggccgctgattggcgacgtgctgtcgcaaaccggacagccgctgccgtgtgccgatctctggttaggcaatgccaaagcgaccagcgaactgcaacaggcacaaatagtggtgcaactgggaagcagcctgacggggaaacgactcctccaatggcaggcaagctgtgaaccagaagagtactggattgttgatgacattgaagggcgacttgatccggcacaccatcgcggacgtcgcttaattgccaatattgccgactggctggagctgcatccggcagaaaaacgccagccctggtgcgttgaaatcccgcgcctggcggaacaggcaatgcaggcggttattgcccgtcgcgatgcgtttggcgaagcgcaactggcgcatcgcatcagcgactacttgcctgaacaggggcaattgtttgtcggtaacagcctggtggtgcgtctgattgatgcgctttcgcaacttccggcaggttacccggtgtacagcaaccgtggtgccagcggtatcgacgggctgctctcgactgccgccggcgttcagcgggcaagcggcaaaccgacgctggcgattgtgggcgatctctccgcactttacgatctcaacgcgctggcgttattgcgccaggtttccgcaccgctggtattaattgtggtgaacaacaacggcgggcaaattttttcgctgttgccaacgccgaaaagcgagcgcgagcgtttctatctgatgccgcaaaacgtccattttgagcacgccgccgcgatgttcgagctgaaatatcatcgtccgcaaaactggcaggaacttgaaacgacactagtcgatgcctggcgtacgccgaccaccacggtgattgaaatggtggttaacgacaccgatggtgcgcaaacgctccagcaacttctggcgcaggtaagccatttatga

SEQ ID NO: 27865 - DNA, 759 bp, Escherichia coli
atgatcctgcacgcgcaggcaaaacacggcaaaccaggtttaccctggttggtgtttttgcacggtttttctggcgattgccatgaatggcaagaagtgggcgaggcgtttgccgactactcgcggttgtatgttgatctcccaggtcacggtggttcagcgacgatcagcgtcgatggatttgatgatgtcaccggcttattgtgtaaaacgctggttagttacaacatccttaacttctggctggtggggtactcgcttggcggacgggtggcgatgatggcggcttgccaggagctggcggggctttgtggagttgttgtcgaaggcgggcatcctggattgcaaaatgctgaacaacgcgcggaacgtcagcgttccgatcgccaatgggcgcagcgttttcgtacagaaccgttaacggcggtatttgccgattggtatcaacagcctgtttttgcctcgctcaatgacgatcaacgccgggagctggtggcgctgcgcagcaacaataatggcgcaacccttgccgccatgctggaggcgacttctctcgccgtccagcccgatttacgtgctaaccttagcgcccgcacatttgcgttttattatttatgtggtgaacgtgacagcaaattccgcgctctggcggcggaactggctgccgactgccatgtcattcctcgcgccggacataacgcgcaccgggaaaatcccgctggcgtaatcgcaagtctggcgcagatcttgcgtttctga

SEQ ID NO: 27866 - DNA, 858 bp, Escherichia coli
atgatttatcctgatgaagcaatgctttacgcaccggttgaatggcacgactgctccgaaggttttgaggacattcgttatgaaaaatccaccgacggtatcgcaaaaatcaccattaatcgtccgcaggtgcgcaatgccttccgtcctctgacggtaaaagagatgatccaggcgctggcggatgcgcgttatgacgacaacatcggcgtgatcattctgactggtgcaggcgataaagcgttctgctccggtggtgaccagaaagtacgtggtgattacggcggctataaagatgattccggcgtacatcacctgaacgtgctggacttccagcgtcagatccgtacctgtccaaaaccggttgtcgcgatggtggctggctactccatcggtggcggtcacgtcctgcacatgatgtgcgacctgactatcgcggctgataatgccatcttcggtcagactggcccgaaagtcggttccttcgacggcggctggggcgcttcctacatggctcgcatcgttggacagaaaaaagcgcgtgaaatctggttcctgtgccgtcagtacgacgcgaaacaggcgctggatatgggtctggtgaacaccgttgtaccgctggcggatctggaaaaagaaaccgtccgttggtgccgcgaaatgttgcaaaacagcccgatggcgctgcgctgcctgaaagctgcactgaacgccgactgtgacgggcaggcggggctgcaggagctggcgggcaacgccaccatgctgttctatatgacggaagaaggtcaggaaggtcgcaacgctttcaaccagaaacgtcagcctgatttcagcaaatttaaacggaatccgtaa

SEQ ID NO: 27867 - DNA, 963 bp, Escherichia coli
atgcgtagcgcgcaggtataccgctggcagatccccatggacgcgggggtggttctgcgcgacaggcggttaaaaacccgcgacgggctgtatgtttgcctgcgtgagggcgagcgcgaagggtggggggagatctccccactgccgggcttcagtcaggaaacctgggaagaggcgcaaagtgtgctgcttgcctgggtaaataactggctggcaggcgattgcgaattaccgcagatgccttccgttgcctttggcgtaagttgtgcattggcggagctggcagatacgctcccgcaggcggccaattaccgtgcggcaccgctgtgtaatggcgatcctgacgatctgatcctcaaacttgccgatatgcctggcgagaaagtggcgaaggtcaaagtgggattgtacgaagccgtgcgcgacggcatggtggtgaatctgttgctggaggcaattcctgatctgcatttgcgtcttgacgcgaaccgcgcctggacaccgctgaaaggccagcagtttgccaaatacgttaacccggattatcgccaccgcatcgcgtttctcgaagagccgtgcaaaacccgcgatgattcgcgtgcgtttgcccgtgaaaccggcattgccattgcctgggatgaaagcttgcgcgagccggattttgcctttgtagctgaagagggcgtgcgcgcggtagttatcaaacccacgctcacgggcagcctggataaagtacgcgagcaagtgcaggcggcgcatgcgctggggctgacggcggtgatcagttcttccattgagtcgagcttaggtctaacgcaactggcgcggattgctgcctggttaacgccagacaccattccgggactggacacgctggatctgatgcaggcgcagcaggttcgtcgctggccggggagcctgctgccgttagtggacgttgatgcactggagcagctgttatga

SEQ ID NO: 27868 - DNA, 1356 bp, Escherichia coli
atgatcttctctgactggccgtggcgtcactggcggcaagtgcggggagaagccatcgccttacgtctcaatgacgagcaactcaactggcgcgagctttgtgctcgcgtcgatgaattagcctccagctttgcggtgcagggtgtggttgagggcagcggcgtgatgttgcgggcgtggaatacgccgcaaacgctgctggcctggctggcgttactgcaatgcggggcgcgggtgttgcccgtgaaccctcagctgccgcaaccgctgcttgaggaattgctgcccaatcttacgctgcaatttgcgctggtgccggaaggggaaaacacgtttccggcgttagcgtcgctgcacattcagctggttgaaggcgcacatgccgcggcgtggcagccgacgcgtctgtgctcaatgacgttaacctctggttccactggcttgccgaaagccgctgttcatacttatcaggctcatcttgccagcgccgaaggggtgttatcgctgattccttttggtgatcacgatgactggttgctctctttaccgctgtttcacgtctccggtcagggaattatgtggcgctggttatacgctggtgcgcggatgacggtgcgtgataaacagccattggagcaaatgctggcaggttgtactcacgcttcactggtgccaacacaactctggcgtttgctggttaaccgtagttccgtttccctgaaagcggttttacttggcggcgcggctatcccggtcgagttgacggaacaggcgcgcgagcaggggattcggtgcttttgcggctatggtctgaccgagtttgcctccacggtgtgtgcgaaagaagccgacggtctggcagacgttggttcgccgctgccgggtcgggaagtgaaaatcgttaatgatgaagtgtggctgcgggctgccagtatggcagaaggttactggcgtaatgggcaacgggttccactggttaatgacgaaggctggtacgccacgcgcgatcgcggtgagatgtataatggcaagttgaccattgtcggacgtttagacaatctattcttcagtggcggtgagggtattcagccggaagaagtcgagcgcgttattgctgcacatcctgcggttttgcaggtgtttatcgttcccgttgccgacaaggagtttggtcatcggccggtagcggtggtggagtatgaccagcaaagcgttgatcttgacgaatgggtgaaagataagctggctcgttttcaacaaccggtgcgctggctgactctgccgccggagctgaaaaacggcggtattaaaatttcacgtcaggcgctaaaagagtgggtgaaacgccagcaataa

SEQ ID NO: 27869 - DNA, 267 bp, Escherichia coli; identical to SEQ ID NO: 593

SEQ ID NO: 27870 - DNA, 387 bp, Escherichia coli
gtgggcctgatgtggggattattcagcgtcattatcgcctccgctgcgcaattaagcctgggttttgcggcgagtcatctgccgccaatgacgcacttatgggattttatcgcggcgctgttagcttttggcctggatgcccggatactgttgctcgggctgctgggttatctgctttccgttttttgttggtataaaacactacataaacttgcgctaagcaaagcctatgccttgctcagtatgagttatgtgctggtatggattgcttcaatggtacttcccggctgggaagggactttttcgctgaaagcactactgggagtagcctgtattatgagcgggttgatgctgattttcctgcccacaacaaaacaacgttactga

SEQ ID NO: 27871 - DNA, 336 bp, Escherichia coli
atgatctggttaacattagtctttgccagcttgcttagcgttgccgggcagttgtgtcagaaacaggcaacctgctttgcgacggtaaacaaacggcgcaaacatatcgtgctgtggctgggactggcgctggcttgtcttggccttgcaatggtgctctggctgctggtcttgcagaacgtaccggtaggcattgcctacccgatgttaagtctgaattttgtctgggtaacgctggctgcagtaaaactgtggcacgagccggtatcgctgcgtcactggtgtggggtggcgttcattattggcggcattgtgatcctcgggagtacggtgtag

SEQ ID NO: 27872 - DNA, 1653 bp, Escherichia coli
atgaaatcggtacgttaccttatcggcctcttcgcatttattgcctgctattacctgttaccgatcagcacgcgtctgctctggcaaccagatgaaacgcgttatgcggaaatcagtcgggaaatgctggcatccggcgactggattgttccccatctgttagggctacgttatttcgaaaaacccattgccggatactggattaacagcattgggcaatggctatttggcgcgaataactttggtgtgcgggcaggcgttatctttgcgaccctgttaactgccgcgctggtgacctggtttactctgcgcttatggcgcgataaacgtctggctttactcgccacagtaatttatctctcattgtttattgtctatgccatcggcacttatgccgtgctcgatccgtttattgccttctggctggtggcgggaatgtgcagcttctggctggcaatgcaggcacagacgtggaaaggcaaaagcgcaggatttttactgctgggaatcacctgcggcatgggggtgatgaccaaaggttttctcgcccttgccgtgccggtattaagcgtgctgccatgggtagcaacgcaaaaacgctggaaagatctctttatttacggctggctggcggttatcagttgcgtactgacggttctcccctggggactggcgatagcgcagcgggagcctgacttctggcattattttttctgggttgagcatattcaacgctttgcactggatgatgcccaacatagagctccgttctggtactacttgccggtcgtcattgccggtagcctgccgtggctgggattactccccggtgcactgtacgctggctggaaaaaccgcaagcattccgcaaccgtctatttgttgagctggacgataatgccgctgctgtttttctccgtcgctaaaggcaaattgcccacctatattctttcctgctttgcacctctggcaatgctgatggcgcattacgcattgctggctgcaaaaaataatcctctggcgttgcggattaatggctggattaatatcgcttttggcgtcactggcattattgccacatttgtggtctccccctggggaccaatgaacacaccggtgtggcaaaccttcgagaactataaagtcttttgtgcctggtctattttttcgctatgggcatttttcggctggtacaccttaacaaacgtcgaaaagacctggccttttgccgcgctttgcccgctggggctggcgttgctggtaggattttcaattcctgacagagtcatggaaggaaaacatccgcaattttttgtcgagatgacacaagaatcacttcagccaagccgctatattcttactgatagcgtcggtgttgccgcaggtctggcatggagcctgcaacgcgatgacatcatcatgtatcgccagacaggtgagttgaaatatggccttaattatccggatgcaaaagggagatttgtcagcggtgatgagttcgcaaactggcttaatcaacatcgtcaggaggggattattacactcgtgctttcggttgaccgcgatgaagatatcaatagtctcgccattccgcccgcagatgtcatcgatcgtcaggagcgtctggtgctaattcagtatcggcccaaatga

SEQ ID NO: 27873 - DNA, 891 bp, Escherichia coli
atgaccaaagtcggcttacgcattgatgtcgatacctttcgtggcacccgtgaaggcgtgccgcgtctgctggaaatcttgagtaagcataatattcaggccagcatttttttcagcgtcggcccggacaatatgggccgccatctctggcgactggtgaagccacagtttttgtggaagatgctgcgctcaaacgcggcatcgctttatggctgggatattttactggcaggtacggcctggccaggtaaagagattggtcatgccaatgccgatatcattcgtgaagcggctaaacatcacgaagtcggcctgcacgcctgggatcaccatgcctggcaagcccatagcggtaattgggatcggcaaacaatgatcgacgatattgcacgcggccttcgcaccctggaagagattatcggtcaaccggtaacctgttctgccgctgctggctggcgtgctgaccaacaggtgatcgaagcaaaagaagcgttccatttgcgctacaacagcgattgtcgtggggcgatgccgtttcgtccattgctcgaatcaggaacccctggcactgcgcaaattccggtgaccttacccacctgggatgaagtgattggtcgggatgtgaaagcagaagattttaacggttggttactcaaccgcatccagcgagataaaggcacgccggtttataccattcatgccgaagttgaaggctgcgcttatcagcataattttgtggatctcctgaaacgcgcagctcaggaaggcgtgacattttgccctttaagcgaactgttatcagggacgttgccgctcggacaagttgttcgcggaaatattgccggacgtgaaggctggctgggttgccaacaaattgcgggtagtcactga

SEQ ID NO: 27874 - DNA, 1983 bp, Escherichia coli
atgaaaaccgtcgtttttgcctaccacgatatgggatgcctcggtattgaagccctgctggctgccggttacgaaattagcgccatttttacccatactgataatcccggtgaaaaagccttttatggttcggttgcccgactggcagcggaaagaggcattccagtttatgcgccggataacgttaatcatccgttgtgggtggaacgcattgcccaactatcaccagaggtgattttctctttttattatcgccatcttatttgcgatgagattttgcagctcgctccgagaggtgcatttaatctgcatggttcgctgttaccaaaatatcgtggtcgcgcgccgctgaactgggtgctggtgaacggtgaaacggaaactggcgttacattgcaccgaatggtgaaacgtgccgatgccggggccattgtggcacaactgcgcgttgccattgcgccagacgatatcgccattacgctgcatcataaattgtgccatgccgcgcgccagctactggaacagacattacccgccattaaacacggtaatattctggaaatcgcccagcgcgaaaacgaagccacctgttttggtcgcagaacgccggatgacagtttcctcgaatggcataagtcggcatccgtactgcacaacatggtgcgtgccgttgccgatccgtggccgggtgccttcagctatgttggcaatcagaaattcaccgtctggtcgtcgcgtgttcatcctcatgccagcaaagcacagccggggagcgtgatttctgttgcaccactgctgattgcctgtggcgatggcgcgctggaaatcgtcactggacaggcgggcgacggcattactatgcagggctcgcaattagcgcagacgctgggcctggtgcaaggttcacgcttgaatagccagcctgcctgtgccgcccgacgccgtacccgggtactcatcctcggggtgaatggctttattggcaaccatctgacagaacgcctgctgcgcgaagatcattatgaagtttacggtctggatattggcagcgatgcgataagccgttttatgaatcatccgcattttcactttgtcgaaggcgatatcagtattcattccgaatggattgagtatcacgtcaaaaaatgtgatgtcgtgttgccgctggtggcgatagccacgccgattgaatatacccgcaacccgctgcgcgtatttgaactcgatttcgaagagaatctgcgcattatccgctactgcgtgaagtaccgtaagcgaatcatcttcccgtcgacttcagaagtttatgggatgtgtagcgataaatacttcgatgaggaccattctaatttaatcgtcggcccggtgaataaaccacgctggatttattcggtgtctaaacaattacttgatcgagtgatctgggcctatggcgaaaaagaaggtttacagttcaccctcttccgcccgtttaactggatggggccacgactggataaccttaatgcagcgcgaattggcagctcccgcgctattacgcaactcattctcaatctggtagaaggttcaccgattaagctgattgatggcggaaaacaaaaacgctgctttactgatattcgcgatggtatcgaggcgttataccgcattatcgaaaatgcgggaaatcgctgcgatggcgaaattatcaacattggcaatcctgagaacgaagcgagcattgaagaactgggtgagatgctgctggcgagcttcgaaaaacatccgctgcgccattacttcccaccgtttgcgggctttcgtgttgtcgaaagtagcagctactatggcaaaggatatcaggacgtagagcatcgtaaaccgagcatccgcaatgcccgccgctgcctggactgggaaccgaaaattgatatgcaggaaaccatcgacgaaacgctggatttcttcctgcgcaccgttgatcttacggataaaccatcatga

SEQ ID NO: 27875 - DNA, 969 bp, Escherichia coli
atgtttgaaatccaccctgttaagaaagtctcggtggttattcccgtttataacgagcaggaaagcttaccggaattaatcaggcgcaccaccgcagcctgtgaatcactggggaaagagtatgaaatcctgctgattgatgacggcagtagcgataattccgcgcatatgctggtcgaagcctcacaagcggagggcagccatattgtgtctatcttgcttaaccgcaattacgggcaacattcagcgattatggcgggattcagtcacgtcaccggcgacttaattattaccctcgatgccgatctccagaatccgccagaggaaatcccccgtctggtggcaaaagccgatgaaggttacgacgtggtagggactgtacgccagaaccgccaggacagctggtttcgtaaaaccgcttcaaagatgattaaccggcttattcagcgcaccacaggcaaagcgatgggtgactatggttgtatgctgcgcgcctatcgccgtcatattgtcgatgcgatgttgcactgccatgaacgcagcacctttatcccgattctggcgaatatcttcgcccgccgtgccattgaaattccagtgcaccatgccgagcgtgagtttggtgaatccaaatacagctttatgcgcctgattaatttgatgtacgacctggtgacctgtcttaccacaacgccgctacgtatgctgagtctgctcggcagcattattgcgattggcggttttagcattgcggtgctgctggtgattttacgcctgaccttcggaccccaatgggcggcagaaggcgtctttatgctatttgccgtgctgtttacttttattggcgctcagtttatcggcatgggattgctcggtgaatatatcggcaggatctacaccgatgtccgcgcccgcccccgctattttgttcagcaagttatccgtccatccagcaaggaaaatgaataa

SEQ ID NO: 27876 - DNA, 1158 bp, Escherichia coli
atgacggatggaaaaaaaatgtcaggatttttgcctttttcgcgaccagcaatgggcgtagaggaactcgctgcagttaaagaggttctcgaatccggttggatcacaaccggtccgaagaatcaggcgcttgaacaagctttttgccagttgacgggaaatcagcatgccatcgcggtcagttcagccaccgccggaatgcatatcacgctaatggcgttggaaattggcaagggcgatgaagtgattacgccttccctgacctgggtttcaaccctcaatatgatttccttgctgggtgcaacgccggtaatggtggatgtcgaccgcgatacgctgatggtcacgcctgaagcgatcgaagcagccattacgccacgcactaaagccatcattccggtgcattatgccggtgcgccagcagatattgacgccattcgcgccattggcgaacgttacggcatcgcagttatcgaagatgctgcccatgccgtcggtacgtattacaaagggcgacatattggcgcaaaaggtactgctattttttcgtttcacgccatcaaaaatattacctgtgcggaaggtggcctgattgttactgataatgaaaatcttgcccgccagctgcggatgctgaaatttcacggtctgggtgtcgatgcctatgacagacatacctggggccgtgcaccgcaggctgaagtcttaacgccgggctataagtacaatctgaccgatattaacgccgcgattgccctgacacagttagtcaaattagagcacctcaacacccgtcggcgcgaaattgcccagcaatatcagcaagcactggcagctctcccctttcagccattaagccttcccgcctggccgcacgttcatgcctggcatctgtttattattcgtgtcgatgaacaacgttgtggtatcagtcgcgatgcgttgatggaagcgttaaaagaaagaggcattggtaccgggttacatttccgcgccgctcacacacaaaaatattatcgcgagcgttttcccacgctgtcgttaccgaataccgaatggaatagcgaacgcatctgttcgttgccgctgttcccggatatgaccaccgccgatgccgaccgcgtcatcacagcccttcagcaactcgcaggacaatga

SEQ ID NO: 27877 - DNA, 603 bp, Escherichia coli; identical to SEQ ID NO: 585

SEQ ID NO: 27878 - DNA, 426 bp, Escherichia coli; identical to SEQ ID NO: 584

SEQ ID NO: 27879 - DNA, 543 bp, Escherichia coli
atgaaaaaaattgcgctagcaggtctggccggaatgctgttggtttctgcatcggtcaatgcaatgagcatcagcggccaggcgggtaaagaatacaccaatattggtgtcggttttgggactgaatcgacgggcctggcgttaagcggtaactggacacataacgacgacgacggtgatgccgcgggcgtggggctggggttgaatctgcctctcggaccattaatggcgaccgttggcggaaaaggcgtttacaccaacccgaacgatggtgatgaaggttatgcagcggcagttggcggtggtttgcagtggcaaattggtgacagcttccgcttgtttggtgagtattactactctccggattcgctctccagcggaattaaaagttatgaagaagcgaatgctggcgcgcgttacaccattatgcgtccagtcagcattgaggctggctaccgttacctgaacctggcaggtaaaaatggcaatcgtgataacgccattgctgatggtccgtatgttggggtaaatgccagcttctga

SEQ ID NO: 27880 - DNA, 1203 bp, Escherichia coli
atgttaaaagtggaaatgttatccaccggggatgaagtgttacacgggcaaatcgttgacactaacgctgcctggctggccgattttttctttcatcaggggctgccattatctcgccgcaatacggtgggggataatcttgatgacttagtcaccattcttcgcgaacgtagtcagcacgccgatgtgctgatcgttaacggcgggctgggaccgaccagtgatgatttaagcgcactcgccgctgcgacagcaaaaggtgaaggcctggtgctgcatgaagcctggctcaaagagatggaacgctatttccatgaacggggacgagtaatggcaccgagcaaccgtaaacaagcggagctgcctgccagtgctgaatttatcaataacccggtaggcactgcctgtggttttgccatacagcttaatcgttgcctgatgttctttacccccggcgtaccgtcagaatttaaggtgatggtcgagcacgaaatcctgccgcgcctgcgcgagcgtttttctttaccacagccgccggtttgcctgcgtttgactacctttggtcgttcggaaagcgatctggcacaaagcctggacactctacaactgccgccgggcgtaacaatgggctatcgctcctcaatgccgattatcgaactgaaactcaccggaccggcaagcgaggaacaggcgatggaaaaactgtggctggacgttaaacgtgttgccggacagagcgtgattttcgaaggcaccgaaggactgcccgcgcagatcagtcgcgaattgcagagccgccagttcagcctgacgctgagcgagcaattcaccggtggtttattggctttgcaactttctcgcgcagatgctccattgctggcgtgtgaagtggttccttcacaggaggaaaccctggcgcaaactgcgcactggattacagaacggcgggcgaaccattttgctgggttggcactggctgtttctggtctggaagatgagcatctcaactttgcactagccacgccagacggcactttcgctttgcgtgtacatttcagtgccacacgctacagtctggctattcgccaggaagtctgcgcaatgatggcgcttaatatgctacgccgttggttaaacggccaggacatcgccagcgagcatggctggattgaggttgttgagtccatgaccttatctgtctga

SEQ ID NO: 27881 - DNA, 783 bp, Escherichia coli
atgttggaatcaagcaaagttcccgccctgacacgggctattgatattctcaatttgattgcccggattggcccctgtagtgctgcgacgatcattgacacattggggatccctaaaagcacagcctatttgctgcttaatgaactcaggcgtcagcgttttcttagccttgatcaccaggaaaatttttgtttgtggaccaggctggtggagctttccggtcatgcgttaagcaagatggatctccgggaactggctcgaccgcgtttgacgcaactgatggataccaccgggctgttatgtcacctggggattattgataacggcagcgcttattacattttgaaagtggagtcatcagccactatcagcgtgcgttcccatgaaggaaaaagcctttcgctttatcgctccggaataggtaaatgcctgcttgcctggcaacctgaagctgtacagaaaagtattatcgaagagctggtctgggagcagatgacacccaccaccattacccatccacaacggctctacgaggaactggcgcgtattcgccgtcagggctggagctatgacaacggcgaagattatgccgatgtccgttgtgtcgctgcgccggtgtttaacgccaataacgagcttaccgctgcgatttcggtggtcggtacccgcttacaaatcaatgaagaataccgtgattatctggcgggcaaggctattgcctgcgccagggatatttcacgtttgttgggatggaaaagtccctttgacttacaggcctcataa

SEQ ID NO: 27882 - DNA, 1206 bp, Escherichia coli
atgaccctaccaaaaatcaaacaggttcgcgcctggtttactggcggtgcgacagcagaaaaaggcgctggcggcggtgattatcacgaccagggggcgaatcactggattgatgatcatattgccaccccgatgagtaaataccgcgattacgagcagtcacgccagtcatttggcattaacgttcttggcacgttgattgttgaagttgaagcagaaaacggccagaccggattcgctgtttcgacagccggtgaaatgggctgttttattgtcgaaaaacatcttaaccgtttcattgagggtaaatgcgtcagtgatatcaaactgatccacgatcaaatgctcaatgccaccctgtattactccggctctggtggcctggtgatgaatacgatttcctgtgtcgatctggctctgtgggatctgttcggcaaagtggtcgggcttccggtttataaacttttaggtggtgcagttcgtgatgaaattcagttctacgccacaggtgcgcgtccggatctggcaaaagagatgggctttatcggtggcaaaatgccgacgcactgggggccacatgatggtgatgcggggatccgcaaagatgccgctatggtcgcggatatgcgtgaaaaatgcggtgaggatttctggttaatgctcgactgctggatgagtcaggacgtgaactatgccatcaaactggcccacgcttgcgcgccctataacctgaaatggatcgaagagtgcctgccgccacagcagtatgaaggttatcgcgaactgaaacacaacgcaccagcggggatgatggtcaccagcggtgagcaccacggcacactgcaatctttccgtacgctttcagaaaccggtatcgacattatgcagccggatgttggctggtgcggtggcttaaccacgctggtggaaattgccgcaatcgccaaatcaagggggcaactggtggtgccacacggttcgtctgtttactcccaccatgcggtgatcaccttcaccaatacgccattcagcgaattcctgatgaccagcccggattgttcaacgatgcgtccgcaatttgatccgattctgcttaatgagccagtaccggtgaatggtcgtattcataaatcagtgcttgataaacccggtttcggcgtcgaactcaatcgtgactgcaatttgaaacgcccctacagccactaa

SEQ ID NO: 27883 - DNA, 1290 bp, Escherichia coli
atgagcaccgctttgcttgacgccgtggtgaagaaaaaccgcgcgcgtttaattccgtttatgttggcgctgtatgtgctggcgtttctcgaccgttcgaatattggttttgccaaacagacctaccagattgataccgggctgagtaatgaagcttatgcgctgggagcaggcattttctttgtggtatacgcgtttctgggggttccggcgaatcttttgatgcgcaaactgggggccagaacctggattggtacgacaacactgctgtggggatttctttcggctgccatggcatgggccgatactgaagcgaaatttctgatcgttcgcactctgcttggtgctgcggaggccggttttttccctggtatgatttatctcacttcgcaatggtttccgcagcgtaatcgcgccagcattatggggctgttctatatgggcgcaccgctggcgttaacactgggatcaccgctttccggcgcgctgctggagatgcatggatttatggggcatcccggctggttctggatgtttgtgattgaaggattgctggcagtcggcgctggggtattcacattcttttggcttgatgacacaccggagcaggcacgttttctgagtaaacaagaaaaaacgttacttatcaatcaactggcaagtgaagaacaacagaaagtgacttcgcgactgagcgatgcgttgcgtaatgggcgagtctggcaactggcgattatctacctgaccattcaggtggcggtttacggattaattttcttcctgccgacccaggttgctgcattgctggggacaaaagtgggctttacggcgtcggtggtcaccgccattccgtgggttgcggccttgtttgggacctggcttattccgcgctactccgataaaaccggcgaacggcgtaatgtcgcagcgctgacattactggcggcgggcattggtattggtctgtccgggctgctttctccagtactggcgatcgtagcactgtgtgttgcagccatcgggtttattgccgtgcaaccggtgttctggacgatgccgacacagcttctttccggtacggcgctggctgcggggattggttttataaacctgtttggtgcagtgggcgggtttattgccccgatcctgcgcgtgaaagcagaaacgttattttccagcgatgcggcgggattactgacgctggcagcggtggcggtcatcggttcgctgattattttcactctgcgtgtaaatcgcactgttgcgcagaccgacgtggcacatcattaa

SEQ ID NO: 27884 - DNA, 804 bp, Escherichia coli
atgaacgcattattaaccaatccctttaaagaacgtttacgcaagggcgaagtgcaaattggtctgtggttaagctcaacgactgcctatatggcagaaattgccgccacttccggttatgactggttgctgattgacggggagcatgcgccaaacaccattcaggatctttatcaccagctacaggcggtagcgccctatgccagccaccccgtgatccgtccggtggaaggcagtaagccgctgattaaacaagtcctggatattggcgcgcaaactctactgatcccgatggtcgatactgccgatcaggcacgtcaggtggtgtctgccacgcgctatcctccctacggtgagcgtggtgttggggccagtgtggcacgggctgcacgctggggacgcattgagaattacatggcgcaagtcaacgattcgctttgtctgttggtgcaggtggaaagtaaaacggcactggataacctggacgaaatcctcgatgttgaagggattgatggcgtgtttattggacctgcggatctttctgcgtcgttgggctacccggataacgccgggcacccggaagtgcagcgaattattgaaaccagcattcggcggatccgtgctgcgggtaaagcggctggttttctggctgtggctcctgatatggcgcagcaatgcctggcgtggggagcgaactttgtcgctgttggcgttgacacgatgctctacagcgatgccctggatcaacgactggcgatgtttaaatcaggcaaaaatgggccacgcgtaaaaggtagttattga

SEQ ID NO: 27885 - DNA, 1191 bp, Escherichia coli
atgaatgacaccagcttcgaaaactgcattaagtgcaccgtctgcaccaccgcctgcccggtgagccgggtgaatccgggttatccggggccaaaacaagccgggccggatggcgagcgtctgcgtttaaaagatggtgcactgtatgacgaggcgctgaaatattgcatcaactgcaaacgttgtgaagtcgcctgcccgtccgatgtgaagattggcgatattatccagcgcgcgcgggcgaaatatgacaccacacgcccgtcgctgcgtaattttgtgttgagtcataccgacctgatgggtagcgtttccacgccgttcgcccccatcgtcaacactgctacctcgctgaaaccggtgcggcagttgcttgatgcggcgttaaaaatcgaccaccgtcgcacgctaccgaaatactccttcggtacgttccgtcgctggtatcgcagtgtggcggctcagcaagcgcagtataaagaccaggtcgctttctttcacggctgcttcgttaactacaaccatccgcagctaggcaaagatttaattaaagtgctcaacgcgatgggtaccggtgtacaactgctcagcaaagaaaaatgctgcggcgtaccgctgatcgccaacggttttaccgataaagcacgcaaacaggcaattacgaatgtagagtcgatccgcgaagctgtgggagtaaaaggcattccggtgattgccacctcctcaacgtgtacatttgccctgcgcgacgaatacccggaagtgctgaatgtcgacaacaaaggcttgcgcgatcatatcgaactggcgacccgctggctgtggcgcaagctggacgaaggcaaaacgttaccgctgaaaccgctgccgctgaaagtggtttatcacactccgtgccatatggaaaaaatgggctggacgctctacaccctggagctgttgcgtaaaatcccggggcttgagttaacggtgctggattcccagtgctgcggtattgcgggaacttacggtttcaaaaaagagaactaccccacttcacaagccatcggcgcaccactgttccgccagatagaagagagcggcgcagatctggtggtcaccgactgcgaaacctgcaaatggcagattgagatgtccacaagtcttcgctgcgaacatccgattacgctgctggcacaggcgctggcttaa

SEQ ID NO: 27886 - DNA, 1260 bp, Escherichia coli
atgcgctttgatactgtcattatgggcggcggcctcgccggattactctgtggcctgcaactgcaaaaacacggcctgcgctgtgccattgtcactcgtggtcaaagcgcgctgcatttctcatctggatcgctggatttgctgagccatctgccggatggtcaaccggtgacagacattcacagtggactggaatctttgcgtcagcaggcacctgcccatccttacactcttctcgggccacaacgcgtgctcgatctcgcttgccaggcgcaggcattaatcgctgaaagcggtgcgcaattgcagggcagcgtagagctggctcaccagcggattacaccgcttggcactctgcgctcaacctggctaagttcgccagaagtccctgtctggccgctgcccgcgaagaaaatatgcgtggtgggaattagcggcctgatggattttcaggcgcatcttgcggcggcttcgttgcgcgaactcgaccttgccgttgaaaccgcagaaatagaactgccggaactggatgtcctgcgcaataacgccaccgagtttcgcgcggtgaatatcgcccgtttccttgataacgaagaaaactggccgctgataattgatgcgctaatccctgtcgccaatacctgtgaaatgatcctgatgcccgcctgtttcggcctggccgatgacaaactgtggcgttggctgaatgaaaaactaccttgttcactgatgcttctgccaacactaccaccttcagtgctggggatacgtctgcaaaaccagttgcagcgtcagtttgtgcgtcagggcggtgtgtggatgccgggcgatgaagtgaaaaaagtgacctgtaaaaatggcgtggtgaatgaaatctggacgcgcaatcacgccgatatcccgctgcgcccacgatttgtggtgcttgcgagcggcagtttctttagcggcggactggtggcagaacgtgacggcattcgcgagccgattctcggccttgatgtgctacaaaccgctacgcggggtgaatggtataagggcgatttttttgcgccgcagccgtggcagcagttcggtgtaaccactgatgaggcgctacgcccgtcgcaggcggggcaaaccattgagaacctgtttgccatcggttcggtgctgggcggatttgatcccatcgcccagggatgcggcggcggtgtttgtgccgtcagtgctttacatgtcgctcaacagattgcccaacgcgcaggaggccaacaatga

SEQ ID NO: 27887 - DNA, 1629 bp, Escherichia coli
atgaaaactcgcgactcgcaatcaagtgacgtgattatcattggcggtggcgcaacgggagccgggattgcccgcgactgtgccctgcgcgggctgcgcgtgattttggttgagcgccacgacatcgcaaccggtgccaccgggcgtaaccacggcctgctgcacagcggtgcgcgctatgcggtaaccgatgcggaatcggcccgcgaatgtattagtgaaaaccagatcctgaaacgcattgcacgtcactgcgtagaaccaaccaacggcctgtttatcaccctgccggaagatgacctctccttccaggccacttttatccgcgcctgcgaagaagcagggatcaacgcagaagccattgagccgcagcaagcgcgcattatcgaacctgccgttaacccggcactgattggcgcggtgaaagttccggatggcaccgttgatccatttcgtctgacagcagcaaacatgctggatgccaaagaacacggtgccgttatccttaccgctcatgaagtcacggggctgattcgtgaaggcgcgacggtgtgcggtgttcgtgtacgtaaccatctcaccggcgaaattcaggcacttcatgcgcctgtcgtagttaatgccgccgggatctgggggcaacacattgccgaatatgccgatctgcgcattcgcatgttcccggcgaaaggatcgctgctgatcatggatcaccgcattaatcagcatgtgatcaaccgctgccgcaaaccttccgacgccgatattctggtgcctggcgataccatttcgctgattggcaccacctctttacgtattgattacaacgagattgacgataatcgagtgacggcagaagaagttgatattctgctgcgtgaaggggaaaaactggcccccgtgatggcgaaaacgcgcattttgcgggcctactctggcgtacgcccgctggttgccagcgatgacgatccgagcgggcgtaacgtcagccgtggcatcgtgctgctcgaccatgctgaacgcgatggtctggacgggtttatcaccatcaccggtggcaaactgatgacctatcggctgatggcggaatgggctaccgacgccgtatgccgcaaactgggcaacacgcgcccctgtacgaccgccgatctggcacttcctggttcacaggaacccgctgaagctaccttgcgtaaagtcatctccctgcctgccccgctgcgcggttctgcggtttatcgtcatggcgatcgcacgcctgcctggctgagcgaaggccgtctgcaccgtagcctggtatgtgagtgcgaagcggtaactgcgggtgaagtgcagtacgcggtagaaaatttaaacgttaatagcctgctggatttacgccgtcgtacccgtgtggggatgggcacctgccagggcgaactctgcgcctgccgcgctgccggactgctgcaacgttttaacgtcacgacgtccgcgcaatctatcgagcaactttccaccttcctaaacgaacgctggaaaggcgtgcaacccatcgcctggggagatgcactgcgcgaaagcgaatttacccgctgggtttatcagggattgtgtggtctggagaaggagcagaaagatgcgctttga

SEQ ID NO: 27888 - DNA, 1359 bp, Escherichia coli
atgttgagtatttttaaaccagcgccacacaaagcgcgcttacctgccgcggagatcgatccgacttatcgtcgattgcgctggcaaattttcctggggatattctttggctatgctgcttactatttggttcgtaagaactttgcgctcgctatgccttatctggttgagcagggattctcacgcggtgatttaggttttgccctttcggggatctcgattgcttatggattttcgaaattcatcatgggttcggtatcggatcgctcgaatccgcgcgttttcctgcccgcaggtttgattctggcggcggcagtgatgttgtttatgggctttgtgccatgggcgacgtcgagcattgcggtgatgtttgtactgttgttcctctgcggttggttccaggggatggggtggccgccgtgtggtcgtactatggtgcactggtggtcgcagaaagaacgtggcggcattgtgtcagtgtggaactgtgcgcacaacgtcggtggtggtattccgccgctgctgttcctgctggggatggcctggttcaatgactggcacgcggcgctctatatgcccgctttctgcgccattctggtggcactgttcgcctttgcgatgatgcgcgataccccgcaatcctgtggcctgccgccgatcgaagagtacaaaaatgattatccggacgactataacgaaaaagcggaacaggagctgaccgcgaagcagatcttcatgcagtacgtgctgccgaacaaactgctgtggtacatcgccattgccaacgtgttcgtttatctgctgcgttacggcatcctcgactggtcaccgacttatctgaaagaggttaagcatttcgcgctggataaatcctcctgggcctacttcctttatgaatatgcaggtattccgggcaccctgctgtgcggctggatgtcggataaagtctttcgtggtaaccgtggggcaaccggcgtcttctttatgacactggtgaccatcgcgactatcgtttactggatgaacccggcaggtaacccaaccgtcgatatgatttgtatgattgttatcggcttcctgatctatggccctgtgatgctgatcggtctacatgcgctggaactggcaccgaaaaaagcggcaggtacggcagcgggttttaccgggctgtttggttacctcggcggttcggtggcggcgagcgcgattgttggctacaccgtggacttcttcggctgggatggcggctttatggtaatgattggcggcagcattctggcggttatcttgttgattgttgtgatgattggcgaaaaacgtcgccatgaacaattactgcaaaaacgcaacggaggctaa

SEQ ID NO: 27889 - DNA, 1077 bp, Escherichia coli
atgaaattgacgctgaaaaaccttagcatggcgatcatgatgagcactatagtcatgggaagcagtgcaatggcggcggacagcaacgaaaaaatagtcatcgcccatcgcggtgccagtggatatttgccggagcatacgctgccagcaaaagcgatggcgtatgcgcagggagcggattatctggaacaggatttggtgatgaccaaagacgaccatctggttgttctgcatgaccattatctcgatcgtgttactgatgttgccgatcgtttcccggatcgagcgcgcaaagacggtcgttactacgcgatagatttcacgctggatgaaattaagtcgctgaaatttaccgaaggtttcgatattgaaaacggtaaaaaagtgcagacttatccggggcgtttcccaatgggtaaatctgacttccgggtgcacacctttgaagaagagattgaatttgttcaggggttaaaccactctaccgggaaaaatatcggtatctatccagaaattaaagcgccgtggttccatcatcaggaagggaaggatattgcggcaaaaacgctggaagtgctgaagaaatatggttacaccggtaaggacgacaaagtttatttgcaatgttttgatgctgatgagctgaagcgtattaagaatgtgctggaacccaaaatgggtatggatctcaatctggtacagctgattgcctataccgactggaatgaaacgcagcagaaacagccggacggaagctgggttaattacaattacgactggatgtttaagccgggggctatgaaacaggtggcggaatatgctgatggtattggtccggattaccatatgttgattgaggagacatcgcagccgggtaatatcaaactcactggcatggtgcaagatgctcagcagaataaactggtagtgcatccttataccgtgcggtcagataaactgcctgaatacactactgatgtgaatcagttatatgatgctctgtataacaaagcgggtgtaaacgggctatttactgatttccctgataaggcagtaaaattccttaataaagagtaa

SEQ ID NO: 27890 - DNA, 651 bp, Escherichia coli
atggcagtttcagcaaagcacgacgaatttaatcactggtgggcaacagagggcgactgggttgaagagcctaactatcgccgtaatggtatgagcggggtgcaatgcgtcgagcgcaacggcaaaaagctgtatgtaaagcgcatgacgcatcatctgtttcattctgtacgttacccgttcggccgaccaacgattgtccgtgaggttgcggtaattaaagaactggaacgggccggtgtcatcgtgccgaagatcgtttttggtgaagcggtgaaagttgagggtgaatggcgcgcgttgctggtgactgaagatatggcggggttcatcagcattgctgactggtatgcccggcatgcagtatcgccttattctgacgaagtacggcaagccatgttgaaagcagtggcgctggcgtttaagaaaatgcatagcgttaatcgtcagcatggctgttgttatgttcgccatatctatgtgaaaacagaaggtaaggcagaagctggatttcttgacctggagaaaagtcgtcgccgcttgcgtcgtgataaagcgattaatcatgacttccgccagctggaaaaatatctggagccgatccccaaagcggactgggagcaggtgaaagcatattactacgctatgtaa

SEQ ID NO: 27891 - DNA, 255 bp, Escherichia coli; identical to SEQ ID NO: 569

SEQ ID NO: 27892 - DNA, 1131 bp, Escherichia coli
atggcatataccaccttttcacagacgaaaaatgatcagctcaaagaaccaatgttctttggtcagccggtcaacgtggctcgctacgatcagcaaaaatatgacatcttcgaaaagctgatcgaaaagcagctctctttcttctggcgtccggaagaagttgacgtctcccgcgaccgtatcgattaccaggcactgcctgaacacgaaaaacacatctttatcagcaacctgaaatatcagacgctgctggattccattcagggtcgcagtccgaacgtggcactgctgccgctgatctcgatcccggaactggaaacctgggtagaaacctgggcgttctcagaaacgattcattcccgctcctatacccatatcatccgtaatatcgttaacgatccgtcagttgtctttgacgatatcgtcaccaacgagcagatccagaaacgtgcggaagggatctccagctattacgatgaactgatcgaaatgaccagctactggcatctgctgggcgaaggcacccacaccgttaacggtaaaaccgtaaccgttagcctgcgcgagctgaagaaaaaactgtatctctgcctgatgagcgttaacgcgctggaagcgatccgtttctacgtcagctttgcctgctctttcgcattcgctgaacgtgagctgatggaaggtaacgccaaaattattcgcctgattgcccgcgacgaagccctgcacctgaccggcacccagcatatgctgaatctgctgcgcagcggcgcggatgatccggagatggcggaaattgccgaagaatgtaagcaggagtgctatgacctgtttgtccaggcggcacagcaagagaaagactgggcggattatctgttccgtgatggttcgatgattggtctgaataaagacatcctctgccagtacgttgaatacatcaccaatatccgtatgcaggcagtcggtttggatctgccgttccagacgcgctccaacccgatcccgtggatcaacacctggctggtgtctgataacgtgcaggttgctccgcaggaagtggaagtcagttcttatctggtcgggcagattgacgcggaagtggacaccgacgatttgagtaacttccagctctga

SEQ ID NO: 27893 - DNA, 2286 bp, Escherichia coli
atgaatcagaatctgctggtgacaaagcgcgacggtagcacagagcgcatcaatctcgacaaaatccatcgcgttctggattgggcggcagaaggactgcataacgtttcgatttcccaggtcgagctgcgctcccacattcagttttatgacggtatcaagacctctgacatccacgaaaccattatcaaggctgccgcagacctgatctcccgtgatgcgccggattatcagtatctcgccgcacgtctggcgatcttccacctgcgtaaaaaagcctacggtcagtttgagccgcctgcgctgtacgaccatgtggtgaaaatggtcgagatgggcaaatacgataatcatctgctggaagactacacggaagaagagttcaagcagatggacacgtttatcgatcacgaccgtgatatgaccttctcttatgctgccgttaagcagctggaaggcaaatatctggtacagaaccgcgtgaccggcgaaatctacgaaagcgcccagttcctttatattctggttgccgcgtgcctgttctcgaactacccgcgtgaaacgcgcctgcaatacgtgaagcgtttttacgacgcggtttccacatttaaaatttcgctgccgacgccaatcatgtccggcgtgcgtaccccgactcgtcagttcagctcctgcgtgctgattgagtgcggcgacagcctggattccatcaacgccacctccagcgcgattgttaaatacgtttcccagcgtgccgggatcggcattaacgccgggcgtattcgtgcgctgggtagcccgattcgcggtggcgaagcgttccataccggttgtattccgttctacaaacatttccagacagcggtgaaatcctgctctcagggcggtgtgcgcggcggtgcggcaacgctgttctacccgatgtggcatctggaagtggaaagcctgctggtgttgaaaaacaaccgtggtgtggaaggcaaccgcgtgcgtcatatggactacggggttcaaatcaacaaactgatgtatacccgtctgctgaaaggtgaagatatcactctgttcagcccgtccgacgtaccggggctgtatgacgcgttcttcgccgatcaggaagagtttgaacgcctgtataccaaatatgagaaagacgacagcatccgcaagcaacgtgtgaaagccgttgagctgttctcgctgatgatgcaggaacgtgcgtctaccggtcgtatctatattcagaacgttgaccactgcaatacccatagcccgtttgatccggccatcgcgccagtgcgccagtctaacctgtgcctggaaatcgccctgccgaccaaaccgctgaacgacgtcaacgacgagaacggtgaaatcgcgctgtgtacgctgtctgctttcaacctgggcgcaattaacagcctggatgaactggaagagctggcaattctggcagtacgcgcactcgacgcgctgctggattatcaggattacccgatcccagccgccaaacgtggagcgatgggtcgtcgtacgctgggtattggtgtgatcaacttcgcttactacctggcgaagcacggtaaacgctactccgacggcagcgccaacaacctgacgcataaaaccttcgaagccattcagtattacctgctgaaagcgtctaatgagctggcgaaagagcaaggcgcgtgcccgtggtttaacgaaaccacttacgcgaaagggatcctgccgatcgatacctataagaaagatctggatgccatcgctaatgagccgctgcattacgactgggaagcactgcgtgagtcaatcaaaacgcacggcctgcgtaactccacgctttctgccctgatgccgtccgagacttcttcgcagatctctaacgccactaacggtattgaaccgccgcgcggttacgtcagcatcaaagcgtcgaaagacggtattctgcgccaggtggtgccggactacgagcatctgcacgacgcctatgagctgctgtgggaaatgccgggtaacgatggctacctgcaactggtgggtatcatgcagaaatttatcgatcagtcgatctctgctaacaccaactacgatccgtcacgtttcccgtcaggaaaagtgccgatgcagcagttgctgaaagacctgctcactgcctacaaattcggggtcaaaacgctgtattatcagaacacccgtgacggcgcagaagacgcgcaggacgatctggtgccgtcaatccaggacgatggctgcgaaagcggcgcatgtaagatctga

SEQ ID NO: 27894 - DNA, 3765 bp, Escherichia coli
atgaatatgcggattatctctctacgcaaggagtatttatctttactcccgtcaatgattgcatctcttttctctgctaacggtgccgcagcggtcattgattcatgccagggatatgatatcaaagcgaactgtcaggccagcaggcaaagcctttcaggcaatatgcaggactggagcatcgcggatgggcaatggttgattttttcgggtatggccaataatgccagcggtggcgcagtatttttgcagcacagtgctgaatttacgatatcaccacaaaatgaaacagggatgaccctgtttgctgataactcggttagtggcgaatataataatggtggggctatctttgctaaagaaaactcaacgataaatcttgcgaatgttattttcgacagtaatgttgcaggaggctatggcggggcaatctattctgccggtaccaatgataccggtgccgccgatttacgtgtcactaacgccgtatttcacaataacatcgctaatgacggcaaaggcggtgcaatttataccatcaataatgacgtctatttaagtgatgatgcttttaataataaccaggcatatacatcaacaagttatagtgatggggatggcggcgccattgatgttacggataatagtacggataacacacatctttcaggaaaaacgataattaataatacctcctttaccaataactatgcagaaggttatggcggcgcaatttataccagcagcaccacatccccgtatcttattgatatttctgttgatgataattatgaccaaaacaatggtgtgatgattgatgaaaataacagcgcctcgggatatgaccattcggcgacggcagcggcggggggctttatgtatatcggtcatagtgtggctgaatttaacattgccgccgataaaacgctggtaataggcaataccagcaacgatggcgcgattgattctcttgccggaacgggagtcatcgtgaaagagggagcgggagagttagtcctcaatgccgacaataatgcgtttaccggcgagatgagtatccagaatggcgaggtgacgttggggcgcagcgatgagttaatgaatgtcggcgacacgcactgtcagagcgatccgcaggattgctttggtttgatggtcggcagcactgttcattctgagtatcaggcagaactgaatgttggcaatacacaacaaacgtttgtgcactcattaaccggttttgctaatggcattttgaatatcgacgcaggcggcaatgttacagtaaaccagggcggtttttccggctcgattcagggtgaaggacagttgacggtagcgcaagatggcagctatctcctgacaggggcgcagtcgatggcattaaccggcgatattgtggtggaagataacgccgtattgtcgctggcggggaatcaggccgatttacgggcaatgcagagcgatccgcaatcgatcgtgctaaatggcggagtattggatctctctgatttcaccacctgggatggcgatagctcatacaatgacggtctgcaaatcagcggcagcggggggacagtgattggcagtaatgatgtcgttgatatcagcagtggcgatgatttacatattggcggcagcgatgccagccagaatggcgtttatgtcgtcattaatgcgggggatcagcgcgtaacgctggcgaataacaacggttatctcggtaatacgcaaatcgcctccggtacgcttgaagtcagcgataattcgcaattgggggacacaagttacaaccgttcagtgatcttcacagatccccaacaacacagtgaaatggatgtgacgactgatgttgacactcgctcggctacaacaggtcagggcaggaatattgaaatgcgcgctgatggcgaaatacacgttgaggatggcgtagatacgcaatggggcgggttgatggcggatagtaccgggcaacaactggatagcgtaagcacgttgactaaaagtggcggcggtacgctggagttgactgccagcggcactgcgacgtctgcggtacgtgtggaggacggaacgctaaaaggtgaagcggagaatattattccttatgtttcttcactgtgggtgggggaagacggtgtttttgaaaccgggcaaaatcaggatattcgttcaatcgatgccacctctggcggcgatatcgacataaccgatggtactgtgttgcgattgacgcagcaggatacgaaccaggcgctggatgcctcgctgtttagcggcgacggtacgctggtgaatgccaccgatggcgtgacgctggcaggtgagcttaataccaaccttgaaactgacagcctgacttatctttccgacgtgacggttaatggcaatctgaccaatacgtccggtgcgattagcctgcaaaatggcgtcgctggcgacacgctgacggtaaatggtgattataccggcggcggtacgctactgctcgatagcgaattaaacggcgatgactcagcaagtgaccaactggtattgaacggtaatactgctggcaacacggccgtggtaattaaccccattacgggtattggtgagccgacatctacaggtattaaagtagttgatttcgcagctgatcccgcgcagtttcaaaacaatgcgcagttcagtctgacaggaagcggctacgtcaatatgggggcgtatgactacacgctggtggaagataacaacgactggtatctgcgatcacaagaagtcaatccgacgccgccgcctgatccggacccgactccagatcctgatcccacgccggatcccgacccaacccccgacccggaacctacacctgcctaccagccggtgttgaatgccaaagttggtggatattttaataacctgcgggcggcaaatcaggcatttgtgatggagcgacgcgatcacgctggtggcgatggtcagacgctgaatttacgcgttatcggcgggcgttatcattacacggcggtagggcagttggctcagcatgaagacacttctacggtgcagcttagcggcaacctgtttagcgggcactggggtgatgatggcgagtggatgcttgggattgttggtggctacagcgataaccagggcgacagccgctcgaatatgaccggaactcgcgccgataaccagaaccacggttatgccgttgggctgacctcaagctggtatcagcacggtaatcagaagcagggggcctggttggatagctggctgcaatatgcgtggtttaacaatgatatttccgaacaagacgatggcgtggatcattaccactcgtcggggattatcgcctcgctggaagccgggtatcaatggttaccggggcgtggtgtggtgattgaaccgcaggcgcaggtgatttatcagggcgtgcagcaggatgattttaccgccgctaaccatgcgcgcgtgtcacaatcgcagggtgatgatattcagacgcggctgggtttacacagcgaatggcgtactgctgttagtgtcacgccaacgttagatctgaattattatcacgatccccatgcgacggaaattgaagaagatggcagcactatcagtgacgatgcggcgaagcaacggggtgaaataaaagtgggaataacgggcaatatcagtcagcgagtttcgctgcgcggcagcgtggcgtggcagaaagggagtgatgattttgcccagacggcagggtttttgtcgatgacagtgaaatggtaa

SEQ ID NO: 27895 - DNA, 723 bp, Escherichia coli
atgaatgccgaaaaatcgccggtaaaccacaacgtagaccacgaagagatcgctaaatttgaagccgtcgcctcccactggtgggatcttgaaggtgagttcaaaccgctgcaccgcattaacccgctgcgtctgggctatattgccgagcgtgctggcggtttatttggcaaaaaggtgctcgatgtcggttgtggcggcggcattctggccgagagtatggcgcgggagggcgcgacggtgaccggtctggatatgggctttgagccattgcaggtggcaaaactgcacgcactggaaagcggcattcaggtggattacgtgcaggaaaccgtggaagagcacgcggcaaaacatgccggacagtatgacgtggtgacctgtatggagatgctggagcacgtccccgatcctcagtcagtggtcagagcctgtgcgcaactggtgaaaccgggcggcgatgtctttttctcgacgcttaaccgcaacggcaagtcatggctgatggcggtggttggtgcggaatatattttgcgcatggtgcctaaaggtacacatgatgtgaagaagtttattaaaccggcagaattgctgggctgggtggttcagaccagtcttaaagaacggcatatgaccgggctgcattacaaccctatcactaacacctttaagctcggccccggcgtggatgtgaactatatgctgcatacgcagaataagtga

SEQ ID NO: 27896 - DNA, 2628 bp, Escherichia coli
atgagcgaccttgcgagagaaattacaccggtcaacattgaggaagagctgaagagctcctatctggattatgcgatgtcggtcattgttggccgtgcgctgccagatgtccgagatggcctgaagccggtacaccgtcgcgtactttacgccatgaacgtactaggcaatgactggaacaaagcctataaaaaatctgcccgtgtcgttggtgacgtaatcggtaaataccatccccatggtgactcggcggtttatgacacgatcgtccgtatggcgcagccattctcgctgcgttacatgctggtagacggtcagggtaacttcggttccatcgacggcgactctgcggcggcaatgcgttatacggaaatccgtctggcgaaaattgcccatgaactgatggccgatctcgaaaaagagacggtcgatttcgttgataactatgacggtacggaaaaaattccggacgtcatgccaaccaaaattcctaacctgctggtgaacggttcttccggtatcgccgtaggtatggcaaccaacatcccgccgcacaacctgacggaagtcatcaacggttgtctggcgtatatcgatgatgaagacatcagcattgaagggctgatggaacacatcccggggccagacttcccgacggcggcaatcattaacggtcgtcgcggtattgaagaagcttaccgtaccggtcgcggcaaggtatatatccgcgcccgtgccgaagtagaagttgacgccaaaaccggacgtgaaaccattatcgtccacgaaattccttatcaggtgaacaaagcgcgcctgatcgagaagattgcggaactggtaaaagaaaaacgcgtggaaggcatcagcgcgctgcgtgacgagtctgacaaagacggtatgcgcatcgtgattgaagtgaaacgcgatgcggtcggtgaagttgtgctcaacaacctctactcccagacccagttgcaggtttctttcggtatcaacatggtggcattgcaccatggtcagccgaagatcatgaacctgaaagacatcatcgcggcgtttgttcgtcaccgccgtgaagtagtgacccgtcgtactattttcgaactgcgtaaagctcgcgatcgtgctcatatccttgaagcattagccgtggcgctggcgaacatcgacccgatcatcgaactgatccgtcatgcgccgacgcctgcagaagcgaaaaccgcgctggttgcaaatccgtggcagctgggcaacgttgctgcgatgctggaacgtgcgggcgacgatgctgcgcgtccggaatggctggagccagagttcggcgtgcgtgatggtctgtactacctgaccgaacagcaagctcaggcgattctggatctgcgtctgcagaaactgaccggccttgagcacgaaaaactgctcgacgaatacaaagagctgctggatcagattgcggaactgttgcgtattcttggtagcgccgatcgtctgatggaagtgatccgtgaagagctggagttggttcgtgaacagttcggtgacaaacgtcgtaccgaaatcaccgctaacagcgccgacatcaacctggaagatctgatcacccaggaagatgtggtggtcacgctttctcaccagggttacgtgaagtatcagccgctttctgaatacgaagcgcagcgtcgtggcgggaaaggtaaatctgccgcacgtattaaagaagaagactttatcgaccgactgctggtggcgaacactcacgaccatattctgtgcttctccagccgtggccgcgtctattcgatgaaggtctaccagttgccggaagccactcgtggcgcgcgcggtcgtccgatcgtcaacctgctgccgctggaacaggacgaacgtatcaccgcgatcctgccggtgaccgagtttgaagaaggcgtgaaagtcttcatggcgaccgctaacggtactgtgaagaaaaccgtcctcaccgagttcaaccgtctgcgtaccgccggtaaagtggcgatcaaactggttgaaggcgatgagctgatcggcgttgacctgaccagcggcgaagacgaagtaatgctgttctccgctgaaggtaaagtggtgcgctttaaagagtcttctgtccgtgcgatgggctgcaacaccaccggtgttcgtggtattcgtttaggcgaaggcgataaagtcgtctctctgatcgtgcctcgtggcgatggcgcaatcctcaccgcaacgcagaacggttatggtaaacgtaccgcagtggcggaatacccaaccaagtcgcgtgcgacgaaaggggttatctccatcaaggttaccgaacgtaacggtttagtggttggcgcggtgcaggtagatgactgcgaccagatcatgatgatcaccgatgccggtacgctggtacgtactcgcgtttcggaaatcagcatcgtaggccgtaacacccagggcgtaatccttatccgtacttcggaagatgaaaacgtggtgggtctgcaacgtgttgctgaaccggttgacgaggaagatctggataccatcgacggcagtgccgcggaaggggacgatgaaatcgctccggaagtggacgttgacgacgagccagaagaagaataa

SEQ ID NO: 27897 - DNA, 1689 bp, Escherichia coli
atgagtggtgaaaaaaaggcgaaaggctggcggttttatggccttgttggttttggggcaatagcgctgctatccgctggcgtatgggcgttgcaatatgctggcagtgggccaaaaaaaacgttgtcgccactggtggtgcacaacaatctgcaaatcgatctcaatgagccggacctctttctcgacagcgactctctgagccagcttcccaaagatctccttaccattccgtttctccacgatgttctgagcgaagatttcgttttctattatcagaatcatgccgatcgtctgggcattgaaggcagcattcgccgcattgtctatgaacacgatctcacgctgaaagataagctcttttcgtcactcttagaccagcccgcgcaggcggcactgtggcatgataaacaaggtcatctttcacattatatggtgcttatccagcgcagtggtttaagcaaactgctggagccattgttgtttgccgctaccagcgacagccagttaagcaagacggaaatcagtagcatcaagataaatagtgaaactattcctgtttatcagttgcgctataacggcaataacgtcctgatgtttgcgacttatcaggacaaaatattggcgttttccagttcggatatgctgtttaaagatgaccaacaggataccgaagctacggcgatcgcaagtgatttgttgagtggtaaaaaacgctgggaaacccgctttggcctggaagcgcgtactgccgaaaaaacgccagtacgccagcgcatcgtagtcagcgccaggttgctggggtttggctaccagcgattaatgccttcttttgctggcgtgcgcttcgaaatgggtaacgacggctggcatagctttgtggcgttaaatgatgaatccgccagcgtagatgccagtttcgattttacgccggtatggaacagtatgcctgccggagccagcttctgtgtggcggtgccgtattcacacggtattgccgaagagatgctttcgcacatcagccaggaaaacgacaagctgaatggggcgttagacggtggcgccgggcggtgctggtatgaagactcaaaattacaaaccccgctatttgttggtcagtttgatggcactgccgaacaggcgcaattgccagggaaactgtttacgcaaaatattggtgcgcacgaaagcaaagcgccagaaggtgttttgccggtaagccagactcagcagggcgaagcgcaaatctggcgtcgcgaagtgagttcccgatacggtcagtatccgaaagcgcaggcggcgcaacccgatcaattaatgtcggattattttttccgcgtgtcgctggcgatgcaaaacaaaacgctgcttttctccctcgatgacacgctggttaataacgccctgcaagcactgaataaaacccgcccggcaatggtggatgtaatacccactgatggcatcgttccgctctatatcaatccacaaggaatggcgaaactgctgcgtaacgaaacgctgaccagtctgccgaagaatctcgaaccggttttttataacgccgcacaaactttattaatgccgaagctggacgctttatctcaacaaccgcgttatgtcatgaagctggcccagatggaacccggtgccgcctggcagtggctacccataacctggcaaccgctatga

SEQ ID NO: 27898 - DNA, 624 bp, Escherichia coli; identical to SEQ ID NO: 562

SEQ ID NO: 27899 - DNA, 1650 bp, Escherichia coli
gtgaactggcgcagaatcgtctggctattggcgttggttactctgccaacgcttgcggaggagacgccgttacaactggcgctgcggggcgcgcaacacgatcaactgtatcagctgtcgtcatcaggcgtgaccaaagtctcggcattacctgacacgctcaccacgccattagggagtttgtggaaactgtatgtttacgcctggctggaggatacccatcaaccggagcagccctaccagtgtcgcggaaactccccggaagaggtttattgttgtcaggctggggagagcataacgcgcgataccgcgctggtacgctcctgtggactctattttgcgtcgcagcggttgcatattggcgcagatgtgtgggggcaatactggcaacagcgtcaggcacctgcgtggttagcgtctcttactacgctgaagccagaaacctcggtaacggttaaatcgctgcttgattctttagcgacgttacccgcgcaaaacaaagctcaggaagtcttactggatgtggtgctggacgaggcgaaaatcgatgtcgcatccatgctcggtagtcgggtacgggtgaaaacctggagctggtttgccgatgataagcaggaaatccgtcagggtggttttgctggctggttaaccgatggtacaccgctgtgggctactggcagtggcaccagcaaaacggtactaacccgttatgcgacggtgcttaatcgggttttgccagtgccgacgcaagttgccagtgggcaatgtgtgctggtggatctgtttgctcgttatccgctgaagaaagttactgaggaaaagagtacgacggcattcaaaccaggcgtgctcaatgggcgctatcgtgtgacgtttgccaatggtaaccacatgacatttgtcagccacggtgagacaacgttactgacggtaaagggcaaactgaaattgcagtcgcatctcgatcgtgaagagtacgttgccagagttctggatcgcgaggcgaaaagtacgccccctgaggcagcgaaagctatgaccgtggcgattcgcactttcttacagcaaaacgccaatcgggaaggcgattgcctgaccatccctgacagcagcgccacacagcgtgtttcggcttcgccagctaccacgggggcgcgaacgatgaccgcctggacgcaggatctcatctatgcgggcgatccggttcattatcatggcagccgggttaccgaagggacgctttcctggcggcacgctactgcccaggcggggcagggagagcgttatgatcagatacttgcgtttgcttatcccgacaacaaccttagccgctggggagcgccacgctcaacctgccagttattacccaaagcgaaagcctggctggcgaaaaaaatgccgcagtggcggcgtatattacaaggtgagacgggatacaacgaaccagacgtgtttgcggtctgtcgtttagtctcaggtttcccctataccgatcggcagcagaaacggctgtttattcgtaacttctttacgcttcaggatcggctggatttaacccatgagtatctgcacctggcctttgatggttatcccaccgggcttgatgagaactatatcgaaacgctgacccgacaattattaatggactaa

SEQ ID NO: 27900 - DNA, 777 bp, Escherichia coli
atgcgaaagatttttcttccgttgttactggtggcgctttcgcctgtcgctcacagtgaaggtgtgcaggaagtcgagattgatgcaccgctctctggctggcatccggcagagggtgaagatgccagtttttcacaaacgatcaattacccggcgtcgtccgtcaacatggcagatgatcaaaatatctcagcgcagatccgcggcaaaataaagaattatgctgcggcgggtaaagttcagcagggccggctggtggtcaacggtgccagtatgccgcagagaattgaatcagatggttcttttgcacgcccttatattttcactgaaggcagcaacagcgtgcaggtcatcagcccagatgggcaaagccgacaaaaaatgcagttttactcaacgccgggtgctggggcgattcgcgcacgtttacggctggttctctcgtgggatacggacaataccgacctcgatcttcatgtcgttacgcctgacggtgaatatgcctggtacggtaacaccgtgctgaaaaacagtggtgcactggatatggatgtcacgacagggtacggccccgagattttcgccatgccagcgccagttcacggccgttatcaggtgtatatcaactactatggcggacgcagcgaaacggaattaactacggcccaactgacgctgatcaccgatgaagggtcggtcaatgagaaacaggaaacttttattgtaccgatgcgtaatgctggcgaactgacgctggtgaaaagttttgactggtga

SEQ ID NO: 27901 - DNA, 1185 bp, Escherichia coli
atgaaaaattgtgtcatcgtcagtgcggtacgtactgctatcggtagttttaacggttcactcgcttccaccagcaccatcgacctgggggcgacagtaattaaagccgccattgaacgtgcaaaaatcgattcactacacgttgatgaagtgattatgggtaacgtgctacaagccgggctggggcaaaatccggcgcgtcaggcactgttaaaaagcggactggccgaaacagtgtgcggattcacggtcaataaagtgtgtggttcgggtcttaaaagtgtggcgcttgccgcccaggcaattcaggcaggtcaggcgcagagcattgtggcggggggtatggaaaatatgagtttagcgccctacttactcgatgcaaaagcacgctctggttatcgtcttggagacggacaggtttatgacgtaatcctgcgcgatggtctgatgtgcgccacccatggttatcatatggggattaccgccgaaaacgtggctaaagagtacggaattacccgtgaaatgcaggatgaactggcgctacattcacagcgtaaagcggcagccgcaattgagtccggtgcttttacagccgaaatcgtcccggtaaatgttgtcactcggaagaaaaccttcgtcttcagtcaagacgaattcccgaaagcggattctacggctgaagcgttaggcgcattgcgcccggccttcgataaagcaggaacagtcaccgccgggaacgcgtctggcattaacgacggtgctgccgctctggtgattatggaagaatcttcggcgctggcagcaggccttacccccctggctcgcattaaaagttatgccagcggtggcgtgccccccgcattgatgggtatggggccagtacctgccacgcaaaaagcgttacaactggcggggctgcaactggcggatattgatctcattgaggctaatgaagcatttgctgcacagttccttgccgttgggaaaaccctgggctttgagcctgagaaagtgaatgtcaacggcggggccatcgcgctggggcatcctatcggtgccagtggtgctcgtattctggtcacactattacatgcaatgcaggcacgcgataaaacgctggggctggcaacactgtgcattggtggcggccagggaattgcgatggtgattgaacgattgaattaa

SEQ ID NO: 27902 - DNA, 1323 bp, Escherichia coli
atgattggtcgcatatcgcgttttatgacgcgttttgtcagccggtggcttcccgatccactgatctttgccatgttgctgacattgctaacattcgtgatcgcgctttggttaacaccacaaacgccgatcagcatggtgaaaatgtggggtgacggtttctggaacttgctggcgtttggtatgcagatggcgcttatcatcgttaccggtcatgcccttgccagctccgcgccggtgaaaagtttgctgcgtactgccgcctccgccgcaaagacgcccgtacagggcgtcatgctggttactttcttcggttcagttgcttgtgtcatcaactggggatttggtttggttgtcggtgcaatgttcgcccgtgaagtcgcccggcgagtacccggttctgattatccgttgctcattgcctgcgcctacattggttttctcacctggggtggcggtttctctggctcaatgcctctgttggctgcaacaccgggcaacccggttgagcatatcgccgggctgatcccggtgggcgatactctgttcagtggttttaatattttcatcactgtggcgttgattgtggtgatgccatttatcacccgcatgatgatgccaaaaccgtctgacgtggtgagtatcgatccgaaactactcatggaagaggctgattttcaaaagcaactaccgaaagatgctccaccgtccgagcgactggaagaaagccgtattctgacgttgatcatcggcgcactcggtatcgcttacctggcgatgtacttcagcgaacatggcttcaacatcaccatcaataccgtcaacctgatgtttatgattgcgggtctgctgctacataaaacgccaatggcttatatgcgtgctatcagcgcggcagcacgcagtaccgccggtattctggtgcaattccccttctacgcggggatccaactgatgatggagcactccggtctgggcggactcattaccgaattcttcatcaatgttgcgaacaaagacaccttcccggtcatgaccttttttagttctgcactgattaacttcgccgttccgtctggcggcgggcactgggttattcaggggccgttcgtgatgcccgcagcccaggcgctgggcgctgatctcggtaaatcggtaatggcgatcgcctacggcgagcaatggatgaacatggcacaaccgttctgggcgctgccagcactggcaatcgccggactcggtgtccgcgacatcatgggctattgcatcactgccctgctcttctccggcgtcattttcgtcattggtttaacgctgttctga

SEQ ID NO: 27903 - DNA, 651 bp, Escherichia coli
atggatgcgaaacaacgtattgcgcgccgtgtggcgcaagagcttcgtgatggtgacatcgttaacttaggaatcggtttacccacaatggtcgccaattatttaccggagggtattcatatcactctgcaatcggaaaacggcttcctcggtttaggcccggtcacaacagcgcatcccgatctggtgaacgctggcggacaaccgtgcggcattttacccggtgcagccatgtttgatagcgccatgtcatttgcgctaatccgtggcggtcatattgatgcctgcgtgctcggcggtttgcaagtagacgaagaagcaaacctcgcgaactgggtagtgcctgggaaaatggtgcccggtatgggtggcgcgatggatctggtgaccgggtcgcgcaaagtgatcatcgccatggaacattgcgccaaagatggttcagcaaaaattttgcgccgctgcaccatgccactcactgcgcaacatgcggtgcatatgctggttactgaactggctgtctttcgttttattgacggcaaaatgtggctcaccgaaattgccgacgggtgtgatttagccaccgtgcgtgccaaaacagaagctcggtttgaagtcgctgccgatctgaatacgcaacggggtgatttatga

SEQ ID NO: 27904 - DNA, 663 bp, Escherichia coli
atgaaaacaaaattgatgacattacaagacgccaccggcttctttcgtgacggcatgaccatcatggtgggcggatttatggggattggcactccatcccgcctggttgaagcattactggaatctggtgttcgcgacctgacattgatagccaatgataccgcgtttgttgataccggcatcggtccgctcatcgtcaatggtcgagtccgcaaagtgattgcttcacatatcggcaccaacccggaaacaggtcggcgcatgatatctggtgagatggacgtcgttctggtgccgcaaggtacgctaatcgagcaaattcgctgtggtggagctggacttggtggttttctcaccccaactggtgtcggcaccgtcgtagaggaaggcaaacagacactgacactcgacggtaaaacctggctgctcgaacgcccgctgcgcgccgacctggcgctaattcgcgctcatcgttgcgacacacttggcaacctgacctatcaccttagcgcccgcaactttaaccccctgatagcccttgcggctgatatcacgctggtagagccggatgaactggtcgaaaccggcgagctgcaacctgaccatattgtcacacctggtgccgttatcgaccacatcatcgtttcacaggagagcaaataa

SEQ ID NO: 27905 - DNA, 1386 bp, Escherichia coli
atgactgctattaatcgcatccttattgtggatgatgaagataatgttcgccgtatgctgagcaccgcttttgcactacaaggattcgaaacacattgtgcgaacaacgggcgcacagcattacacctgtttgccgatattcaccctgacgtggtgttgatggatatccgcatgccagagatggacggcatcaaggcactaaaggagatgcgcagccatgagacccggacacccgttattctgatgacggcctatgctgaagtggaaaccgccgtcgaagcactacgctgcggagccttcgactatgttatcaaaccgtttgatctcgatgagttgaatttaatcgttcagcgcgctttacaactccagtcaatgaaaaaagagatccgtcatctgcaccaggcactgagcaccagctggcaatgggggcacattctcaccaacagcccggcgatgatggacatctgcaaagacaccgccaaaattgccctttctcaggccagcgtcttgattagcggtgaaagcggcaccgggaaagagttgattgccagagcgattcactacaattcgcggcgggcaaaggggccgttcattaaagtcaactgcgcggcactgccggaatcgttgctcgaaagtgaactgtttggtcatgaaaaaggtgcatttactggtgcacaaaccttgcgtcagggattatttgaacgtgccaacgaaggtactctgctcctcgacgaaattggcgaaatgccgctggtactgcaagccaaattactacgcattctgcaggaacgggaatttgaacggattggcggccatcagaccataaaagttgatatccgcatcattgctgccaccaaccgcgacttgcaggcaatggtgaaagaaggcaccttccgtgaagatctcttttatcgccttaacgttattcatttaatactgccgcctctgcgcgatcgccgggaagatatttccctgttagctaatcactttttgcaaaaattcagtagtgagaatcagcgcgatattatcgacatcgatccgatggcaatgtcactgcttaccgcctggtcatggccgggaaatattcgagagctttccaacgttattgaacgcgccgtcgtgatgaattcaggcccgatcattttttctgaggatcttccgccgcagattcgtcagccagtctgtaatgctggtgaagcaaaaacagcccctgtcggtgagcgtaatttaaaagaggaaattaaacgcgtcgaaaaacgcatcattatggaagtgctggaacaacaagaaggaaaccgaacccgcactgctttaatgctgggcatcagtcgccgtgcattgatgtataaactccaggaatacggtatcgatccggcggatgtataa

SEQ ID NO: 27906 - DNA, 1827 bp, Escherichia coli
atgcattatatgaagtggatttatccacgccgcttacgcaatcaaatgatcctgatggcaatcctgatggtcattgtcccaacgcttactattggttatatcgtagaaacggaaggacgttcagcagtcttatctgaaaaagagaaaaaactttctgccgtggtcaacctgcttaatcaggcgctaggcaatcgctacgatctctacatcgacttaccgcgtgaggagcgtatccgcgcattaaatgcagaacttgcccccattaccgaaaatatcactcacgccttccctggcatcggcgctggttattacaacaaaacgctggatgcgataatcacctacgcgccttcagcgctatatcagaataatgtgggcgttaccattgccgcagatcaccctggtcgcgaagtcatgcgtacaaatacccctttggtttattcaggcaggcaggtgcgcggcgatattttgaattcaatgattcccattgagcgtaatggtgaaatcctcggctatatctgggccaatgaattaaccgaagatattcgtcgccaggcctggaaaatggatgcgaggattatcattgtgctcaccgccggtttgctgataagcctgctgttgattgtccttttctcccgtcgcctgagcgccaatatagatatcatcaccgatggcctctcgactctggctcaaaatattcccactcgattaccacaattgcccggtgaaatggggcaaatcagtcagagtgttaacaacctcgcccaggcactgcgtgaaacgcgaacacttaacgatctgattattgaaaacgctgccgatggcgtcattgccattgaccgccagggtgatgtaaccaccatgaacccagcagcagaagtcatcactggctatcaacgtcatgaactggtagggcagccttactccatgttgttcgacaatactcagttctacagtcccgtactggatacgctggaacatggcaccgaacatgtagcgttggagatcagttttccaggccgtgaccgcaccattgaactcagtgtcacgaccagtcgtattcataacacgcacggtgaaatgataggtgctttggtgattttctctgatttaactgcccgcaaagaaacccagcgccgcatggcgcaagcagaacgcctcgccacactgggtgagctgatggctggcgtggcgcatgaagtacgtaatccgttaacggctattcgtggttatgtacagatcttgcgccaacaaacccgtgacccaatacatcaggaatatctgtccgtagtactcaaagaaatcgattcaattaacaaagttattcagcaattgctcgaattttcacgcccacgccacagtcaatggcaacaagtcagcctcaatgcattggttgaagaaactctggtactggtacaaaccgccggcgtacaagcgcgggtcgacttcataagcgaactggataatgaattaagcccgattaacgccgatcgtgaactgctcaaacaggtactactgaatatcctgatcaatgccgtccaggctatcagtgcacgagggaaaattcgtattcgaacctggcagtatagcgactcgcaacaggccatttcgatagaggacaacggcagtggcattgatctctcgctgcaaaaaaagatcttcgatccctttttcactaccaaagcctcaggaaccgggcttggtctggcgttaagtcaacgcatcattaatgcccatcagggtgatattcgcgtcgccagtttgccgggctacggcgcaaccttcacgcttattttaccgatcaacccgcagggaaatcagactgtatga

SEQ ID NO: 27907 - DNA, 2850 bp, Escherichia coli
ttgaaataccttgcttcttttcgtacaaccctgaaagcctcgcgctacatgttcagagcattggcgttagtgctctggctgttgattgctttttcatccgttttttacatcgttaatgcgttacatcagcgagaatcggaaattcgtcaggaatttaatctgagttccgatcaggctcagcgctttattcaacgcacctctgatgtgatgaaagagctgaagtacatagctgaaaatcgcttatcggcagaaaacggtgtgctttccccgcgtggacgagaaacgcagacggatgtgcctgcgtttgaaccgctgtttgctgactctgattgttccgcaatgagtaacacctggcgaggttctctggagtcattggcgtggtttatgcgctactggcgcgataatttttctgcggcttacgatctaaaccgggtatttttaatcggcagcgataacctctgcatggccaatttcggtctgcgtgatatgccagtggaacgcgataccgcgctaaaagctttgcatgaacgcattaataaatatcgaaatgcaccacaagatgatagtggcagtaacctctactggatcagcgaaggtccgcgccctggcgtcgggtatttttacgccttgacgccagtttatctggcgaaccggttgcaggcgcttttgggtgtcgagcaaaccatccggatggagaactttttcttacctggtacgttgccgatgggggttaccattcttgatgaaaatggtcataccctgatttcgcttaccggaccagaaagcaaaattaagggcgatcctcgctggatgcaggaacgctcctggtttggctatacggaagggttccgggaactggtgctgaagaaaaatctgccaccctcatcgctaagcatcgtttattcagtgccagttgataaggtgctggaacgcattcgcatgttgatccttaacgcaattttgctgaatgtgcttgccggagctgcattgtttactctcgcgcggatgtacgagcggcgtattttcattccggcggaaagcgacgccctgcgactggaagaacatgagcaatttaatcgcaagattgtcgcctccgcgccagtgggtatctgcattttgcgtaccgctgatggcgtcaatattttaagtaacgaactggcgcatacctatctcaatatgcttacgcatgaggaccgccaacggctgacacaaattatctgtgggcagcaggtcaattttgttgatgtcctgaccagcaacaataccaatctgcaaatcagcttcgtccattcgcgctatcgtaatgaaaacgtggccatttgtgtgctggtggatgtttcttcgcgcgtgaagatggaagagtcgttgcaggagatggcacaagcagcggaacaggcgagccagtcaaaatcgatgttcctggccaccgtcagtcatgagctgcgaacgccgctgtatggcattatcggtaacctggatctgttgcaaaccaaagagttaccgaaaggcgtcgatcgtctggtgacggcaatgaacaactcttccagcctgttgttgaaaattatcagcgatattctcgatttctcgaaaattgaatcagaacagttgaagatcgaaccgcgtgagttttcaccgcgtgaagtgatgaaccacatcaccgccaactatttaccgctggtggtacgcaagcagttaggcttgtactgctttattgaaccggatgtgccagtggccttaaatggcgacccgatgcgtttacaacaggtcatctctaacctgctgagtaacgccataaaattcaccgataccggctgtatagttttgcatgttcgcgctgatggcgattatctctctatccgtgttcgcgataccggcgtggggattccggcaaaagaagtggtgcgtttgtttgatcccttcttccaggtcggaacgggcgtacagcgtaacttccaggggactggtctgggtctggcgatttgtgaaaaactgatcagcatgatggacggcgacatctcggtagattcagaaccgggaatgggcagccagtttaccgtgcgtattccgttgtatggcgctcagtacccgcagaaaaaaggtgtggaagggttgagtggtaaacgctgctggctggcggtccgcaatgcgtcgctctgtcagttcctggaaaccagtttgcagcgcagcggcatcgtcgttacaacatacgaagggcaggaaccgactcccgaagatgtgttaattactgacgaggtagtgaacaaaaaatggcagggcagagcggtagtgaccttctgtcgtcgccatattggtattccgctggagaaagcgccaggggagtgggtacacagtgtggctgctccgcatgagctaccggcattgttggcgcgtatttatttgatcgagatggagagcgacgatcctgctaacgctctgccgtcgacggacaaagcggtcagcgataatgacgatatgatgattctggtcgtggatgatcatccgattaaccggcgtctgctggcagatcagttgggatcgttgggctatcaatgtaaaaccgcgaatgatggcgtcgatgcgcttaatgtacttaacaagaatcatattgatatcgtgcttagcgacgtcaatatgccaaatatggatggttaccgcttgacgcaacgcattcgtcagttgggactgacgttgccggtaatcggagtaactgctaatgcgttggctgaagagaagcagcggtgtctggagtccggtatggacagctgcctgtcgaagccggtaacgctggatgtgataaaacagacgctgacggtatatgccgagagggtcaggaaatcgcgggaatcgtag

SEQ ID NO: 27908 - DNA, 651 bp, Escherichia coli
atgaacaatatgaacgtaattattgccgatgaccatccgatagtcttgttcggtattcgcaaatcacttgagcaaattgagtgggtgaatgttgtcggcgaatttgaagactctacagcactgatcaacaacttgccgaaactggatgcacatgtgttgattaccgatctctccatgcctggcgataagtacggcgatggcattaccttaatcaagtacatcaagcgccatttcccaagcctgtcgatcattgttctgaccatgaacaacaacccggcgattcttagtgcggtattggatctggatatcgaagggatcgtgctgaaacaaggtgcaccgaccgatttgccgaaggctctcgccgcgctgcagaaagggaagaaatttaccccggaaagcgtttctcgcctgttggaaaaaatcagtgctggtggttacggtgacaagcgtctctcgccaaaagagagtgaagttctgcgcctgtttgcggaaggcttcctggtgaccgagatcgctaaaaagctgaaccgcagtattaaaaccatcagtagccagaagaaatctgcgatgatgaagctgggtgtcgagaacgatattgctctgctgaattatctctcttctgtgacgttaagtccggcagataaagactaa

SEQ ID NO: 27909 - DNA, 2673 bp, Escherichia coli
atgcgtcagaaagagacaacggccacgacccgcttttcactcctaccggggagcattacccgcttctttttactgttgatcattgtgttactggtgacgatgggtgtaatggtacaaagcgccgttaacgcctggctgaaagataaaagttaccagattgtcgacattacccacgcaatccaaaagcgcgtcgatacctggcgttacgtgacctggcagatctacgacaacattgccgcgacgacctccccctcctccggcgaaggtttacaagagacgcgcctgaaacaggatgtctactatctggaaaaaccacgccgcaaaacggaagccttaatctttggctctcacgacaactcaacgcttgagatgactcaacggatgtccacctatctggacacattgtggggcgcagaaaatgtaccgtggtcgatgtattacctgaatggtcaggataacagtctggtgctgatctcaaccctgcccctcaaagatctcacctccggatttaaagaatcgaccgtcagcgacattgttgattcacgtcgtgcagagatgttgcaacaggccaacgccctcgatgaacgcgaaagtttttctaacatgcgccgcctggcctggcagaacggtcattactttaccttgcgtaccacgttcaaccagccgggacatctggcaacggtcgtggcttttgatctgccgattaatgatttgatcccaccgggtatgccgctggacagtttccgccttgagccagacgcgacggcaacgggaaacaatgaaaatgagaaagaagggacggatagcgtcagtatccactttaacagtacgaagattgaaatctcctcggcactcaactctaccgatatgcgcctggtctggcaggttccttacggcaccttactgctggatacgttgcaaaacattctgctgccactgctgctgaacatcggtttgctggcgctggcgttatttggctataccacattccgccatttctccagccgcagtacagaaagcgtccccagcacggcggtcaataacgaattgcgcattttacgggcaattaatgaagagatagtctcactgctgccgctcggcctgctggttcacgatcaggaatcgaaccgcacagtcataagtaacaaaattgccgatcatttgctgccgcatttgaatctgcaaaacatcaccaccatggcggaacagcatcaggggattattcaggcgacgatcaataacgagctgtatgagatccgcatgtttcgcagccaggttgcgccgcgcacacaaattttcattattcgcgatcaggatcgcgaagtgctggtaaacaagaaactcaagcaggcgcagcgtctgtatgagaaaaaccagcaggggcggatgacctttatgaaaaacattggcgatgcgctgaaagaacccgcacagtccctggcggagagcgcggctaaactcaacgccccggaaggcaaacaactggcgaatcaggcagatgtgctggtgcggctggtcgatgaaatacagttagcgaacatgcttgcggacgatagctggaaaagtgagacggagctgttctccgtgcaggatttaattgatgaagttgtgccttcagtgttgcctgccatcaagcgtaaaggtctgcaactgctgattaacaatcatctgaaagcacacgatatgcgccgcggcgatcgcgatgccttacgacgtattttgctgctactgatgcaatatgccgtgacctcaacgcaattgggaaaaatcacccttgaggttgatcaggatgagtcctccgaagaccgcctgacgttccgcattctggacactggagaaggcgtaagcattcatgaaatggataatttgcacttcccgtttatcaaccagacccaaaacgatcgctatggcaaggcggacccgctggcattctggctgagcgatcaactggcgcgtaaactgggcggtcatttaaacatcaaaacgcgggatgggcttggtacacgctactctgtgcatatcaaaatgctcgcagctgacccggaagttgaagaggaagaagagcgattactggatgatgtctgcgtaatggtggatgttacttcggcagaaattcggaatattgtcactcgccagttagaaaattggggtgcaacctgtatcacacccgatgaaagattaattagtcaagattatgatatctttttaacggataatccgtctaatcttactgcctctggcttgcttttaagcgatgatgagtctggcgtacgggaaattgggcctggtcaattgtgcgtcaatttcaatatgagcaacgctatgcaggaagcggtcttacaattaattgaagtgcaactggcgcaggaagaggtgacagaatcgcctctgggcggagatgaaaatgcgcaactccatgccagcggctattatgcgctctttgtagacacagtaccggatgatgttaagaggctatatactgaagcagcaaccagtgactttgctgcgttagcccaaacggctcatcgtcttaaaggcgtatttgccatgctaaatctggtacccggcaagcagttatgtgaaacgctggaacatctgattcgtgagaaggatgttccaggaatagaaaaatacatcagcgacattgacagttatgtcaagagcttgctgtag

SEQ ID NO: 27910 - DNA, 1128 bp, Escherichia coli
atgaaagttaaagtactgtccctcctggtcccagctctgctggtagcaggcgcagcaaacgctgctgaagtttacaataaagacggcaacaaattagatctgtacggtaaagtagacggcctgcactatttctctgacgacaagtctgtagatggcgaccagacctacatgcgtcttggcttcaaaggtgaaactcaggttactgaccagctgaccggttacggccagtgggaatatcagatccagggcaacgctccggaaagcgaaaacaactcctggacccgtgtggcatttgctggtctgaaattccaggacatcggttctttcgactacggtcgtaactacggcgttgtttacgacgtaacttcctggaccgacgttctgccagaattcggtggcgacacctacggttctgacaacttcatgcagcagcgtggtaacggcttcgcgacctaccgtaacaccgacttcttcggtctggttgacggcctgaactttgctgttcagtaccagggccagaatggcagcgtaagcggtgaaaatgatccagatttcactggtcatggcatcaccaacaatggtcgtaaagctctgcgtcagaacggcgacggtgtcggcggatctatcacttatgattacgaaggcttcggcgttggtgctgcagtttccagctccaaacgtacctgggatcagaacaacactggcctgatcggtactggcgaccgtgctgaaacctacactggtggtctgaaatacgacgctaacaacatctacctggctgctcagtacacccagacctacaacgcaactcgcgtaggttccctgggttgggcgaacaaagcacagaacttcgaagctgttgctcagtaccagttcgactttggtctgcgtccgtctgtagcatacctgcagtctaaaggtaaaaacctgggtgtcgttgctggtcgtaactacgacgacgaagatatcctgaaatatgttgatgttggtgctacctactacttcaacaaaaacatgtccacctacgttgactacaaaatcaacctgctggacgacaaccagttcacccgcgctgctggcatcaacactgatgacatcgtagctctgggtctggtttaccagttctaa

SEQ ID NO: 27911 - DNA, 1056 bp, Escherichia coli
atggaaataagctttacccgcgtggcactgctggctgccgcgctcttctttgttggttgcgatcaaaaaccacaacccgccaaaacccacgctactgaagttaccgttcttgaaggcaaaaccatgggtaccttctggcgtgccagcatcccgggcattgatgccaaacgcagtgccgaacttaaagaaaagattcagacccagctggacgccgacgatcagctgctttcgacctataaaaaagattccgcgctgatgcgctttaacgactcgcaaagtttgtcgccgtggccggtaagtgaagcgatggccgatatcgtcaccacctcgctgcgcattggcgcaaggaccgatggtgcgatggatataaccgtcgggccgctggtgaatctgtggggctttggcccggaacaacagccggttcaaattccgagccaggaacagatcgatgcgatgaaagccaaaaccggcttacagcacctgacggtcattaatcagtcgcatcagcaatatctgcaaaaaaacctgccggatttatatgtcgatctctccactgtcggcgaaggctatgcggcggatcatctggcacgcttgatggagcaggaagggatttcccgctatctggtgtcggtgggcggcgcgctgaacagccgtggcatgaacggtgaaggccagccgtggcgggtagcgattcaaaaaccaaccgataaagaaaacgcggttcaggccgtggtggatatcaacggtcatggcattagcacctctggcagctaccgtaactattacgaactggacggcaaacgcctttcccatgttatcgatccgcaaaccgggcgtcccatcgaacacaatctggtatccgtgacggtgattgccccgacggcgctggaagccgacgcctgggatactggcttaatggtgctcgggccagagaaagccaaagaagtcgttcgccgggaagggctggcggtttatatgatcaccaaagagggcgatagctttaaaacctggatgtcgccgcagtttaaaagcttccttatcagcgaaaaaaattaa

SEQ ID NO: 27912 - DNA, 1065 bp, Escherichia coli
atgaaaaacgccacatgcttaactgacgatcaacgctggcaatctgtcttagcccgcgacccgaatgccgacggcgaattcgttttcgccgtgcgcaccacaggcatcttttgccgtccgtcttgccgcgccagacatgctttgcgggaaaacgtttctttctatgccgatgccagtgaggcgcttgccgctggctttcgcccctgcaaacgttgtcagccagacaaagccaatccccaacaacatcgccttgataaaatcacccacgcctgccgactgctggaacaggaaacgcctgtaacgctggaatccttagccgaacagctggcgatgagtccgttccatttgcatagattgtttaaagcgactaccggaatgacgccgaaagcctggcagcaggcctggcgtgctcgccgattgcgggagtctctggcaaaaggggagagcgtgactcaggcgattctcagtgccggattccccgacggcagcagttactaccgtaaagccgatgaaacgctgggcatgacggctaaacaattccgtcacggtggcgaaaatctggcggtgcgttacgcgctggctgattgtgagctgggccgttgcctggtggcagaaagcgagcgggggatttgcgcgatattgttgggcgatgatgatgcgacattaatcagcgagttgcagcagatgtttcccgctgccgacaacgcgcctgccgatctgacgtttcagcaacatgtgcgtgaagtgatcgccagcctcaatcaacgcgatacgccgctgacgttaccgctggatattcgcggcactgcttttcagcaacaagtctggcaggcactgcgcacgataccttgtggtgaaaccgtcagttatcagcaactggcgaacgccatcggcaaaccgaaagcggtacgggccgttgccagcgcctgtgccgccaacaagctcgctatcgttataccttgtcatcgggtggtccgtggtgatggctcactttccggttaccgctggggcgtgtcgcgcaaagcgcaactgctgcgccgcgaagttgaaaatgaggagaggtaa

SEQ ID NO: 27913 - DNA, 651 bp, Escherichia coli
atgttggatctgtttgccgatgctgaaccgtggcaagaaccactggcggctggagcggtgattttgcaccgttttgcttttaacgctgcggagcaactgatccgcgatattaatgacgttgccagccagtcgccgtttcgccagatggtcactccaggcggatataccatgtcggtggcgatgaccaactgcgggcgtctgggctggaccacccatcggcagggttatctctattcgcccattgatccgcaaacaaataaaccgtggcccgccatgccgcagagttttcataatttatgtcaacgtgcggctacggcggcgggctatccagatttccagccagatgcttgtcttatcaaccgctacgctcctggcgcgaaactgtcgctgcatcaggataaagacgaaccggatctgcgcgcgccgattgtttctgtttctctgggcttacccgcgatttttcaatttggcggcctgaaacgaaatgatccgctaaaaagattgttgctggaacatggcgatgtggtggtatggggcggtgaatcgcggctgttttatcacggtattcaaccgttgaaagcggggtttcatccactcaccaccgactgccgctacaacctgacattccgtcaggcaggtaaaaaagaataa

SEQ ID NO: 27914 - DNA, 1644 bp, Escherichia coli
atggaacttcttgtacttgtctggcggcagtatcgctggccatttatcagtgtgatggcgctaagcctcgccagtgcggcattaggcattggcttaattgcttttatcaatcagcgccttatcgaaacggcggataccagtctgctggtgttgccggagtttctgggattattgttgctgttgatggcagtcactctcggatcgcaactggcgctcaccactttggggcatcacttcgtttaccgactgcgtagtgaatttatcaagcggattctggatacccacgtcgagcgcattgaacaacttggtagcgcttcgttgctggcggggttaaccagcgatgtgcgcaatatcaccattgcttttgtgcgtctgccggaactggtgcaggggatcattctcactatcggttcagcggcgtatttgtggatgctgtcgggcaaaatgttgctggtaacggctatctggatggcagtcaccatctggggcggttttgtgctggtggcgcgggtgtacaaacatatggcgaccctgcgtgaaaccgaagataagctgtacacggattttcaaactgtactcgaagggcgcaaagagctgactctgaaccgtgaacgcgccgagtatgtgtttaacaacctctacattcctgatgcgcaagagtatcgccatcatattattcgcgcagacaccttccatcttagtgccgtgaactggtcaaacatcatgatgctgggcgctatcggcctggtgttctggatggcgaacagtctcggttgggctgataccaacgttgctgcgacctattcgttgacgctgttattcctgcgtacgccgctgctttcggcggttggcgcattgccgacgctgctgacggcgcaggtggcgtttaacaagctgaacaaattcgcgctcgcgcctttcaaagcagagtttccgcgcccgcaggcttttcccaactggcaaacgctggagctgcgtaacgtgacgtttgcttatcaggataacgcgttttccgttgggccgattaacctcaccatcaaacgtggtgaactgctgtttctgattggtggcaacggtagtggaaaatcgacgctggcgatgttgctgacgggcttgtaccaaccacaaagcggcgaaatcttgctggatggcaaacctgtcagcggcgaacaaccggaagattatcgcaaactgttttcggcagtgtttaccgatgtctggctgtttgatcaactgctggggccggaggggcaacccgctaacccgcaactggttgagaagtggctggcgcagctgaaaatggctcataagcttgagttaagcaacgggcgtattgttaacctgaagttatcaaaagggcagaaaaaacgcgtggcgctgttgctggcgctggcagaagaacgcgatattatcctgctggatgaatgggcggcggatcaggatccacacttccgtcgtgagttttatcaggtgctgctgccgctgatgcaggagatgggtaaaactattttcgccatcagtcatgatgatcattactttatccacgccgaccgcctgctggaaatgcgcaacgggcaacttagcgagctgacaggcgaagagcgcgatgctgcttcgcgtgatgccgttgcccggacggcataa

SEQ ID NO: 27915 - DNA, 1647 bp, Escherichia coli
atgaaaaaagtgactgccatgctcttctcgatggccgtggggcttaatgccgtttcgatggcggcaaaagcgaaagcgtccgaggagcaggaaactgatgtactgttgattggcggcggcattatgagcgccacgttggggacctatttacgcgagctggagcctgaatggtcgatgaccatggtggagcgcctggaaggtgtcgcgcaggagagttcgaacggctggaacaacgccggaaccgggcattctgcactgatggaactgaactacaccccgcaaaacgccgatggcagcatcagtattgaaaaagcagtcgccattaacgaagcatttcagatttcgcgccagttctgggcgcaccaggtcgagcgcggcgtgctgcgtacaccgcgttcatttatcaataccgttccgcatatgagctttgtctggggcgaggataacgttaatttcctgcgagcccgttacgccgcgttgcaacaaagctcgctgtttcgcggtatgcgttactctgaagatcacgcgcagatcaaagagtgggcaccgttagtgatggaagggcgcgatccgcaacagaaagtggcagccacgcgtacggaaattggcactgatgtgaactatggcgagatcacccgccagttaattgcttccttgcagaagaaatctaatttttcgctgcaactcagcagcgaagtccgcgccctaaagcgtaatgacgataacacctggaccgttaccgttgccgatctgaaaaatggcactgcacagaacatccgcgccaaatttgtctttatcggcgcgggcggtgcggcgctgaagctgttacaggaatcggggattccggaagcgaaagactacgccggtttcccggtgggcggacagttccttgtttcggaaaatccggacgtggttaatcaccatctggcgaaggtttacggtaaagcatccgttggcgcaccaccgatgtcggttccgcatatcgatacccgtgtgctggacggtaaacgcgtcgtgttgtttgggccatttgccaccttctcaactaaattcctcaaaaacggttcattgtgggatctgatgagttccaccaccacctctaacgtgatgccgatgatgcacgtcgggctggataatttcgatctggtgaaatatctggtgagtcaggtgatgttgagtgaagaggatcgttttgaagcgttgaaagagtactatccgcaggcgaaaaaagaggactggcgtttgtggcaagcggggcagcgcgtgcagattatcaagcgtgatgccgataaaggtggcgtactgcgtctgggtactgaagtcgtcagtgaccagcaagggaccattgccgcgctcctgggggcatcgccaggggcgtcaaccgccgcgccgattatgttgaatctgctggaaaaagtatttggcgatcgcgtttccagcccgcaatggcaggctacgttgaaagcgatcgttccgtcttatggacgcaagctgaacggtgatgtagcggcaacagaacgcgagttgcagtacaccagcgaagtgctggggctgaaatacgacaagccgcaggcagtagatagtacgccgaaaccgcagttgaaaccgcaactcgttcaaaaagaagtggcggatattgcgttgtaa

SEQ ID NO: 27916 - DNA, 489 bp, Escherichia coli
atgaagaccattctacctgcagtattgtttgccgctttcgccaccacttccgcctgggcggcagaaagcgtccagccactggaaaaaatcgcaccttatccacaagctgaaaaaggcatgaagcgtcaggtgattcagttaactccgcaagaagatgaatctaccctgaaagtagaactgttaatcggtcagacgctggaagtcgactgcaatttgcatcgtctcggcgggaagctggaaagcaaaacgctggaaggctggggctatgattattatgtctttgataaagttagctcgccggtttccacgatgatggcctgcccggatggcaagaaagagaagaaatttgtcaccgcgtatctgggcgatgctggaatgctgcgttacaacagcaagctgccgatcgtggtgtatacgccagacaatgtggatgtgaagtaccgcgtctggaaggcggaagagaaaattgacaacgcggttgtccgctaa

SEQ ID NO: 27917 - DNA, 165 bp, Escherichia coli
atgcataccccgatcggggtaaaacctgtagcaggatcaaaagagtggcgggaagcgtggcaaaaacgggcttttgctcacattttaaatggttataaacatatttatatagcgattaattcgccagagatatttctgctggtttgttttctcatcagaatttaa

SEQ ID NO: 27918 - DNA, 495 bp, Escherichia coli; identical to SEQ ID NO: 541

SEQ ID NO: 27919 - DNA, 264 bp, Escherichia coli; identical to SEQ ID NO: 540

SEQ ID NO: 27920 - DNA, 2487 bp, Escherichia coli
atgaaactcagtcgtcgtagctttatgaaagctaacgccgttgcggccgctgcggcggctgccggtctcagcgtgccgggcgttgcccgcgccgttgttggtcagcaggaagccattaaatgggataaagcgccgtgccgtttctgcggtacgggttgcggcgttctggtcggaacgcagcaggggcgtgtggtggcctgtcagggcgacccggacgcaccggttaaccgtggcctgaactgcattaagggctatttcctgcccaaaatcatgtacggtaaagaccgtttgacgcagccgctgctgcgtatgaaaaacggtaaatatgacaaagaaggcgaatttaccccaatcacctgggatcaggccttcgatgtgatggaagagaaatttaagactgccctgaaagaaaaagggccggaatcgatcggtatgttcggttctggtcagtggactatctgggaaggttatgccgcgtccaagttgttcaaagcgggcttccgttcgaacaacatcgacccgaacgcgcgtcactgtatggcgtcggcagtagttggctttatgcgtacctttggtatggatgagccgatgggctgctacgacgacatcgagcaggctgacgcgtttgtgctgtggggcgcaaacatggcggagatgcacccgatcctctggtcgcgcatcactaaccgtcgtctctctaaccagaacgttaccgtggcggtgctttctacctaccagcatcgtagcttcgagctggcggataacggcatcatctttacgccgcaatctgacctggtgatcctgaactatatcgccaactatatcattcaaaacaatgcgataaatcaggacttcttcagcaaacacgttaacctgcgcaaaggagcgacggacatcggctacggtttacgtccgacccatccgctggaaaaagcagcgaagaatccgggttctgacgcctccgaaccgatgagctttgaagattacaaagccttcgttgctgaatatacgctggaaaaaaccgccgaaatgaccggcgtgccgaaagaccagttagaacaactggcgcagctgtatgccgatccgaacaagaaagtcatctcctactggacgatgggcttcaaccagcatacccgtggtgtgtgggccaacaacctggtctacaacctgcacctgctgaccggcaaaatttcccagccgggttgcggtccgttctccctgaccgggcagccttccgcgtgtggtactgcgcgtgaagtgggcacctttgctcaccgtctgcctgcggacatggtggtgactaacgagaaacatcgtgatatttgcgagaagaagtggaatatcccgagtggcaccattccggcgaaaatcggtctgcacgcggtggcacaagaccgtgcgctgaaagacggcaaactgaatgtttactggaccatgtgtaccaataacatgcaggccggaccgaacattaatgaagagcgtatgccgggctggcgcgatccgcgcaactttatcatcgtttccgatccgtatccgacagtcagtgcgctggcagccgacttgatcctgccgaccgcaatgtgggtagagaaagagggcgcttacggtaatgccgaacgccgtactcagttctggcgtcagcaggtacaggcaccgggtgaagcaaaatcggatctctggcagttagttcagttctcccgtcgcttcaaaactgaagaagtgtggccggaagagttgctggcgaagaaaccagaactgcgcggcaaaacgctgtacgaagttctgtatgccactccggaagtgagcaaattcccggtatccgaactggcggaagatcagctgaacgatgaatcccgcgagctgggcttctatctgcaaaaagggctgttcgaagagtacgcatggtttggtcgcggtcacggtcacgatctcgcgccgttcgatgattaccacaaagcacgcggtctgcgctggccggtggtgaacggtaaagaaacgcagtggcgttacagcgaaggtaacgacccgtacgtgaaagcgggcgaaggctacaagttctacggtaaaccggatggcaaagcggtgatcttcgcgctgccgttcgaacctgcggcggaagcaccggatgaagagtacgacctgtggctctctaccggacgcgtcctggagcactggcataccggcagtatgactcgccgtgtaccggaactgcaccgcgccttcccggaagcggttctgtttattcacccgctggatgcgaaagcgcgcgatctgcgccgtggcgacaaagtgaaagtggtttctcgccgtggcgaagtgatctcgattgtcgaaacgcgcggtcgtaaccgtccgccgcagggcctggtgtacatgccgttcttcgacgccgcacagctggttaacaaactgacgctggatgcgaccgatccgctctcgaaagagacggacttcaagaagtgcgcggtcaaactggagaaggtgtaa

SEQ ID NO: 27921 - DNA, 696 bp, Escherichia coli
atgtcccggtcagcgaaacctcaaaatggtcgccgccgctttctgcgcgatgtcgttcgcacagcaggcgggctggctgccgtgggtgtggcgctggggttacaacagcaaaccgcacgcgcatctggtgtgcggttgcgcccgcccggagccataaacgagaacgcctttgccagtgcctgtgtgcgttgcggtcagtgtgttcaggcttgcccttacgacaccttaaaactggcgacgctggcctctggtctgtcggcgggcacgccatattttgtcgcacgggatattccttgcgaaatgtgtgaggacattccgtgcgccaaagtgtgcccgagcggtgcgctggatcgtgagatcgaatcgatcgacgacgcgcggatggggctggcggtactggtggaccaggaaaactgtctcaactttcaggggctgcgctgcgatgtttgttatcgcgaatgcccgaaaattgatgaggccatcaccctggagctggagcgcaacacgcgaaccggtaagcacgcccgctttctgccgacggttcacagcgacgcctgtaccggctgcggtaagtgcgaaaaagtgtgcgtgctggaacaaccggcaatcaaggtgttaccgctgtcactggcgaaaggggagttaggtcaccattaccgcttcggctggctggaggggaacaatggcaaatcgtaa

SEQ ID NO: 27922 - DNA, 864 bp, Escherichia coli
atggcaaatcgtaaacgtgacgccgggcgcgaggcgctggagaaaaaaggctggtggcgcagtcaccgttggttagtgttacgtcgcctttgtcagttcttcgtgctggggatgtttttgagcggtccgtggtttggtgtgtggatcttgcacggcaactacagcagtagcctgttattcgacaccgttccgctgaccgatccgctgatgacgctgcaaagccttgccagcggtcatctgcctgccacggtagcactgactggtgcggtaattatcaccgtgctctacgccctggcaggaaagcgattattttgcagctgggtctgcccgctgaacccgattaccgacttagcgaactggttacgcaggcgctttgacctcaatcagtctgcgacgatccctcgccacattcgctacgtgctgttggtggtcattctggtgggatcggccttaaccggcacgctcatctgggaatggatcaaccccgtttccctgatggggcgcagcctggtaatgggcttcggtagcggcgcgctgcttattctcgcgctgtttttatttgatctactggtcgttgaacacggctggtgcggtcacatttgtccggttggcgcgctgtatggcgtgctgggtagcaaaggtgtgattaccgttgcggccagcgatcggcagaaatgtaaccgctgtatggattgttttcatgtttgcccggaaccgcatgtgctacgtgccccggtgctggatgaacaaagcccggtgcaggtcaccagccgcgattgcatgacgtgcggtcgctgcgtggatgtctgttctgaggatgtatttacaataactacacgatggagttcgggagcgaaatcatga

SEQ ID NO: 27923 - DNA, 450 bp, Escherichia coli
atgaaaagccatgacctgaagaaagcgctgtgtcaatggacggcgatgctggccctggtggtgagcggcgcggtttgggcggctaatggcgtcgattttagccagtcgccggaagtatccgggacgcaggaaggggccattcggatgccaaaagagcaggaacggatgccgctgaactatgtgaatcagccgccaatgatcccgcatagcgttgaaggttatcaggtaacgaccaataccaaccgctgcttgcagtgccacggtgtcgaaagctatcgcaccactggcgcgccgcgcatcagtcctactcactttatggacagcgacggcaaagtgggcgcggaagtggctccgcgtcgttatttctgtctgcaatgtcacgtaccgcaggccgataccgcgccaatcgtggggaatacctttaccccatcaaaaggttacgggaaataa

SEQ ID NO: 27924 - DNA, 603 bp, Escherichia coli
atgggaaattctgaccgtaagcctggtctgattaagcgcctgtggaaatggtggcgtacccccagccgtctggcgctggggacgctgctgttgatcggttttgtcggcggcatcgtcttctggggcggctttaacaccgggatggaaaaagccaataccgaagagttctgcattagctgccacgaaatgcgtaacacggtgtatcaggaatacatggattccgtgcactacaacaaccgtagcggcgtccgtgcgacctgtccggattgtcacgttccgcacgagtttgtgccgaagatgatacgcaagctcaaagcaagtaaagagctgtatggtaaaatttttggcgttattgacacgccgcagaaatttgaagctcatcgcctgacgatggcacagaatgagtggcggcgcatgaaggacaataactcgcaggagtgccgtaactgtcacaacttcgagtatatggatacaaccgcccagaaatcggttgccgcgaagatgcatgaccaggcggtgaaagatgggcaaacctgtattgattgccataaagggatagcgcacaagctgcccgatatgcgcgaagtcgagccaggtttttaa

SEQ ID NO: 27925 - DNA, 618 bp, Escherichia coli
atgcttgaagccagagagttactttgcgagcgggatgaacgaaccttatttagtggcttgtcatttacgctgaacgcaggagagtgggtacaaatcaccggtagcaacggcgcggggaagacaacgcttctccgtttgctgacggggttgtctcgccctgatgcgggtgacgttctctggcaagggcagcctttgcatcaggtacgcgacagctaccatcaaaacctgttatggataggccatcagccggggatcaaaacccggctgacggcgttagaaaatctgcacttttatcatcgcgatggcgataccgcacaatgtctggaagccctggcgcaggccgggcttgccggattcgaagatattccggtaaatcaactttctgccgggcaacaacgccgcgtcgctttagcgcgtctgtggctgacccgtgccacgttatggatactcgacgagccttttaccgcgattgacgttaacggcgtcgatcgtctgacccagcgtatggcgcagcatacggagcagggggggattgtgattctgactacccaccagccgctcaacgttgctgaaagtaaaattcgccgcatttcactgacgcaaacgggggccgcatga

SEQ ID NO: 27926 - DNA, 663 bp, Escherichia coli
atgatgttctggcgcattttccgtcttgagctgcgcgtggcgtttcgccatagcgccgaaatcgccaacccgctgtggttcttcctgattgtcattaccctttttccgctcagtatcggtccggagccgcaactgctggcgcgtattgcaccgggcattatctgggttgctgcgttgctttcatccttgctggcactcgagcgactgttccgtgacgatttgcaggacggcagtcttgaacaattgatgttgttgccgttacccttgcccgccgttgtgctggcgaaggtgatggcgcactggatggtaaccggtctgccgttactcatcctttcgcccctggtagcaatgctactgggaatggatgtttatggctggcaagtgatggcgctgacgctgctgctgggaacccctacgcttggctttctcggtgcgccgggcgtggcgctgacagtgggacttaagcgcggtggtgtgctgctcagcatactggtgttaccgctgactatcccattactcatctttgccaccgccgcgatggacgcggcttctatgcatttgcccgttgatgggtatctggcaattttaggcgcgttgctggcaggcaccgcgacattaagtccttttgcgacggcggcagcgttacgaatcagcattcaataa

SEQ ID NO: 27927 - DNA, 738 bp, Escherichia coli; identical to SEQ ID NO: 19441

SEQ ID NO: 27928 - DNA, 210 bp, Escherichia coli
atgacccctgcatttgcttcctggaatgaatttttcgcaatgggcggttacgccttttttgtctggttggcggtggtgatgaccgttattccgctggtggttttggtcgtgcactcggtgatgcaacatcgcgcaattctgcgtggcgtggcgcaacagcgggcgcgtgaggcgcgtttacgtgctgcgcaacagcaggaggctgcatga

SEQ ID NO: 27929 - DNA, 480 bp, Escherichia coli; identical to SEQ ID NO: 530

SEQ ID NO: 27930 - DNA, 1944 bp, Escherichia coli
atgatgccagaaattggtaacgggctgctgtgtctggcgctaggaattgcgctgctgctgtccgtgtatccgctatggggcgtggcgcgcggggacgcgcgcatgatggcgtcttcccgcttgtttgcctggctgctgtttatgtctgtggctggcgcatttctggtgctggtcaatgctttcgtggtcaacgactttaccgtcacctatgttgccagcaactccaatacccagcttccggtgtggtatcgcgtggcggctacctggggcgcgcatgaaggctcgctcctgctgtgggtgctactgatgagcggctggacctttgcggtagcgatttttagtcagcgtattccgctggatattgttgcccgcgtactggcgataatggggatggtcagtgtcggctttttgctgttcattctctttacctctaacccgttctcacgcacgctgccgaatttcccgattgaagggcgtgatcttaacccactgttgcaggatccggggctgatcttccatccgcctctgctttatatggggtacgtgggtttctcggtggcgtttgcttttgccattgcttctttgctgagtgggcgtctggacagcacttatgcgcgttttactcgcccgtggacgctggcagcgtggattttcctgacgctcggcattgtgctcggttccgcatgggcctattacgaactcggctggggcggctggtggttctgggatccggtagaaaacgcctcgtttatgccgtggctggtggggactgcgctgatgcactcactggcggtcactgaacaacgcgccagcttcaaagcgtggacattactgctggcaatcagtgccttctcgttgtgtctgctggggactttcctggtgcgttccggcgtgctggtatcggtacacgcgtttgcgtctgatccggcgcgcggtatgtttatcctcgcctttatggtgttggtgattggcggttcgctgctgctgtttgccgcgcgtggacacaaagttcgctcacgcgtaaacaatgcgctgtggtcgcgggaatctttgctgttagcgaacaacgttttgctggtcgccgcgatgctggtggtgttgctggggacgttgctgccgctggtgcacaagcaactgggactgggcagtatttcgattggcgaaccgttcttcaacaccatgtttacctggctgatggtgccgtttgcgctactgcttggtgtcggccctctggtgcgctggggacgcgatcgcccacgtaaaatccgcaatttgttgattatcgccttcatctctacgctggtgctgtcgctgctgttgccgtggctgttcgaaagcaaagttgtggcgatgacggtgctcggcctggcaatggcctgctggattgcggtgctggcaattgcggaagctgcgctgcgtatttcacgcggcacgaaaaccaccttcagttattgggggatggtggcagctcacctggggctggcagtgacaattgttggcattgcttttagtcagaactatagcgttgagcgtgatgtgcgcatgaagtccggcgatagcgtcgatattcatgaatatcgcttcaccttccgtgatgtcaaagaagtgactggtccaaactggcgtggcggtgtggcgaccatcggcgtaacgcgagatggaaagccggaaacagtgctgtatgcagaaaaacgttattacaacactgccgggtcgatgatgaccgaagcggcgattgacggtggcatcacgcgtgacctgtacgcggcgctcggtgaagagctggaaaacggcgcgtgggccgtgcgtctttactacaaaccatttgttcgctggatttgggcgggcgggctgatgatggcgttgggcggactgctgtgtctgtttgatcctcgctatcgtaagcgcgtgaacccgcagaaaactgcgccggaggctgcatga

SEQ ID NO: 27931 - DNA, 558 bp, Escherichia coli
atgaagcgcaaggtattgttaattccgttgattatcttcctggcgattgccgcggcgctgctgtggcagctggcgcgtaatgccgaaggggatgatccgaccaatctggaatcggcgctcattggcaagccagtgccgaagtttcgcctcgaatcactggacaatccggggcagttttatcaggcggatgtgctgactcagggcaaaccagtgctgcttaacgtctgggcgacctggtgtccgacctgccgtgcggaacatcaatatctgaatcagctttctgcgcagggcatccgcgtggtcggcatgaactataaagacgatcgccagaaggcaatcagctggctgaaagagctgggcaatccttacgcgctaagcctgtttgatggcgacggcatgttagggctggatctcggtgtctatggcgcgccagaaacgttccttattgacggcaacggcatcattcgctatcgccatgcgggcgatctcaatcctcgcgtctgggaagaagagatcaagccactgtgggagaaatacagtaaggaggccgcacaatga

SEQ ID NO: 27932 - DNA, 1053 bp, Escherichia coli
atgaggtttttattgggcgtgctgatgctgatgatctccggctcagcgctggcgaccatcgacgtgttgcagtttaaagatgaagcacaggaacaacagttccgtcagctcactgaagaactgcgctgcccgaaatgccagaacaacagcattgccgattccaactcgatgattgccaccgacctgcgccagaaagtgtatgaactgatgcaggaaggcaaaagtaagaaagagattgtcgattatatggtggcgcgttacggcaacttcgtcacttacgatccgccgttaacgccgctgaccgtgctgctgtgggtgctgccagtagtggctattggcattggcggttgggtcatatacgcccgttcgcggcgtcgggtacgcgtggtgctggaagcgtttccagaacaaagcgtgccggaaggtaagcgtgccggatatgttgtttatctgccgggtattgtggtggcgttaattgtggctggcgtcagctactaccagactggcaattatcagcaggtgaaaatctggcagcaggccacggcacaggctccggcgttactggacagggcgctggatccgaaagccgatccgctcaacgaagaagagatgtcgcgccttgcgctggggatgcgtactcaactgcaaaaaaatccgggagatatagaaggctggattatgttgggccgcgttggcatggcgctgggtaacgccagtatcgccaccgatgcatacgccactgcgtatcgcctcgatccgaaaaacagcgatgctgcactgggatacgctgaagcgttgacacgttcatctgatcccaacgacaaccgcctcggcggcgaactgctgcgccagttggtgagaacggaccatagcaatatccgtgtgttaagcatgtatgcatttaatgcctttgagcagcaacgatttggcgaagccgttgccgcgtgggaaatgatgttgaaactcttacctgccaacgatactcgccgtgcggtgatcgaacgtagtatcgcgcaggcgatgcaacatttgtcgccgcaggagagtaaataa

SEQ ID NO: 27933 - DNA, 648 bp, Escherichia coli; identical to SEQ ID NO: 526

SEQ ID NO: 27934 - DNA, 204 bp, Escherichia coli
atgcaccaatctggttctgtttctctttgtcgttccgcaatatctgttctggtggctacagcgttatattcgcccatagcattggcatcaactgttgagtatggtgagacagttgatggtgttgtcctggaaaaagatatccagctggtttgtagggccgccaataatacgaaaatcaatcctggcggagaacagcatatataa

SEQ ID NO: 27935 - DNA, 156 bp, Escherichia coli
atgtggagttcggcaattaacagccgcaacaacgtgaccactgatgcaggcgctggctttgagcaaacattgacggggctaacgcttggtatcgacagccgtttctcccgtgaagaaagcagcacaactcaggcgggtgtagtctggacgttctga

SEQ ID NO: 27936 - DNA, 1761 bp, Escherichia coli
atggtaactcatcgtcagcgctaccgtgaaaaagtctcccagatggtcagttgggggcactggtttgcactgttcaatattctgctttcgctcgtcattggcagccgttacctgtttatcgccgactggccgacaacgcttgctggtcgcatttattcctacgtaagcattatcggtcatttcagcttcctggtgttcgccacctacttgctgatcctcttcccgctaacctttatcgtcggctcccagaggctgatgaggtttttgtccgtcattctggcaacggcgggaatgacgctattactgatcgacagcgaagtctttactcgtttccatctccatcttaatcccatcgtctggcagctggttatcaacccagacgaaaatgagatggcgcgcgactggcagctaatgttcatcagtgtgccggttattttattgcttgaactggtgtttgcgacgtggagctggcaaaagctgcgcagcctgacgcgtcgtcggcgcttcgcgcgcccgctggccgcattcttatttatcgcctttatcgcctcgcatgtggtttatatctgggccgatgccaacttctatcgcccgatcaccatgcagcgcgctaacctgccgctttcgtacccgatgacggcacgacgttttcttgagaagcatggcctgcttgatgcgcaggagtatcaacgccgtcttattgagcaaggcaatccagacgccgtttccgttcagtatccgttaagcgaactgcgctatcgcgatatgggcaccgggcagaatgtgctgttgattactgtcgatggcctgaactactcacgcttcgagaagcagatgcctgcgctggcaggttttgctgagcaaaatatttcgttcacgcgccatatgagctccggcaacactacagacaacggcatctttggcctgttctatggcatctcgccgagctatatggacggcattctgtcgactcgtacgcctgcggcgttaattactgcgcttaatcagcaaggctatcagctggggttattctcatcagatggctttaccagcccgctgtatcgtcaggcattgttgtcagatttctcgatgccgagtgtacgcacccaatccgacgaacagaccgccacgcagtggatcaactggctgggccgctacgcacaagaagataaccgctggttctcgtgggtctctttcaatggcacaaacattgacgacagcaatcagcaggcatttgcacggaaatatagccgggcagcaggcaatgtcgatgaccagatcaaccgcgtgctcaatgcactgcgtgattctggcaaactggacaatacggtggtgattatcactgccgggcggggtattccgctgagcgaagaggaagaaacctttgactggtcccacggtcatctgcaggtgccattagtgattcactggccaggcaccccggcgcagcgtattaatgcgctgactgatcataccgatctgatgacgacgctgatgcaacgcctgctacatgtcagcacacctgccagcgaatattcgcaaggtcaggatttgttcaaccctcaacgccgccattactgggttaccgccgcggataacgatacgctggcaattaccaccccgaaaaagacgctggtgctgaacaataacggtaaataccgcacttacaacttacgtggtgaaagagtgaaagatgaaaaaccacagttaagtttgttattgcaagtactgacagacgagaagcgttttatcgctaactga

SEQ ID NO: 27937 - DNA, 228 bp, Escherichia coli
atgccacaaatttcccgctacagtgatgaacaggttgaacaattgctcgcagagctgctcaacgtactggaaaaacataaggctccgaccgacctttccctgatggtgttaggcaacatggtcactaaccttatcaacaccagcattgccccggcccaacgccaggcaattgccaactcttttgcccgcgccttacagtcctctatcaacgaagacaaagcgcactaa

SEQ ID NO: 27938 - DNA, 1008 bp, Escherichia coli; identical to SEQ ID NO: 520

SEQ ID NO: 27939 - DNA, 285 bp, Escherichia coli
atgtttactatcaacgcagaagtacgtaaagagcagggtaagggtgcgagccgccgcctgcgtgccgctaacaagttcccggcaatcatctacggtggcaaagaagcgccgctggctgtcgaactggatcacgacaaagtcatgaacatgcaagttaaagctgaattctacagcgaagttctgaccatcgttgttgacggtaaagaaatcaaagttaaagctcaggacgtacagcgtcacccgtacaaaccgaagctgctgcacatcgacttcgttcgcgcttaa

SEQ ID NO: 27940 - DNA, 1761 bp, Escherichia coli
atgatttttacactccgcccatatcagcaagaagccgtggatgccacgctcaaccattttcgtcgtcataaaacccctgccgtaatcgtgctgcccaccggtgcaggtaaaagcctggtgatagcggaactggcgcggctggcgcgtggtcgcgtgctggtgttggcacacgttaaagaactggtggcacaaaaccatgaaaaatatcaggcgctggggctggaagccgatatttttgccgccgggctaaagcgcaaagagagccacggtaaagttgtatttggcagcgtgcagtcggtcacccgtaatcttgatgcctttcagggtgaattttcgctgttgattgtcgatgaatgccaccgtattggtgacgatgaagagagccagtatcagcaaatcctcactcacctgaccaaagtgaatccccacttacgcctgctggggctgactgccacgccttttcgactgggcaaaggctggatttatcagttccattatcacggcatggtacgcggcgatgagaaagcccttttccgtgactgcatttatgagctgccgctgcgttatatgattaaacacggctatctgacgccgccagaacggctggatatgccagtcgtgcaatacgatttcagccgcttgcaggcacagagtaacggactgttcagcgaagccgatctcaaccgcgagctgaaaaaacagcaacgcattacgccacacatcatcagccaaatcatggagtttgctgcaacgcgcaaaggggtgatgattttcgccgcgacggtcgaacacgcaaaagagattgtgggattactgcctgccgaagatgcagcactgattactggcgacacacccggctctgagcgcgatgtgttaattgatgattttaaagcccagcgttttcgctatctggtcaacgtcgcggtactgaccaccggatttgacgccccgcacgtcgatcttatcgccattctgcgccctaccgaatcagtgagtctttaccaacaaattgtcgggcgcggtctgcgcctggcccccggcaagactgattgcttaattcttgattatgcgggtaaccctcacgatctctacgcgccggaagttggtacaccgaaaggcaaaagtgacaacgttccggtacaggttttctgccctgcctgcggttttgccaacaccttttgggggaaaacgaccgccgacgggacattgattgaacactttggtcgtcgctgtcagggatggtttgaagatgacgacggacatcgcgaacagtgtgacttccgtttccgttttaaaaattgcccgcaatgtaacgcagaaaatgatattgccgctcgccgctgccgcgaatgtgacacggtactggttgatccggatgatatgttaaaagcggcgctacgactgaaagacgcgctggtattacgctgtagcggcatgtctttgcagcatggacacgacgagaaaggcgaatggttgaaaatcacctattacgatgaagacggcgcggatgtgagtgagcgtttccgtctgcaaacgcccgcccagcgtaccgccttcgagcagctttttatccgcccgcatacgcgcacaccgggcatccctctgcgctggatcaccgccgccgatatcctcgcccagcaagcattactgcgacacccggattttgtcgtcgcccgcatgaaaggtcagtactggcaagtgcgtgaaaaagtgttcgattacgaaggtcgttttcgtcgggcgcacgaattacgcggttaa

SEQ ID NO: 27941 - DNA, 696 bp, Escherichia coli
atgcgacttgataaatttatcgcacagcaactcggcgttagccgtgctattgccgggcgtgaaatccgcggcaatcgtgtcaccgtcgatggcgaaatcgtccgtaatgcagcgttcaaactgctccctgaacatgatgtcgcttacgatggcaacccgctggcgcagcaacacggtccacgttacttcatgctcaataagcctcagggctatgtttgctccacggacgacccggatcacccaacggtgctctattttcttgatgaaccggtagcgtggaaactgcacgctgcagggcgtctggatatcgataccaccggtctggtactaatgacagatgatggtcagtggtcgcaccgcattacttccccgcgccatcattgcgagaagacctatctggtaacgctggaatcacccgtagctgacgatacggcagagcaatttgctaaaggcgtgcagctgcataacgaaaaagatctcactaagccggcggtgctggaagtgattaccccaacgcaggttcgtctgaccatcagcgaagggcgttatcatcaggtgaaacgcatgttcgccgccgtgggtaaccatgtggttgagctgcatcgtgaacgtattggcggcattacgctggatgctgatttagcccccggtgaatatcgtccgttaactgaagaagaaattgccagcgtcgtctaa

SEQ ID NO: 27942 - DNA, 1191 bp, Escherichia coli
gtgaccacccgacagcattcgtcgtttgctattgtttttatccttggcctgctggccatgttgatgccgctgtcgattgatatgtatctgcctgcgctaccggtaatttcagcgcagtttggtgtaccggcgggcagtacgcagatgaccctgagtacttatattctgggctttgcgttggggcagttaatctacgggccgatggcagacagcttcgggcgtaagccggtggtgctcggcggtacgctggtgtttgccgccgccgcggtggcgtgtgcgttggcaaacaccatcgatcagctgattgtgatgcgtttcttccacgggctggctgcggctgcggccagcgtggttatcaacgctttgatgcgtgatatctacccgaaagaagagttctcgcgaatgatgtcgtttgtcatgctggtgacgaccattgcaccgctgatggcaccgatagttggcggctgggtgctggtgtggctgagctggcattacatcttctggatcctcgccgtggcggcgattctggcttcggcaatgatcttctttctgatcaaagaaaccttaccgccggagcgtcgccagccttttcacattcgtaccactattggtaactttgcggcgctgttccgtcataagcgtgtcctgagttatatgctggccagcggtttcagctttgccgggatgttctcattcttaagcgccggaccgtttgtctacattgaaatcaaccacgtcgcgccggaaaactttggttattactttgcgctaaacattctttttctgttcgtgatgaccatctttaacagccgcttcgtccgccgtattggcgcgttaaatatgttccgctcggggttgtggatacagtttattatggcagcgtggatggtcatcagtgcactgctggggctgggattctggtcgctggtggttggcgttgcggcgtttgtgggctgcgtgtcgatggtgtcatccaatgcgatggcggtcattcttgatgagtttccccatatggcgggaacggcatcttcgctggcaggaaccttccgtttcggcataggggcaattgttggcgcattactttctcttgcgacctttaactctgcatggccgatgatttggtcaattgcattctgcgcaaccagctccattctcttctgtttgtacgccagtcggccgaaaaaacggtga

SEQ ID NO: 27943 - DNA, 1788 bp, Escherichia coli
atgacgcaaactctgttagcgattgaaaatttgtcggtgggttttcgccatcagcaaaccgtacgtacagtagtcaatgatgtttcactacagattgcggctggcgaaacgctggcgctggtaggtgagtctggttcaggtaagagcgttaccgcgctgtcaattttacgcctgctcccttgcccgccggttgaatatctctccggcgatattcgttttcatggcgaatcgctgcttcatgccagcgatcaaacgttgcgcggtgtacgcggtaataagatcgccatgatttttcaggagccgatggtgtcgttaaatccattacataccctggaaaaacagctttatgaagtactttcactccaccgcgggatgcgtcgggaagcggctcgtggcgaaattcttaactgccttgatcgcgtcggtatccgccaggcggcaaaacggctgacagattatccgcatcagctctccggcggcgaacgccagcgggtgatgattgcgatggcgctgttaacgcgaccggaattattaattgccgatgaaccaaccaccgcgctggacgtctctgtccaggcgcagattttacagctgttgcgcgaactgcaaggcgagctgaatatgggtatgctgtttattactcataacctcagcattgtcagaaaactggcccaccgcgtggcggtaatgcaaaacggtcgctgtgtcgagaaaaataacgccgctacgctatttgcctcacccactcatccttacacacaaaagctactcaacagtgaaccatctggcgacccggtgccattgccagaacccgcctcaacgttgctagatgttgaacagcttcaggttgccttccccatccgcaaagggattttgaagcgcattgtggatcataatgtggtggtgaaaaacatcagttttacgctacgggcgggtgaaacactgggtttagtgggcgagtccggttccgggaaaagcacgacgggactggcgctgctgcgactgattaattctcatggcagcatcgtctttgacggtcagccactgcaaaatttaaatcgccgccagctgttacctattcgtcatcgcattcaggtggtatttcaggatccaaactcctcactcaacccacgactcaacgttttgcaaattattgaggaaggcttacgggttcaccagccgacgctttctgccgcacaacgcgaacaacaagtgatagccgtgatgcatgaagtgggattagatcctgaaacacgccaccgttatccggcggagttctctggtggtcagcggcaacgtattgcgattgccagggcgttaattcttaagccctcgctgatcattcttgatgaaccaacatcatcactcgacaaaacggtgcaggcgcaaatattgacgctattgaaatcattgcaacaaaagcatcaactggcctatttgtttatcagccacgatttgcgcgttatgtcatcaggttatcgtactgcgacaaggggaagtagtggaacaaggaccgtgcgcgcgcgtgtttgccgcaccgcagcaggagtatacgcgtcagctactggcgttgagctgacgcttaaaaaggattgtagtttgaaaagggttcggcaattgccacaccaaaatttttcaatcggcatgttgcagcaaattcgtcctggcgatttacaaacaggcacggctcaccttcacactccagcaccgaacatggaacttcgatgtcgcttaacgcctggcttagtttgtacatcaccgaccatgcattatcaccatccgggctaa

SEQ ID NO: 27944 - DNA, 1026 bp, Escherichia coli
atgtcgcgactcagccccgtcaatcaggcccgttgggcgcgttttcgccataaccgtcgcggctactggtcgttatggattttcctcgtcttgtttggtttgagtttgtgttctgaacttatcgccaacgataaaccgttgctggtgcgttatgacggcagttggtatttcccgttgttgaaaaactacagcgaaagcgattttggcggcccgctggcaagtcaggctgattatcaggacccgtggctgaaacaacggctggaaaataacggctgggtactgtgggcaccgattcgctttggtgctaccagtatcaactttgctaccgataagcccttcccttctccaccctcccggcaaaactggctgggaacggatgccaatggcggcgatgtgctggcacgcattctctatggcacgcggatctcagttctgtttggcctgatgctgaccctctgctccagcgtgatgggcgtgctggcgggggcgctacaaggctattacggtggtaaagtcgatctctgggggcaacgttttattgaagtatggtcggggatgccgacgctgtttttgattattttactttccagcgtcgtacagcctaacttctggtggctgttggcaattaccgtcttgtttggctggatgagtctggtcggtgtggtgcgggcggagtttttacgtacccgtaatttcgactacatccgcgcggcgcaggcgcttggcgtcagcgatcgcagtatcatcctgcgtcatatgttgccaaatgccatggtcgctaccctcacttttttaccgtttattttatgtagttcgataaccaccctgacctcactcgatttcctcggcttcggtctgccgctcggttcaccgtcactcggtgaactgctgttacaagggaaaaataaccttcaggccccgtggcttgggatcaccgccttcttatcggtggcgatattgttgtctttgttgatctttattggtgaagccgtccgcgacgcatttgatcctaataaggcggtgtag

SEQ ID NO: 27945 - DNA, 1095 bp, Escherichia coli
atgggcgcttatctgattcgccgtctgttgctggtgatcccaacgttatgggcgattatcactatcaactttttcatcgtgcaaattgcgcctggcggtccggtcgaccaggccatcgccgccattgagtttggtaatgccggagtattacccggcgcaggcggtgaaggtgttcgcgccagccatgcgcaaacgggcgtcggcaatatcagcgacagtaattaccgtggcggacgcggattagatccagaagtgatcgccgagatcactcatcgctacggtttcaataagccgatccacgaacgttacttcaaaatgctctgggactacatccgttttgattttggcgacagcctttttcgcagcgcctcggtgctgacgctgattaaagacagtctgccggtctccatcaccctcggattgtggagcacgctgattatctatctggtgtcgattccgttaggcattcgcaaagctgtttataatgggagccgttttgacgtctggagtagtgcatttatcatcatcggctacgccattccggcctttttgtttgccatcctgctgattgtcttcttcgcgggcggcagctatttcgatctgttccctctgcgcggcctggtttccgctaactttgattcgctgccgtggtatcagaaaatcaccgattatctgtggcatatcacgctgccggtgctggcgacagtgattggcggctttgcggctctgaccatgctgacaaaaaactcattccttgatgaagtgcgtaagcaatacgtggtgacggcacgtgcgaaaggggtaagtgaaaaaaatattctctggaaacatgtgttccgcaacgccatgctgctggtgattgccggttttccggcgacgtttatcagcatgttttttaccggctcgctgctgattgaggtgatgttttcactcaatggtcttggcttactgggctacgaagcgaccgtctcgcgcgattatcctgtaatgtttggtaccttgtatattttcaccctgattggcctgctgctgaatattgtcagtgatatcagctatacgctggtcgatccgcgtatagattttgagggacgttaa

SEQ ID NO: 27946 - DNA, 1815 bp, Escherichia coli
atgattgtgcgcatactgctgctgtttatcgctctgttcacctttggtgcgcaggcgcaggctatcaaggaaagctatgcctttgccgtactgggcgaaccccggtacgcatttaatttcaaccattttgattatgtgaaccccgccgcgccaaaaggtgggcaaataacgttgtctgccctcggcaccttcgataatttcaaccgctatgcactacgcggcaacccgggcgcacgcaccgagcagctgtacgacacgctatttacgacttccgatgacgaaccaggcagttattacccgctgattgctgaaagcgcacgctatgctgacgattattcctgggtggaggtcgctattaatccgcgcgcccgttttcatgatggttcgcccattactgcccgcgatgtagagtttacttttcaaaaatttatgaccgaaggcgtgccgcaatttcgtctggtctacaaaggcaccaccgtcaaagccattgcgccgttaaccgtgcgcattgagttagctaaacccggcaaagaagatatgctgagtctgttttcgctgccggtatttccagaaaagtactggaaagatcacaaacttagcgacccgctcgccacgcctccgcttgccagtggtccgtaccgcattacgtcctggaaaatggggcaaaatattgtctattcccgcgtgaaagattactgggcagcaaacttaccggtaaaccgtggacgctggaatttcgacaccattcgctacgattattacctcgatgataatgtcgcctttgaagcgtttaaagccggtgcctttgatttgcgtatggaaaacgacgccaaaaactgggccacgcgctatagcggtaaaaatttcgataaaaaatacatcatcaaagatgagcaaaagaacgaatcagcccaggatacgcgctggctggcgtttaatatccaacgtccgatattcagcgatcgccgggtccgggaagcgatcactctcgcctttgactttgaatggatgaacaaggcgttgttttacaatgcctggagtcgcacgaacagttattttcagaataccgaatatgcggccagaaattaccccgacgccgcggaactggtgcttctggcaccaatgaaaaaagatctaccgccagaagtcttcacgcaaatctaccagccgccggtatccaaaggcgatggctacgatcgtgacaacctgttaaaagccgacaaacttctcaacgaagcaggctgggtgctgaagggtcagcaacgcgttaatgtcacaacgggtcagccactcagctttgaattattgcttcccgcaagcagcaatagtcagtgggtattgccgttccagcacagcctgcaacggctgggtatcaacatggacattcgcaaggtggataactcgcaaatcaccaaccgcatgcgcagtcgcgactatgacatgatgccgcgcgtatggcgggcgatgccgtggcccagttccgatttacaaatttcctggtcatcggaatatatcaattccacttataatgcccccggcgtgcaaagcccggttatcgactcgctgatcaaccaaattattgccgcgcagggaaataaagaaaaattactgccgttgggacgagcactggatcgcgtattaacgtggaattattacatgctgccaatgtggtacatggcggaagaccgtctcgcctggtgggataaattctcccaacccgctgtacgccctgtttacagcctgggtattgatacctggtggtatgacgttaataaagcgacgaaactgccgtcagccagacaacagggagagtag

SEQ ID NO: 27947 - DNA, 1557 bp, Escherichia coli
atgtttatacgcgctcccaattctggacgtaagctcctgcttacctgcattgttgcaggcgtgatgattgcgatactggtgagctgccttcagtttttagtggcctggcataagcacgaagccaaatacgacacactgattaccgacgtacaaaagtatctcgatacctattttgccgaccttaaatccactactgatcggctccagccgctgaccttagatacctgccagcaggctaaccccgaactgaccgcccgcgcggcgtttagcatgaatgttcgtacgtttgtgctggtaaaagataaaaaaacattctgttcatctgcgaccggtgagatggacattccactcaatgaattgattccggcgctcgacattaataaaaacgtcgatatggcgatcttacccggcacgccgatggtgccgaacaaacccgcaatcgtcatctggtatcgcaaccctttgctgaaaaatagcggcgtgtttgccgctctgaatctcaacctgacgccttcactcttttatagttcacggcaggaagattacgatggcctagccctcattattggtaatactgcgctatctaccttttcttcacgtttgatgaacgttaatgaattaaccgacatgccggtccgtgaaactaaaattgcgggcattcctttgaccgttcggctttatgcagatgactggacatggaacgatgtgtggtacgcatttttactgggtggcatgagtggaactttcgttggacttctctgctattacctgatgagtgtgcgtatgcgcccaggcagagaaatcatgaccgccatcaagcgcgaacaattttacgtggtgtatcaaccggtggttgatacacaagctttgcgggtaacgggcctggaagtactgctacgctggcgacatccagtagcaggtgaaatccccccggatgccttcattaactttgccgaagcgcaaaagatgattgtgccactgactcagcacctgtttgagttgattgcccgcgatgccgcagaattagaaaaagtactgccggtaggcgtcaaatttggcattaacattgcgccagcccacttgcacagcgaaagctttaaagcggatatccagaaactgctcacttccctgcccgcacaccatttccagattgtgctggaaattaccgagcgcgatatgctgaaagagcgagaagccacacaactcttcgcctggctgcattcggtcggcgtagaaattgctattgatgacttcggcaccgggcacagcgcgcttatctatcttgagcgttttacgctcgattatctgaaaattgatcgtggatttatcaacgccatcggtacggaaacgatcacttcacccgtacttgacgcggtgctgacgctggcgaaacgtctcaatatgctgacagttgctgaaggggtcgaaacgccagaacaggcacgatggctaagcgaacgcggcgttaatttcatgcaaggctactggattagtcgcccgttaccgctggacgattttgttcgctggctgaagaaaccgtatacgccgcagtggtaa

SEQ ID NO: 27948 - DNA, 567 bp, Escherichia coli; identical to SEQ ID NO: 509

SEQ ID NO: 27949 - DNA, 714 bp, Escherichia coli
atgattaaaaatttgccgcaaatagtgttgttgaatattgtcggcctcgcgctgtttctttcctggtatattcccattaatcatggattctggttgccgattgatgcggatattttttatttctttaatcagaaactggtcgaaagtaaggcctttttgtggctggttgcattgaccaacaatcgcgctttcgacggttgttcactgctggcgatgggaatgttgatgctgagtttctggctgaaagaaaacgccccaggcagacgacgtatcgtgattattggtctggtcatgctattaactgcagtggtattaaaccagctgggtcaggcattaattcctgtaaaacgggccagcccaacgttgacttttaccaatattaaccgcgtcagcgaactgctctctgttcccacgaaagatgcctcacgagatagctttcccggcgatcacggtatgatgctgcttattttttcggcattcatgtggcgttatttcggcaaagttgcaggccttatcgcccttattatttttgtggtttttgcgtttcccagagtaatgattggcgcacactggtttactgacatcatcgtcggttccatgaccgtgatattgatcggtttgccctgggtgttgctgacgccattaagtgatcgattaatcaccttttttgacaaatcacttcctggaaaaaacaaacatttccaaaacaaataa

SEQ ID NO: 27950 - DNA, 987 bp, Escherichia coli
gtgaccagaaccaacctcatcaccggttttctcggcagcgggaaaactacgtcgattcttcatctgttagcccataaagatcccaacgaaaaatgggcggtactggttaatgaatttggggaagtcggaattgatggtgctttgctcgccgatagcggcgcactgctgaaagagatccccggcggttgcatgtgctgcgttaatggtttacccatgcaggtagggttgaataccttactgcgtcagggaaaaccagaccgcttgttgatagagccgaccgggctgggccatccgaaacagctcctcgatctcttaaccgcacccgtctatgaaccgtggatagatctgcgcgccacgttgtgcattctcgatccacgcctgttgctggacgaaaaaagcgccagcaatgaaaacttccgtgaccaactggctgccgcagacattattgtcgccaataaatccgaccgtgcgacgcccgaaagtgagcaagcgctagagcgctggtggcagcaaaatggtggcgatcggcaattaattcacagcgagcatggaaaaattgacggtcatcttctggatttgccgcgtcgcaatttagccgagttgcccgccagcgccgcgcattctcatcagcatagcgtgaaaaaagggttagcagcgttaagcctgccagagcatcaacgctggcgtcgcagtctgaacagcggacaagggcatcaggcctgtggctggatattcgacgctgatacggtattcgacaccattggtattctggaatgggcgcgacttgcaccggtggaacgcgtcaaaggcgtgctgcgtattcccgaagggctggtgcgaatcaaccgtcagggcgatgacctgcacattgaaacgcaaaacgttgcgccaccggacagtcgtattgagctgatttccagcagcgaagctgactggaatgccttgcagagcgcgctgttgaagcttcgtttagcgactaccgcgtaa

SEQ ID NO: 27951 - DNA, 1467 bp, Escherichia coli
atgaatacaatcgcctccattacgctcccgcatcatgtacacgctccacgctacgatcgacagcagttgcaatcacgtatcgttcattttggctttggagcctttcaccgcgcacatcaggcgttactgaccgatcgtgtgctgaatgcccagggcggcgactgggggatctgtgagatcagcttgttcagcggcgatcaactgatgagccagctccgcgcacagaaccatttatataccgtgctggagaaaggtgcggacggcaatcaggcgataattgtcggtgccgttcacgactgcctgaatgcaaaactggattccttagcggcaattattgagaaattttgcgagccacaggtggcaattgtttccctgacgattaccgaaaaaggctattgtattgacccggccaccggtgcactcgacaccagcaatccgcggattattcacgatcttcaaaatcctgaagaacctcactccgcgccgggtattctcgtcgaagcactgaaacgacgccgtgaacgcggccttgcaccgtttaccgtactctcctgcgacaatattcccgacaatggccatgtggtgaaaaacgcggtgctggggatggcggaaaaacgttcaccagaactcgccgggtggataaaagaacacgtcagttttccgggaaccatggtcgaccgtattgttccggcagcaaccgacgaatcactggcagaaatcagccagcatctgggggtgaatgatccctgcgcgattagctgcgaaccgtttatccagtgggtggtggaagataacttcgtcgctgggcgtcctgcctgggaagtcgctggtgtacaaatggtgaatgatgtcctgccatgggaagagatgaaactgcgtatgcttaatggcagccactcttttctcgcttatctgggttacctctcaggattcgcgcacatcagtgattgcatgcaggatcgcgcatttcgccatgccgccagaacattaatgctggatgagcaagcgccgacactgcggattaaagatgtcgatttaacacaatatgcggataagttaattgcacgttttgctaatccggcactgaaacataagacctggcaaatcgcgatggatggcagccagaaattaccgcaacgcatgctggcaggtattcgcatacatctggggcgcgaaacggactggtcgttgctggcattaggcgttgcaggctggatgcgttacgtcagcggcgttgatgatgccggaaatgccattgatgttcgcgatccgcttagcgataaaattcgtgaacttgttgcgggcagcagcagtgaacaacgcgtaaccgccctgctttccctgcgtgaaattttcggtgatgatctgccagataacccgcattttgtgcaggccatcgaacaagcctggcaacaaatcgcacaattcggcgcgcatcaggcgctattaaacaccctcaaaatttaa

SEQ ID NO: 27952 - DNA, 573 bp, Escherichia coli; identical to SEQ ID NO: 505

SEQ ID NO: 27953 - DNA, 255 bp, Escherichia coli; identical to SEQ ID NO: 504

SEQ ID NO: 27954 - DNA, 1182 bp, Escherichia coli
atgcataactcccccgcagtcaccagcgcgaaatcgtttgacctgacctcgacggcgtttttaatcgttgcctttctcaccggtattgcgggcgctctgcaaaccccgacactcagtatttttcttactgatgaagtacatgcccgtccggcgatggtgggattcttctttaccggcagcgctgtcattgggattctggtgagtcagtttctcgccgggcgctctgataagcgcggcgatcgcaaatcgctgattgtcttttgctgcctgttaggcgtgctggcctgcaccctttttgcctggaatcgcaactactttgttttgctattcgttggcgtctttcttagcagctttggctcaaccgctaacccgcaaatgtttgcccttgcccgtgaacatgctgacaaaaccggacgtgaggcggtgatgttcagctcttttttacgcgctcaggtttcactggcatgggtcattggcccaccgctggcttatgccttagcgatgggtttcagctttacggtaatgtatctgagcgcagcggtagcgtttattgtttgcggcgtgatggtgtggctgtttttgccgtcgatgcaaaaagagcttccgctggcgaccggcacggttgaagcgccgcgccgtaaccgtcgcgatacgttgctgctgtttgtcatttgtacattgatgtggggctcgaacagcctgtacatcatcaacatgccgctatttattatcaacgaactgcatcttcccgagaaactggccggtgtgatgatggggaccgccgcagggctggaaatcccgaccatgttgatcgccggatattttgccaaacgtctgggtaagcgcttcttaatgcgcgttgctgccgtgggtggcgtctgtttttacgcaggaatgctgatggcgcattcacctgtcattctgttgggcttgcagctgctaaatgctatttttattggcattctgggcggcatcgggatgctctattttcaggatttgatgcccggtcaggcaggttcagccaccacgctctataccaacacgtcgcgcgtgggctggatcatcgcaggatcagtggcgggcatcgtcgccgagatctggaattatcacgctgtgttctggtttgcgatggtgatgattatcgctactctgttttgcttactgcgaattaaagatgtttaa

SEQ ID NO: 27955 - DNA, 1131 bp, Escherichia coli
atgttccagttatccgtacaggacatccatccgggcgaaaaggccggagacaaagaagaggcgattcgccaggtcgctgcggcgctggtgcaggccggtaatgtagctgaaggctacgtcaatggcatgctggcgcgcgaacagcaaacctcaacgttcctcggcaatggtattgctattccacacggcactaccgacacccgcgatcaggtgctgaaaaccggcgttcaggtatttcagttcccggaaggcgtcacctggggtgacggccaggtagcgtacgtggcgatcggtattgctgccagctcggatgaacatctgggcctgctacgccagctgacccacgtactgagcgatgattccgttgctgaacaactgaagtcagcaacaacagcagaagaacttcgcgcattgctgatgggcgaaaagcagagtgagcagctgaagctcgacaacgaaatgctgacgctggatatcgtcgccagcgatctgctgactcttcaggcgctgaacgctgcgcgtctgaaagaagcgggggcagttgacgccactttcgtcaccaaagccatcaatgaacaaccgctgaacctcgggcagggtatctggctgagcgatagcgccgaaggcaatctgcgtagcgcgattgcggtaagccgtgcggcaaatgcttttgatgtggacggcgaaacggcagccatgctggtgagtgtggcgatgaatgacgatcagcccatcgcggttcttaagcgtctcgctgatttgttgctcgataataaagctgaccgcttgctgaaagcggatgcggcaacgttgctggcgctgctgaccagcgatgatgcgccgaccgacgacgtgttaagcgcggagtttgtggtgcgcaatgaacacggcctgcatgctcgtccaggtaccatgctggtcaataccattaaacaatttaacagtgatattaccgtgacaaaccttgatggcaccggcaaaccggcaaacggacgtagtctgatgaaagttgtggcacttggcgttaagaaaggtcatcgcctacgctttaccgcccagggtacagatgctgaacaggcgctgaaagccattggcgacgctatcgctgctggtcttggggagggcgcataa

SEQ ID NO: 27956 - DNA, 939 bp, Escherichia coli
atgagcagacgtgttgctacgatcacccttaatccggcttatgaccttgttggtttctgcccggaaattgaacgcggcgaagtgaacctggtgaaaaccaccggtctgcatgcggcgggtaaaggcatcaacgtggccaaagtattaaaagacctgggaattgatgtcaccgttggcggcttcctgggtaaagacaatcaggatggttttcagcaactgttcagcgagctgggcattgccaaccgtttccaggttgtacaggggcgcacccgaattaacgttaagctgacggaaaaagacggcgaagtgaccgacttcaacttctcgggttttgaagtcacccccgccgactgggaacgctttgtgactgattctctgagctggctcggtcagttcgatatggtctgtgtcagcggaagcttaccgtcaggcgtcagcccggaagcgttcaccgactggatgactcgcctgcgtagtcagtgtccttgcattatctttgatagtagccgtgaagcgttagtagcaggtttgaaagcggcaccgtggctggtgaaacctaaccgccgcgagctggaaatctgggcaggccgtaaactgcctgaaatgaaagatgtgattgaagctgcgcatgcgctgcgtgaacaaggtatcgcgcatgtcgttatttcactgggtgccgaaggcgcgctttgggttaatgcctccggcgaatggatcgccaaaccaccgtcagtcgatgtcgtaagcaccgttggcgcaggggattctatggttggtggcctgatttatggcttgctgatgcgtgaatccagtgaacacacactgcgtctggcgacagctgttgcagccctggcggtaagtcaaagcaatgtgggtattaccgatcgtccgcagttggccgcaatgatggcgcgcgtcgacttacaaccttttaactga

SEQ ID NO: 27957 - DNA, 1692 bp, Escherichia coli
atgaaaacgctgctgattattgacgctaatctcggtcaggcacgcgcctatatggcgaagaccctgctgggcgcggcggcgcgaaaagcaaaactggaaatcatcgacaatccgaacgacgctgaaatggcgattgttctcggtgattccatcccgaacgacagcgcgctgaacggtaaaaatgtctggctgggcgatatttcccgggcagttgcgcaccctgagctgttcctgagtgaagccaaaggccatgcgaaaccttacactgcgccggtcgctgcgacagcaccggttgctgccagcggtccgaaacgcgtagttgcggtgactgcttgcccgactggcgtagcacacacctttatggcggctgaagccattgaaaccgaagcgaaaaaacgtggctggtgggtgaaagttgaaacccgtggttctgttggcgcgggtaatgcaatcacccctgaagaagtcgcagcagcggatctggtgattgtggcggcagatatcgaagtagatctggcgaaatttgctggtaaaccgatgtatcgcacctctaccggtctggcgctgaagaaaactgcgcaggaactggataaagcggttgctgaagcaacgccgtatgaaccggcgggcaaaactcaaacagcgaccactgaaggtaagaaagagagtgcaggcgcttaccgtcacttgctgacgggcgtctcttacatgctgccgatggttgttgcaggtggtctgtgtatcgcgctttcttttgcttttggtatcgaagcgtttaaagagccgggtacgttggcagcggcgctgatgcagattggtggtggttcagcctttgcgctgatggtgccggtactggcaggttatattgccttctccattgccgatcgtccgggtctcacgccgggtctgattggcggtatgctggcggttagcaccggttctggcttcattggtggtattattgcgggcttcttggcgggttacattgcgaagttaatcagtacgcaactgaaactgccacagagtatggaggcactgaaaccgatcctgatcattccgctaatttccagtctggtggtcggtctggcgatgatctacctaatcggtaaaccggttgctggcattctcgatgggttgactcactggctgcagaccatggggactgcgaatgcggttctgctgggggcgatcctcggtggcatgatgtgtactgacatgggcggtccggtaaacaaagcagcgtacgcattcggtgtgggtctgctgagtactcaaacctatggcccgatggcggcgattatggcggcaggtatggtgccaccgctggcaatgggtctggcaacaatggtggcgcgtcgcaaattcgacaaagcgcagcaggaaggtggcaaagccgctctggtacttggtctgtgctttatttcggaaggtgcaattccgtttgctgctcgtgatccgatgcgtgtgctaccgtgctgtatcgttggtggggcgctgactggcgcaatctcaatggcgattggtgcaaaactgatggcaccacacggtggtctgtttgttctgctgatccctggcgctattacgccggtattgggttacctggtagcaattattgccggtacgctggtggcgggtttggcctatgccttcctcaaacgcccggaaacacaaatagtagaaaaaaacgcataa

SEQ ID NO: 27958 - DNA, 942 bp, Escherichia coli; identical to SEQ ID NO: 4585

SEQ ID NO: 27959 - DNA, 939 bp, Escherichia coli
atgtctgaattaactctgtcccctgaattattacaaatatccgctgaagtacaggatgctttaaaaaataaaaaaccggttgttgcgctggaatcgaccataatttctcacggaatgccattcccacaaaatgcccaaaccgcaattgaagtagaagaaacaattcgtaaacagggcgcagtaccagccactatcgccattattggcggtgtgatgaaagtgggcttaagtaaagaagaaatcgaattgctgggccgtgaaggacataacgtgacgaaagttagtcgtcgtgatttaccttttgtcgttgctgcagggaaaaatggcgcgactaccgttgcatcaaccatgattattgcagcactggctgggattaaagtttttgcaaccggaggtattggtggtgtgcatcgcggagcggaacataccttcgatatttctgccgatttacaggaactggcaaataccaatgtcactgttgtttgtgcgggggcaaaatctattctcgatttaggattaacaacagaatatttagaaaccttcggtgtaccgttaattggttatcagacaaaagcgctgcctgcgtttttctgccgaaccagcccatttgaagtcagcattcgtctcgacagtgcccgcgaaattgctcgcgcgatggcagtgaagtggcaaaccggtttgaacggcggcctggtggtagcgaacccgatcccggaacagtttgcgatgccagaagaaaccatcaatgcagcaattgatcaagccgttgctgaagccgaagaacagggtgttattgggaaagagagtacaccgttcctgctggcgcgtgttgcggagctaaccggcggtgatagcctgaaatccaatattcaactggtctttaataacgccattctggcgagcgaaattgccaaagaatatcagcgtctcgtgggttaa

SEQ ID NO: 27960 - DNA, 1251 bp, Escherichia coli
atggatataatgagaagtgttgtggggatggtggtattgctggcaattgcctttgtgttgtcggtaaataaaaagagcatcagcttgcgcacggttggggctgcgctgctgctgcaaattgccattggtggcatcatgctctattttcccccgggaaaatgggcagtagagcaggcggcattaggcgtccataaagtgatgtcctacagtgacgcaggaagtgcctttatttttggttcgctggtcggtcccaaaatggatgttctgtttgacggtgcgggctttatcttcgcctttcgcgtactcccggcgattattttcgttaccgcgcttatcagcttgctgtactacattggcgtaatggggctgctgattcgtattcttggcagtatttttcagaaagccctcaacatcagcaaaatcgaatcttttgtcgcagtcaccactattttcctcgggcaaaatgagatcccggcgatcgttaaaccttttattgatcgcatgaatcgcaacgagctatttacggctatttgtagcggcatggcgtctattgcgggttcgatgatgattggctatgccggaatgggcgtgccgattgactatttgttagccgcttcgctgatggctattcctggcggtatcctgtttgcacgtattcttagtccggcgacggaaccttcgcaagttacgtttgaaaatctgtcgtttagcgaaacaccgccaaaaagcattattgaagctgcggcgaacggtgcaatgactgggctgaaaatcgccgccggtgtggcgacggtggtaatggcgtttgtcgcaattattgcgctgatcaacggcattattggtggagttggcggctggtttggttttgccaatgtctctctggaaagcattttcggctatgtgctggccccgttggcatggattatgggggtggactggagtgatgcaaatcttgccggaagtttgattgggcagaaactggcgattaatgagtttgttgcttatctcaatttctcgccctatctgcaaacgagcggcacgctggatgtcaagaccattgccattatctcgttcgccctctgtgggtttgcaaactttggttctatcggtgttgtcgttggagcgttttcggctatttcgccaaaacgcgcgccggaaatcgcccagcttggtttacgggcgctggcggcggcgacgctttccaacctgatgagcgcgaccattgccgggttctttattggtttagcttga

SEQ ID NO: 27961 - DNA, 699 bp, Escherichia coli
gtgaaagaaatccacaataatgatcttaagcagcaattgatgagtgaatctgcgtttaaggattgcttttcaacggatgtttcagccgatacgcggctgtttcattttttagcgcgtgactacattgtgcaggaagggcaacagccgtcctggctgttttacctgacgcgaggccgcgccaggctttacgtcacgcttgctaatggtcgcgtgtcgctgatcgatttctttgccgcgccctgttttattggcgagattgagttaatcgacaaagaccatgaaccgcgtgcagtgcaggctattgaagagtgttggtgccttgcgctccctatgaagcattaccgcccgttgttattaaacgacacgctatttttacgaaaactctgcgtcaccttaagtcataaaaattatcgtaatattgtttctttaactcagaatcaatcatttccgttagtgaatcgcctggcagcttttatattactctcgcaggaaggtgatctttatcacgaaaagcatacgcaagcggcagagtatttaggcgtttcttatcgacatcttttatatgttcttgcgcaattcattaatgacggtttattaattaaaagcaagaaagggtatctcattaaaaacagaaagcagttgtcaggactggcgctggagatggacccggagaataaattctccgggatgatgcagtaa

SEQ ID NO: 27962 - DNA, 942 bp, Escherichia coli
atggaaaagagaaaaattattctggattgtgatccgggtcatgatgatgctattgctataatgatggcggcgaaacatccggcgattgatttattaggtatcaccattgtagcgggtaatcaaaccctcgataaaacattaattaatggcctgaatgtttgccagaaactggagattaatgttccggtttatgcggggatgccgcagcccattatgcgtcaacaaattgttgccgataatattcacggtgaaaccggactggatggcccggtattcgagccgctgacccgccaggcagaaaacactcatgcggtgaaatatatcatcgatacccttatggcaagcgatggcgatatcactctggtgccggttggtccgttgtcaaacatcgcggtggcaatgcgtatgcaacccgcgatcctgccgaaaatccgtgaaattgttctgatgggcggtgcttatggtactggcaacttcaccccatctgctgagttcaacatctttgctgacccggaggccgcacgcgtggtgttcacctccggcgttccattagtgatgatgggcctcgatcttaccaaccagaccgtttgcaccccggacgtgattgctcggatggaaagggctggcggccctgccggagagctgttcagcgacatcatgaacttcactctcaaaacgcagttcgaaaactacggcctggctggcggcccggtgcacgacgccacctgcatcggttatttgattaaccctgatggcattaaaacccaggagatgtacgtcgaagtggacgttaacagtggcccttgctatgggcgtaccgtctgcgacgagctgggtgttcttggcaagcccgccaataccaaagtcggcatcactattgataccgactggttctggggattagtcgaagagtgcgtacgcggctacataaaaacccattaa

SEQ ID NO: 27963 - DNA, 1089 bp, Escherichia coli
atgaacgacagggaaaagcagattcttaaaattttacggcgtaacccgctgattcaacagaatgaaatcgccgatattctgcaaatcagccgctcacgtgttgccgctcatattatggatttgatgcgcaagggtttgattaaaggcaaaggatatatccttaccgagcaggattactgtgtggttgtgggtgcaatcaatatggatattcgcggaatggcggatatccgttacccgcaagcagcctctcatccaggttctgttcactgttccgcaggcggcgtcggacgtaatatcgcgcataacctggctctgcttggtcgggatgtgcatttaatttcagctattggcaacgatttttacggcgagacattactggaagaaacgcgccgcgcgggcgtgaacgtttcaaactgcattcgtctgcatggacacagcactgcaacttatctcgctatcgctaataagcaggaagaaactatcctggcaatcaatgacacacatattctgcaacagctaacgcctcaactgctcaatacttcacgggacttgattcgccatgctggtgtggtgctggctgattgtaatctcacacctgaagccctggagtgggtctttaccattgctgatgaaattccgatgtttgtcgataccgtttccgaatttaaagcgaacaaagtaaaaaactggtacagccggatccacactctgaaaccgacacaaaatgaactggaaattttgtgggggcaaccgattaaagacgacaacgatcgcatcagagctgtaaattcgctgcatcaacaaggtgttaaacgcatttttgtttatctgaaagatgaatctgtattttgcagcgataaggatggagaacaatttttgctgaccgcgccagcgcatacgacagtagacagttttggtgctgacgatggttttatggcgggcctggtatatagctttcttgaaggatacagtttccgcgacagcgcccgttttgcgatagcctgcgcggcaatttcacgcgccagcggcagcttaaacaaccctaccctgtctgccgataacgcgctttcattagtgccaatggtgtaa

SEQ ID NO: 27964 - DNA, 858 bp, Escherichia coli
atgaaatacattggagcgcacgttagtgctgctggcggtctggcaaatgccgcaattcgcgccgccgaaatcgacgcaaccgcgtttgccttgttcaccaaaaaccaacgtcagtggcgtgccgcaccgctcacgacgcaaaccatcgatgaattcaaagccgcctgtgaaaaatatcactacacatcggcgcaaattcttccccacgacagttatctgattaacctcggacatccggttgctgaagctctggaaaaatcgcgcgatgcctttatagatgaaatgcagcgttgcgaacagctggggctttctttgctcaacttccaccctggcagccatctgatgcagatttcagaagaggattgccttgcgcgtattgccgaatccatcaacattgcgctggataaaactcaaggtgtcaccgcggtgattgaaaacaccgccggtcagggcagtaacttagggtttaaattcgaacatctcgcagcgattatcgacggcgtggaagataaatcccgcgtcggcgtctgcattgatacctgccatgctttcgctgccgggtatgatttgcgtactcctgccgaatgcgagaaaacgttcgctgattttgcccgtattgtaggctttaagtatctgcgcgggatgcacctcaacgatgcgaaaagcacctttggcagccgcgttgaccgtcatcatagcctcggcgaaggcaatatcggtcatgatgcgttccgctggatcatgcaagacgaccgtttcgacggcattccgctgatccttgaaaccatcaacccggatatctgggcagaagagatcgcctggctgaaagcgcaacaaactgaaaaagcggtggcctga

SEQ ID NO: 27965 - DNA, 1050 bp, Escherichia coli
atgacgaatatcaccttacagaaacaacatcgtacactgtggcattttattccggggttagccctgagtgcagttatcaccggggtcgccctgtggggtggttccattcccgcggttgcgggtgccgggtttagtgccctcaccctcgcaatcttgttggggatggttttaggcaacaccatttacccgcacatctggaaaagctgtgacggtggtgtgctgtttgccaagcaatatttattacgtctgggtatcattctttatggcttccgtctgacgttctcgcaaattgccgatgtcggtatcagtgggatcatcattgacgtgttgacgctgtccagtaccttcctgctggcttgcttcctggggcagaaagtgtttggtctggataagcacaccagctggttgatcggtgccggtagcagtatctgtggtgctgccgcggtactggcgactgagccggtagtgaaagcagaagccagtaaagtaaccgtggctgttgcaaccgttgttatcttcgggaccgtcgcgattttcctctacccggcgatatatccgctgatgtctcaatggtttagtccggaaactttcggtatctacattggttctactgtgcacgaagtggcgcaggtggtggcggcaggtcatgccatcagcccggatgcagaaaacgcagcagttatttccaaaatgctgcgcgtgatgatgctggctccgttcctcatcctgctggcggcgcgtgttaaacagctgtctgggacgaacagcggcgagaaaagcaaaatcactattccgtggtttgccatcttgttcatcgtcgttgccatctttaactcgttccacctgttaccgcagagcgtggtgaacatgctggtaacgctggataccttcctgctggcaatggcgatggcggcgctgggtctgaccactcacgtcagcgcgctgaaaaaagccggggcgaaacctctgctgatggcactggtactgtttgcctggctgattgttggtggtggtgcgattaactatgtgattcaaagcgtcatcgcataa

SEQ ID NO: 27966 - DNA, 882 bp, Escherichia coli
atgcacatcaccctccggcagttggaagtttttgcagaagtattgaaaagtggatcaaccacccaggcgtcggtgatgctggcgttgtcgcaatcagcagtgagcgcagccttgaccgacctggaagggcagcttggcgttcaactgtttgatcgcgtggggaaaagactggttgttaatgaacacgggcggctgctctatccgcgagcgttggcactgcttgaacaggcggttgaaatcgaacaactgtttcgcgaagacaacggtgcgattcgtatctatgccagtagtaccatcggtaactacattctgcctgcagttatcgcccgttatcgccatgattatccgcagttgccgattgaacttagcgttgggaatagccaggacgtgatgcaagcggtgctggatttccgcgttgatattggctttattgaaggaccgtgccacagcactgaaatcatttctgaaccgtggctggaagacgagctggtggttttcgccgcgccgacttcgccgttggctcgtggtccggtcaccttagaacagctggccgctgcgccgtggatcctgcgtgaacgcggttccggcacgcgggagattgtcgattatctgttgctgtcacatttaccgaagtttgagatggcgatggaattaggtaactccgaggcaatcaaacatgcggtgcgtcatgggttgggaattagttgcctgtcgcgacgggtgattgaagatcaattgcaggcaggcacattaagtgaagttgcggtccctctgccgcgcctgatgcgtacgttgtggcgtatacatcatcggcaaaaacacctttccaacgcgctacggcgctttctggactattgcgatcccgcgaatgtaccgcgttaa

SEQ ID NO: 27967 - DNA, 1470 bp, Escherichia coli
atgggttccgaaactaaaactacagaagcgccgggcttacgccgtgaattaaaggcgcgtcacctgacgatgattgccattggcggttccatcggtacaggtctttttgttgcctctggcgcaacgatttctcaggcaggtccgggcggggcattgctctcgtatatgctgattggcctgatggtttacttcctgatgaccagtctcggtgaactggctgcatatatgccggtttccggttcgtttgccacttacggtcagaactatgttgaagaaggctttggcttcgcgctgggctggaactactggtacaactgggcggtgactattgccgttgacctggttgcagcacagctggtcatgagctggtggttcccggatacaccgggctggatctggagtgcgttgttcctcggcgttatcttcctgttgaactacatctctgttcgcggctttggtgaagcggaatactggttctcactgatcaaagtcacgacagttattgtctttatcatcgttggcgtgctgatgattatcggtatcttcaaaggcgcgcagcctgcaggctggagcaactggacaatcggcgaagcgccgtttgctggtggttttgcggcgatgatcggcgtagctatgattgtcggcttctctttccagggaaccgagctgatcggtattgctgcaggcgagtccgaagatccggcgaaaaacattccacgcgcggtacgtcaggtattctggcgaatcctgttgttctatgtgttcgcgatcctgattatcagcctgattattccgtataccgatccgagcctgctgcgtaacgatgttaaagacatcagcgtcagtccgttcaccctggtgttccagcacgcgggtctgctctctgcggcggcggtgatgaacgcagttattctgacggcggtgctgtcagcaggtaactccggtatgtatgcgtctactcgtatgctgtataccctggcgtgtgacggtaaagcgccgcgcattttcgctaaactgtcgcgtggtggcgtgccgcgtaatgcgctgtatgcgacgacggtgattgccggtttgtgcttcctgacctccatgtttggcaaccagacggtatacctgtggctgctgaacacctccgggatgacgggttttatcgcctggctggggattgccattagccactatcgtttccgtcgcgggtacgtattgcagggacacgacattaacgatctgctgtaccgttccggtttcttcccactggggccgatcttcgcattcattctgtgtctgattatcactttgggccagaactacgaagcgttcctgaaagataccattgactggggcggcgtagcggcaacgtatattggtatcccgctgttcctgattatttggttcggctacaagctgattaaaggaactcacttcgtacgctacagcgaaatgaagttcccgcagaacgataagaaataa

SEQ ID NO: 27968 - DNA, 1992 bp, Escherichia coli
atgtttaggttgaaccctttcgtacgggtcgggctgtgtttgtccgctatttcttgtgcatggcctgtgttagcggtcgatgatgatggcgaaacgatggttgtcactgcatcttccgttgaacaaaaccttaaagatgctcccgccagtatcagcgtcattacccaggaagacctgcagcgaaaaccggtacagaatctgaaggatgtcctcaaagaagtgcctggcgtacaactgacgaacgaaggggataaccgtaagggcgtaagtattcgtggtctggacagcagctacaccctgattcttgtcgacggtaaacgcgttaactcccgcaatgccgtcttccgccacaatgatttcgatctgaactggatcccggtcgattccatcgaacgtattgaagtggttcgtggcccgatgtcgtcgctgtacggttccgatgcgctcggcggtgtagtgaatatcatcaccaaaaaaatcggtcagaaatggtcgggcaccgttaccgtcgataccaccgttcaggaacatcgcgatcgcggtgatacctataacggtcaattctttaccagcggaccattaattgacggcgtgctgggaatgaaagcttacggcagcctggcaaaacgtgaaaaggatgacccgcaaaactcaacgaccaccgataccggagaaacgccgcgtattgaaggattctccagccgcgacggcaatgtcgaatttgcctggacaccgaatcaaaatcacgattttactgccggatacggtttcgaccgtcaggatcgtgattccgactcgctggacaaaaaccgcctggaacgccagaactactccgtcagccataatgggcgttgggattacggcaccagcgaactgaaatactacggtgagaaagtcgagaacaaaaaccctggcaacagcagcccgataacttccgaaagcaatacggtcgacggcaaatacacgttgccgctgacggcgattaatcagtttctcacggttggcggtgaatggcgtcacgacaaacttagcgatgcggtgaacctgaccgggggaaccagctccaaaacgtctgccagccagtacgcgctgtttgtggaagatgaatggcggatcttcgagccgctggcgctgacgaccggcgtgcgtatggacgatcacgaaacctacggtgaacactggagtccgcgtgcctacctggtttataacgccaccgacaccgtaacggtgaaagggggctgggcgacggcatttaaagccccttctctgttgcaacttagccctgactggacgagcaattcctgccgtggcgcatgtaagattgtgggtagcccggatctgaaaccagaaaccagcgaaagttgggagctggggctttactacatgggtgaagaaggctggctggaaggggttgaatccagcgttaccgttttccgtaacgatgtgaaagatcgtatcagcattagccgtacgtctgacgtcaatgctgcaccgggctaccaaaactttgtcggttttgagacgggcgctaacggacggcgcataccggtatttagctactacaacgttaacaaagctcgtattcagggcgtggaaaccgaactgaaaattccgttcaacgatgaatggaaactgtcgatcaactacacctacaacgatggtcgtgatgtcagcaacggcgaaaacaaaccgctatccgatctgccgttccatactgctaacggtacgctggactggaaaccgctggcgctggaagactggtcattctatgtttctggtcactataccgggcagaaacgcgccgacagcgcgacggctaaaacaccgggcggttataccatctggaataccggcgcggcctggcaggtgactaaagacgtcaaactgcgcgcaggcgtgctgaaccttggcgacaaggatctcagtcgtgacgactacagctataacgaagacggacgtcgttactttatggcagtggattatcgcttctga

SEQ ID NO: 27969 - DNA, 837 bp, Escherichia coli
atggaaatgctcgaagagcaccgctgttttgaaggctggcagcaacgctggcgacacgactccagtaccttaaactgcccgatgacgttcagtatctttctcccaccacctcgtgatcacaccccgccaccagtgctgtactggctttccggattaacctgcaatgacgagaacttcaccaccaaggcgggtgcccagcgcgtggcggcggaactggggattgtactggtgatgccagacaccagcccgcgcggcgaacaggttgccaacgacgatggctacgatttaggccagggcgcggggttttatcttaacgccacgcaaccaccgtgggcgacgcattaccggatgtatgattatctgcgcgatgaattaccggcgctggttcagtcgcaatttaatgtcagcgaccgctgcgctattagcggtcattccatgggtggtcacggtgcgctgattatggcgctgaaaaatccgggtaaatacaccagcgtttccgcctttgcgccaattgtgaatccgtgcagcgtcccgtggggaatcaaagcgtttagcacttatttaggtgaggacaaaaatgcatggctggaatgggacagttgcgcgttgatgtatgccagtaacgcgcaggatgcaatcccgacgcttattgatcagggtgataatgatcagtttcttgctgaccaactgcaacctgcagtactggcagaagccgcgcgccagaaagcgtggccgatgacgctgcgtattcagccgggatatgatcacagttactacttcatcgcctcttttatagaggatcacctgcgcttccatgcgcagtatttactgaagtga

SEQ ID NO: 27970 - DNA, 669 bp, Escherichia coli
atgccatcactcagtaaagaagcggccctggttcatgaagcgttagttgcgcgaggactggaaacaccgctgcgcccgcccgtgcatgaaatggataacgaaacgcgcaaaagccttattgctggtcatatgaccgaaatcatgcagctgctgaatctcgacctggctgatgacagtttgatggaaacgccgcatcgcatcgctaaaatgtatgtcgatgaaattttctccggtctggattacgccaatttcccgaaaatcaccctcattgaaaacaaaatgaaggtcgatgaaatggtcaccgtgcgcgatatcactctgaccagcacctgtgaacaccattttgttaccatcgatggcaaagcgacggtggcctatatcccgaaagattcggtcatcggtctgtcaaaaattaaccgtattgtgcagttctttgcccagcgtccgcaggtacaagaacgtctgacgcagcaaattctcattgcgctacaaacgctgctgggcaccaataacgtggctgtctctatcgacgcggtgcattactgcgtgaaggcgcgtggcatccgcgatgcaaccagtgccacgacaacgacctctcttggtggattgttcaaatccagtcagaatacgcgccacgagtttctgcgcgctgtgcgtcatcacaactga

SEQ ID NO: 27971 - DNA, 1158 bp, Escherichia coli
atggagcgcaacgtcacgctcgattttgttcgcggcgtcgccattctggggatcctgctattaaacatcagcgcctttgggctaccaaaggcggcttatctcaatcccgcctggtacggcgctattacgtcgcaggatgcatggacctgggcatttctcgatctcatcggccaggtgaaattcctcacgctttttgctctgctgtttggtgcgggcctgcaaatgttgctgccccgtggcagacgatggatccagtcgcggttaacgctgttagtcttgctgggctttattcacggtttattgttctgggacggcgatattctgctggcttacgggctggtgggcttaatctgctggcggctggtgcgcgatgcgccatcggtaaaaagcctgtttaatacaggcgtcatgctttatctggtggggcttggcgttttgctgttattggggctgatttccgacagccagaccagccgcgcctggacacctgatgcatcggctattttgtatgaaaagcactggaaacttcacagtggtgttgacgcgatcagtaatcgtgccgatggtgttggcaacagtttactggcactgggcgcacagtatggctggcaactggcagggatgatgctcattggtgccgcattgatgcgcagtggctggctgaaagggcagttcagctttcgtcactatcgtcgtactggttttgtgctggtggcgattggggtgatcattaaccttcctgccatcgccctgcaatggcgactggactgggcgtatcgttggtgcgccttcttacttcagatgccgcgggaactgagtgcgccgtttcaggcgattggctatgcgtcgctgttttatggcttctggccgcaattaagccgctttaagctggtgctggcaatcgcctgtgtcggacggatggcactgaccaactatctattgcaaacgctgatttgtactacgcttttttaccacctcggtttgtttatgcagtttgaccgtctggagctgctggcgtttgttattccggtatggctggcgaatatcttcttctctgttatctggctgcgttacttccgccaggggccggtggaatggctctggcgtcagttaactttgcgtgctgccggaccgacaatatctaaaacatcaagataa

SEQ ID NO: 27972 - DNA, 1041 bp, Escherichia coli
atgatcaccattcgtgatgtagcgcgtcaggctggcgtctctgtggcaacggtttcccgggtgctcaataacagcacgctggtcagtgccgatacgcgtgaagcagtaatgaaagccgtgagtgagctggattatcggccaaacgccaatgcccaggcgctggcaactcaggttagcgataccattggcgtggtggtgatggacgtttctgatgcgtttttcggcgcgctggtaaaagcggtggatctggtcgcccagcagcatcagaaatacgtgctaatcggcaatagctatcatgaagcggaaaaagagcgtcacgccattgaggtgttaattcgccagcgttgtaatgcgttgattgttcactcaaaagcattgagtgacgatgaactggcacaatttatggataacattcccggtatggtgttaatcaaccgcgttgtgccggggtacgcccatcgttgcgtttgcctggataatctcagcggtgcccgaatggcgacgcgcatgttgctgaataacggtcatcaacgtattggttatctttcttccagccacggcattgaagatgacgccatgcgtaaagcaggctggatgagtgcgttgaaagagcaggatattattccgccggaaagctggattggcactggcacgccggacatgccgggcggtgaggcggcgatggttgaactgctggggcgcaatctacaactaaccgctgtatttgcttataacgacaatatggccgctggcgcactgacagcattaaaagataatggcattgcgattccgttacatctctcaatcattggtttcgatgatattcccatcgcccgttacaccgacccgcaattaacgactgtgcgttatcccattgcttcaatggctaaattagctaccgaactggccttgcagggggcagcagacaatattgatcctcgtgccagccactgttttatgccgacgttagtgcgtcgccattctgtcgcaacacgccagaatgcggcggcgatcactaactcaacaaatcaggcgatgtaa

SEQ ID NO: 27973 - DNA, 999 bp, Escherichia coli
atgaataagaaggtgttaaccctgtctgctgtgatggccagcatgttattcggtgccgctgcacacgctgctgatactcgcattggtgtaacaatctataagtacgacgataactttatgtctgtagtgcgcaaggctattgagcaagatgcgaaagccgcgccagatgttcagctgctgatgaatgattctcagaatgaccagtccaagcagaacgatcagatcgacgtattgctggcgaaaggggtgaaggcactggcaatcaacctggttgacccggcagctgcgggtacggtgattgagaaagcgcgtgggcaaaacgtgccggtggttttcttcaacaaagaaccgtctcgtaaggcgctggatagctacgacaaagcctactacgttggcactgactccaaagagtccggcattattcagggtgatttgattgctaaacactgggcggcgaatcagggttgggatctgaacaaagacggtcagattcaattcgtactgctgaaaggtgagccggggcatccggatgcagaagcacgtaccacttacgtgattaaagaattgaacgacaaaggcattaaaactgaacagttacagttagataccgctatgtgggataccgctcaggcgaaagataagatggacgcctggctgtctggcccgaacgccaacaaaatcgaggtggttatcgccaacaacgacgcgatggcaatgggcgcggtagaagcactgaaagcacacaacaagtccagcattccggtgtttggcgtcgatgcgctgccagaagcgctggcgctggtgaaatccggtgcactggcgggcaccgtactgaacgatgctaacaaccaggcgaaagcgacctttgatctggcgaaaaacctggccgatggcaaaggtgcggctgatggcaccaactggaaaatcgacaacaaagtagtccgcgtaccttatgttggcgtagataaagacaacctggctgaattcagcaagaaataa

SEQ ID NO: 27974 - DNA, 1521 bp, Escherichia coli
atggtcagctcaacgactccgtcttccggggaatacttgttggaaatgagcggtatcaacaagtcttttcctggtgttaaggcacttgataacgttaacttaaaagtccgaccacattctatccatgcattaatgggggaaaatggtgcgggaaaatcaacattattaaaatgcctgtttggtatttatcaaaaagactctggcaccattttattccagggtaaagagatcgatttccattccgccaaagaagcactggaaaatggtatttcgatggtacatcaggagttaaacctggtattacaacgttcggtgatggacaacatgtggctggggcgatatcccaccaaaggcatgtttgtcgatcaggacaaaatgtaccgcgaaaccaaagcgatttttgatgaactggatattgatatcgatccgcgtgcgcgcgtcggtacattatctgtttcgcaaatgcagatgatcgaaatcgccaaagcgttttcctataacgcgaaaattgtgattatggatgaaccgacttcttcgttaaccgaaaaagaggtcaatcatctgttcactattattcgtaaattaaaagagcgcggctgcggtattgtttatatctcgcataaaatggaagaaatcttccagttatgtgatgaagttaccgtattgcgcgacggtcagtggatcgctaccgaaccgctggcaggactgacgatggacaagatcatcgccatgatggttgggcgttctcttaaccagcgtttccctgacaaagaaaacaagccgggcgaagtgattctggaagtgcgtaacctgacgtcgctgcgccagccgtcgatacgcgatgtctcgtttgatctgcataaaggggagattctcggtatagccggtctggtgggagcgaaacgtaccgatattgttgagacgttatttggtattcgcgagaaatcggctggcaccattacgttgcacggcaaaaagatcaataaccataatgccaacgaagccataaaccacggatttgcactggtaactgaagagcgccgctcaacgggaatttatgcctatctggatattggctttaactcgttaatttccaatatccgcaactataaaaataaagttggtttactggataactcgcggatgaaaagcgatacccagtgggtgattgattcgatgcgggtaaaaacaccggggcatcggacgcaaattggttcgctctccggtggtaatcagcaaaaagtgattattggtcgctggctgttaacgcaaccagaaatattaatgctcgatgaaccgacgcgcggtattgatgttggggctaagtttgagatttatcagttaattgccgaactggcgaagaaaggcaaggggattattattatctcctccgaaatgccagagttgttagggataacagaccgtattctggttatgagcaatggtctcgtttccggaattgtcgatacaaaaacaacaacgcaaagcgaaattctgcgtcttgcgtctttgcacctttaa

SEQ ID NO: 27975 - DNA, 1011 bp, Escherichia coli
atgagtgcattaaataagaaaagttttcttacttacctgaaagagggcggtatttacgtcgttcttttagttttgctggcgattattattttccaggacccaacatttttaagtctgttgaacttaagtaatattctcacccagtcatcggtgcgtattattatcgcgcttggtgtggcagggttaattgtcacccaggggactgacctttccgcaggtcgccaggtggggctggcggcagtagtagcagcgacgttattgcagtccatggataacgccaacaaagtgttcccggaaatggcgacgatgccgattgcgctggttattctgattgtctgtgccattggtgcggtgatcggtttgatcaacggcttgattatcgcctatctcaacgtgacgccgttcattaccacgctcggtacgatgattatcgtctacggcattaactcgctctattacgactttgtcggggcatcgccaatttccggttttgacagtggtttctccacttttgcccaaggctttattgcgctggggagtttccgtctctcttacatcaccttctatgcgttgattgcggtggtgtttgtctgggtgttatggaacaaaacccgcttcggtaagaacatttttgccattggcggtaacccggaagcggcgaaagtatctggtgtcaacgtcggcctgaacctgctgatgatttacgcgttgtctggtgtgttctatgccttcggcgggatgttagaagccggacgtatcggctcagccaccaacaacctcggctttatgtatgagctggatgctatcgcggcgtgcgtggtaggcggcgtatcgttcagcggcggtgtggggacggtaattggtgtggtgaccggggtgattatttttaccgtcatcaactatggtctgacgtacatcggcgtaaacccgtactggcagtacatcatcaaaggggcgattattatcttcgccgtggcgctggattcactgaaatacgcgcgtaagaagtga

SEQ ID NO: 27976 - DNA, 1236 bp, Escherichia coli
atgttaacgaaagatctttcgattactttttgcggcgtgaagtttcccaacccgttctgcctttcttcttcgccggtaggcaactgctatgagatgtgcgccaaagcctacgacacaggttggggcggcgtggtgtttaaaacgatcggtttttttatcgccaacgaagtctcgccgcgttttgatcatctggtgaaagaagataccggttttatcggcttcaaaaatatggagcagattgctgaacatccgttggaagagaatctggccgccctgcgtcggctgaaagaagattatccggacaaagtattgatcgcttcaatcatgggcgaaaatgagcagcaatgggaagagctggcgcgtctggtgcaagaagctggcgcggatatgatcgagtgtaacttctcctgtccgcaaatgacttctcatgcgatgggtagcgatgtcgggcaaagcccggagctggtagaaaaatattgtcgggcagtaaaacgtggttccacgctgccaatgctggcgaagatgacgccgaatattggtgatatgtgcgaagtggcgctggcggcgaagcgcggcggcgcagatggcattgcggcgattaacaccgttaaatccatcaccaatatcgatcttaatcagaaaattggtatgccgatcgttaacggtaaatcgagtatttccggatattccggtaaagcggtaaaaccgatcgccctacgctttattcagcaaatgcgcacccatccagaactgcgcgatttcccgatcagcggtatcggcggcattgaaacctgggaagatgcggcggagtttttattgctcggcgcagcgacgttgcaggtgaccaccggcattatgcagtacgggtatcggatagtggaagatatggcaagcgggttgtcgcattatctcgccgatcaagggtttgattcgttgcaggagatggtaggtctggcgaatcacaatattgtcccggcggaagatttagaccgcagttatattgtctatccccatatcaatcttgataaatgtgttggctgtggacgctgttatatttcctgttacgacggcggtcaccaggcgatggaatggagcgagaaaacccgcacaccgcattgtaataccgagaaatgcgtgggttgtctgctttgtggtcatgtctgcccggtaggttgtattgatcttggggaagtgaagtttaagaaaggcgagaaagaacacccggtaacgttgtag

SEQ ID NO: 27977 - DNA, 1239 bp, Escherichia coli; identical to SEQ ID NO: 10027

SEQ ID NO: 27978 - DNA, 240 bp, Escherichia coli
atggatgtacagcagttttttgtcgttgccgtttttttccttatcccgatattttgtttccgcgaagcatggaaaggctggcgcgcaggcgcgattgataaacgggttaaaaatgcaccggaaccggtgtatgtctggcgagcgaaaaatcccggactcttcttcgcttatatggtggcatatatcggcttcggaattttatctatcggcatgattgtttatcttattttctatcgttaa

SEQ ID NO: 27979 - DNA, 564 bp, Escherichia coli
atgtcgttttgttggaatgaaattaactctggtgtcaagtctttaattctcatattatgtatgttgtctttaatgactttgtctttgtgggatgatgttgcaacaaagtttcttcatgcagctggaattatatctgcattatattttctagcgacaccaaaaaaaacaataactaataatcctactttgttaattttcatctcattatgtcttttgggtatcgttaatatcatctggtattcacattataaagtttcaggctcggtttataccaatgcatatcgtggcccaatggaaactggaaaaattgccttgtgtagtgcttttattttcttagttctttttgctaaagatgagatgagaaccaaaataaaatttgggaaactaattctgttcgcatccttggcaacgcagttactttttttttgcgcatgccatgtggcaacatttctatttaaacgtcgaccgtgttgcattatcagcttcccacgctacaacagcaggctacatcatccttttcccttctttactggcatcaattctcattttaaaatccgactttag

SEQ ID NO: 27980 - DNA, 372 bp, Escherichia coli
gtgctggatgcgctggagcaggcgttgtgggcccgtcgaccgtccggcacggtccatcacagtgataaaggttctcagtatgtatcgctggcctacacacagcggcttaaggaagccggattactggcatcaacaggaagtacaggcgactcgtatgacaacgcgatggctgagagcatcaatggtctttacaaagcggaggtaatacaccgtaagagctggaaaaaccgtgcagaagtggaactggccacactaacgtgggtggactggtataacaatcgacgattgctgggaaggctgggccatactcctccggcagaagcagaaaaagcttattatgcttccatcggaaacaatgatctggcagcctga

SEQ ID NO: 27981 - DNA, 1746 bp, Escherichia coli
atgagcggtggcgatggacgcggccataacacgggcgcgcatagcacaagtggtaacattaatggtggcccgaccgggcttggtgtaggtggtggtgcttctgatggttccgggtggagttcggaaaataacccgtggggtggtggttccggtagcggcattcactggggtggtggttccggtcatggtaatggcggggagaatagtaattccggtggtggctcgggaacaggcggtaatctgtcagcagtagctgcgccagtggcatttggttttccggcactttccactccaggagctggcggtctggcggtcagtatttctgcgggagcattatcggcagctattgctgatattatggctgccctgaaaggaccgtttaaatttggtctttggggggtggctttatatggtgtattgccatcacaaatagcgaaagatgaccccaatatgatgtcaaagattgtgacgtcattacccgcagatgatattactgaatcacctgtcagttcattacctctcgataaggcaacagtaaacgtaaatgttcgtgttgttgatgatgtaaaagacgaacgacagaatatttcggttgtttcaggtgttccgatgagtgttccggtggttgatgcaaaacctaccgaacgtccaggtgtttttacggcatcaattccaggtgcacctgttctgaatatttcagttaataacagtacgccagcagtacagacattaagcccaggtgttacaaataatactgataaggatgttcgcccggcaggatttactcagggtggtaataccagggatgcagttattcgattcccgaaggacagcggtcataatgccgtatatgtttcagtgagtgatgttcttagccctgaccaggtaaaacaacgtcaggatgaagaaaatcgccgtcagcaggaatgggatgctacgcatccggttgaagcggctgagcgaaattatgaacgcgcgcgtgcagagctgaatcaggcaaatgaagatgttgccagaaatcaggagcgacaggctaaagctgttcaggtttataattcgcgtaaaagcgaacttgatgcagcgaataaaactcttgctgatgcaatagctgaaataaaacaatttgatcgatttgcccatgacccaatggctggcggtcacagaatgtggcaaatggccgggcttaaagcccagcgggcgcagacggatgtaaataataagcaggctgcatttgatgctgctgcaaaagagaagtcagatgctgatgctgcattaagtgccgcgcaggagcgccgcaaacagaaggaaaataaagaaaaggacgctaaggataaattagataaggagagtaaacggaataagccagggaaggcgacaggtaaaggtaaaccagttggtgataaatggctggatgatgcaggtaaagattcaggagcgccaattccagatcgcattgctgataagttgcgtgataaagaatttaaaaactttgacgatttccggaagaaattctgggaagaagtgtcaaaagatcccgatcttagtaagcaatttaaaggcagtaataagacgaacattcaaaagggaaaagcaccttttgcaaggaagaaagaccaagtaggtggtagggaacgctttgaattacatcatgataaaccaatcagtcaggatggtggtgtctatgatatgaataatatcagagtgaccacacctaagcgacatattgatattcatcggggtaagtaa

SEQ ID NO: 27982 - DNA, 2166 bp, Escherichia coli; identical to SEQ ID NO: 26171

SEQ ID NO: 27983 - DNA, 606 bp, Escherichia coli
  misc_feature (159)..(168): n is a, c, g, or t
atgggggaatatcgtagtggaaataacctgcaaagcacccccaagttcgtacaagcaagcttgatgcatggtctgaaaggaaactggacaccttatggcggaatgcaaattgcagaagattatcaggccttcaaccttggtattggtaaagatttaggnnnnnnnnnngatttaggactttttggtgccttttctttcgatattacgcaggccaatacgacacttgcagatgacacccgtcacagcggacaatcggttaaatccgtctacagcaaatccttctaccagacgggaaccaatatccaggtcgcaggatatcgctattctacgcaaggtttttataacttatccgacagtgcatacagtcgaatgagtggttacaccgtcaagcctcctaccggagacaccagtgagcagacactatttattgattattttaatctgttctacagtaagcgtggtcaggaacaaataagcatctctcagcagcttggaaattacggtacgacatttttcagtgccagtcgccaaagttactggaacacgtcacgcagcgaccagcaaatatcatttggattaaatgtgccgtttattgctgtcagatga

SEQ ID NO: 27984 - DNA, 480 bp, Escherichia coli
atgattcattacagggagaatatatattctcttgataattatgagcgttacataactgacagttcgctatttgagaatactggcgatggcataatatatacaggtattgtgccccttattacagttgttgagcctgttgtatctaatcaacatagtgtgctgattatacctggaggtggatacaggaggattgtttatgaaagagagggacttgatgttggcagatggatagcaggtcagggatatacggcatttattctttcttacagaatgccctccgttaatggttattattcctttgcagatgcgaagaatgccctgaactttatttcttactgggccggaatgtcggagagaacatttaagagtgttggatgtatggggttttcggcaggtggtcatcttgctggatatattactcatctccattatgaggaagagacttctgtgcgtcctgacttatccagttatatctcttga

SEQ ID NO: 27985 - DNA, 138 bp, Escherichia coli
atgaacgtttcttctccggtatcgttagttcttattagtgcaaaaataaagtcgaatggcctattaatgcctatattacttcacatcgcgatgaatgtagccatagcaggaatacaatatctggcttatatcaattaa

SEQ ID NO: 27986 - DNA, 711 bp, Escherichia coli
atgaatgtaaaagatttatcaattacaacggttctcttggccgccctttattttatggctttttctttttacaaaggatacagctcattttatggattccctgtaagttttatttctattgggattgaggaaatagttaagttttctgttattgcattaggacttttgtgcaccttagtcgctttgctgcatattgatactgaagagaagaatattccatggggggtgtatttatttttcttcattttggcctctttgctttcatactggacaatgtatttatatggcggtagctcatacctttatgaaaaatccataagggatgtggctacccaagcaatactattgggatttattagccctatcagtgtcagggcagtatctgtttttattaggaatgaatttagaataaaaaacaaaactcatggggttatgttttttatatccatagcaatgcttccttcagtccttgggtgggcatgggcatacttatcagatgagcctcttttttattctaaaaaatatgatgcttatattatcgaaagctataacggaaaatttgtcttggggaactgtaaaaaaaatagctctgaatttatgagtgtcgaaggaattgaggggaaattaattcctgtaagcataaaagaaacacaacaactaaaagtatgttttttaaaagcttctaagctcaagaaaaatcgctcagaatga

SEQ ID NO: 27987 - DNA, 654 bp, Escherichia coli
atggtcgatcaggactggatggattccagtaaccccggaacctggacggatgaaagtagacaccctgatacacaactcaattatgccaacgaatttgatctgaatatcaaaggctggctcctcaacgaacccaattaccgcctgggactcatggccggatatcaggaaagccgttatagctttacagccagaggtggttcctatatctacagttctgaggagggattcagagatgatatcggctccttcccgaatggagaaagagcaatcggctacaaacaacgttttaaaatgccctacattggcttgactggaagttatcgttatgaagattttgagctaggtggcacatttaaatacagcggctgggtggaagcatctgataacgatgaacattatgacccaggaaaaagaatcacttatcgcagtaaagtcaaagaccaaaattactattctgttgcagtcaatgcaggttattacgtaacgcctaatgcaaaagtttatattgaaggcgcatggaatcgggttacgaataaaaaaggtgatacttcactttatgatcacaatgataacacttctgactacagcaaaaatggtgcaggcatagaaaactataacttcatcactactgctggtcttaagtacaccttttaa

SEQ ID NO: 27988 - DNA, 2652 bp, Escherichia coli
atgacagcctttcgtgccgcatttaaggcatatcgtatgcatcaggtgttaatactgcctcgctttgcacggcttacctttgcccttggcttagcaactgcggtttttcccgttgacgcagagtattattttaatccacggtttttaagcaatgaccttgctgaatctgtcgatttatctgcctttactaagggacgcgaggccccacctggtacatatcgggtcgacatttatttgaacgacgaatttatggctagtcgggatattacttttattgcagatgataataacgcagatctcatcccatgcctgagtacagaccttcttgtcagtcttggcataaaaaaatcagcattattagacaacaaggaacattcggcagataaacatgtgccggacaacagcgcatgcacaccacttcaggatcgtttggctgacgcatcatctgagtttgatgttggtcagcaacatctgtcactctccgttccgcaaatatatgtcggcagaatggctcgcggctatgtttctcctgatctgtgggaagaaggaataaatgccgggctactaaactatagttttaatggtaattctattaataaccgtagtaaccataatgcaggaaaatccaactatgcatatttgaatttacagagtggcatcaacattggtagttggcgactgcgcgataactcaacgtggagttataacagtgggagtagcaattcatctgacagcaataaatggcagcatatcaatacgtcggctgaacgtgacattattccgttacgctcacggttaacagtgggtgatagttataccgatggcgatatttttgacagtgtgaactttcgtggccttaaaataaattcaacagaagcgatgttgcccgatagccaacatggtttcgctccggtgattcatggtattgctcgtggcaccgcacaagtgagtgtaaaacagaatggatacgatgtttatcagactactgtcccacccggcccttttactattgatgatatcaactctgcggccaatggtggtgatctgcaagtaaccataaaagaggcagacggcagtattcagacattatatgttccttattcgtctgttccggttctccaacgtgctggatatacgcgttatgcacttgccatgggggaatatcgtagtggaaataacctgcaaagctcccccaagttcgtacaagcaagcttgatgcatggtctgaaaggaaactggacaccttatggcggaatgcaaattgcagaagattatcaggccttcaaccttggtattggtaaagatttaggactttttggtgccttttctttcgatatcacgcaggccaatacgacgcttgcagatgacacccgtcacagcggacaatcggttaaatccgtctacagcaaatccttctaccagacgggaaccaatatccaggtcgcaggatatcgctattctacgcaaggtttttataacttatccgacagtgcatacagtcgaatgagtggttacaccgtcaagcctcctaccggagacaccagtgagcagacactatttattgattattttaatctgttctacagtaagcgtggtcaggaacaaataagcatctctcagcagcttggaaattacggtacgacatttttcagtgccagtcgccaaagttactggaacacgtcacgcagcgaccagcaaatatcatttggattaaatgtgccgtttggtgatattacgacttcgctgaattacagctattccaataatatatggcaaaacgatcgggatcatttactcgcttttacgcttaatgttccctttagtcattggatgcgtacagacagtcagtcggcatttcgtaattcaaacgccagttacagtatgtcaaacgatttgaaaggcggcatgaccaacctatcaggggtttatggcactctgctgccggataataacctgaattatagcgttcaggtcggtaacacccaagggggtaatacatcgtctggcaccagtggttacagttctcttaattatcgtggagcttacggtaatacgaatgtcggttacagtcggagtggtgacagcagccagatttattacggaatgagtggtgggattattgctcatgctgatggcatcacctttggacagccgctgggcgacacaatggttctggttaaggctcctggcgctgataatgtcaaaatagagaaccagatcggaattcataccgactggcgtggctatgccatattaccatttgcgacagaatatagagaaaatcgtgtcgctcttaacgcgaattcccttgcagataatgttgaactggatgaaaccgtagtcactgtcatcccaactcacggtgctattgccagagcaacatttaatgcacaaatcggcgggaaagtattaatgacgttgaagtacggtaataaaagcattccattcggtgcaattgtcactcacggagagaataaaaatggcagcattgtcgcggaaaatggtcaggtttatctgactggacttccacagtcagggaaattacaggtttcatggggcaatgataaaaactcaaactgtattgtcgattacaagcttcctgcagtctctcctggaaccttgctgaaccagcagacagcaatctgtcgctaa

SEQ ID NO: 27989 - DNA, 168 bp, Escherichia coli
gtggaagattgccgggtacgcgtacgtctgaataaccaaagctgggtgttaaacatcgacagcgaaggtcagttcaacaacgtaccaccggagctgaacgatatgtgccgcatcattagccatgtccaccagcatcatcattatctgctgggccgcgtggaggtgtaa

SEQ ID NO: 27990 - DNA, 411 bp, Escherichia coli
atgcccgtggcgcttcgccgcattacccctgccgtagtgcaatctatccaggtattttttcaggttgtgctgtatgcaggtttatttatttttgcgcagtatctcgtctcctggctgcatttgccgctgcctgccaacctggtggggatgatcctgatgctggcgctgattgtttgtcgcattcttcctctgcaatgggttcgagccggggcgcgttggctattggccgaaatgttgctgttttttgtccctgccgtggtggctgtggtgaactatgcacaactattactggtggatggctggcgtatttttgctgtgatcgcgctgagtacggtgatggtgctgggcacgactgcctgggtagtggaaaaagtctatcgctatgaaatgcgcaggttaaaccgtggctaa

SEQ ID NO: 27991 - DNA, 1401 bp, Escherichia coli
atgtctgatataaaccatgcaggttctgaccttatatttgaactggaggatcgccctccctttcatcaggctctcgtaggtgccattacccatctgttggcaattttcgttccgatggtaacccccgcgttaatcgtgggtgcggccttacagctttccgctgaaacaactgcctatcttgtttctatggcgatgatcgcctctggtattggtacctggttacaagtaaaccgctacggcatcgtcggttctggtttactttcaattcagtcagtcaatttttcatttgttacggtcatgattgcgctgggcagcagcatgaaaagcgacggttttcacgaagagttaatcatgtcgtcgctcctcggcgtctccttcgttggcgcatttctggttgtcggctcttcttttatcctgccctatttacgtcgggttattacgcctaccgtcagcggcattgtggtgctgatgatcggcttaagcctgattaaagtcggcattattgattttggtggaggatttgcagccaaaagcagcggtacgttcggcaattacgaacatctcggcgttggtttattggttttgattgtggtgatcggctttaactgctgtcgcagtccgttgctacgcatgggagggatcgccattgggctatgtgtcggctatatcgcatcgttatgcctgggcatggtggatttcagcagtatgcgcaatttgccgttaatcaccatcccgcatccgttcaaatacggctttagttttagcttccatcagttcctggtggttggcacgatttatctgcttagcgtgctggaagctgtcggcgatatcaccgccacagcaatggtttcccgccgccccattcagggggaagagtatcagtcccgactgaaaggcggcgtgctggcagatggtctggtttctgttatcgcctccgctgtcggttcattaccattaaccacgtttgcgcaaaataatggggttattcagatgactggcgtcgcttcacgttatgtcgggcgaaccatcgcggtaatgctggttatcctcggcttatttccgatgattggcggcttcttcacgaccattccctcagcagttctgggaggcgcaatgacgttgatgttttccatgattgccatcgcagggattcgcatcatcatcaccaacggtttaaagcgccgtgaaacgcttattgtcgccacgtctttaggtttagggcttggtgtctcctacgatcccgaaatttttaaaatattgccagcctctatttatgtattagttgaaaaccctatttgtgctggcgggttaactgcgattttattaaatattatcctccctggtggctaccgacaggaaaacgttctgcctggtattacctcagcggaagagatggattaa

SEQ ID NO: 27992 - DNA, 1167 bp, Escherichia coli
atgccgggaattgtctgctcgcataaccatttttactcggggctttcccgcggaattatggcaaatatcgccccctgcccggatttcatctcaacgctgaaaaatctctggtggcggctcgatcgcgcccttgatgaagagtcgctctattacagcggactgatttgttccctggaagcgattaagagcggatgtacatcggttatcgatcaccatgcctctccagcctatatcggcgggtcgctctccatattgcgcgacgcatttttaaaagttggcctgcgcgcgatgacctgttttgaaactactgaccgtaacagcggcatcaaagagttgcaggaaggtgtagaagaaaacatccgcttcgcccgtcagattgatgaggcgaagaaagcagcaaccgagccgtatctggtggaagcacatatcggcgctcacgcgccgtttaccgtgccggatgccggtctggagatgctgcgtgaagccgtgaaaagcacaggtcgtggtttgcatattcacgttgcggaagacctttacgacgtttcctacagtcaccattggtacggcaaagacctgctggcacgacttgcgcaattcgatctcatcgacagcaaaacgctggtcgctcatgggctgtacttgtcgaaagatgacatcgccctactcaatcagcgcgatgcgttcctggtgcataacgcccgttcaaacatgaacaaccatgtcggctacaaccatcaccttagcgacatccgcaatctggcgttgggaacggacggcattggttcggacatgtttgaagagatgaaatttgccttctttaaacatcgcgatgcgggtggcccgctgtggcctgacagttttgccaaagcactggctaacggcaacgaactgatgagccgcaactttggcgcgaaatttgggcttctggaagccggttacaaagccgatttaaccatttgcgattacaactcgccgacgccgctgctggcagacaatatcgccgggcatatcgctttcggtatgggctcaggtagcgttcacagcgtgatggtcaatggtgtgatggtctatgaagaccgtcagtttaacttcgattgcgattccatttatgcgcaagccagaaaagccgctgccagtatgtggcgtcggatggatgcgctggcataa

SEQ ID NO: 27993 - DNA, 1575 bp, Escherichia coli
gtggccccaagtgatacccctttaaactcacataaacccataaatttgtataccagaagtattctagctactatctggtatacacacttgaaccactggtatacattgatgaaaatgacactcaatcagtcgattataatcaataagttatctatcgacgtgaaaccgagccttgatccgcaaggcagagtagtctacttacccaatccagagcgaaaaccgtatcttatcactgataatcaccgggattcaccagttggttttggtgtcaaaatcagtgcaacgaaaaagacctatatcgttcagcgacgagtgtcttctcctggcaatcgtcctaagacaggggggaaatccccatctgaggttatcaggtctacaattggcaatatctctgatttcgctaatatcgatcaagcccgcgaagttgctcgcaatttagttcaaaccatgaagttgaccaaaaggaaccctaacaagataaaacgggagtccgaagcttctgaactcactatcagtgaagtctttgctcaatatcgacagcatctgttaggaagatcaaaaccggcgaaacccaacacacttaatgttctgaacaaagcagaaaacaggctttctgaatggtcagggcttcgagtgaaggatttaacaggcaatgaaattcttcgtaagtttgatgaaatcgcaagtagagcaaggaccgcatctgagcaaacattcaggtgggccaatgtcgctgttagacatgcaatcgagatcgaagcaagtaatgcacagactcaacaaagacaaccatcactgtcatacaatccattttcaattctaaaagtgcagaaaaaattcaggactcgatcagaactggaagacagctacaaagcaaaaggtgtcagaaatccgctttcgccaaaagatactcttggacgatttttaacagcattgcataacaagagaagctttaatcggttggggtgcgattatctgctaatcaccgttctcttaggggctcgtaaagaagaaacagcttcactttgttggcttgaatcccttacagacgaagaagctaaaacggcaagttatgtagatcttgaaaatcgtatcattcgtttttatgacactaagaatcgaaacgaccatgagcttccgatctgtgatgccgtcaaaagaattttggaagacagaagggatattgttcaggaagcagaaactcgtccagaaagacttatgtgggttttcccagcccgttccaaaagaagcaaagtcgggcattactctgacagtaaaagcttgcgggaatacttatgccaagaggcgggaatcttcaagctgggtatgcatgacctgcgacgaactttcggcagggttgcagaagaactgacttcgtatgcagtggtgaaaagactactcaaccatcgcaataccaccgaccccactgaacggtatgcaatacctgataatgaacgaatttatgaggcacttcaaaggattgagcttcatatgctgatgacggcaccagagttgtataatacacttttggcttcggcaaaatatccgccattgcctgtggggagtaaggaatga

SEQ ID NO: 27994 - DNA, 198 bp, Escherichia coli
atgtgcctccagcatatccagcacctgatcccactgggtaatttccaccggacgcgtcatcgacggtactggcggctgggctttacgttgcgcgacaaaataacccgaacgcggctacggagtgatgaggttcatcgtctccagcgtctgatacgcctgctgcacggtactgatgctgacgccgtgctcctgacttaa

SEQ ID NO: 27995 - DNA, 459 bp, Escherichia coli
atgaagaaacaacttattgccggcgtcatgctggttgcggcgcacgccgccggcgctgcgcagggtgatgatatggacctgcagcagatttacacggaggcgggcattcaggggatatgcagcgccgggatgctcaccgtgccggaagaagccagggatgaagtcgtcccgcagaacgtcagacgcctcctggttcagtgtgcctatttcgatgagcagcagttgcgccggcgtgccggtctgccggtacagacatttgaccactggcgtggccgtcatgcggtccttaatctgtcgtcagaccaggtatctgatgcgctctggctttcagcgtggcgtgacttccgggcacagctggcatcggtttacccggccccggcagaaaaaaaggcacagggggaagaggccgtacccgccggcacgaagcccggcactgagcatgggagcgcggcggattga

SEQ ID NO: 27996 - DNA, 249 bp, Escherichia coli
atgagtggattgaaaggccgccgcatcagtgcggatatgtttgccataatgctgaagatatctgccgggcagctggtttttgcagcccggcatgacaagccgttacgcggactgaccctgcccccttacagaatcgaaggcggaaaaagctggagctcgaccacctcaacacggagcatgacgtttgatatgcaggaagcggtcgatttcagcgagaaatttcataaaattcagtcgcctgacggctga

SEQ ID NO: 27997 - DNA, 237 bp, Escherichia coli
gtggccctgaacgtgcgcaccattgagcgctgcatcgcagcggaaccggaaaaatttttccggccaatgagtgcccttgtcaccgaaacggtgacaagtatgcacgcacaattacacgaacaggcagcacccatgcccggcctgacaggccgggagctatatcttaatgtgggatgctatatacgaaaggtgaaggttaatactgcggacctgaagcgtcaggattctgaccggtag

SEQ ID NO: 27998 - DNA, 2061 bp, Escherichia coli
atgacagtaaaaatttctggcgtgcttaaagatggcacaggaaaaccagtacagaactgcaccattgtgctgaaggccagacgaaccagcagcacggtggtggtgaacacggtggcctctgaaaatccggatgaagccggacgttacagcatggatgttgagcatggtcagtacagcgtcaccctgctggttgaaggttttccgccttcacatgccgggaccattaccgtctatgaaggttccagaccaggtacgctgaatgattttctcggcgccatgacggaggatgatgttcgtccggaggcactgcgccgttttgagctgatggtgaatgaagtggcacgtcatgccggagcatcatcacagagtgcagcggcggcaaagaaatccgaaacggcagcagcctcatcgaagaatgcggcgaaaacctcagaaacgaatgcagctaacagcgcacaggcggcagcggcctcgcagactgcatcggcaaactccgcgacagcagccaaaaaatcagaaaccagcgcgaaaaatagcgagacagccacaaaggccagcgaaaaaaacgcaaaatccagccagacggcagcgaaaaccagtgagacgaatgccaaagacagtgaagccaacgcaaaggtgagcgaaacagcggcggcgaactcggcgaaagcatcggcagcaagccagacggcagcaaaagcaagtgaagatgctgccagagaatacgcaaaccagacagcagagccgtacagatatgttttacagccgctgccggatgtgtggataccctttaatgattcgctggatatgattacgggctattctccgggttataaaaaagtgaagattggtgataatgtggttcaggttgccagtgataaacaggttaatttcagtcgcgcatcaacggcaacatatatcaacaaatctggcgaactgaaaacggcggaaattaatgagccacgatttgaaaaagaaggtttattgattgaaggtcagcgaaccaactacatgttgaattcagcaactccagcttcttggggtaaatctgcaaatatgaatgtcgctgaggttggaactgatagttttggttttacttatggaaagtttgtttgtaatgaatcattaattgggcaaagtacaacccttaatatggcagtagtttcaacctcgggggctgtcgatgtatcaggcgataataagtgtgtgacgacatcgtgcagatttaaaacggatttggaactcctgttaaggatcaggtttgaagccttcgatggcagcgcttcatctaatcttggatatgccattgttaatacgcggtctttattggttgaaatcaccggtgtagctgccgacaggctcaccgcacgagttaacaaagatgaagctacgggctggatttttgtagaggcaacgattcaagcaagtaaagaaacttacataacctctgcaatacaatacgcaccaaaaaaaggtggtgtcgttgaatctggtgactatatttatctggccacccctcaggttgaggatggttcgtgtgtatcatcttttattatatcaggaacgacggcggcgacgcgcgcaagcgatatggttacagttccgattaagaataatctttataatcttccttttacggttctttgtgaggtacataagaactggtataaaacgccaaatgcagcgccacgtgtttttgataccggcggtcatcaaaccggagcggctattattcttggcttcggatcttcggcagatgggccagacggatttccttattgcgatattggtggatcaaataggcgtgttaacgaaaacgcatcgttgaaaaaaatggttatggggatgcgtgtaaagtcagatcagtctacatgtgcagtaagtaacgggcgtatatccagcgaaacaaaaaccacatgggaatatatccggagtacagcaatcattcgcattggtggacaaactacagcaggattacgccatttatttgggcatgtgaggaattttcgtctctggcataaagagctaacagatgcgcagcttggggaggttgtggagtga

SEQ ID NO: 27999 - DNA, 150 bp, Escherichia coli
atgcaaaccaccctgaatagggtatactacgcgggtcaatctgttgacgttcttctccagcccccgcttacgcggcgtgaacggtttaaagccctggttgaaaaacaggtggtgctgtttcaatgccctggctggagtgggaacatctaa

SEQ ID NO: 28000 - DNA, 654 bp, Escherichia coli
atgaaaggatattcgtatactgttgtcgataacaacatggctaaatcaaaaggtgttggctactatctgtcacgcctgtctgtagccataagtatagttattttaacaataagtcttccgttgactgtatattctggctttcttactttaggtggaagcctggcattggcgtggtttgttgctctacttgttttcgatgccatgctgatcacatatgttgtacgccaggtaaaaagtaagggagtcaaaaaggtcgttgcaggcatgagagtttatggatgctttaatccatcggctaaagaggaacaatacatgccggctcagaaaacatattttggtatagacatggactctggtgttgttgggattgctgccctttatgctgtacaggcctctattaagcaaaagagaattttgtttgaggctgagacaattgagtcttgggagtatactgatagtaaacttgtcgtgaatcttcggaaccgacatgtacctactgttgaaataatcttgctcaatgccggcctagcatatcgccagctggaaatgttaaccaggatgcatgagcaacataaaaaatacaggggtgaaaaatatctccagtggcgaaagactatgcttgatgaaggttggatgctaccacgaacgtattga

SEQ ID NO: 28001 - DNA, 2196 bp, Escherichia coli
atgaataagtcaagaaactcattggtcgcattgttgccgctatcgcttttcattaccccggcatattctgcagatctgggaattgatagtattacagaggctgctaaacggtctggtgatttgtcacgtcagatgctgcataccgtttttggtgaagtggtaaataatcctttcagtccgtcaggtgatgggttgttaaataacgtatttttcacagtgaatgaggttatcgccatattagcactgatttatatggcgataatcagtattaaaaaactacatcaggcaggacaacttgggaagtttatagagggtgatgggaataatgccttcaattttgttaaaacaacattcggctggctccttttggttccaactgttgttggatggtccgttgcacaactgctcttcctgtggtgtgggtccatcataggtgtaggttctgccaatgttattgcagataaaacagcgtcggaactagcgagtggcaaagctgtttatataacgccagttatgccagaaatggcttctgtggctaaaggaatgttcgaaatgaacttgtgcgctcttggtgtcaatcaagggttagctcagatggaggcttcaggccaacattatgaaagtaatagccagatgaagtttaatactggtgattctagttactcaatttcagttgacaatggttctgctgtttgtgggactgttaaattaccacaaaaacctacaggttggacttcggtattctccagtggttacgctgattctgtttatgcagttcaacagcaggctacagactcgctttggagtaagatgaagaatacagcagagcaatttaactctgcttatatgtctaaaatgcgttccggagatgggcagctgcctgacgttgaaactgcaattcagacagcagcaagagattaccaacaacaagtacagcaagctgcagacaatgctgccggaagtaatgatatgctccagaaaatggagtcggatataaaggaaaaaggctggctatatcttggtatttattatcataccctggcaactgctaacactgagctgaaggacgttgctaatctgaaacctattgtatcagggataagtggtgatggtgatgtaggttctacggactattataaaggtctgttccaggcatatcattcacaactgaaaaacagtacctacactccccctttaggtactgctgataatgctttagctcagaatattgacaataaaggcatcgaagaagcggcaaaaagtggtgatgcagattcgttgattaccaaaattttcaactttaatgttacttcatggcttgccactagaaactacggcactggcgatggatacagcgatgtaacgaatcccttgttgaaaatgaaagccattggtgattacacgatgtttactgctgagagtggtctagctgcttggggagctgttaatgtcgcaatgagtgttgcagatggtaataacgctgctggtatgggggcgggattacttaatttcttcacttcaggtaaggatattattaagggtgtaattaaaactgcggctccgatcgtatacatgattttagtcgctctgttctgtatagggttaacgctttcaatttggcttccatttgtgccatttatctattggtttgtcgcaatggcggattggttagttactttgctgactggtatcgttgcatcttcattgtgggccgctacccatattaacattggccaaactaatgaggaccggtcaacgtatggatatattttcctgatagatgtgatgattcgaccactgttgatggtaatggggttcatttttgcatcattggccattgtggctcttggcaccgcgcttaactatattttcaaaacagcaatggaaaatgtacaggcagattcaacaactggcctttggtcaatgataggtatcctttttgtctatgcaaggatgtgtacaggtatggttgctagggtatttgcattacctgcaaggatgcctaactacgtcatcagctggattggtaacaagcataacgattcaattcttggtgatatgcagaatcatgttcacgacctgtttgctgcatttggtcgtggagctaaaaatacaggtggacgtccttctgggccgaagaacttcaacccaaccaatacggttgataaagacaaagatggtatagcgggggcgtga

SEQ ID NO: 28002 - DNA, 597 bp, Escherichia coli
atgacagacgaaaataaaacaggggaagaagttacaaaatcccccggccgcatgaaaaaagcggtttatcatattaccggaattagtgatattcagtttatgtggaaatcactaagggaatctatcagcctgctcaatgagcgggcttctttcgttaagaagcaaatcaaaaatttggaagctccggacgaaaaatcagcttcgaatcagtcgtttgaggatgttgttaaaaagagttctatccccttagaacagcatctagctaaagccggtaagtataagaaatattggttatgttgcttctttatagctgtttttgttgccctgtttttaatcgctggctgtgtaaaattgattgttaatactgaatacaatgtaagccttctgaaggtgacattaacacttggtttaatgtttgctgtttgtatctactcgttcgtaaaagcaatgacttatgaatttttaggttggcaattacggaatgaggcccattctgaagaagaattcggtacattgagacattttattaacgataacggtgtgcgcaatacatttaattttgaacaagctggccagattcggggggcgcatgaataa

SEQ ID NO: 28003 - DNA, 351 bp, Escherichia coli
atgaataaaaaatatgaactggttgttaaggggataaataattacggggataaggttactgttactgtgaagcaggaaggtgacgggcaagcgtcgctgttgttgccagatgtggcgattagtcttgaccgtactgaaggtgccacgctggagttttacgaagctgaggcgaaaaagcaggcgaagcagtttttcatggatgttgctgccgggttatgtgaaggggatggtccgttgccggaaaagcgccccgtaattttagaggcgcaggatgtgttgataacctacaaaggaaagctaccgggaagaattactggttctctgaagactccaccggaatcacaaccttaa

SEQ ID NO: 28004 - DNA, 696 bp, Escherichia coli
atgaaaaaggaaatactcaaggctctttgccctacatgcggtgggttacgtaactgcactgtgcatgggaagctaaccactagctgggaggattcccaatatccagtttatgggtaccattaccatcacctactccaatgcaatggctgtgatactgtcttctatcaccacaacgaacacttcagtgagcatactacccacgaatatcgtgatggtgaatttgtagaaacgcctatagatatgatcactacctatcctgccgctgaaacatttcaagctccgatatggttatccaagcttgaatcagttgatcgtcagctctttcaaatatttaatgaaatgtattcttcatatacttctgaccatttcattctttcgtccatcggtttacggacgatttttgatcgaactgctgaactgttacaaattcaccccggtttgccgcttggtgaaaaagttgaaaaattaaaacaagatggagtcataggcgacactgaggcatgcgttatatcttcagtaattgatgcaggaaacgccgccgcacatcgcagttggagcccgaataaaagtgagttcgaacaaatgctagaagctatagaaagttttgtccaaagaactatcttgggcaaaaaatcacttgaacatataaccaaacaactcccacctcgggttacaagacctaaaaatagtgcataa

SEQ ID NO: 28005 - DNA, 504 bp, Escherichia coli
atgccatttgcgcgctatttctgcattttcataaacgttggtttgggagaaggttcggcattacccgttggtgtgcctgttccgtggcctttagccactccaccaacaggatggctgaaatgtaacggcgctccatttgcagctgaaaattatccgaagctggcactggtttaccccggtcttgtgctgccagatctgcggggtgagtttattcgtggctgggatgatgggcgtggagtggacagtgggcgagcgttattgagtgctcagagcgatacgctgcaaaatattacaggtagcttttttgatatgaccacggggacaaataataatactttcggcgcatttacctcttcaatagtgcaaccaaatctcacaccaattgcgataggtggtacatataaacaggcgaattattattttgatgcatcacttgttgccagaacatcaacggaaacacgtgcgcgaaatattgcatttaactttatcgtgagggctgcataa

SEQ ID NO: 28006 - DNA, 444 bp, Escherichia coli
atgtctgaattatcatctgaaaaaaataaagaaaaatcgttattaagcatatatgttccagggtttattttttcctgtttagctctaatactttgtgtgttcgaatatgtcgatagcccattttatttattgatccccataattccggtggtatacattctttttagaatcattagaaccaaaaataaaatagaacgcgatgttataaaatccttgaacgacagtattcttttctctatcagttttctaaccacttgcacccttacatttaaaacagtagattacctgaactatgatatctttaatgaattaatgaaaaaaaacactggctattacttaatatctatttatgccattttattttctataaaaacatcaatttcaatatgtgaggctattgaaaacaataaggctttgaaagaaagcttgaagccaaaaccttaa

SEQ ID NO: 28007 - DNA, 204 bp, Escherichia coli
atgattaaaaaaaagtcaaataaattactggcaatatgtatggttgttttatatttgctattagttatcgctttaattgtttgtttaaatataacaccagcttttcattttaaggatatattggtggctattcttatgttggtcgtcatactaatcccttgggttataatcggtgcgaaaatggtatttgataaagaagattaa

SEQ ID NO: 28008 - DNA, 321 bp, Escherichia coli
atgtcgtgggaaatagtttgtaaaacagattatattgattattctgttgcgaataatgaagatgaatcattttttacgaatcaaatagtattatcaaatagagagatccaccaagagccaagcagcgaatataaagctccaaaagatgatgtaatggttgacacttatattgcgaactctgaacatggtatatttcaatggacagtgacagcccgccgcactggttttaattcttttgctgaaattgaggataccattttaactgaaccgaatgactgtgaagcattaagctctgcatattttgatattgaatcggattga

SEQ ID NO: 28009 - DNA, 333 bp, Escherichia coli
atgagtaaaacaataactttatcctatacaaatgactttaaaccaatcatcacccctgctcaatcattacgaatacactgtgtcagtgttcgattcaatcaagccgaattagagcttctgaatgctaatcgtggaaacaaaagcaaaggtgaatggcttcgcttaacctctcttgataaacttcctcctgtcgttcctgctataaatattgaagcttggaaatcattgtctgatatatcccaaaagctgaacaaactaataaatcatcttgatgcaaaaagtagcaatagtgaatttgtaagcacacccgttttagttccacgcactttttga

SEQ ID NO: 28010 - DNA, 795 bp, Escherichia coli
atgagcgtacgccaggcatgcaggacgttatcgctgagcaggacggtgtatttttatcgcccggatagcgggcgcgatgaaccggtgatccaggcgctgactgaggctgctgagcgttatccccgctatgggtttaagaaactgtttcaggtgctgcgccggcaaggccacgcatggaaccataagcgggtacaccggatttactgtctgttaaaactgaattttcgtcgtaagggaaagcaacgtctgcctgcgcgtaacccggcagcactggcaacgcctgaggcacttaatcagagctggtcgatagactttatgcacgatgcgctgatctgtggcagacgcttccggaccttcaacatggtggatgattttaaccgcgaggctctcgcaatagaaatcgacctgaatatcccggctcagcgtgtcgtccgggtactggacagggtagcggcaaaccgcggatacccgctgaagatgcggatggacaatggaccggaattagtctcactggctctggcgcaatgggctgaagagcatggtgtaatgctggagtttattcaaccgggcaaaccgacgcagaatgcctttattgaacgttttaaccggacctaccgaacagaggtactggatttttatctgttcagaaccctgaatgaagtgcgggaaatcaccgagcgctggctgacggaatataacagcgagcggcctcatgaatccctgaaggatctgacgccggaagagtaccggctgatggctgacaaaccggaaatctcaaaaagtgcgtggaactaa

SEQ ID NO: 28011 - DNA, 1047 bp, Escherichia coli
atgactggtgattgtgcaaaagaactgatagcagagtttgatactgcaagtaagctcagaaccgacattgctaaaccagcctggcacaattcgctcaggttaccttgtggcgatacactttccagtgaccaatggataaagatcgctgacgattatatgaatcaaatggggtttagtgatactcactttcgttgttatgttttgcatgatgacagtgcaggccagcacatacacatcattgctaaccgaatagattccgtatcaagtaaggtcaacttaggaagacatgaaagtttggtcagtggtcggataattcaggaactagaagtcaaatacgacctgactataacaaaaggaccagaaccattaaaaccagagaatacgggaaatgggaaaaataatacaataccaggaaaagccaagaaactttcaagaaatgaaacaatgtatgaaaaacgaaccgggaatatctgcaataagaagcaattacagaccatccttgataaaagtttgactgataccccaagtgttgagactttcctgttaagacttgaagaggaaagagttttatggacagctaacatagctaccactggtagaatgaatggattatcgttcgtgtttaacggaatcgcattcaaagcttcactgcttgggaaaaaatactcatgggtaaatcttcaaaagcttctcaactatgagccagagcgagacaactgcctactgttgcataccggcacagtggctcctgctcctgctccgattttagggtcaacagaaagaagagaaagtatcagcgaaaaaatcgctgaactcgaactacgattcatagaaggaagacgaaacgaaatcgtagaaaagattcttcaaaagaatgccgtcaaaaagcaaaagcatctcaggctcagtagctggttcccctttttacaacggctcatagagattctccgaagctacggtaagagcatccttcacaacaaccctgcaaaattctcaaaagtctatgcaactcagcatctaagccagaaaataaaaatccgtttatag

SEQ ID NO: 28012 - DNA, 327 bp, Escherichia coli
atgaaactctctgcgccggtagcggaactctcacgcgtgcggtcgccgtcgtcacagctcccccaaccgcaaacggtctttgcaaacacgcaagcatctgcaaaaaaaggatttttttcgggtgtctggggaggctgtgaggcggaaaaattcttgaagaatacagaaggttcatgcaaactgaatgaactggtttctgtcgccgcaaacaacagactccacaggaacattgaggaggtcgaaaacctcaatgaacccgaagaagctcgcctaatggcgggcttttttcgttctacgctccccgacgaaagatcgcaagtgaaataa

SEQ ID NO: 28013 - DNA, 477 bp, Escherichia coli
atgcaggtgctaaattcccagcgtaaagcttttctggatatggtggcctggtcagaaggaacagataacgggcgacaaccgacacgtaatcacggttatgatgttattgtcggtggtgaactcttcactgattactccgatcaccctcgtaaacttgtcactctaaacccaaaacttaaatcaacagccgctggacgctatcagcttctttcacgctggtgggatgcttatcgtaagcagcttgggctgaaagacttctctcccagaagccaggactcagtggcattacagcagattaaggagcgtggcgctttaccgatgattgatcgcggtgatattcgtcaggcaatcgaccgttgcagcaatatctgggcgtcgttacctggtgcaggttatggtcagtatgaacataaaataggcgacctgattgcccgatttaaagaggctggtggggaagtaaatgaagctgagatataa

SEQ ID NO: 28014 - DNA, 1032 bp, Escherichia coli
atgagcaagcgtgaaatcaaaactaaaaaaataatctataaagaagtcacaatgtcaggtgtgtcaaagacgctccagtcgatgctaatggagctgctcaaaaaacacactaaagcagattctcgcaaggaaatggtcaacccaggagaggaagacttattccgattaattaataaacatgaagagttccagggaatgctgttttgccagcttgttgccttcgaaccaggccattctcaacgctatatacagcttaaaaatgatgctgaatcttatgaaataagatccgtaacatcagatgaactttctaaaatgactgttgaagaagctgaagaagcacgcacagagagggaacaggttgtgcgtgagtttatagattcaattctttatttcggtgtatttggtaacagcatcgtagtaatgcaatccagatctcttacaacaagagaacttgaaacacatctgaaatggttacttggctctttaagcaattacttaggcgcagaaaacatcttaaaagtttccgataagcccaaagaagagatcattgaggaagttctaaaacgacctgtaaaatcagtttctataggtgcccctgtaactgccgttaacgaatttagtcaaggaagcaaaagcccaggctgggttcccgcaggaactgcctctgaactccttaaagctatgttagcagagaaatgggaaagcttcttacgtagtagcaagcttgaagattgtcttgatgacgctaatcttgaagtaacgctgaaaatcacatacaagaggaaaacttctgattcaggagaaaggatgttaagaaatcttgttgacgctaccagacactacccggatgatgacgtcgttgttgaaatggttggtgggacgcgtttaactggtaaagagattcgtttatggaatactgttaaactcacaacttacaatagcttaattgatgaacatgaactatatggccaaatgcatgattggatggtcgctctgatcaacaatggagaaatagaagagaccgatgaatag

SEQ ID NO: 28015 - DNA, 540 bp, Escherichia coli
atgaatagagaggctgctaagtgcatatcctaccaacaaccaagtagagcattccacttggttgttgtagtattgcttatgtttacagcctggtttatcgccaataagtacatcattttaacatccattccttggggcgtattaactatcctcatcttaccaattgcaagtagcgcaaccctgtttcataagttatctgaaacccaaaaaaacgttgctgaggatttatctcgcaatgaacaaagaaggttaacaaggcttattaaagaaaaaagccgggcaacattattcatgcttacgctacaaatttcgataataatttttgtggcattgattagccttggcaatgagtcctcttttgttcaacagcacattcatactataagtaaattcgttgtttgtgctttggttttttcactatactcattaatccctgttttactaggagtaaaggaagtcattgattttgaagggttaataaaaacacgaaaaacattaaataagcgtaaaaaatctgcattatccaagcttgggaagtaa

SEQ ID NO: 28016 - DNA, 1221 bp, Escherichia coli; identical to SEQ ID NO: 5756

SEQ ID NO: 28017 - DNA, 639 bp, Escherichia coli
gtgaagttcaggctggatagtgacaaagataagtggctggacataaaaatgtgcagggggagttcagaggcaaaatacctggggacgggaaccctggcccggaaaaaacgctcgcagtgtgaaggacatttttatctttataaacattcacctaaaggcagaaaaagcaggcgtgccagagggaggccgggcttaccaacaacggaaaaagaacaaaaagccgcaggcagagaaccatggttaatattcagcaatacagctgagtttaatgccaaaaaaatcatgaaactgtacagtcgaagaatgcagatagagcaaaactttcgggatgaaaaaagtgaacgctttggttttggccttcgggcgagcagaagtcggaggggagagcgttttctggtattaagtctactggttacactggccagtatcgtactctggctacttggttatcattttgaaaataaaggatttcatttaaagtatcaggctaatagtctcaaaaaacgaagagtattgtcttttctgacgctggctgagaacgtcctgagatttaaccctgaacttctacgacgagcacaacctgaaaagatattgtgccggttggccagcacttaccgaagtatggtgctggcttactga

SEQ ID NO: 28018 - DNA, 552 bp, Escherichia coli
atgcctgcccgtaaagtatgccagacttttttccgtaatgctttagcttccacgcatcagtatcgacaaaatgccattattgattctgctgctgctttagtcggtggcgcatctctttctcttaccagcattggccggcatttactcggtcctgctcgcgtgaaagataaaataaaacgcgttgaccgtctgttgggtaataaacgacttcataatgatatccctctgatattcaaaaatattacatccatgatgacaaataaactgtcgtggtgtgttatcgctgttgactggagcggttacccttttcaggaatatcatgtccttcgtgccagcctcctctgcgacggtcgctctatccccctgatgagtcaggtcttcccgtcaaaaaaaataacgaggcggtggaaatcgcttttctggatgcgctttccggggccatttctccccggactcgtgttgttattgttactgatgctggttttcaaagtgcatggttccgtcatatcaaatcacagggatgggattttattggtcgtatcaggggggtag

SEQ ID NO: 28019 - DNA, 132 bp, Escherichia coli
atgagctcccgattttatttcatcattatatatcattttacctatattaatcagattctaagtaaattacaaaacaaatacttcttgtatattactaagcgtcttagcacctataccttttatgctttttaa

SEQ ID NO: 28020 - DNA, 234 bp, Escherichia coli; identical to SEQ ID NO: 10186

SEQ ID NO: 28021 - DNA, 204 bp, Escherichia coli
ttgtttcctccggataaccggatccgcgatctggacaactataacaaggcgctgtttgacgccctgacccacgcgggtgtgtgggaagacgacagtcaggtgaaaagaatgctggtggagtggggaccggttatcccggaggggaaggtcgagatcactatcagtaagtacgaaaaagcgagttgcaaattagcaactcggtaa

SEQ ID NO: 28022 - DNA, 573 bp, Escherichia coli
atgacaatggaaatacttacagcaattcttgttatcattacaggaatttatgcatttttgacatacaagatgtcgagaataagcgaacgaacagctcagataatgaatgagcaaaccgaggcaatgtctcgtccttatataataatccagccaatggtaagacctcactcgcaattcctatacctgaaaatttataatagcggtaagacaccagccctgaatgtaaaattagaattagataaggatttttatcagttcgatgagccaactaaaaacctaaaagaaacaagtatttttacatcgactattgatagcttagcgcccaatcaagagttattcttcgcccttggtcaaggttgggttatttttggagaatcgaaaaatccgttaccacaacaatttacgataaccgcaacgtacagttatatgaataaagaagttgttgaaaaaaataatatagacttaagccctttcatgcaaagtgaaggcgagaaaaatcccattgttgaagaacttgaaagaataagaaaaattcaagagaaattgataaaagtgtctaacaaatcgatataa

SEQ ID NO: 28023 - DNA, 1032 bp, Escherichia coli
atgccgatcatagtaccaataccccgtggcgaacgacgcctgatgcagaaagctattcataaaacgcgtgataaaaatcatgcccgcagactcacggccatgctgatgcttcatcggggtgaacgggtcagcgatgttgccagaactctctgttgtgcccgttcatccgttggtcgctggattaactggtttacgcactcaggtattgaaggcctgaaatccttacccgcagggcgctcccgacgctggccttttgaacatatctgcaccctgttacgtgagctgataaagcattctcccggcgattttggttatcaacgttcacgctggagcaccgaattactggcaataaaaatcaatgagataaccggttgccagttacatgcaggaaccgttcgccgctggttgccatctgcggggcttgtatggcgcagggccgcgccaactctgcgtatccgtgacccacataaagatgaaaagatggcggtaatccacaaagcgctggatgaatgcagcgcagagcatccggtattttatgaagatgaagtggatatccaccttaatcctaaaatcggtgcggactggcagttgcgcggacagcagaaacgggtagtgacgccggggcagaacgaaaaatactatctggccggcgcactgcacagtggcacgggtaaagtcagctacgtgggcggcaacagcaaaagttcagcgctgtttatcgctctgctgaagcacctgaaagccacttaccggcgggcgaaaacaatcacgctgatcgttgataactacattatccataaaagccgcgaaacacagcgctggttgaaagcaaatcccaagttcagggtaatttaccagccggtttactcgccgtgggtgaatcatgtggaacggctatggcaggcacttcatgacacgataacccgtaatcatcagtgccgctcaatgtggcagttactgaaaaaggtccgccattttatggaaaccgccagcccattccccggaggaaaacatggtcaggcaaaagtgtag

SEQ ID NO: 28024 - DNA, 429 bp, Escherichia coli
atggacaaaaacaattttaattcagtgatgacactggaagaacagcttgttgtcatagtagacaaatacatatcaaaacgatatcagccacacgataaaagtttttctcatcaactctatttagtatttgttggctatcacttaaagtatttctatccgaagcagctatacactcgttctaatcgcaatatagacaacatcatgacgatgttcagttctgtgtataaatgccttacaagtaatctgttacagcgattaaacaacaaggaaggagttcttagggagttgaactctcttgttaattacatcgatagaaatcaagaacaaacagaagaaatctatgcaacatttaaagctcaatacgaaatgagagttattgaaaaagaaattattcaagaggtggttaaagtaaggaatgttagattataa

SEQ ID NO: 28025 - DNA, 384 bp, Escherichia coli
atgagtaaaaagtttaacaaggaagatattgaattcgttctcgataaaataaatggctgggaagggggtttaacctgggttagtctttgtgattcgcttgaagaacatttttctaaaaaaccaacgaggcaggctctttcaagacatgcagtgattgcttatgcatatcagcagaaaaagaaaattaaaggtgaaactgtgaagcatatcaaaagcccccagagtcttgcttatgcttcgagtaaaattaataaattagaagcagaaaattcgaaattagtaagtgaaaataacagacttctacttatggttagagatcttcaaatggtcgcatatagtaaatgtattagagaagatcggattttccccgaaaacaaaaaataa

SEQ ID NO: 28026 - DNA, 684 bp, Escherichia coli
atggtgggctgggtgggggcaccgaaaggtgcgccggtttccgtatgcgccggttacgccaaccctgctcagttcaccaccagcgaaattggcgtttccggtggtggaagttatccattgcatacggaggctgccatcatggctacgatccctgccttagttcaacctgaactttgcattattgcagacaaagttgttacttcttctctggctgttgctagttatttcggcaaacaacacaaaaacgtcattcaaaaaattgcgtctcttgaatgctctgccgaatttactgagctgaatttccagctcagtgagtacatcgacgcatcaggccgcaaactaccttgctatcaaataacccgcgacggctttgcgtttcttgctatgggtttcacgggtaaacgtgctgcccagttcaaagaggcatacatcaatgcctttaaccagatggagaaacagctttcaaagcccgctgtaccgagcgacgttgcacataacgccagcgttctctgttcctacatttcatcaattcatcaggtctggctgcagcagctttatcctatgttggcaaaagccgaatctccgctggctgttagcttatatgactatattaatgatgcttcggcgctggcctgcctcataaatttgtcgctgaacccttcagaggtaagggggcgcaaatga

SEQ ID NO: 28027 - DNA, 249 bp, Escherichia coli
atgctgaagtttaccgaacgcccggaccttatcggtttcatcggtggattcatacgccaggaacccttttggcttcttggtgccatcgccggtggtaaaggcaatttcttcctgttcggcaaattcggtcgccagctcgctgttgatccaggcctccacgttgaagaaggcatcatccagcattttctgggtggcctgcgggttaccgtagatttcccccatgaaaggttcaatcagtcccagttttga

SEQ ID NO: 28028 - DNA, 270 bp, Escherichia coli
atgattgtgcttcacgtcctgtgcctgctgccgctgctgacaggttgcggaaattcgcggacggtttacgtgagcgctccggtggcaccactgccagccagcctgacttctgatactcctgtaccgtttatacccaatccgctgacgtatggtgccagtctggagttgaatgtgagtctgttgtcagcgttgggacaatgcaatattgacaaagcggggattcgaagtatcgagatgcgccataacgctttgctggcagcaggcaaataa

SEQ ID NO: 28029 - DNA, 162 bp, Escherichia coli
atggtcgatcctgtactgcttaaggcgcataacggtctgcgcatccagatgaacggaaccaccttttacctcgcctgtgttcaggtcgttaatacaattcacagtaacttcctcttactgactaaactgcgcgcattattgatcgataaaagtggtagataa

SEQ ID NO: 28030 - DNA, 330 bp, Escherichia coli
atgaaaaaatttgctttactggcgggtctgtttgttttcgcaccaatgacctgggcgcaggactacaatattaagaacggtttgccatcagaaacctatattacttgtgcagaagccaacgaaatggcaaaaactgacagcgcacaggttgcagaaattgttgcggtaatgggtaatgccagcgttgccagccgtgatttaaaaattgagcaatctccggaactgagcgccaaagtggtagaaaaactgaatcaggtttgcgctaaagatccgcaaatgctgttgatcacggcaattgatgacaccatgcgtgctatcggcaaaaaataa

SEQ ID NO: 28031 - DNA, 639 bp, Escherichia coli
atgaccactattaccaaagaacgtattgaattgttcattaaaaatccgcttgaaaacggacttacccgtggcgaacaaatggaactggcacggattgcactggcatcactgaaacgcgaacagattcgccacgagcatgccaaatggtctgactccacatttggctgcgttggccccattggtccactgaaacacctctcaaaagaggcactggaagccgcagccgaaccagaagatcttagcgagtgggctgatatgcagtttctgttgtgggatgcacagcgccgtgctggcatcagcgatgctgaaattaccgctgctatggaagataaattgaagatcaacatggagcgccagtggcctgagccaaaagatggtgagcctcgcttgcacattaaagaacccggcaactctccggtaattccggatggttggataagctgtagtgatcgaatgcctgaaattagacaaacagttattggatggaatggatatgcagttagacaatgcgtatatacaaggaatgaatatgccaagacacagaaaggcagagagccaaggtttgaaaccttaactggtatatggcatggagtaacccactggatgccgctaccggaaccgccgcaggaggcgaagtaa

SEQ ID NO: 28032 - DNA, 189 bp, Escherichia coli; identical to SEQ ID NO: 11611

SEQ ID NO: 28033 - DNA, 204 bp, Escherichia coli
atgctaaaacagcaagatatgacagaaaccgccgccgcagtccttcatttcttacctgctggcaagtgggtaacgccacgcatgatgacgagaactaccggagtaagcgaagcccggtgccagttaatactgactcagttagttctggcgggtctggcgaaggataacggcgggtacgggaataaattcagacgctgccagtaa

SEQ ID NO: 28034 - DNA, 150 bp, Escherichia coli
atggcaaagaattttgtagaagaaggaaaaacggtggcgattgttgccagtgcagccatcagcagcggagatctggtgcaggtgggtgatgtttttgcggtggcgctgaccgatattccacagggtgaaacaggcgacggcatgacctaa

SEQ ID NO: 28035 - DNA, 183 bp, Escherichia coli
atgctggcagttttccaactggtcaaaaatacctgctctcgtctgttgcaatgcctgcagcatgcggcggcaatgcgccttgcttttactaaccatctttccttcctctatcagtcgctgcgtgaactcatcatggaataccaggtaaatgcggatgttatcggttttggctacgcagcatag

SEQ ID NO: 28036 - DNA, 252 bp, Escherichia coli
atgaaaatcagaaatattctcgctatctcccttgcgacatcatccttcagttgcctggcatttaaatcctcgcccaatgtgctaccaggaccaacgaatcaactaactgcggtagaaagtaaaattatcggacatttttatgccccacacagtacattacccggaacaaccatcacagggacatgtgacgcctcccccgtcccgggatgcacctgtccgttttgtactatgctgcgtagccaaaaccgataa

SEQ ID NO: 28037 - DNA, 1035 bp, Escherichia coli
atgaacagcaatagtaaatcttgcaatcaatcattttttaagttagatttatttggtcttcttatttacattataaaaaaatatggatttattatagttgttgccataatcatggtttcacctgtgatgaattttgtgcttaaaacttcgctttcagacattcaactggaatcatcatcaatagtaaatttaataaacgagaagaaagagtttattttatttacagcaactgccctagtttttgttggttcttttgtcgcaataatgacttcttatttaaacaaaggaattggtggtagagatattgaaaacacgagatatatttttcacaaagaaatagttaagctaaataaaaaattgagcgaaattgaaaatagaacatcttccggagtttccattgaaataacagagagtgaaagggagaagttaatatccgatgcaaaaaagagaataattggaaacacaatacttctggcagataacagcctaaaaagcgatatatctgattttaagaagagctacagcttacataaactccatactgatatggttctaagattagagtctgaaatagacagactcaatcgacgaggtgggcttaaccttgcaatcggaacaataattgcgttgacagggatattatctcttgcttactttctttacagcgcgccagacattgtggatggggtgggattttttattcatcaccttcctaaattatcatttgtaatagtcgttgaattgtttgcttatttttttctacgcctctataaaaatgggtttgacgaaatcaaatattttcagaatgaaatcacaaatattgagatgaaagtcatgtctctaaaatatgctcaagaattcaagaacgaagacatgataaaagagttggcaatgcttttaatgaaaacagaaagaaatttcatattagaaaagggacaaactacagtttctattgagaaagatagactgcagaatctttccgattcaaagctaacaactatgatatcagaaattataaagctaaaacaaaagtga

SEQ ID NO: 28038 - DNA, 315 bp, Escherichia coli
atggcgcatcatgaagtcatcagtcggtcaggaaatgcgtttttgctgaatatacgcgagagcgtactgttgcccggctctatgtctgaaatgcatttttttttactgataggtatttcttctattcacagtgacagggtcattctggctatgaaggactatctggtaggtgggcactcccgtaaggaggtctgcgagaaataccagatgaataatgggtatttcagtacaacactggggagacttatacggctgaatgctcttgcagcaaggcttgcaccttattatacagatgagtcgtcggcatttgactaa

SEQ ID NO: 28039 - DNA, 552 bp, Escherichia coli; identical to SEQ ID NO: 11816

SEQ ID NO: 28040 - DNA, 1035 bp, Escherichia coli
atgcagtcagtcagtaaatcaatctaccgagggaagttgcttggcagtttacctgctgtgggcgagattcataaagaaatcgcagtatcagaagaaaccgtaacatggatctctctgcaacgagagattatagcgaatattttgctgggaaaagatcctcgcttgcttgtgattgttggtccatgctcaatccatgacgttcaggctgccgttgaatatgcgaaacgattgtccgtattacagaataagtacttatcgcaaatgtacattgtaatgcgcacttattttgagaaacctcgaactcgtaaaggctggaaaggaataatgcacgagcctgatctaaatggaagctataatgttgagaaagggatacgatatgctcgccagtgtttgtcctcaatcacaacaatgcgtgtcgcaaccgctacagaattcctcgatcctttccttactccctatattgctgatttaatatgttggggggctgttggtgccagaactactgaatcacaaacgcatcgtcaacttgcatctggtttacattgtcctgttggatttaaaaacagcactgatggaaatattaacttagctattgatgctattcttgcagcccgtgaacaacatgttgtatatatgacatctttaacaaaatgtatatctaccctattaaccgatggcaatccacatggacatctcatattacgtggtggtagagagccgaactatggtttgtcggatataacgaaggcagtgaaattaatgcatgatgaaggtatcaatcatcgtctgataattgactgtagccatggtaatagtggtaaagtggctgaacggcaaatctctgttgctcgtgaagtcattgataatcggaaaaagatgccgggatatgtagctggaattatgctggaaagctttttacaaggtggaaaacaatcagacagccttccgcgagagtatggtcagtctgttactgatgagtgtctttcatggcaacagacagaacaattattatcaactctggcagcacaactttaa

SEQ ID NO: 28041 - DNA, 1752 bp, Escherichia coli; identical to SEQ ID NO: 11847

SEQ ID NO: 28042 - DNA, 489 bp, Escherichia coli
atggcgaagcccttcggcacccacgctgaaatccacggtctgcgtttccagcagttctgttttaatcagccacagcccggcgcggtgtgcctgcccccggctggtacagccaaaagcatccatcttcgtgacgttacgaccgtaacgggcaatggcctgcgtatcctccacaagctctgtcgccgtctcccagccgttgttcgggtcaatccagttcacctcaacggcattatggcggtctttcagggcgctgaagctgtagcggaacggcgcgccatcatccggcatcaccacattactgcggttataggtccacaccttatccgacggtcggtcctgcacgaacgtcagcgtctgcccgttccataccggcatacagcgcatcgccgagcagaaatcactgagcacatcccacgccttgcgctgtgtggtcaggtacgcattacaggtgatgcgcggctccgtgccgccaaagccgtccggcactga

SEQ ID NO: 28043 - DNA, 375 bp, Escherichia coli; identical to SEQ ID NO: 4464

SEQ ID NO: 28044 - DNA, 645 bp, Escherichia coli
atggctctttctgtagtacatcatgaatttaatggtaatattagggcaattagaagtgcgctaagggaattaaaagcatgggctgacagaaatcctaagcttgatattatataccaaaaaatcagaactagttttgatcacttagatggttatttaaaaacctttacaccattgacaagacgtttaagtcgctctaaaaccaatataactggaactgccattttagaatttatcagagatgtattcgatgatcgtcttgagaaagaaggaattgaattattcactacctcaaagtttgttaatcaagaaattgtaacttacacatcaaccatttaccctgtctttataaatctaattgataacgcaatatactggcttgggaaaacaactggagaaaaaagacttatacttgatgctactgaaacaggatttgttattggtgatactggtcccggtgtttcaactagagatcgagatataatatttgatatgggatttacacgaaaaacaggagggcgtggaatgggattattcatttccaaagagtgtttatctcgagatggatttactataagattggatgattacactcctgaacagggtgctttctttattattgagccatcagaagaaacaagtgaatag

SEQ ID NO: 28045 - DNA, 225 bp, Escherichia coli; identical to SEQ ID NO: 11866

SEQ ID NO: 28046 - DNA, 405 bp, Escherichia coli; identical to SEQ ID NO: 2569

SEQ ID NO: 28047 - DNA, 273 bp, Escherichia coli
atgacgtcgctggcaaacaagcttaataaatttgatgtcggctgggaagggaatgcagtgaacgaatctagtttatatgccctcagtaatactggttcatggggagcaatgatgtgggattctggaagtaaagtagggcattgggtacttgttaagggtgttgatgatgctgggaatgtgataatatatgatccatatcaagggagtcgatatctgatgactgaacaggaatttaaggaggtatggaatgggcatagtgtttacaaaccataa

SEQ ID NO: 28048 - DNA, 2622 bp, Escherichia coli
atgcagcaggaagccaatgtaatgaaaacaacgacatcgactaaacgccataatcttacgcgtatcgcaatgtattgctcaatcatgtatagcggcgctaccatcggagccgaaagtgttgagtatgaccctacctttttaatgggtggcaacgcttccagtattgatgttagccgctatagcgatggcaacccgactttgcctggtgtttacgatgttagcatctatgttaacgagcaacctgttgctaacctggagatcccctttatcgcgatccccgataaaaagaatgctcaagcctgtattaccctgaaaaatctactacaactgcatatcaagacacccccggcagacgaggaaaatactatccttcttccacgggatgaaacgcttggcaactgtcttgacctgtcgttagccatacctaaatcctcagtgaactatgacccctctgaacaacgtctggatatcaatgttccccaggcatgggtgatgaagaattatcaaaactatgtggacccatcactttgggaaaatggcattaacgcggctacgctgtcttataacatcaacgcttatcgcagtgaaaattcaaattatacaaatgatagcgtttatacatcgttcaatggtggcgtcaatttaggggcctggcgtctgcgtagcagcggtaactatagctggagaaacgacgcgggaagcaatgttgagtttatgaatcgctacgtccagcgcgacattaccgctattcgctcgcagctcattatgggggaatcctacaccacaggtgaaacgttcgactccgttagtatccgcggcattcgcttatacagcgacagccgaatgctgccgcctgtattggcaaacttcgccccgacaattcgtggtgtagcaaatactaacgccaaagtcagcatcacccagagtggatacaaaatttatgaaaccactgttccaccgggaccttttgtcattgatgatctcagcccgtcagggtatggcagcgatcttatcgtaaccattgaagaagctgatggcagcaagcgtacattttctcagccattttcttcagtaattcaaatgctgcgcccgggtgtttctcgctgggatatcagcggcgggcaaattaataaagacgacttgcatcatgaaccaaacttactacaagcgacctattaccgtggtttaagtaaccttttcactggctatactggttttcaggtcacagataatcattatgctgcaggcttacttggcattgggatgaatacttctgtcggcgcaatttccttcgatgtcacccactccagtgtcgatataccggatgataaaaggtaccaggggcaaagctatcgcatctcctggaacaaattttttgacctgacagatacatcattaaacatcgcggcttaccgctactccacgcaggactatctgggcctgaatgatgcattaacacttattgatgaagttgaacatcccactcaggatcttgatcccaaaactatgcgcaactacgggcgcatgaaaaaccagttcaccgtaagcattaaccaaccgctacgctttgggaaggatgattatggctcgttctatacatctggaagctggtctgattactgggggggcagtaagagccgtagcaactattcggtcggctacagtaacagcgcttcatggggaagctacagtatcagcgctcaacgatcctgggatgagtacagccaaacagaaaacagtatttacctcagcttttcgatacctatcgaaaagctgatgggtacggagcaccgtgattccggtttccaaagtattgatacacaacttagtaccaatatggatggtaataatcagttcaatatgagcagtagcggttatagcaacgataaccgcgtgagctatagcgtgaacgcgggttatgggatgaataaaaccggcaaagatctcagcaacattgggggttatgccagctatgaatcgccatggggaacgctagctgggtcagtctctgctaccagcgataataaccgccagtactccgttaatacagatggtggatttgtgttgcacagcggaggactgacgttcagcaacgacagtttcagtgataatgacaccattgctctggttaaagcaccgggtgcaaaaggggcgcgtattaactacggcaacaataccgttgaccgttggggatatggcgtaaccagtgctctttcaccataccaggaaaacaaaattgctctggacactgaaaacctggaaaacgacatcgaaatgaagagcaccagtacggttgccgtaccacgccagggctcggttatctttgctggttttgaaaccaatcagggacaatctgcgattatgaatatcaaacgcagtgacggaaaaggtatccccttcgccgccgatattcatgatgaaacaaatgcaatcattggcaacgttgggcagggcgggcaggcatttgttcgcggtattcagcagcagggcacgataaaaatcacctggctggaagccagcatgcccaaaacctgtattgcgcagtaccagcaacccaatgtgacatcggagaaaatccagcaaacgattattctcaataatattctttgccagctccaataa

SEQ ID NO: 28049 - DNA, 549 bp, Escherichia coli
atgggccaaatcatactttggcctatgaaaaaagaaaccgatatccgacgcggaaggcattgtgttttcctgaagcatgttcacctagtcttcgttactaaataccgacgtcagatttttgaccatgacgcgacagaaaaactacgcacttacttttcaaatgtatgtgctgattttgaagctgaacgggttgaaatggatggcggaccagatcacgtccatttgttaattaactatcctcccaaactggcgatatccagtctggtaaacagcctcaaaggcgtatcgagtaggttactgcgacgagatcgaccagatattgcagtcaggtattacgacaaaggcgttttgtggagtcctggctattttgtcagtagctgcatcttaacgtatcaactagatttaataacaacgatatccgtacctaaccggatatctaatgtcataagcatccctttaattatcccctcaacctcttgtaactttcccactcttgagctccacatagtccaaacgccggatgcaaaaaaatcacacgtgcatttctga

SEQ ID NO: 28050 - DNA, 336 bp, Escherichia coli
atgagtaaaattattatatttacaatgtttgaaaagaaatctttgctattttttatttcatcgattttttccgctgaaatgtttactaagttttcatttccggaaatgaaaagcaatttgccatgggggctttttttaaattgttcttctgttttagaaaagacatcctctttaaaaggtggcaactcactaccagtaataaacggtttcaataaattcgaatttgaaattgtcatatctttgctccactacagggttatcctggagcatgttgtacataacatcatgggcaaagaataccaaaaatcgctcatatcgatcaggacaaatatttaa

SEQ ID NO: 28051 - DNA, 1083 bp, Escherichia coli
atgcaaccttttggcgtacttgaccgctatatcggtaaaactattttcaccaccatcatgatgacactgttcatgctggtgtcgctgtcgggcattatcaagtttgtcgatcagctgaaaaaagccgggcaggggagttacgacgcgttaggcgcaggaatgtataccttgctgagcgtgccgaaagatgtgcagatcttcttcccgatggcggctctgcttggggcgttgcttggtcttgggatgctggcgcagcgcagcgaactggtggtgatgcaggcttctggttttacccgtatgcaggtggcgctgtcggtgatgaaaaccgccattccgctggtcttgctgacgatggcgattggcgaatgggtcgcgccgcagggcgagcagatggcgcgtaactaccgtgcgcaggcgatgtacggcggctcgttgctctctacccagcaaggcttatgggcgaaagatggcaacaacttcgtctacattgagcgggttaaaggtgacgaagagttaggtggcatcagcatttatgcctttaacgagaatcgtcgtctgcaatccgtacgctatgccgctactgcgaagtttgacccggaacataaagtctggcgtctgtcgcaggttgatgaatctgatctgaccaatccgaaacagattaccggttcgcagacggtgagcggcacctggaaaaccaacctcacgccggacaaactgggcgtggtggcgctggacccggatgcactctctatcagcggtttgcacaactatgtgaagtatctgaagtcgagcggtcaggatgccggacgttatcagctcaacatgtggagcaaaatcttccagccgctatctgtggcggtgatgatgctgatggcgctgtcgttcatctttggcccactgcgtagcgtaccgatgggcgtgcgtgtggtcaccggtatcagtttcggttttgtcttctacgtactggaccagatcttcggcccgctgacgttggtttatggcatcccgccgatcatcggcgcactgttgccaagcgccagcttcttcttaatcagcctgtggctgttaatgagaaaatcgtaa

SEQ ID NO: 28052 - DNA, 810 bp, Escherichia coli
atgattcattacagggagaatatatattctcttgataattatgagcgttatataactgacagttcgctatttgagaatactggcgatggcataatatatacaggtattgtgccccttattacagttgttgagcctgttgtatctaatcaacatagtgtgctgattatacctggaggtggatacaggaggattgtttatgaaagagagggacttgatgttggcagatggatagcaggtcagggatatacggcatttattctttcttacagaatgccctccgttaatggttattattcctttgcagatgcgaagaatgccctgaactttatttcttactgggccggaatgtcggagagaacatttaagagtgttggatgtatggggttttcggcaggtggtcatcttgctggatatattactcatctccattatgaggaagagacttctgtgcgtcctgactggatggctctgatatatccagttatatctcttgacaggagtattgctcatcagggatgccggaaacgtcttctggatgcaggtgaaagtgaatattcagccagtcttgaaaatagtgttacagagtatatgccaccagtctttattgtgcatgcaacagatgataaggatgttccagttattcattctctgagatattttaactctattcgggataagggacatcatgcagaagctcatttttttgataagggaggtcatggatttggtgtatccggaaaaaatggatatccgatagaaaaatggcaaagcctgcttctggaatggcttgcggaacataagttttattga

SEQ ID NO: 28053 - DNA, 3480 bp, Escherichia coli
atgggtaaaggcagcagtaaggggcataccccgcgcgaagcgaaggacaacctgaagtccacgcagctgctgagtgtgatcgatgccatcagcgaagggccggttgaaggtccggtggatggattaaaaagcgtgctgctgaacagtacgccggtgctggacagtgaggggaataccaatatatccggcgtcacggtggtgttccgggccggtgagcaggagcagacaccgccggagggatttgaatcctccggctccgagacggtgctcggtacagaagtgaaatatgacacgccgataacccggaccatcacgtcggcaaacattgaccgtctgcgttttactttcggcgtgcaggcactggtggaaaccacctcaaagggggacaggaatccatcggaagtccgcctgctggttcagatacaacgtaacggtggctgggtgacggaaaaagacatcaccattaagggtaaaaccacttcacagtatctggcctcggttgtggtggataacctgccgccgcgcccgtttaatatccggatgcgcaggatgacgccggacagcaccacagaccagctgcagaacaaaacgctctggtcgtcatacactgaaatcatcgatgtgaaacagtgctacccgaacacggcactggtcggcgtgcaggtggactcggaacagttcggcagccagcaggtgagccgtaattatcatcttcgcgggcgcattctgcaggtgccatcgaactataacccgcagactcggcaatacagcggtatctgggacggaacgtttaagccagcatacagcaataacatggcctggtgtctgtgggatatgctgacccatccacgctacggcatggggaaacgtcttggtgcggcggatgtggacaaatgggcgctgtatgtcatcggccagtactgcgaccagtcagtgccggacggctttggcggcacggagccgcgcatcacctgtaatgcgtacctgaccacacagcgcaaggcgtgggatgtgctcagtgatttctgttcggcgatgcgctgtatgctggtatggaacgggcagacgctgacgttcgtgcaggaccgaccgtcggataaggtgtggacctataaccacagtaatgtggtgatgccggatgatggcgcgccgttccgctacagcttcagcgccctgaaggaccgccataatgccgttgaggtgaactggattgacccggataacggctgggagacggcgacagagcttgttgaagatacgcaggccattctccgttacggtcgtaacgtcacgaagatggatgcctttggctgtaccagccgggggcaggcgcaccgcgccgggctgtggctgattaaaacggaactgctggaaacgcagaccgtggacttcagcgtgggtgccgaagggcttcgccatgtaccgggcgatgtcattgaaatctgtgatgatgactatgccggtatcagcaccggtggtcgcgtgctggcggtgaacagccagacccggacgctgacgctcgaccgtgaaatcacgctgccatcctccggtaccacgctgataagcctggttgacggaagtggtaatccggtcagcgtggaggttcagtccgtcaccgacggacttaaggtgaaagtgaaccgggttcctgacggcgttgcagaatacagtgtgtgggggctgaagctgccgacgctgcgccagcgcctgttccgctgtgtgagtatccgtgagaacgatgacggcacgtatgccatcactgccgtgcagcatgtaccggaaaaagaagccatcgtggataacggggcgcactttgacggcgaccagagcggcacggtgaatggtgtcacgccgccagcggtgcagcacctgaccgccgaagtcaccgcagacagcggggaatatcaggtgctggcgcgctgggacacgccgaaggtggtgaagggcgtgagcttcctgcttcgcctgaccgtggcagcggatgacggcagtgagcggctggtcagcacggcccggacgacggaaaccacataccgcttcacgcaactggcgctggggcggtacacgctgacagtccgggcggtaaatgcgtggggacagcagggcgatccggcgtcggtatcgttccggattgccgcaccggtagcaccgtcgcggattgagctgacgccggggtattttcagataaccgccacgccgcatcttgccgtttatgacccgacggtacagtttgagttctggttctcggaaaagcggattaccgatatcaggcaggttgaaaccacagccagctatcttggcacggggctgtactggatagccgccagtatcaatatcaaaccgggccatgattattatttttacgttcgcagtgtgaacaccgttggcaaatcggcattcgtggaggctgttggtcagccgagtgatgatgcatccggctatctggattttttcaaaggcgagatagggaaaacccatctggctcaggagctgtggacgcagattgataacggtcagcttgcgcctgacctggctgaaatcaggacgtccattacggatgtcagcaatgaaatcacgcagaccgtcaataagaaactggaagaccagagtgcagcgatccagcagatacagaaggttcaggttgatacaaataataacctgaacagcatgtgggcagtgaagctgcagcagatgcaggacggacgcctttatattgcgggtatcggtgccggtattgagaacacccccgacggcatgcagagtcaggtgctgctggcggcagacaggattgcgatgattaatcctgcgaatggcaacacaaagccgatgtttgttggtcagggcgatcagatattcatgaatgaagtgttcctgaaatatctgacggctcccaccattaccagcggcggtaatcctccggcattttccctgacaccggacgggcgactgacggcgaaaaatgccgatatcagcggtagcgtgaatgcgaactccgggacgctcaacaacgtcacgattaacgagaactgtcgggttctgggaaaactgtccgcgaaccagattgaaggcgatctcgttaaaacagtgggcaaagctttcccccgggactcccgtgcaccggagcggtggccatcagggaccattaccgtcagggtttatgacgatcagccgtttgaccggcaaattgttattccagcggtggctttcagcggtgccagacatgaacgggagaatagcgatacttattcgtcatgccgcctgatagtgaagaaaaacggggctgaaatttataaccgaacggctctggataatactctgatttacacgggtgttattgatatgcctgcaggcagtggcgtaatgacactggagttttctgtatcagcatggtgggtaaatggctggtatcccacagcaagtatcagcgatttgctggttgttgtgatgaagaaagccactgcaggcatcacgattagctga

SEQ ID NO: 28054 - DNA, 597 bp, Escherichia coli
atgaataactcggaacttatacatcttattaaacattttatgcgtaacgaacataaggccgttgaagaggttattgattccccactttctgaagtcgctaatttaattaaagtattacaatcttgtcagggtaaagttgtttttattggtgttggtaagtccggtattattgccagaaaactcgcagcaacatttgccagtaccggaactccctcgttttttgttcacggtacggaagcggtacacggcgaccttggaatggtggcgaaagacgatgttgttattcttatttcaaacagtggtgagacggcggaaatcctggcgacactgcctagtctgaaaagaatgggtaattatttgatctcttttacccgcagtcatcactcatcgcttgcgataagttgtgatttatctgttgaaatccccgtcaaaagtgaggcggataatttaggtttagcaccgtcatgctcgtctactgttgttctggttgttggtgatgcggtggcgcttgcactctccgaattgaaaaaatttactcgtgccgatttcggcttatatcatccaggaggtgcactcggcattaaagcaaattcataa

SEQ ID NO: 28055 - DNA, 483 bp, Escherichia coli
atgcccctcaacccattccggagatggacagttctgctgttgttcccccaactaatgaaaacacctcgcctccggaagatactcccgacaacactccggccggaggcaataccggacaagcggaaaagaccagaaacgcaggactcacacccattcctgaaaaacgttcaggaatgcccccggaacatctgcggtttgccacagggtttccaccgcaaccgaagattgccggtcccaaaggaaagccgatgcgcaccgtgcatccggataaaatctatcgtgaaattatatggttctgctccggttacctgcggaaatccggaccagaggctacgaggacgatcatcaactcaatattctgtgaatgggccagcatcttcaatgattactcctcccccttttcgtgggtggacagcagggacagtgaacagtgtgactggttatggaacgccatgcaggtccggtgtgtgggaaccccgctga

SEQ ID NO: 28056 - DNA, 432 bp, Escherichia coli
atgcggagaatcacgcaggtagaccaaagtacaggggaggaattaggtggttttgtagcagtgattcgtcccaaacaaaagtcatcattccagaggcactttactatgaatcaagccgcgctaattaccattgccaatgagctaaaccatgaccagatgcgtgtactgatggccttgctcgcagagctggattacgagaactacatccaggtcgcgcagatagatattgcagaagcgctgactatgcaaaaaacaaatgtcagtcgtgcggtaaaaaacctgattgatttcgggatcatactggaaggaccgaagattgggcggagcaaaacgtaccgcctaaatccccagttcggctggaaaggtactgtcagcaaccacaaaaaagcactgaaaaacggcctcagcgttatacagggcggcagaacctga

SEQ ID NO: 28057 - DNA, 195 bp, Escherichia coli
atgtaccgggtggtggatttttttgtagattgtcaaattgctgctcaagctcgaatggaatatgtttttgtatatcttccggagatgaatagtaagcctttaatggaactttccctgtatgttcattcattgaatctatacaatattgtagagaaagatgcctgcacacgatttcattttctggtttttcattaa

SEQ ID NO: 28058 - DNA, 435 bp, Escherichia coli
atgcgaacaccacatcttgtgccactcagccaacaggctgtagccatactggcagaacttcagacatgggcaggtgaaaatggtctgatctttacgggagcacacgacccacgtaaaccaatcagtgaaaataccgtaaataaggccctcagagtgatggggtatgacacaaccaaggaagtctgtggccatggattccgggcgatggcgtgcagtgcattgattgaatccggcttatggtcaagagatgcggttgaacgtcagatgagtcatcaggagcgcaacggagtacgtgccgcgtatattcataaagcagaacatctggaagaacgtcggcttatactgcaatggtgggcagattttctggatgcaaacagggaggagtgtatcagtccgtttgaatatgcaaaagttaacaatccactaaaaaggtga

SEQ ID NO: 28059 - DNA, 1179 bp, Escherichia coli
atgagtaatattgtttacctgacagtaacgggagaacaacaaggaaacatctccgcaggttgtgggactactgaatctataggtaatcgctggcagagtgggcatgaggatgaaatatttacattctcactcgcaaatagaattactaatacgggacttggttcacagttacagggtatgacattttgtaaattaattgataaaagcactccattacttattaattccattaacaataatgagcaattatttatggaatttgacttttatagaatcaatagatttggtagatgggaaaagtattattatatacaactaagaggcgcttttttatcggctattcatcatcagatcattcaaaatcaactggatacagaaacaataactgttagttatgaatttatcctctgtcaacatcttatcgcaaataccgagttcagctatttggcactccctgaaaattataaccgtttgtttttaccaaattcaaaaaaccaaacaaataatcgtttcaaaacgttaaacagcaaagctattggcaggctacttgctgctggtggcgtatacaatgggaacattgaaggattcagagatactgcggaaaaactgggtggagatgcaataaaaggctatgatcaaatactaaatgaaaaaacagcgggcatagcgatagcaacagcatctattcttttaacaaagcgttctaatgttgatacatatacagaaataaatagttacttaggcaaacttagaggtcaacaaaaacttcttgatggtatagacataatagaaataatatacattaagagaccttcaaaagacttagctaacttacgaaaggagtttaataaaactgtaagaaaaaattttcttatcaaacttgcaaaaacctccgaagcatctggaagattcaacgccgaagaccttttaagaatgagaaagggcaatgttcctctaaattataatgttcaccataaactatctctagatgatggtggtactaatgatttcgaaaatttagtattaatcgaaaacgaaccatatcataaagtttttactaacatgcaatcacgaatagctaagggagtattagtaggtgaaagcaaaatcactccctgggccattccatctggctcaatttatcctcccatgaaaaatattatggaacccacaaaatga

SEQ ID NO: 28060 - DNA, 192 bp, Escherichia coli
atgaatccagtatttgcacttattctgacggtttttcttgtttccggagagtcagttgatattgcagtcagtgttcacagaacaatgcaggaatgtatggcagcagcaaccgaacagaaaattccaggcaactgttatccggtcgataaagttattcaccaggataataacgaaatcccggcaggattttaa

SEQ ID NO: 28061 - DNA, 189 bp, Escherichia coli; identical to SEQ ID NO: 20596

SEQ ID NO: 28062 - DNA, 609 bp, Escherichia coli
gtggctgataacaacgttcagcaggaacagccagagcaggcagaactgccggaagaaaccaccacggcaacagtagcgaaaatctcagagtgcgatttaaccgcgacgattgaacaacgtggcccacaaacggcggatgaactggctacgtttttcggcaccacatcacgcaaagtggcttcaacgctggcaatggcaatcagcaaaggccgtctgattcgcgttaatcagaacggtaaatttcgttactgcatgccgggcgatgatttaccagcagagccgaaagctgcatcggtaacggaaactgatggtaaagcctttcctcaaccagcaggtgttgcgttaccgggacaggaagctgcaacacaggaagatattaaaacagaaactgtggcggacattgtgcagtcgttgccatcgtttaccgaaacgcgagcggatgacctcgttctgccatcgctgcatatggcaaaccgcgaactgcgtcgggcgaaaaatcatgtccagaagtgggagcgtgtctgcgccgcgctgcgggagctgaacaagcaccgggatattgttcgacagattactgattcttctcgctgtgttgcatcggaaaagtga

SEQ ID NO: 28063 - DNA, 420 bp, Escherichia coli
atgtacgcaaaatcttttctcgcacttgatggcaacggacgtctgaccggtgcccgtaccgcacagactgctccttatgcccactacacctgccacctttgcggcagtgcactcagataccacccgcagcacgacacggaacgtccctggtttgaacacactgacgacgggctgacggagcacgcgcagcaatgtccttatgtcaggccggaacgcagagaaatacggttgattaaacgtctgcagcaattcgtcccggatgccttacccgtggtacgtaaagccagctggtactgcaggcaatgtcaccacgattattatggggagcagtactgcacacactgccagaccgggcgcttcagtgaggacggggagcagaatgaacggtataaaaacggggctggggatcacgccgggtga

SEQ ID NO: 28064 - DNA, 168 bp, Escherichia coli
atgggaaagattaaaatattagaattagattatattcaagtcattaagccggagacagtgatctataagtcctctggggtcgtcaaatcagaattattcatagccaaagaatctatttcacacattctttcaactaaatatgtctggcatgttcacagatttcattaa

SEQ ID NO: 28065 - DNA, 675 bp, Escherichia coli
atgcaattaaaaattcttaatattgttaataaaaactttattgagaatatgaagaaaatatttagccattgtccttatataaaagatccaattatacgtagttatatccatcctgatgaagataacaagttcgataattttatgcgtcaaaatcgattcagtaagatgcatttcgatacccaacagatgatcgattttattaacagatttaatatgaataaatggctgattgatcaaaataacaatttttttatccaacttatcgatcaggctctacgatcaacgaatgatacgatcaaagaaaatgcctggcatctttataaagagtggattcgtagtgatgatgtttcacctttatttatagaaattgaagataatttaagaacctttaacacgaatgaattaacacgaaacgataatatctttatcctgttctcctctgtctatgatgggccagttatggtggtaagctcccagcgcttacatgatatgttgaatcctacaaaagataccaattggaattccacgtatatctacaaatccagacatgagatgttgcctgttaatcttactccggaaacacttttcggcaccaaatctcaggataaacatgcgcttttcccaatttttactgcgagttggcgagctaatcgtataaagaataaaggtatttaa

SEQ ID NO: 28066 - DNA, 156 bp, Escherichia coli
atggatactatcgatcttggcaacaacgaatctctggtgtacggcgtgtttccaaaccaggacggcaccttcaccgcaatgacgtatacaaaaagcaaaacgtttaaaaccgaaaatggtgcccgtcgctggctggaaagaaactcaggtgagtga

SEQ ID NO: 28067 - DNA, 282 bp, Escherichia coli
atgttgtccggttctctccccgtcacgccgcagacgcagcatgtgtttggtgtattcccggcggctctggtcgcgcacgcgggtctggcaggcgaagaacggctgaaagccttcctgctgcagattttccaggacggtgatagtgggaatgtacgcatagtgttcacttcgggaggtatgtcggttttccccaaaaatactcggtacatggcgcatcagttcttcgtgtgtcagcggacggtcacggcgtatctgatttacatgaccaaaacgactggctaa

SEQ ID NO: 28068 - DNA, 234 bp, Escherichia coli
atgccgggttgtacatcacgtttattgcccgaaggccctttctcacgcaaccaggctcttgccgtcacaacggcttaccttaatgtgcttattgaagatgaccagggaacgcatttccggctggtgatccgcaacgctgaaggccagctacgctggcgctgctggaattttgaacctgatgccggaaaacagctaaacccgtatctcgccagcgagggaattctcaggcaataa

SEQ ID NO: 28069 - DNA, 609 bp, Escherichia coli; identical to SEQ ID NO: 24525

SEQ ID NO: 28070 - DNA, 216 bp, Escherichia coli; identical to SEQ ID NO: 5123

SEQ ID NO: 28071 - DNA, 216 bp, Escherichia coli; identical to SEQ ID NO: 5123

SEQ ID NO: 28072 - DNA, 255 bp, Escherichia coli
atgacgtcaagtcatcatggcccttacgaccagggctacacacgtgctacaatggcgcatacaaagagaagcgacctcgcgagagcaagcggacctcataaagtgcgtcgtagtccggattggagtctgcaactcgactccatgaagtcggaatcgctagtaatcgtggatcagaatgccacggtgaatacgttcccgggccttgtacacaccgcccgtcacaccatgggagtgggttgcaaaagaagtaggtag

SEQ ID NO: 28073 - DNA, 213 bp, Escherichia coli
atgcctgaacaccataaggttagcctcttactcgttggaaatcaacacagggggctgggaatgccgcagaaatatagattactttctttaatagtgatttgttgcacgcttttatttttcacctggatgataagagattcactgtgtgaattgcatattaaacaggggagttatgagctggcggcatttttagcctgcaatttgaaagagtaa

SEQ ID NO: 28074 - DNA, 240 bp, Escherichia coli
atgattttaaaatcgaatttatcaacaactcttgcggttctactcatacccgctttaagatgtctagtaatgaaatacaacgatattttcgccgcatcatcatccttaagttgctcagcatactctaataattcttcaagctttaacattttcattccttatgggattcagcataaaaaagttttgggcccacgtcctcaacatcaagaagatcatcttcctccaaatactttgatttag

SEQ ID NO: 28075 - DNA, 210 bp, Escherichia coli
atggaaggtactgtaacatattatggttttgctgatgagaatgctactgaaccggagataaaagtagtcattaatgctggcgcttttgcaacaagcccaccacaatactggcaccgtgttgaactaagcgatgatgctcagtttaatattaacttttgggtagctccagacttctcaggcgaaaaagtctataccgcaaaaaaagaatag

SEQ ID NO: 28076 - DNA, 129 bp, Escherichia coli
atggcggaaaatcgtgttgaggccaacgcccataatgcgtgcactggcgcgacatccgacgccattcatggccatatcaatgattttctggtgcgtaccgggctgagaggcggtgtaagtgaactgtag

SEQ ID NO: 28077 - DNA, 453 bp, Escherichia coli
atgacaaattcattaactgatttctttacaactggtgaggctggttggactaattttgtaaaatcaatcgcaacaatcactgaaaaatacatggttcaagattggattgttgagccgctagcaggattagtaaaaggggggattagctcgctattttcatcaaatccattgagttcaacggctaacacttttgccgttcccgatattccaaaattgggcgcaactcatttaggaggcggtctaggttcgaccgcaccagttatcaatatcaccattaatgacaatggcaacaaaggcggcgttgatagcaatgttagcggcacaacagggcaagtacaaaaaatgggggcggcgctagataaattcctgcaaaactatatcaaagagcaaaacgtaaaatccaaccgtcagggcgggttaaacaaaacaatggggaactggtcgacaagataa

SEQ ID NO: 28078 - DNA, 516 bp, Escherichia coli
  misc_feature (413)..(422): n is a, c, g, or t
atgcatccccataaagtgcatacacaccacggattaacagcaattgagaaagcagctaaacaattggtgacctaccaaacccaaattaaacaggctggtttgcaatttgaccagcaaattaattcaattggtgattcagtaaataatgcgtggagtaataaattatactcttattcaatgtcttctgaccagaatgattttgcaaaccgaattgaacaaatcaatgaacaattcgaccgtatgcgcgaaaatgtagaccgtttggcgctgcaacatcataaatcaattggttcaaaagaatatgttgaaatgttccaaaaaatcgaattagggcgcaaaaacgtattggctgaaaacgttgctggatttaatgaaatggagtcattgcagcattcagcgctggcgggaatggnnnnnnnnnnggaatggatgagggatggattaaataccagaagcaggttaatgatgttgcaagccaatcagagaaagtttttgatacggctgttgagggaatga

SEQ ID NO: 28079 - DNA, 552 bp, Escherichia coli; identical to SEQ ID NO: 26044

SEQ ID NO: 28080 - DNA, 909 bp, Escherichia coli
atggttgcagtgactgcactgactcccgccgtctggctggtgacactgatttccaccgtgccgtccggctgcgtggtgaccaccggagcaaccgttgcgccgttgcctgccgtcacgctgaccgtctgcccggcaagtgcattcccgaacgcatcggtcaccctcgcccgcagcgtattcgccattgcgccgtcagccactgagttatcctgcgtcacctccagactcgcgatctgcgccgtgctgacatcggcgataaacgtcacgttctggctctggctgctgttgttgatgctagcggtgaccacactggttccggcggtctggctggtgactgagatctccaccgtgccgtccggctgcgtggtgaccgtcgaagcagtcgtggcaccgttgtctgccatcacgctgaccgtctgcccggcaagcgcattaccgaacgcatcggtgaccctcgcccgcagcatattcgccattgcaccgtctgccactgagttatcccgggtgactaccagatccgctatctgcgccgtcctgacatcggcgataaacgtcacggtccggctcaggctgctgctgttgatgctggcagtgacagtactggtgcccgccgtctggctggtgacactgatctccaccgtgccgtccggctctgtgatgaccgtcggggctgtcgttgcgccgttgtccgccaacacgctgaccgtctgcccggcaagcgcattgccgaacgcatcggtcaccctcgcccgcagcgtattcgccattgcgccgtctgcgatcgcgttatcctgcataacctccagactcgctatctgcgccgtcctgacatccgcgacaaacgttacgttccggctcaggctgctgctgttaatgctggcagtgacagtactgactcccgccgtctga

SEQ ID NO: 28081 - DNA, 219 bp, Escherichia coli
atgcacgactgttcggttggtgtagaactctgctgccgtatgaccggaatcatcagcgaactttttaatcaggtattcgtaggcctcaccaagatcatcctgagcgacagatttaataccgagcggtattttactgaaatgttcaatcagatcagccagcagatgatcgggcaggcgctctttattggtccactgcgcatcaccgaagacgccatgtaa

SEQ ID NO: 28082 - DNA, 396 bp, Escherichia coli
  misc_feature (282)..(291): n is a, c, g, or t
atgattacaagtatacgttatcgcggcttctcattttattacaaagataatgataataaatataaagaaatctttgatgaaatactggcctataattttaaaacagtaaaagtattacgtaatattgatgataccaaagtatcgttgattgatacgaaatatggtcgctatgtttttaaagtctttgctccgaaaacgaaaaggaatgaacgtttttttaaatcttttgtaaaaggtgactactatcagaatttgatcgttgaaaccgatcgtgtcagaagnnnnnnnnnngtgcaggtcttacttttcctaatgatttttattttctggctgagcgtaaatttttcaactatgccagtgtttttatcatgcttatcgagtatgtcgagggcgtag

SEQ ID NO: 28083 - DNA, 222 bp, Escherichia coli; identical to SEQ ID NO: 26106

SEQ ID NO: 28084 - DNA, 543 bp, Escherichia coli
ttgcttgatagagttactcaagatattattcccgagttttctttttccattaaaacaaatcttggggagcatatttacaatagttttttagagttaactagacaatatggattagttaatttaaactcaaacttagacttaattacgagttcagaaatcgaatatgcattacctgatgaagatatccatttctataaaaataatgaaccctcactaacacacattctaagagatactaattctatcgcaattatggccacccactctgctttggtacttagagaaatcccttcagcacaaataacaatcctacatagaagagacaatatcaccaactataaaacaccgaatattgaaacatttggtgccgatactcatcaaataatgatagatatttttggtgatttatactctaatgcgatatttagagaagagctatcaaacattgcaaaaaacaaaacaatcgatgaattattagtgcagtatggtgatttaccttctgatgtattaaataaaatcatcatggagaaaaattcaaagtga

SEQ ID NO: 28085 - DNA, 270 bp, Escherichia coli
  misc_feature (239)..(248): n is a, c, g, or t
atgaagcgagttcttattcctggcgtcattttatgtggcgctgatgtggcgcaggccgtcgatgacaaaaacatgtacatgcatgtttttgaagagatgacggtctatgctcctgtccctgtacccgtaaacggcaacacgcattacaccagtgaaagcatcgagcgtttaccgaccgggaatggcaatatcagcgatctgctgagaacaaaccctgcggtgcgcatggattcaacgcnnnnnnnnnntgtcacaggggtattatcttga

SEQ ID NO: 28086 - DNA, 1776 bp, Escherichia coli; identical to SEQ ID NO: 26038

SEQ ID NO: 28087 - DNA, 840 bp, Escherichia coli
gtgagtacgcaaccgcaaaataccttgccctactgttgcctggcggaatgccatatatcattagccctccttggactcagtgaacaaaaacaagcaataactacggcagtaacctccattgaaaaggctcttgaaattaacccttcaaattctcaggcattgggtttactgggtttaatcagtgggctaaaagatgaacattcagtgtctaatgtgctatttaagcaagcacatttactcaaacctaattcgccagacgtttattattatcagtctctgctatgttttttgaacggtgaccttgcaagagcatttaatctaatagaaaaaagtattgctcttgaacccaataaaatgggtataagcattcttaaattaattatactttattacacatcccccctcgataacgcgatatcttttgcattaaatcttaacagtcaaaacacctgtaataatccaattattacctctattctggctatgttcatggcactgaaaggacataatgacaaagccaaaagtttattgcttaaacttgagcctgaacatggtcttgattacacctgtgttaactcgctttatacgaaatttctgatctatggcgcatctataaaaaatgacattatgaagttactggcaaatattaacaccaacaaaatcaatggtgttattttgccgttgatttacactgtgtatggtaaaaaagaatatgaaaggcgctggcaacaattaattaaagacaatgatttatggtcaaatgttttgcttcatgacccccgtttgctcagtgtaaaaaatgaatttaatactatcggtgtgatgcgtacttctgcgtaa

SEQ ID NO: 28088 - DNA, 285 bp, Escherichia coli
atgggtcaggtcgttcactatggtaaaaactggcgtttatttattgagttaattcatgccagaacacataaattgattgatcatcaaagtattgatttcaatcccgataatcctctttccgtattattatcacaagtaattaatattcttattgaaaaaatacccaacattaattttaaatctattaatacacaacaaatgccatctctggattctgctgttatgtatatgaatggcagaatggaaatgtaccgttatacaccagagagtttgaacgagcattag

SEQ ID NO: 28089 - DNA, 633 bp, Escherichia coli
atgagatgccgggggctgattgccctgctgatatgggggcagagtgtggccgccgccgatcttggcacctggggcgatctgtggccggtaaaggagccggacatgctgacggtgatcatgcagcgcctgacggcactggagcagtccggtgagatgggccggaaaatggatgcctttaaggagcgggtgatccgcaacagtctgcggccccctgccgtgcccggtatcggacgcacggagaaatacggcagccggttgtttgacccgtccgtcagactggctgcggatatccgggataacgaagggcgggtgtttgcccgtcagggtgaagtgatgaatccgctgcagtatgttccttttaaccagacgctgtatttcatcaatggcgatgatccggcgcaggtggcctggatgaaacgccagacgccgcccacactggagagcaaaattatcctcgtgcagggcagtatcccggagatgcagaagtctctggacagccgtgtttactttgaccagaacggtgtgctctgccagcgcctcggcatcgatcaggtcccggcacgggtgagcgccgttcccggcgatcgcttcctgaaggtggaatttattccggcagaggagggcagaaaatga

SEQ ID NO: 28090 - DNA, 387 bp, Escherichia coli
atgaccacaacgcaaaaaacgactgacgttacagccccccgacgcagccactggtggtggatggtgccgggatgcctggcaatggtgttactgaacgcagccgtcagttacggcattgtcagactgaacgcaccggtgactgccgccttcaacatgaaacagactgtggatgcattttttgacaacgccagtcagaaacaactgtcagaagcacagtcaaaagccctttcagcgcgttttaacacggcactggaagccagcctgcaggcgtggcagcagaaacaccacgcggtcattctggtgtcgcctgccgtggtacagggggctccggatatcacccgggaaatccagcaggatattgcccggcgaatgagagcggaaccatga

SEQ ID NO: 28091 - DNA, 618 bp, Escherichia coli; identical to SEQ ID NO: 26035

SEQ ID NO: 28092 - DNA, 900 bp, Escherichia coli
atgcatccccataaagtgcatacacaccacggattaacagcaattgagaaagcagctaaacaattggtgacctaccaaacccaaattaaacaggctggtttgcaatttgaccagcaaattaattcaattggtgattcagtaaataatgcgtggagtaataaattatactcttattcaatgtcttctgaccagaatgattttgcaaaccgaattgaacaaatcaatgaacaattcgaccgtatgcgcgaaaatgtagaccgtttggcgctgcaacatcataaatcaattggttcaaaagaatatgttgaaatgttccaaaaaatcgaattagggcgcaaaaacgtattggctgaaaacggaatggatgagggatggattaaataccagaagcaggttaatgatgttgcaagccaatcagagaaagtttttgatacggctgttgagggaatgacaaattcattaactgatttctttacaactggtgaggctggttggactaattttgtaaaatcaatcgcaacaatcactgaaaaatacatggttcaagattggattgttgagccgctagcaggattagtaaaaggggggattagctcgctattttcatcaaatccattgagttcaacggctaacacttttgccgttcccgatattccaaaattgggcgcaactcatttaggaggcggtctaggttcgaccgcaccagttatcaatatcaccattaatgacaatggcaacaaaggcggcgttgatagcaatgttagcggcacaacagggcaagtacaaaaaatgggggcggcgctagataaattcctgcaaaactatatcaaagagcaaaacgtaaaatccaaccgtcagggcgggttaaacaaaacaatggggaactggtcgacaagataa

SEQ ID NO: 28093 - DNA, 576 bp, Escherichia coli
atgccatttaagccaatccttgttgagcttgtcttttttgccaccctcttcaactttaatcggagcctggtcaacgttcataaccacttcaactgcatcaaaaccaagcttttcaccgagcaaataatacatctgcacacaggcttcgcgatcgtataccacaaccatgcctttcatctttttcggcataacatggttggtaaaatgctcagcaatatcattactcaccgcagccatacgtctgggagatttcagcataatagccagcttgccggcacgtctggacaatgctgctttttcttcttcatccaggttgttttcggtagccagttgctcgaactcttcattgatggcatcacgatccactcggagttcagccagccgaggttcgaacttcaccgggttagttgcgccatcccggatcgactgcttatagctatagcggctcatatagcgacctggatcttcttcggcaccgaacaatttgaacgtattacgatcaatgccagaaatcggagtaccagtcaggccatagaagtgggcattgggcaacgcccagcgcattttctcgcctaa

SEQ ID NO: 28094 - DNA, 1128 bp, Escherichia coli
atggcgaaacgggtatggcggcgggagcgtgacctgacggggtggatgtcgctgtcgcgtaaaccggaggtgacgtggtacggctgggacggcgaccacctgacgacggtgcagaccgacagcacacgtatccagacggtatacgagccgggaagcttcacaccgctcatccgcatcgaaacagacaacggcgagcgggagaaaacgcagcggcggagcctggcggagaagctccagcaggaagggagcgaggacggacacagcgtggtgttcccggctgaactggtgcggctgctggacaggctggagggggaaatccgggcagaccgcgtgagcagtgaaagccgggcgtggcttgcgcagtgcgggctgacggtggagcaactggaaaaacaggtggagccggaatacacaccggcgcgaaaagttcatctttaccactgcgaccaccggggcctgccgctggcgctcatcagcgaagacggcaatacggcgtggagcggggagtatgatgaatggggcaacctgctgaatgaggaaaacccgcatcacctgcaccagccgtaccgtctgccagggcagcaacacgatgaggagtcggggctgtattataaccgtcaccggtactacgatccgttgcaggggcggtatatcatccaggacccgatagggctggcggggggaataaacccgtacagttatgttatgaacaatcctgtgcaatggattgatccattgggattagctcatacttcaggaaaatggaaggactgtggtaaaggttgtcgaatccgaatagatggcgatgctgttggtgacggaagacatttgcattgggagtgtaaaaatgggagtggtgtaatgggggaatttggaggtatgtcccatggtgaggattactcatcagcaccaaatagcattaagaaatgtgcaaaaaaatatggtttcgagccagaaccaagtaaagatctgtcatgcaaaacctccgggctatcaactactgatgcggctcttgcaactggtgctacaattggcgcagggtatgttatatatagagtgattcgatttataccttcacttgcaccacctctttggtggtcaatacctgcaaacgttgttactccatga

SEQ ID NO: 28095 - DNA, 234 bp, Escherichia coli
atgagcgaatatttcagaatatttcaggggctgcctgacggctcctttacccgcgaacaggctgaagccgttgccgcacagtaccggaatgtctttatcgaggatgatcagggaacgcattttcgcctggttgtccgtcaggatggcacgttgatctggcgctcctggaattttgaggactatgccgggtactggatgaaccggtacatcagggatttcgggattcttaagtaa

SEQ ID NO: 28096 - DNA, 234 bp, Escherichia coli
atgagcgaatatttcagaatatttcaggggctgcctgacggctcctttacccgcgaacaggctgaagccgttgccgcacagtaccggaatgtctttatcgaggatgatcagggaacgcattttcgcctggttgtccgtcaggatggcacgttgatctggcgctcctggaattttgaggacggtgccgggtactggatgaaccatgtcatccggaatttcggcattcttaagtaa

SEQ ID NO: 28097 - DNA, 234 bp, Escherichia coli; identical to SEQ ID NO: 28095

SEQ ID NO: 28098 - DNA, 348 bp, Escherichia coli
gtgaaagcctgttctgggttaatgtcaaagctattcctacagctggcaattattagccgcataaaaatgttttatcgccccacgaacctggcaatggcacctgaagaagcgcctgcaatgcttcggtttcgtcgcagcggtagcaaacttactcttattaatccaacgccctacttcattaccgtaacaaatatgaaagcaggaaatagcaatctcccaaataccatggtgccgccaaaaggtgatgtatcggtggatatcccgcatgctgcaaccggggatatcagttttcagacgatcaatgattacggtgcattaactccgcgtattaaggcaaccatgcagtaa

SEQ ID NO: 28099 - DNA, 384 bp, Escherichia coli
atgcaaactacgcgtaccccctactctatttcctttatggcgacagtgttacttttattgctctttgcttgccatagcaccgttgccaacgcagctgtcgcactgggtgcgacgcgggtaatttatccggcaaaccagaaacaggttttattgcctgtcacgaataatgatcctgccagtgtctatctcattcagtcatggatagaaaatgcaggtgaccaaaaagacacccagtttgtcattacgccaccgcttttttccatgcaaggtaaaaaagagaatacgctgcggataatcaacgccactaatcatcagttaccaggcgaccgtgaaagcctgttctgggttaatgtcaaagctattcctacagctggcaattattag

SEQ ID NO: 28100 - DNA, 168 bp, Escherichia coli
atggaaattcttcagcaggatatgagtaatttatcaaaaacgcgcgaacaaatgcttacagtgatgcaaaggatagataaaaccgttgaacaagaggttgctcagatggtgcgtgtattacaacaccgaactgaagctttgaaatttgcttctcattctatcgtataa

SEQ ID NO: 28101 - DNA, 255 bp, Escherichia coli
atgggcacgttcacgggtaacatactcaaccccgttgataaacaaaaccttatttttgcgttcagcaggtttattgcaattaagcaccaccaagcaagattccatcggcgagttgtaaaacagatttggtcccaaaccaatcaccgcttcgattatgtcggattcaatcacctgtttacgaatggcttgttcagaatcacggaacagtacaccatgcggccagagcatggcagcacgaccggtgtcgggttttaa

SEQ ID NO: 28102 - DNA, 153 bp, Escherichia coli
atggcacttcccgaaagctataactatatccacaagtcaggaactttgcatgaagcgccaagtcctatcattccgctaaactggtcgaaagcctcaatgactcttatgttgaaagaaatgtccaaccttatcaatgatgagggaattaaatag

SEQ ID NO: 28103 - DNA, 474 bp, Escherichia coli
  misc_feature (16)..(25): n is a, c, g, or t
gtgcagtgggtagggnnnnnnnnnncacgtgcagtgggtagtgaaacatcatcactgcaagcttctcaggatgaatttgaaaacctggttcgtaatgtcgacgtaaaatcgcgaattatggatcagtatgctgactggaaaggcgtacgctatcgtctgggcggcagcactaaaaaaggtatcgattgttctggtttcgtacagcgtacattccgtgagcaatttggcttagaacttccgcgttcgacttatgaacagcaggaaatgggtaaatctgtttcccgcagtaatttgcgtacgggtgatttagttctgttccgtgccggttcaacgggacgccatgtcggtatttatatcggcaacaaccagtttgtccatgcttccaccagcagtggtgttattatttccagcatgaatgaaccatactggaagaagcgttacaacgaagcacgccgggttctcagccgcagctaa

SEQ ID NO: 28104 - DNA, 336 bp, Escherichia coli
atgcaaaagctaaaacagcaggtgtttgaagccaacatggatctgccgcgctatgggctggtgacctttacctggggcaacgtcagcgctatcgaccgcgaacgcgggctggtggtgatcaaacccagcggcgttgcctacgaaaccatgaaagcggccgatatggtggtggttgatatgagcggcaaggtggtggaaggggagtatcgcccatcttccgacactgcgacgcatctcgaactctaccgtcgttacccgtcgcttggcgcattgtccatacccactccactcatgccaccgcatgggcgcaggcggggctggcgatcccggcgttag

SEQ ID NO: 28105 - DNA, 480 bp, Escherichia coli
atgccgccgggaccgtttgagattagcgatcttaacccgacatcatctgcgggagatctggaagttaccatcaaagagtctgataattcagaaactgtctataccgtaccttatgccgctgtccccatcctgcaacgagaaggtcattcaaaatattctactacggttggccaatatcgaagcaatagctataaccagaaaagtccttatatatttcagggggaattaatttggggtttaccctgggatattacggcttatggtggggcacaattctctgaggattaccgggcgttggcgctcggccttggcctgaatctgggagtatttggtgcaacatcgtttgatgttactcaggctaacagttcgcttgtggatgggagcaaacatcaagggcaatcttatcgttttctttattccaaatcgttagttcagacaggaacagcattccatattattggctatcgttattcaacctag

SEQ ID NO: 28106 - DNA, 363 bp, Escherichia coli
  misc_feature (35)..(44): n is a, c, g, or t
atgatcagaaaattgagttccgttttaccggtacnnnnnnnnnntaccggtactgcagatagcgctaataaaacgctcgctaacgaagtagaaggatcaacggatgctgacaacagcggcaatgcgggggcgactggtgtagggattcgaatttactccaaaggtacgacgaataatggtctgattaacctgaataccactgcggcagagggtagcgcctccaccgccgcttatacaattccaggaaatgctacgacccatgatttcagcgcggcctttactgcaggttatgctcaaaacggtagcactgttgcaccaggtgtagttaagtcaacagcaagttttgttgtgctgtacgagtaa

SEQ ID NO: 28107 - DNA, 774 bp, Escherichia coli
atgattttcatgtggttaaccttgctttcggttaatctatactttaatggtttacgctgtgatatctggaacggtgtgtcggtgattgctttttgtgccgtgctgtacaatatctctctgttatttatgagcaggtatagcgtgtccatttggtatattagtcgcactattgaagtagtcagtaagttaaccgttttggtaatttttatgtgccatatattcagtgcgctacgagtaacaaaggacattgcacatcgcgatcccttaaccaatatatttaacagaaattatttttttaatgaactgacggttcaatcagcatcggccaaaaaaacaccttattgcgtcatgattatggatattgaccacttcaaaaaagtcaacgacacctggggacatccggttggcgatcaagtgataaagacagtggtgaatatcattgggaaaagcatacgaccagatgaccttttagcgcgcgttggcggcgaagagtttggcgtcttgctgacggagatcgatactgaatgtgcgaaagctttagcggaaaggattcgggaaaatgttgaacgtttaactggcgataatcctgaatacgccataccacaaaaagtgacgattagtattggcgctgttgtaacgcagaaaaatgagttaaaccctaaggagatctatcaactggctgataacgcactttacgaggcgaaagagaccgggcgtaataaggtggtagtaaaagaggcagaaattcttatcaaccgcaaggatgatgaatga

SEQ ID NO: 28108 - DNA, 588 bp, Escherichia coli
atggaaaaagactatttgggaattagtagtactgtattagtgagtttattgtttgggcttgcgttggttttggtgaatagttggttcaatcagccaaccgttgaggaagttgttccacgatcaacctatctgatggttatgattgctttattttttatcgatactgtttcatttatttttatgcagttgtatttcatttatgaccgtaggcaattttcaaactgtatacttagtttggcttttttaagttgtttgatttactttattaaaaccgtcattatcattcagcaaattattgaggggcgtttgacaagcagtgttgttcaaaatgacattgcaatttattatttgtttcgtcagatgagtttgtgcgtattaatatttctggcattggtaaataaagttagtgaaaacacaaaacagcgaaatttgttttccaaaaaagtgactttgtgcataactttgttttttgttcttggggggccgatagttgctcacatattttctagccattatgagagctacgatttacacattgccgagttaaccaataatgattttcatgtggttaaccttgctttcggttaa

SEQ ID NO: 28109 - DNA, 795 bp, Escherichia coli
gtgaaggcgaacttcacgctgagcgatggcgacaaagcggttactgatgccgatggcaaagcgaaagtcacgctgaaaggtacaaaagcaggcgctcataccgtgacagcatcgatggttggcggtaagagtgagcagttggtggtgaactttactgcggatacgctcactgcgcaggttaatcttaacgttaccggggacaatttcatcgccaataacattggaatgaccaggctacaggcaacagtgactgatggaaacggcaacccagtagaaggtataaaagttaatttccgcggaacctccgtcacgctaagcagcaccagcgttgaaacggatgatcaggttttcgctgaaattcttgtgacaagcaccgaggtcggactaaaaacagtttcagcctctctggcagataaacctactgaagtcatctcgcgattactgaatgccaaggtagatgttaattctgcgacgattaccagtcaggagatacctgaaggtcaggtcatggtcgcacaagacatagcagttaaagctcacgttaacgaccagtttggcaacccggtgacgcatcaacccgcgacattcagtgcagcgccatcctcgcaaatgatcatcagccagaatacggtctctactaatacgcagggagtagccgaggtcaccatgacgcctgaaagaaacggctcgtatactgtaaaagcatccctagcgaatggagcttcacttgagaaacaactggaggctattgatgaaaaactgacactccactggagtgccatttgcagaggttag

SEQ ID NO: 28110 - DNA, 465 bp, Escherichia coli
  misc_feature (388)..(397): n is a, c, g, or t
atgggtattcaaggttctgaagaactttttagaagtatgattggctattctcgtctgatgggtcgaagtgaagaagagattaagcgagcactgacagcattatcacagatggctggtaagggtcaggttatggctgaagagcttaaggggcaactagctgaagctgttcctggtatggttcaggtattcgctaaagcaaccggaaagactgaacaggaattatttgatgccatgaagaagggggctttaaaatctgccgatactcttcagaaggtcactcaggaactgaatagacaaatcaccgctaaaggtggctggaaagctatttcagaaagtacacaggcacaattagggaacctgaaaaactcttggaataccacgcttgatnnnnnnnnnngaataccacgcttgatagtatcttcagaggttctgaaagtggtctgcaagattttacaagaagcttaa

SEQ ID NO: 28111 - DNA, 411 bp, Escherichia coli
atgacggagacagcggcgattgcattgatggttctcgatcgtcgcccggatcttgcgccacctcttgggcgcgccgaacgtcaacagtttcaacggctattggtctggctggttgctaatgtctatccaacgttcactttcgccgattaccctaagcgttgggcatctgacgcacctgtaattgaatatcgcaaatcgctttatatctggctgaattcgcaattgactgctgaaccgtatgtgtttggagtgcaactaacgctggtggactgttatctctgcaccatgcgcacatggggaccgggacacgaatggtttcaggataatgccccgaacattaatgcgattgctgatgctgtatgtcagataccgaaattacaagaagtattaaaaaggaatgtcattatttaa

SEQ ID NO: 28112 - DNA, 141 bp, Escherichia coli; identical to SEQ ID NO: 7328

SEQ ID NO: 28113 - DNA, 369 bp, Escherichia coli; identical to SEQ ID NO: 14436

SEQ ID NO: 28114 - DNA, 378 bp, Escherichia coli; identical to SEQ ID NO: 7410

SEQ ID NO: 28115 - DNA, 234 bp, Escherichia coli; identical to SEQ ID NO: 7244

SEQ ID NO: 28116 - DNA, 138 bp, Escherichia coli; identical to SEQ ID NO: 16164

SEQ ID NO: 28117 - DNA, 669 bp, Escherichia coli
  misc_feature (611)..(620): n is a, c, g, or t
atgagatctaatataacttatactcttgatgaaattgccgagatttatgatggccctcatgcaacgcctaaaaagttagagacaggggatgctatttttttaagtatctcttctattgagaatggaagattaaatttggaaaaatcatccttcatttccgaagatgattttgttaaatggacacgtagagtaacacctcaagccggagatgtcgttttttcttatgaaacgaaaattggcgaagcatcaattattcctgaagggttacgttgctgtttaggtagacgtatgggattgctgagagccaaacaagataaggtattacctcagtatttgttatatgcttatttatctccaacatttcaggatgtgattagagaaaaaacgatccacggtagtactactgatcgtatttcaatcagagagatgccttctttcgagatacaactacctgatatacatacacaaaaaaaagtaattcagattttaagttcaattgataataagttatctaaaaatgctgaaataaatcaaaccttagaacaaatggtacaagcccttttcaaaagttggtttgtcaattttgaaccggtaaaagccaaaatcgcggnnnnnnnnnngtgctggaagcaggtggttcgcaaaaagatgcaacgcttgctgccatga

SEQ ID NO: 28118 - DNA, 300 bp, Escherichia coli
atgcttttcatctgcgtgcgcttcgataaagcgatcgctggaaacgaagaacccaccagaccccatcgccgggtcatacacgcggccattgtagggctggagcatttcaacaatcagcgtaacgatgcttttcggcgtgtaatactggccgccctgtttgccttccgccagtgcaaactgaccaaggaagtattcgtaaacgtggccgagaatatctttgctcttcaaattgagcttcacgccattgtatttaggttcgctgaaactggtatcggagaaaacgttaatcaggctgattag

SEQ ID NO: 28119 - DNA, 444 bp, Escherichia coli
  misc_feature (411)..(420): n is a, c, g, or t
atgttacgtaatggaaataaatatctcctgatgctggtgagtataattatgctcaccgcgtgcattagccagtcaagaacatcatttataccgccacaggatcgcgaatctttactcgccgagcaaccgtggccacataatggttttgtggtgatttcatggcataacgttgaagacgaagctgccgaccagcgttttatgtcagtgcgaacatcagcactgcgtgaacaatttgcctggctgcgcgagaacggttatcaaccggtcagtattgctcaaattcgtgaagcacatcgaggaggaaaaccgctaccggaaaaagcagtagtgctgacttttgatgacggctaccagagtttttatacccgtgtcttcccaattcttcaggccttccagtggccggctgtatgnnnnnnnnnnatactccagcggataaacaagtga

SEQ ID NO: 28120 - DNA, 537 bp, Escherichia coli
atggttgaacttaaagagccgtttgccacgttatggcgcggtaaagatccttttgaggaagttaaaaccttgcagggtgaggtatttcgtgaactggaaactcgccgcactctgcgctttgaaatggcgggcaaaagctattttctcaaatggcatcgcggcacgaccctgaaagagataatcaaaaatttactctcattgcggatgccagtattaggcgcagaccgcgaatggaatgcgattcatcgactgcgggatgtcggcgttgatactatgtatggggtggcattcggcgaaaaaggcattaatccgctgaccagaacctcgtttattattaccgaagatctgacaccaaccatcagtctggaagattactgtgctgactgggcgaccaacccaccagatgttcgcgtgaagcgtatgcttattaagcgacgatggtgcgcgatatgcatgctgcgggcattaaccaccgtgactgttatatctgtcatttcctgctgcacttgcctttttccggtaaggaagaggagttaa

SEQ ID NO: 28121 - DNA, 141 bp, Escherichia coli
atgtattccgtaatgctttttgttcctgttgactcagacaatattcacaacaaaccacaaattgctgcggcgccggataacgacgaaaaatatgatatatctgctcaattaatgcctgcatggcaggagtggggtgcataa

SEQ ID NO: 28122 - DNA, 255 bp, Escherichia coli
atgatcaaccgattcgttgaagatgacgctctgaccgcttttaatccacggatttacttttccggcaatgggtttcaccaacagttgcaactggctgctgaatacgccgcgatgatagttttgataactgacttccaggttggattcaggagctgtcagtttgagttgcgcgttcgcctgcgcgaccatgtcttcgagatgggtttcaatcttcttgcctgtataccatgcgccgcctgtccagactacgcctag

SEQ ID NO: 28123 - DNA, 480 bp, Escherichia coli
atgcccccagagaatagcgactggtatcatcatgccaactggcggctaaaaaagaacgtgcgcgatgtttatcgtattttcccgtctggctgttataaacaccttcatcacgaataccggttgttgaatcggtccataaaaatactcgtgaacgccacattccccacagatcaatatttggcgttaaagcccaataacctaatgctccttcagaaacagtcggtaatgtacgttgcgaactgccagccattaacggaatacgataaggtaagctaccataactataatccgtcccgaagcgacctaattttagcaggctattttcactgggttttatttttactgcccccagggcaaagccaaaacttttatcaccatcaagataccaccgggtactcatatcagcacgagcacctaatttataaacataatacgccccgccttcaacgcaataattattggaataataaccactattga

SEQ ID NO: 28124 - DNA, 516 bp, Escherichia coli
atggcgttaacacaccacgaactctgtcagattgcgtacaagttccttaagcgcaacgggttcaaggtttgctttcatgaccgctttgttgctgtaaccagtaccggagaacagccagatgctatgggattcagaaattcagcatcatgcctgatagaggcgaagtgttctcgtgctgacttgttggcagatagaaaaaagcgtttccgtaaaaatccgtctcttggaatgggcgactggcgattctttattagtgagccgggaattatttcaattgaggatttaccacctggctggggattacttcacgttgttaacggaagagtacggaaagtacatgggtggcccaagggtaattgctgttggggtaaccctgaagataaaccttttattgggaataagcaggttgaatgcgattacatgttatctgcattaaggcgcatggagttgagagggcaccttaatgaaatatatgacggtgtaattgttaataagaaagaaggaaacgcggcatga

SEQ ID NO: 28125 - DNA, 264 bp, Escherichia coli
atggcaactttgacaaaaaaagaacaagcatggttgagcgaattacaggacgttcttgatcgctgtccatcaccgaaaaaaattggtttttacaccattggcgataaaagcatttacctgtatgacctgcgccgcatggatgaaatcatggaggctcttgataatcgttcgtcgatggattggtgtgttgctgttcatgatatgaatgcagggtttgatgaaaagattttgttcccctcatcagttgaaagcacagcaggataa

SEQ ID NO: 28126 - DNA, 735 bp, Escherichia coli
atgaaaatttccaaattttctgagttggtgaatcgtattttgtccaacaaccacagccatcgtcgcgatatggatgtaacaatcgttgttcattcgcctggcagcattggttcaacaccttcagttgaggttcagtcaattcacgctggttttgattgggattccgggaaagtgcttattttcccatcacagccactgaccacgctaacaccagaacagattactgatatcactgatagtgtgcgcaaaggtcagtcttggcacgcatatcaggaatacaagaagcatcaagagcagttggaaaaattgtcgattgaactggatgccgcaaaacagcgcattgcagagctggagggtaatcgcacggcgctggcagtggagaatgagctggctcgtaaggcagttcaggcattctgcgatgttgttggcgacaacaccgaggttatcgctgaggtggttgggcgagatggcgttctggttattttgaaggccatgaaggcaacaggaaatatgtcagccaccgacgctttcttggctgaagtccgggcgcagggggtggatgctgctatagaagctgcaaaaaatctggtggcccaagaatatgagtataaggatttcaaagcggcgcagagtgattgctgtatgcaccctggttcagacttggtagggaaggttgaaatgactgagtggttagttgactttgctgcccagcttcgcaaaggaggcaaccagtga

SEQ ID NO: 28127 - DNA, 702 bp, Escherichia coli
atgacaattgactatcaagaactgcgcgaggcggcggaacaggcaacgcaagatgaatgggtagcatatattttgccgggtcataacggcatttatcctgcgcgcacgtctgagggtaggcattgcggatactttattgactggcctggcattgatgggcaaaggaatgctggtgctaatgcccgttatatcgcggctatcccaccaaaagttgcgctggcactcctgggcgaaattaagcgcctggaggacacaaatattgatgctatgtgccgaatagcaccgcttgagactaagctcgcggctctggttgcagagaacgccgggctgaaactcgcaatggctgtaactcttgatcatgtgtcggtcacggatgcagggcaggccggagttgctgcaatgattatcaacgatgccctgcaccacagcgaaactccagctaccgatgcttttctggctgaaattcgtgcggaagcacgcaacgaggggattaactataccgccagccgtcttgctgctgcgttcaatcacggatttatcaataagtctttgcgtgaagttttcgacgttacacgcatgattttgtcagcgaaagaagagttggctaatgaagcgcatccgattgatggcctgtctggtgaatatgcggagaaatcccttgaagaatgggcggaacagattcgcaaaggaagcagccagtga

SEQ ID NO: 28128 - DNA, 318 bp, Escherichia coli
  misc_feature (217)..(226): n is a, c, g, or t
atgtccacgtttaatacgcgtaaagatagggatcgtaatggtaaagcgaagccgcataagcattcagggatcccaacacttacaggtaaatggcgtcacccttcaatggattgttgggtaaactacagtacaccgggcgatcatgaatggaagcggctctatactacgcttcgccgtcgcgcagatgatcgacgccaatgtcatcgggtaatgcagnnnnnnnnnnatcgacgccaatgtcatcgggtaatgcagggggatgatccggaaggaatcgtctggttcccggactgttatccacaaatttactactactaa

SEQ ID NO: 28129 - DNA, 153 bp, Escherichia coli
atgcgcctgcttgccccagaacaatggggcatgccgctgcctttagcgcaaagttctaaaccggtcatcaatgccgagcatgatggtcgccactggcgacgaataccagaaccaatgcgactgttagatgatgctgtggagcgctcatcatga

SEQ ID NO: 28130 - DNA, 690 bp, Escherichia coli
gtggtcgaagccttccggccgggccagcagctcggcctcgctgacgctctcggtgaactcgtcccagggaatcaccgcctcgatggcggcataggggtcgctgccgctttccttcgcttccagcagcgcctggccgatcctggagtacaggcgcaccttgtcgttgatcgccttgccctgcttctggaactgctgctgatgcttgtgcttcgcgccgctgaacagcttgaccaggatgcggtcatgcagatcgaccagctcatcgatcacggtcgcggtgctctccagcaccacggcggccagggtcgcgtagcggcgctgcggctcgaacttaccgaggtctttgggcgtcatctgcccaccctcgcgggccagcttgagcaggcggttctggtggatgtgccggcccaggccttcgggcaagtccaccaactgaaatgtcttcagccgctcgatgtgttccagcatgtgccgagagttgggtttcagcggtgcctggcgcagccaggtcaaccaggtgatgctgctgccggccttgagcttcaacagctcgtccagcttggcccgatgcgagtccgtgagtggttcgaccagggcgcggtagacccgccgattggctcgcgcaatggcttccgagcaggcccggtcaatcacgctcagcgccggcaggatgcgtcgtttctgccgtag

SEQ ID NO: 28131 - DNA, 1029 bp, Escherichia coli
atgctcgcgacgggtcacgtcgcgctcgccgtactttgcccagctcgccggctcggcctggacttgcttcgccacccacaggatgaccggctcgggcagctcgctgtcggttcccagcgcgtaaccggggtagcgcagcaggcagagctgcacggcgaagccgaggcggttggcgtcgccgcgtcgctggcggatcagcgacaggtcggagtcgttgaaggtgtagtagcggatcaggtcatcctggctttccggcagcgcaagcagggtgtcccgctccgtggccgagaggatcaagcgacgcggcatgtgtcagtcgtccgtgcggaggtactggtagagggtttcccggctgatgttgaactcgcgggcaagctgcgccttgggctcgccggccgtcgctcgctgccgcagggtagcagcctgctcatcggacagggctttcttgcggccccggtacgcgccacgctgcttggccaaggcgatgccctcacgctgccgctcgcggatcagggcgcgctcgaactcagcgaaggcccccatcaccgacagcatcaggttggccatcggcgagtcctcgccagtgaacaccaggccctccttcaggaactcgatgcgcacgccgcgctgagtcagcttctgtaccaagcgacgcaggtcatcgaggttgcgggccagccgatccatgctgtgcaccaccactgtatcgccttcgcggacgaagctcagcagcgcttcgagctgggggcgctgggtgtccttgcccgatgccttgtcggtgaacaccttgctcacctgggtttgttccagctggcgttccgggttctggtcaaagctgctgacccggacgtagccgatgcggtgcccctgcacgatgtctccttggttgaaggcggcttaagtgcactttctgttccgttgtgcctcaaagcccatttctgtcaggctgaaatctataaccttcgcgggcatgtgtcaaaaaatgggaaagcagactctattctgacgaagcggcgcggccctgcctga

SEQ ID NO: 28132 - DNA, 708 bp, Escherichia coli
atggttgaatggccatgtcctaattgtgggcaaacaactttaaaaattttagatgaatctttcatctgtaaggatacagctgaaactgtcaaaatggagggtgaagaatggtttgacttagagtatacaagctcggtattcagttgtatgtcacagtgcgtaagacctcaatgtaaggaggtagtggcatgtatcggcagaagtggtctagaacaagattggtgcgaacataaagggcttagttactatcgctggtatgaaccattaagttttactcctgcgttaaagctatttcttatcccgaacatgtgccctgaagacatagccttgcctataaacacctcgtttgcactaagcacaattcatccaggtgccgctgcaaatctaataagaacatctgtagaacggttacttactgctatcggggtaactgaaacaagcgaaaatgggaatagaattaacctccataatagaattgagatgatccctagtgaacattctggctttaaaagcctgttatttgcgattaagtttcttggaaatgcgggtagccaccgctatgaaaaagttaccgcagatgacttggataactcatacgagatcatgaattttattctaagtgatttatattcggataatcgcaaaaaggttagtgagttagctcataatctagacaaaaaatttaatcctcaaaaacaaaaatgttga

SEQ ID NO: 28133 - DNA, 282 bp, Escherichia coli
atgtttgatttcacaataatgctcctctccatccttggcggggtgcattcgtttctgaatggggttcgtgaaaaacgttacgaagcgtcatgcaggcaattgatggccgagtgtattgctgccgtacttgcaggctttataggcatgtatttcgcggaatataagggtatggatgaaagtcttcagaattgcgtgactattatttgcagcatcaataacaggctcattcttgaaaagtcacaaaggattatcgattcgtacctcaatagaaatgcctcttaa

SEQ ID NO: 28134 - DNA, 891 bp, Escherichia coli
atgggcggatcgcagggtgaattacccttagtacctacagtagaagttgttgctgatggcattcctatgggggtgcttaatgatggaaccccttatctaactctttacggtttagccaaattatgtggcatagatgaagcacctcttcgaatgtttacatctaactgggagactgaaaaaaataagccaagaggacaaaaagtagctgcatacttagctgagaaaggatttaacaacgttgaccgactgtatacccgcgtcataaatagctcaaacgttgaaacacatgcttatcctgactatgtttgtatggctatcctccgttactacgctctagatgccaccaattttgataggtcagtcgcaataggtaattttgttcgcttggctgagtacacgcttaagcgaatgatttatgaaaagtcaaattacaacccaaatgcttcaatagatatctcattcgagaactatagagcaaggattaagctaaacgatcagataccgacaactcattttgcagtattcagagagatagctgacattgccatgaacctgatcggaggaggattcccaatggatgacaccacatctttggatggaagtgttggaattcactggggaaagtattggacagctaatgggctatctgagaaattcggggaaagggtgcagtacccacatctattccccgaaaattacaggcagtcagctgcaaataagcatataaaagcttggatttatcctattgaggcacttggcgtgttcagaaaatggctacacgataattacgcaatggaaaaactgccaaattaccttgggaacaaaaagattagtaatgcctccgagctattagagttgataaaaaaaccagcactcccaaataagcattga

SEQ ID NO: 28135 - DNA, 366 bp, Escherichia coli
atgaaaaaagttaacattggaaacgtaccaaagatgctcgttccgctctttgagagcggtacaattgtgttttgtagagactttccagaatggcaacgcctgcatcaaaaacttggcgttgacgtgcatgactcggacgccaacggagcgtctcatacaatgagcagcgagaatggtgttttgcatgtgataggcgtgttcaatggcaaactatctactattgcccatgagtgcgctcacatggcattcgatatctgctcaagggtcggcgttgatgttgaaccaggaagagccaacgagacttactgctacttaatgagcaggcttgttgagttctgcgagcgacatatcaaaaagccggagtga

SEQ ID NO: 28136 - DNA, 450 bp, Escherichia coli
atgatttcaactgacgataattttaatcataagttcagaacgatatcgaggtatcgcgattttgtaaactccccatcagtactgaatataattgcaactattattggctataacgaatgtgagggatggttaaagtcattaaaggcacatattgcctctaacattcaattcacccagcagtatctgaatgaaaatattccagaattgatcgtaaggccagctgatggttgctatttttcctggatagattgttctgctattggttatccttttgatgaattctacagtcgattaattcatgaaggcaaagtgggcattatggcggggcatgtctatggaacggagggggagggctaccttcgtctgaacctggcctgcagtcgagaaaaattatatatggggcttacgcgtcttgtgagtgtaattaaaaatattaatcagggagaataa

SEQ ID NO: 28137 - DNA, 312 bp, Escherichia coli
  misc_feature (239)..(248): n is a, c, g, or t
atgaataacacggatcttatccatctcattaaacattttatgcgtaacgaacataaagcagttgaagaagttattgattcccctctttcggaggtcgcaaatttaattaaagtattacaatcttgtcagggaaaagttgtttttattggtgttggtaagtccggtattattgccaggaaactcgccgcaacatttgccagcaccggaactccctcgttttttgttcacggtacggaagnnnnnnnnnntacacggcgaccttggaatggtggcgaaagacgatgttgttattcttatttcaaacagtggtga

SEQ ID NO: 28138 - DNA, 4716 bp, Escherichia coli
atgagaaaaagctggactataaaggaagattgtaagctgcttaccttggtacgtcagcacttttccgcgttggtcagccataaccggctgaatgccacaatgccatttagccagcagcttcacgatgcatttgactcacctgatcgcgatgccgcagcattgttgtatcgactcgaacaggcaaaaatcctgggatttgccagccgtcctggaggcgatcccactaaacagctgtttcgctgtctgataaacaatgatttggcgctatacgattacagcctcacctttccctctctcagaaaagcattgcatccagataccgttgcagcagcactaaaccacttcacgaatagcaatccacacgaaccactgtccaatactatcaatgaaattgcaaaagccttgcatctttcctccatgcagatagaaaagcttctgatcgatagtggccaaataaccatcaatagttaccgtgagtgtgagcgtgttggagagataactataaataataatctgcaagatctcatctccaggcaaattcctgacataacgctggttgaagatattaacgcttgccgtgcccaagtctctcaactttaccacgtgcatgaatgtgatggtgctgaggtcatcttcagttccgatggcacgggattcggcaaaagctatggcgtaattcaagggtatgtcgaatatctggagcgtttcgccaaaaaccgaaagtcagatgatctgtttcccgaaggtggctttaccaacctgctgttcatgtcgccgcaaaaatcacaaatcgacctggacagcagccagaaagacaaaattctggctgctggcggcgaattcatttgcgttctctctcgtaaggatattgccgatctcgactttatggactgggcctctggcctgaaaaaccgcgaccgctatattcagtggtacgaaggtgcaaaaggtagcaaatatatcggcggcgctatgcgttcgctcaattatcatgtttcacaaattgatcgctgtgaagagcagttaaaaaagctgacaacatacggttctcaggataccaactacgaaagagaaattatcgaagagcagctaaaaaactgtcgtcacagtatccgcaatacgattgagtcagcctgtaaattactatttggaccagatagtgaaaaaacttccattaaagagtacattcgtcgcgggctccaggcgcgccaagagcgaatgcaaaacgcggagacagcacgaaaaccagggaagcctgaacctaagataagcgtacacgaagtctatttcgagcttatcaaacaggtattgcctttcgaagtttgccagtaccgcccgtcggtgctattaatgaccacgaataagttcgacacatcaacttaccgactggtgcctcgccagcgaggcgaaggcgtgcgttttgagtccgtaggtttcgacttgctggttggtggtaagctgactcccaaagatccacagattagcgccgttgcggcagccggtcataccgggcaggttgcctatcttcgtgacgaacacttcagacacaatccagattgtccttttcgcaagaaaaatattcgctttacggtgatcattgatgaactacatgaagcctacactcgccttgaagaaacatgccatgtaaagctgatcacacaggaaaacaacctggcgcacgttatctctgtcgcgggacgtatttacaacgcggtactcagccttgagcgccggaacaagcccaaagaatcgcaaacgacctttgaacaagagatggtcaaattcatcacgactctgcgccatttactggcagaaaagtgcgaactatcacccggcacaacgctgggatcgatactggagatgtttcgcgaccagttaggggcatttgaagtcaacggcgacgccgctgaacgcatcatctcaatcacccggaacgtgttcagctttaaccccaaaatgtacgtcaatgaagaggggctgaaacgcattcgtatgcgcaacagcgaaggcgacataacgcgcaccgagctgtattacgaagtcgaaaatgatgccagcgacaccaatcccaccctgcacgatctgttccagttggtctccgtcatcctcgccgcctgttctgatatcaccaaccgacactttaagcgctgggtaaagaatggcggccaggataactccagcagccagaatacccctttgggccagtttgttgacgcagccaataacgtagctggcgtggtacgccacatcttcgatcgcaccaccgatgaaaacttgttgattgatcatttctatacttacctgcaacccaaaaccgtattcacgatgacgccgatagctgaactcaattacgtgaacagcggagccgagcgcacaattatcctggcgttcgagatggatctgatacaagagttgcccgaagccatgctgctgcgtttattaaccagcacgcacaataaagtaattgggcttagcgccaccagcggttttagccacaccaaaaacggtaacttcaatcgtcaattcttggcgcgttatagtcgtgatcttggctatcgagtcgttgaacgcaaaaaaacagatatcgatacgcttagagcactacgcaagttgagagccagtatccgcaacgtcgacttcagggtgttcgatgataagcagttaaaattgaccgatatctaccaaaattgtgagctctatcgcaggacgtatgacaactttttcgacgcgctgaagaaaccgctggaatacgacctgaaaaatacctataaacggcgtcagtaccagcgggaactggaagcgttactgcttgccgcctgggagggtaaaaacagcctgattttgtcactttcagggacatttaagcgggcctttatcagcgcctggcgcactcatcaatcagcctggcgtcagcagtacggtatgcgctcccggtgcgatgaaaaaacggataatgataagaaacatgaccagatcctgacctttaccccattcaaagggcgtcacacagtccatttggtctttttcgattcaccactggccaatgtcgaagatatcaggcaagaaacctatctccaggacagcaataccgtactggtatttatgagcagctacaaaagtgcaggcaccggcctcaactactttgttaaataccatgacggcgatcttaatgatatcaatgcaccacgtctggatgtcgattttgagcgcttagtactcatcaactcctcgttttacagcgaagtaaaggacaacagcggcaacctcaatacattacctaactacgttaccgtgcttaaacactacgccgatgacgatattaccgtccacaagctggccgatttcaacgtcaatttcgcccacggcgaaaactatcgcctgttaatagccgaacatgatatgagcttattcaaagtcgtcgtgcaggccgtagggcgagtcgagcgtcgtgacactctattgaaaacagaaatctttttaccccgcgatgtgttccgtaatgttgcattccagttcgccgctctcagtgaagatagcggtaacgaggtagtatcagaaagcatgtccttgcttaaccaccgcctaatggaggagtgcgaaaagctgagtcagaaccagtcatttagtgatgcagaacagcggtatgcgtttgaacaggccatcgtagaaaatggtcgccgcatcgatgctgttcataagcgagtcctgaaaaccgactggataaatcaggtacgcgccggcaaccttgaatatctcgaattgtgtaatttattccgcgattctgactcctttaccgatcccatgcgttggctggaaaaacttcaggctaattccttgtatgccgccaatcggcaaatgcaatcaatccaccacgccctgtttatcgaccgccatcagggcaaccaaactattttactttgccacaaacgcggcccggatggacttgtccacagagattatgccgccctgtcggatttcgctggcggcgcaagagagtaccggcctgagctcaccctctttccgcagtatagaaacgatgtcgattttacccccggcaacctggtcggtgagttgattcgtgaatgtgacaacatccaggaaacggcattcaaaaaatgggtacccaaccccaggctagttccgttgctcaaaggcaatgtcggtgaatatctcttcgataaagtgctaaaaagctatggcgttaccccactttctgatcaacgggtgtttgaacgccttgaaccgctagtatatgagttttttgaccgctttattgaagtgggtaacgacctgctctgcatcgacgttaaacgctgggcgacgcagttggatgatttaacgcgggcagaagaaacgcttgagaaaagcaacaacaagattcgcgagatccgtaatatcaccagccaaaaggcggatacagaggggcagaaacagatccagacggcactggcaggccattatgagcgtattcgatttatctatctgaacgtcgcctacagccagaaccccaataatctgatgtggcaagataacgtggatcacacgatccactaccttaacctgttgcaaaccgactaccagtactatcagcccaaaaatagagagagcgggcgagctcaggaaaactcgaaactgagcatgacattggacattaacccaatgttactaaccctgctgggtgtagaaaagttgccgactaaaggaaaagtctcatga

SEQ ID NO: 28139 - DNA, 624 bp, Escherichia coli
atgtcatcaatccgcttaactacgagaatgaaagaggaaatcgctcgtaacgctttaattaagtctggggttttcactgaacttgaagaagtaacaaagttaaagaaccagcttgcacttgacgccagagttattgcgtttggcgggaaaaagaaaactgaggaagttgatcagttatcatccaagttggtagctataagtgaagaacttgaaaagatgggatgttcattttactcatacgatgttcgttctacttcaatttatctgactgcatctggcagaaggattggatggcattcatatgggaaagacggcaacggcgaagatatattgctccctactccgaacaaagataaatgcatgtttagcgcagaacacgaaataacaaaaaggtttgatgaaatctgcgcattgcaacaaaaacttgaagccaagaaaaaggatatcgaatcaaatgtatgggctgctttgaactcagtcacaacagttaagcgacttattgaggtttggcctgaaagcaaagaattgctaccaaaagaagcagataaagcaagtacagcacttcctgctttacgggtagaagatttgaataagatgattggacttccttccgaggccgcatag

SEQ ID NO: 28140 - DNA, 132 bp, Escherichia coli
atggatttaaataatatttatggtgactacctggtgaagcgtcgagtaactatgatgcttcaattcgtttataaaggtgattatacattagctgttcagctttatcacaatcatgctcttttatggccgtaa

SEQ ID NO: 28141 - DNA, 195 bp, Escherichia coli
atgcgtaacgagaatctgattcagattttgtatatgctccaacatcacttgccgatggttttctggttgttgtataaaattctgaccagtcagcttcaaatccataaccatctcgcgctgaacgataataaataccgccgttcttataattcacacggaattgaacagcaggacaactccccacattcatattga

SEQ ID NO: 28142 - DNA, 402 bp, Escherichia coli
atgccgaataaactacccactaataaagagagtattttttatctgaatgttctggatattccaccaaatagtccagaacaagaaggtaagaatgcactgaagtttgcgatgcaaaacagaattaagttgttttaccggccagcgggtattgctccggtaaataaagcgacctttaaaaagttactggtaaatcgcagtggcaatggattggtgataaaaaatgactcagctaattgggtgacgatttcggatgtcaaagctaataatgtcaaagtcaattatgaaactattatgattgcccccttagaaagtcagagtgttaatgtcaaaagtaataatgcaaataactggcatctgaccattatcgatgaccatggcaactatattagtgacaaaatttaa

SEQ ID NO: 28143 - DNA, 138 bp, Escherichia coli
atggtgttaacgtatggcagcgttatacaactgccggaacaggtacaacccttaaaggtcgcacgtttgagcgcgtttttaccggcagctcatggagcgaatggcgggaagtttacacatcttattcacttcccctga

SEQ ID NO: 28144 - DNA, 717 bp, Escherichia coli
atgaaaaaggctaaaatactttctggcgcattattactgtgcttttcgtcaccactgatttctcaggctgcgacactggacgtacgtggtggatatcgtagtggaagccacgcctatgagactcgactcaaagtcagtgagggatggcaaaatggatggtgggcaagtatggaaagtaatacctggaataccattcatgataataaaaaggaaaatgccgcactcaatgatgttcaggtggaagttaattacgcgattaaacttgatgatcaatggacggtgcgcccgggaatgttaacgcattttagcagcaacggcacacgctacggaccctacgtaaaactgtcctgggacgcgacaaaagatcttaattttggcattcgctatcgttacgactggaaagcttaccgacaacaagacttatccggtgatatgtctcgtgataacgttcatcgttgggatggatatgtcacttaccatattaatagtgatttcaccttcgcatggcaaacgacgctatacagcaaacagaacgattatcgctatgcaaaccataagaaatgggcgacggaaaatgcatttgttctacaataccatatgacgcccgatattacgccatacatagaatatgactacctggaccgtcagggtgtttacaacggcagagataatttatcggaaaacagttatcgcattggtgtgtcatttaaactgtag

SEQ ID NO: 28145 - DNA, 474 bp, Escherichia coli
atgaacttcaggaaaaatgttgctcttatatatcacccaatgggtaatatttcaggaaaaatggtatatcaggctgagttgtcaaagtttgttaaaaaaaattatagatcaagcagcttcttaacggaggttgatcctgaaaaaatacagtacctgataacgggtaggtttttttacaatggtagttacagagatttagaaaaaaaaagttattcaggcccatttgatctcgtctcaggcgttatctctcctgatgcaaaatatgtagatcctttcggtctggggtgtgatattgataaggtcaatcatagtataccacacgtgtatgaaatatccacagcacaacgagttgcatttaaaagcgatccagcgttatctgcgataataaataaagaacaaatagataaaaagtgtcggcagttattaaaagcatctgcatctttgaaagatttaggtggatatttaagtcagtag

SEQ ID NO: 28146 - DNA, 216 bp, Escherichia coli
atgcgcgcttgtacacagacagtgtgtttcagtaatatggagaataatgaaatgaataacacagacacattagaaaaaataatcagacaccaaaaaaacaaagaccccgcatatccctttcgggaacatttgttgatgcagctctgtattcgcacaaataaaagaatgcaggataatatatctgaatttctgggggtgtatggaataaatcactaa

SEQ ID NO: 28147 - DNA, 282 bp, Escherichia coli
gtggcgatactggtggttgaccagctcggccaaggccgccgaataggtttcgtcgcggatgtgccaggcttgcagccaggacagcttggcgtaggtcaggccggggctcgactcggccatcttggtcagcccgaggttgatcgcatcaccgaggattgcggacagcagcaacgtcctgtctttggcctcggccccgtccttcaagtgggtgaagtggcggctgaagcccgtccagtcgtccacgtccatcagcagttcggtgatcttgatgcgcggcagtaa

SEQ ID NO: 28148 - DNA, 270 bp, Escherichia coli
gtgcatcagggcaaagacgtgatcggtgaagccggccgtgtcggtgtagtgctcctcgatccgcaggtcggactcgtggtacagcaggccgtcgagcacataggtggaatcgcggacgccgacattcaccacgcgggtgctgaacggcgcgtactggtcggagatatgggtatagaacagccgtcccggctcgctaccgtacttcgggttgacgtgcccggtgctctcgccccggccacccgcgcggaagcgctggccatcggaggatga

SEQ ID NO: 28149 - DNA, 375 bp, Escherichia coli
atgacagagtcattacctgaaaatgcatctaagcaacaatatcccacagaatacgtgctggcattacgtaataatcaactagctgccgcgattgacgatgccaatttaacgccagatattcgcgctgatattcatgccgaactggtcagactgtcgtttatgcctacgcgcagtgaaaatgaacgttatgccattgccgatcgcgccctcgcccaatacgctgcattagaaattctgtggcacgataacccagaccgcactgcccagtaccagcgtattcaggttgatcatcttgaggaagatcattactatattttgctacggttgagagaaacgaatgcccctgtaaccaggtatcattcgggatgctcgtag

SEQ ID NO: 28150 - DNA, 675 bp, Escherichia coli
gtgcaggactatagcaataaagggctgcccaacagtaattatctctctgccagtaaggcaaaagtgtttgtttatgtagggagctccctggtacgtagttatagtgtccctgcaggaaaacgagggaacatctggaccgtgtttaaactcaatccaaacggcgagtttgaagatatcaactctgttaccagcgccaattttaacggcaccacattagacgtcagggatttagccactgtgataatgcctgcgacggactcttcagctccggcttcgcctgcgatgcaaaacagtggagatactcaactggcaagaaaatataatcgcgaaggtgaagctgtttataaaaccggtcaacttgagcaagccattcaactcttccaacaggcaacagaattagacggcaattacggacaggcatttagtaacctgggtctggcgtatcagaaaaatggcaacatagcggaagcaatttgggcaaatcgtaaagcgatctcgttagcgagtggggtaaatgcggcgacaacgcgcgccaactcctattataacattgccaaaatttatgaaacctcgggccagaatgctgaagcattgcagcattatcaactggcgtatacggaaaaaaataagccttcttatgaagaagctattgcacgtgtaaagacgaaaatgtaa

SEQ ID NO: 28151 - DNA, 132 bp, Escherichia coli
atggtgatgttcgtggatttggtgctgttgaaggtggtgttttattatgtgatgaatcgtttaaagacgcagaaagaactgggatcgatgtatatgttccagagggaaggtggcgattatcgactcctatga

SEQ ID NO: 28152 - DNA, 252 bp, Escherichia coli
atgggaagagatgacccgcaatttaatctgcggctaccttacgaattaaaggaaaaactaaaacagcgagccaaatccaatggccgctctcttaattcagaattagttcagatagtgactgatgctgtatcaaagccatccaaaatttcaggctatcgagacgatgcggaacgcatcgctgatgagcagtccgaacttgttaagaagatggtgtttgatacgctgaaggatttgtacaaaaaaaccacctga

SEQ ID NO: 28153 - DNA, 150 bp, Escherichia coli
atgatcatgcagtgttttcatggtggggacagtcctgttctcccaaaatatcatggtattgatacgggagattatgccgtacaggtacgacactttatgtcgtaccagaggggagtggatagaaaaaatggcgaagatgcgaagagttga

SEQ ID NO: 28154 - DNA, 243 bp, Escherichia coli; identical to SEQ ID NO: 8603

SEQ ID NO: 28155 - DNA, 288 bp, Escherichia coli
atggcaactttgcaggaattaatcgacctgacgccagaacaggaaaaagcgtggaatcgccttgtgaaggctgtaaaggatttcagggcagccggaggaaagttttatagcgtcctggacacgctgagcgcatacaacggcgagcacgttgccagcattgataacgataagggctaccacactgcaagcgtctatatgcctagcattgatgcgccagggctaaccagttgggctgatgattggcacggcatcacgctgaaagatggcgttgaagtggataaggactaa

SEQ ID NO: 28156 - DNA, 291 bp, Escherichia coli
atggaatttaaaggtaccgaaggtaagtgggaaataatgatggatggcgatgagattaaaatcatccaggcagactcacttgaaaatggcgcaggctggcgttcgtatattgcaatctgtgaggaagttcaatgcattgaagatgccaatctaatagcggcagcacctgaccttttaaatgccctgcaagcgatgctaaacaaggcatacaagcaaaactggaatgaccattatcctgatcaagtatcgaaagcacagtcagcaatcagcaaagctcttggggaagaatga

SEQ ID NO: 28157 - DNA, 366 bp, Escherichia coli
atggaagaacaagcaaacaagattctcgtagaactactgcaaaaagccagcaatggaatagacgcggctgtttcatttagccaggcacagattcctgatgtcatccatcagcttttgatgtggcacgccgtatcatcagctggaattcaggctatctgtgtattggtgattatagcgtgtgtttatctgatgatttttgcatggaataaaggagatgatgcagatatttttcttttatcactacttgtcacatcaggaatagcgattacttctattgttgttttcttcaattatttcgactggctgaaaatttggcttgctccaaaactttaccttatcgaatatgcagcatcattggttaagtaa

SEQ ID NO: 28158 - DNA, 180 bp, Escherichia coli
atgaaaaaagaaggccatggttttatctcggttgttaactccatctcagaagctaagaactggtttgtggaaaatgaaatacctaaggaaggcgatgtgctagagctggtagttgttaaaagcaacattgaaggtgaatcatacacgcttgatctcaagttacagacagctcaaaaatga

SEQ ID NO: 28159 - DNA, 741 bp, Escherichia coli
atgcatcaaaacttagccaacgcaacatttcaggtcattgcaggtaagtctcgtggtagcgggttcagtttcatgcgagaaaacctagttgtaactaacttgcatgttgtggccacctgttgtgacttacaaaccaagtgtcaaatcaatgacgtcattcttcaaactgaagcaaatgagagtatcgacgctaaaattttgcatgttgatggtagtaacgactttgctatcatgcaattgcaatccccccttcctggcggaagaacagtccttcaaccatctgctgggtttgctccatccaggggcagaaaagtaatttttgcaggatacccgcatgggatacctctgttactaacaagtgaggcaattatttcagcaccgatggagcatggccgatttacgcttgatggaatggttaatggggggaactcaggaggacctattattgatcgagattcgggagagttagtaggtatcgtcacccagcgtagatatataatgggcgatcaggctgatgctttcagccaagaaatagcccaactgcgacaatatctttcttcagcaagtctgcatagaagtgttgagatcatgggtgttaatttcgggcaaatggcggacatgtttggtagatcgctacagattgtttcggacatgatgtcgcagaatgctaactccggaattggtattggattttcaatccagcccatcgttgatgtgatcacatctttccctacgaaataa

SEQ ID NO: 28160 - DNA, 243 bp, Escherichia coli
atggcagagattattcccatgactgaagaacagaaattcaagttagaaatttaccgactgctatctaagaacaattcagcggcagaggaagcttttgcattcattggtgctgaccaactgaaactggaattgttcaagttgcactacaacgatggcggtgcaaatccagacttcacatctcgcactatcgaagcggtgcgtaaatcgaaggaagcgttagacctgttcactaccggagcatga

SEQ ID NO: 28161 - DNA, 1419 bp, Escherichia coli
atgcctattcagcaacttccgcttatgaaaggtgtcggcaaagactttcgaaacgccgactatatcgactatctgccagtgaatatgctggctacacccaaagaaatactcaacagcagcggatatcttcgctcattcccgggcattgccaaacgttctgatgtgaatggtgtatcgcgcggtgtcgagtacaacatggcgcagaatgctgtttatcgcgtttgcggtggcaagttgtataagggcgaaagcgaggtcggtgatgttgccggaagtggtcgcgtatcaatggcgcatggtcgaacatctcaggcggtaggcgttaatggtcaactggtcgaataccgctatgatggcacggttaaaaccgtctcaaactggcctacagacagcggattcacgcagtatgagttaggttcggttcgcgacattacgcgcttgcgtgggcgttatgcgtggtcaaaagacggcactgattcatggtttatcactgatcttgaagacgaatcgcatcctgaccgttacagtgcacaatatcgcgcagaatcgcagccggacggcatcatcggcatcggaacatggcgagatttcatcgtctgctttggttcatcgacgattgaatacttttccctgactggggcaaccaccgttggtgccgcgttgtatgtcgcacagccatcgctgatggtgcagaaaggcattgccggaacctactgtaaaacgccgtttgctgattcttatgcgtttatcagcaatccggcaacaggtgctccgtctgtatacatcatcggctccggtcaggtgtcaccaatcgccagcgcgagcattgagaaaatcctccgctcctacactgctgatgaactggctgatggtgtgatggaatcgctgcgatttgatgctcatgagttgctgattatccaccttccgcgccatgttctcgtgtacgacgcatcttcaagcgccaatggtccgcaatggtgtgtgctgaaaacaggactgtatgatgatgtgtaccgcgctatcgacttcatttacgaaggcaatcagataacgtgcggagataagctggaatcggttatcggcaaattgcagttcgatatcagcagccagtacgacaaacaacaggaacacctactgtttactccgttgttcaaagcggataacgccagatgcttcgatctggaggtggaatcatccactggcgtagctcaatacgccgaccgcctgttcctctctgcaaccactgacggcataaattacggtcgtgaacagatgattgagcagaatgaaccgttcgtttacgacaaacgcgttttgtggaagcgagttgggcgcatcaggaaaaatgtcggcttcaaattgcgcgttatcacgaagtcacctgtaactctgtctggctgccagataaggattgagtaa

SEQ ID NO: 28162 - DNA, 318 bp, Escherichia coli
atgaaacgtatcgctatcctattgctcctgtgtctctcgagcatagctaacgcagaaacaaaatcagacgatagcagttttgatgaaatacaaggcctcatgatagcttcgaaaatggctggtatgtgtggtgcaatcaaacaaatggcaatattccaagaatctacaaacatgccgggtgggaatgaattcttacagagattccttactacagagcaagcaaggcttgggatgactccacagcaatttcttgaagcatgtcagaaatcaatctctatttataccacctattacaatatgagctctgagaaaaaatag

SEQ ID NO: 28163 - DNA, 183 bp, Escherichia coli; identical to SEQ ID NO: 11010

SEQ ID NO: 28164 - DNA, 714 bp, Escherichia coli
atgcgtctgaaggcactggccttcctggtccccctggaaaaaatatcctggatcgcgggcagtgaacgcgcatgcttattttcctggtatctgttgatgcagtttatccagaataacagggcaaaaataagtgcagacttgcttcaaaagaataaactgtatcttaaagaagagtatttagaagggaatgccttcccgtcggactcatcgacacagttcagacaaatactcagagttctcgatattctttctgataagaatttgcgggatgagtggataatccagaccaaagacagatggatgcgggcatttaaatcaaagagccctttcagttacctcctcccggagaacgaacatgaatgcatatggacatggaattatttaaaggaaaaaaatattgcactggacaacctggccagttttcctggttctgctgatatttaccacgcaattcacctttcatttgacatatgggttacccatccatctgcctcacctgacgatataaaaaatttcaggaacagtttcaataaggccaaggcacagcgcaagtacaaaaaaatgcaggaagataaagtcaatgtacagttttttcttgacgcagaaaccagggcgcagctcaaagaattatcgagggccagaagactcagtactggcgaaatgctgcatgacctgattgttgaagagtataaaaggtaccgacattccagataa

SEQ ID NO: 28165 - DNA, 240 bp, Escherichia coli
atggtgcaaaaagtcgcctatattctgattattttagatggcgctgctcttctattgtctggtctggttttatggaaacccgttcagttttcccttctgactatactattcggtggttatgatacagcgcgttatatccactttctgtgcatgaacattatggtactgttcattattattcacctggttatggtgttattggttccgcgtgcattgttatctatgatacggggtcactaa

SEQ ID NO: 28166 - DNA, 663 bp, Escherichia coli
atgttcaggtcattaccggcggacagtaacacgctgtcaccggcagaaacggcggcaccggtgatactgatatccccggctgcgcccataaacagtgagtccgttgccctgacagcagccagcggaccggtatccgttccgctgaaatggttatatccgttgttcatcgcccactgttctgtccgggtgaggttactgatgtttccggtggcgctttccagggatacggttttaccgctgatgactgagctgatattgccgatatccccgatggcgctcaggtccaggctaccgcccgcgcttatcagccccgcattcaggttgtcgatactgcctgtgctgtcgagcaggaggtcattctgtgcgttgatgctgccgccgctgttggtgatattgccgcccgcaagctgcacgttgttcccgctgataacgctgccgttatgcagggtgatatcttccggcgacagatacagtttcggaaccatgactgtctgtccgttgatggtgacggactcccaccacagtatgcttctggtcagttgtgcaacctgcccggcggtcagcgacacaccaaaggtcagtccgagcgctttctgttgtgctgccgcgctgtccatcaggtatttcatctgcgccaggtcagagcctgtgccgttgatataa

SEQ ID NO: 28167 - DNA, 1032 bp, Escherichia coli
atgcaacaacctgtagttcgcgttggcgaatggcttgttactccgtccataaaccaaattagccgcaatgggcgtcaacttacccttgagccgagattaatcgatcttctggttttctttgctcaacacagtggcgaagtacttagcagggatgaacttatcgataatgtctggaagagaagtattgtcaccaatcacgttgtgacgcagagtatctcagaactacgtaagtcattaaaagataatgatgaagatagtcctgtctatatcgctactgtaccaaagcgcggctataaattaatggtgccggttatctggtacagcgaagaagagggagaggaaataatgctatcttcgcctccccctataccagaggcggttcctgccacagattctccctcccacagtcttaacattcaaaacaccacaacgccacctgaacaatccccagttaaaagcaaacgattcactaccttttgggtatggttttttttcctgttgtcgttaggtatctgtgtagcactggtagcgttttcaagtcttgaaacacgtcttcctatgagtaaatcgcgcattttgctcaatccacgcgatattgacattaatatggttaataagagttgtaacagctggagttctccgtatcagctctcttacgcgataggcgtgggtgatttggtggcgacatcacttaacaccttctccacctttatggtgcatgacaaaatcaactacaacattgatgaaccgagcagttccggtaaaacattatctattgcgtttgttaatcagcgccaataccgtgctcaacaatgctttatgtcggtaaaattggtagacaatgcagatggttcaaccatgctggataaacgttatgtcatcactaacggtaatcagctggcgattcaaaatgatttgctccagagtttatcaaaagcgttaaaccaaccgtggccacaacgaatgcaggagatgctccagcaaattttgccgcatcgtggtgcgggtgatgctgccaacttactgatttag

SEQ ID NO: 28168 - DNA, 555 bp, Escherichia coli
  misc_feature (523)..(532): n is a, c, g, or t
gtggttggtcaggttgatggtgatgcatccattttgtgtggtagcccgattatccgcagcaatgaacagttgttgtgggctgtgcgtgaagctaaaccgaatgcacatattctgttcaaacctcatccggatgtggtatctggcaatcgaaaaggtactatttcggcgcgttgtttagcacactgtgttgatagccaagtatctgatattagactggaatcgctatatccacacataaatgagttacataccatgacttcgcttagtggatttgaggcactagttcaaggagtgaaggttacgacatggggacagccgttttatagtggttggggattaacacaagataagcatccatcagaaagacgccatcgtacattaacgttgagtgcattagcatatattacattagtaaaatatccgcgttatatagattggaagtcagggctttggtgcagccctgaacaattaattcatctattatctactcaaaaaaaagctacgacggcaggtgttaagtggnnnnnnnnnngcagcgttggcgaattaagttag

SEQ ID NO: 28169 - DNA, 168 bp, Escherichia coli
atggttatcctgaacaaactcaaccttacgtcctactgcttcttcaaatactttctggttaaagctctcaaaaaagaagccacgttcatccccaaaaacttttggttcaaaaatcagcacatcaggaatttcagttttaattacgttcattttattaataacccttaa

SEQ ID NO: 28170 - DNA, 234 bp, Escherichia coli
atgagagtaagaacctgtctgaatatcaaacagacaggttctttattgtgcacagaaaacccccagctaggctgggggttccggaaagctttcagctttaagccagttattaaaaccccttttgatttgttaaaacaccttgcggtctggcaactgcaagtgtcaaacaagaaatcaaaagggggtcccaatggggaacgaaaagagcttagcgcacacccgatggaactgtaa

SEQ ID NO: 28171 - DNA, 612 bp, Escherichia coli
atggcaaccgccttccagtttcaccgccagcgcaatggcatccgccacgttggcgacgcgcacgacgggcagcaccggcatcatcagttcagtcacagcaaacggatgttctgcggtggtttctacaaacagcagtcgcgtttgttccggaactttaaggccgattgccgccgcgattttcgccgcatcgcgaccaacccagtcacggctgacggtgccttttccgcgctcgtcgatatttttcagcaacaccggttgcagctgctgcgcctgctctgcggtcagtttcaccgcgtgctggccttccatcagacgcatcagttcatcggctacgctatccacaacaatcagtaccttttcgtcggcacaaatgatgttgttatcgaaagacgcgcctttgacgatggactgagcagcacgggcgaggtcagcggtttcatccaccactaccggcgggttgccagcgcctgcggcaatcagacgtttattggtgtgtttacgcgccgcttctactaccgcttcgccgccggtcaccaccagcaggccgatgcccggaaacttgaacaaacgttgagcggtttcgatatccggatttgccacagtaaccagtaa

SEQ ID NO: 28172 - DNA, 333 bp, Escherichia coli
atgtataaaaaattaaaattaaccacaataagcgaattgattaaaaatatttattgttcattatccgttatcatcattggttgtgcgtcagcttatgccgttgaattcaacaaagatttaatcgaagccgaagatcgtgaaaacgttaacctttcccaatttgaaactgatggccaattacccgtcggcaaatattcactaagcactctgattaataataagaggacgccaatccaccttgacctccaatgggtattaattgataacctaactgcagtttgcgtgacaccagagcaattaacattattagggaaggtgcgaacaagtccctga

SEQ ID NO: 28173 - DNA, 537 bp, Escherichia coli
atgagaatgggaaaagataaaaaaggcgattctctcgctattgtaattaaaaataaaaacggaaatgattacttatctctcggttactatgatcaggacgactaccacattcaaagaggaattcgtattaatggtgatagtctcacccaatattgtagtgaaaaagccaggaatgcttcagcgtggtttgaaagcagtaaagctatcatggcagaatcatttgcaacaggttccgatcatcaggttgtaaacgagctcaacggggaaagactgagagagccaaacgaagtttttaaacgtttaggtcgagcaataagatataattttcaagtggacgatgcaaaatttagacgcgataatgtaaaagaaataatttctactttagtcgataacgaagttgaccgttctcaaaataaatatgaccactttaaggaaatcgaagataaagttgaaaaaaggcttcaaaatcgccaggctaaatatcaaaatgaaattaatcaactatctgcattgggtgttaattttgatgataattaa

SEQ ID NO: 28174 - DNA, 1209 bp, Escherichia coli; identical to SEQ ID NO: 19673

SEQ ID NO: 28175 - DNA, 132 bp, Escherichia coli
atgaatatcagcacagaaacccgcgaaattctgcgtaattacagggccgtgattaatgcgcggcgtcgtgaaatggggcagaaaccgctcaccccgcgcagattgttgatgaaatctgcgattttgtggtga

SEQ ID NO: 28176 - DNA, 132 bp, Escherichia coli
atgcgcctgtttgtctcgtcggtaagcgaaaagtataaagtgtcagcctgtgtaaatcctctcgccaccctcccctgcattcagcaaaatcagactccacggacatgtaattttgataacgaacaacgttga

SEQ ID NO: 28177 - DNA, 597 bp, Escherichia coli; identical to SEQ ID NO: 28054

SEQ ID NO: 28178 - DNA, 948 bp, Escherichia coli
atgaaaaatgttctggtcaccgtccccagcttttcagcacgctgtgtttccgccagcaagttgctaagagagaataattttaatcttattattaagaataatgtggagcatctgcttaaatcagaatccactgcattacgagaatctatttgcgcggtcatcgccggaaaagattgttatcaggcggatacgctatcattgctgcctggtgtgaaaataatatcgagattcgggacggggatagacaatattgatcttcgtgcggcacagcaatccggtattgtagtcaaaaatgcggttgggattaattcaaatgcggttgcggaatttatcattggacttatctttgcgagcatgagaaatattcctggcagctatcatgcgatgcaaaatggctactgggttgagtcgcatggctgtgaattacaagggaaacggattggcctggttggctacggtaatataggtaaaaccctggcgaaaaggttgtctggttttgatgttgagcttttagcttttgacaaacaacccgattttcaggccgctggcaaagatggagttcagtttgtatcaattgaagatatctttatgcagtcgcatgtcatcattgttcttttacctttttctcctgagctggagaacttcattagtcataaatatttgtcaatgatgcgcaatggtgctctgatcatcaatgccgcaaggggaaagttgctggatgagggcgctttacttcaggtgattgaagaacgaaatgtgtttgcggcgctggatgtgtttagctctgaaccgttggcgcaatttagcccactgctacatgccaaaaatatcattacaacgccgcatattgcggccgccaccgttgagtcataccagcaaaccgggatacacgttgcccagtcgataattgattacttcgcaggaagggagataaaaaacgtgttgtga

SEQ ID NO: 28179 - DNA, 333 bp, Escherichia coli; identical to SEQ ID NO: 24393

SEQ ID NO: 28180 - DNA, 459 bp, Escherichia coli; identical to SEQ ID NO: 24524

SEQ ID NO: 28181 - DNA, 177 bp, Escherichia coli
atgagccatcatatttcttcccgcttcgttggagcgtttgctaaaatccacataacccagggtaaatatttttaccaaaaactccaaaaatgtcttaggatcaaggatatttcttgtattatcctgcccctcggcattacgggcaaaattattcattccaacacgccaggtatttaa

SEQ ID NO: 28182 - DNA, 315 bp, Escherichia coli
atgaatattgtctgtgttgccgcctgcacggcgggtattgctcacacctatattgctcgtgaaaagttaattaaaggggcaaaagcactgggccacaccattaaagttgaaacccagggaaccattggtacagaaaacgaattacaggcggcagagatctctgctgctgacgtcgtgattcttgctgtggatgtgaaaataaaaggagaagaacgttttaccaataaacgcattgtgcgagtaaagacagagatcgtcattaaatcgcccgttcaatttcttgaaaaggtcgaaaaatcactgggaaataaatga

SEQ ID NO: 28183 - DNA, 933 bp, Escherichia coli
gtgaaaacactaataagaaaattctcccgtacggccatcacggtcgtattagtcattctggccttcatcgcaatttttaatgcctgggtctattacaccgaatccccgtggacgcgtgacgcgcgctttagcgctgacgtcgttgcgatcgcgccggacgtttctggacttatcacccaggtgaatgttcatgataaccagctggtgaaaaaaggacaggtactgttcaccatcgaccagccgcgctatcaaaaggcgcttgaggaagcgcaagccgatgttgcttattatcaggtactggcacaggagaaacgccaggaggcaggacgtcgtaaccgtctcggtgtgcaggcgatgtctcgcgaagagatcgaccaggccaacaacgtactacaaacagttctgcatcagttagcgaaagcgcaggcgacccgcgatctggcaaaactggatcttgaacgcacggtgatccgcgcgccagcagatggctgggtgaccaacctcaacgtctataccggtgagtttattacccgtggatcaacggcggttgcgctggtgaaacagaactccttctatgtactggcctatatggaagaaactaagctggaaggggtgcgccctgggtatcgtgcagagatcacgccgcttggcagtaacaaagtgctgaaagggactgttgatagtgttgccgctggggtcaccaacgccagcagcacgcgtgacgacaaagggatggcgaccatcgactctaaccttgaatgggtgcgtttggcgcaacgtgttccggttcgtattcgtctcgacaaccagcaagagaacatctggcctgcgggcaccactgctacagtggtggtcactggcaaacaagatcgcgacgaaagccaggattcgttcttccgtaaaatggcccatcgcctgcgtgagtttggttaa

SEQ ID NO: 28184 - DNA, 129 bp, Escherichia coli
atgcgcgataaaatcgccagttgcaaaacattcctgccgttcaatgcatttttatctaccgaagggatcgtcttaacatttatccagaacagagactcacgatctgccgccagcggtggaccggtgtaa

SEQ ID NO: 28185 - DNA, 1023 bp, Escherichia coli; identical to SEQ ID NO: 25576

SEQ ID NO: 28186 - DNA, 444 bp, Escherichia coli; identical to SEQ ID NO: 24413

SEQ ID NO: 28187 - DNA, 594 bp, Escherichia coli
atggctttgtctggtcatggaggtgttagaaaatataaagatttcgaaaagctttttagtgaaattgtatttacgccagatgaatgtaatattgtgagaaactctctacagaaagatggtgttgagaaaaaaaccagagaaaatattatttcttgcctctccagtatttcaggaataggtaacctgtattatgcttgttcacaggcatttcctgtcgcgcttgataggggggatattaatgcaatacaggcaagcaattctatttctgccgggtttaatagtaacccagggttttgtgctttgatgggaaaaacaaattttctttttgctgacttttcactgcatacatttacacaaactcattatattgtaaaagccgaaataaatgaagctggtaacgattttaatattgctaatttcatttatcgaacatacggtgaggattatattcataacgactcagtggatgactctcttaatgagcgttccgctgaagattataggtttctggatgactctttgttacctgaaaacgatttccgcaacaggaggagaaatttttcaggcaatattgcaatcgcaacctacaaataa

SEQ ID NO: 28188 - DNA, 1209 bp, Escherichia coli; identical to SEQ ID NO: 19673

SEQ ID NO: 28189 - DNA, 252 bp, Escherichia coli; identical to SEQ ID NO: 8763

SEQ ID NO: 28190 - DNA, 213 bp, Escherichia coli; identical to SEQ ID NO: 8764

SEQ ID NO: 28191 - DNA, 753 bp, Escherichia coli; identical to SEQ ID NO: 8765

SEQ ID NO: 28192 - DNA, 2553 bp, Escherichia coli
atggaagaaagaaataataaatacgaactgtctgcgctgtatatcgctgttctttcatcattgcctttctttttttgtgcagatgttgcggccagaagctacacattcgagccatctatgttgaatgtagatgggaatgatattgatctttctatatttgaaagtggcgctcaattaccgggtacttactatgttgatattatgcttaatggtaagttggtagatacaaaggaaatggagttttctcgtgagcgtaataaagacggagagtttgttctttcttcatgtcttactcagagtatgttgaatcgttatggggttaaggtaggagactacccagaactttttgttaatagttctaatggtaaggtatgtggtgatttgtctgttattcctggtgcattctcatattttgacttttacaatcaacaactgaatttaagtataccgaatgtagcactatatccaaaatataaaggcattgcatcagaagaactttgggataatggaattaatgcatttctgatgaattaccaagctaatgcacaaataaaccaatatcgtaacaaaaaaaatcgagaagtcagttcttattgggccaggatcgagcctggtatgaatattggttcttggcgcataagaaatttgacaacttttactaaagaaaatggtaattctgaaaaaagagaaagcgtttacacatatgctgaacgtggtctcacatccataaaaagcaatctgctgataggtgagtcctatactaactctgatatatttgacagcatatctttcagggggataatgctccattcagatgagagtatggttccttatagcaagtatgcttttgcacctgtaatcagaggtattgcacagtctcaggctttgattgaggttcggcagaatggttatctcattcatactgttagtgtggctccgggggcttttgaaatctctaacctacctgtcacaggctcaggtggtgatttacaagtttccgttatagaaacaaatggtaaaaaccagtctttcaccgtcccttacactacacctgtgattgctttgcgggaaaactatctgaaatatagcttggttggcggtatgtatcgttcggcttattctggtgtggacaatactgctttgattcagatgaccgcaatgtatggtatgccatggaatctgacaacatttgtaggattccaaggctctgaacattacaattctgtcgcaacaggtgtcggattgtctatgggggatatgggggccgtatcgcttgatggaatatatgctcgaggacagaaagaaaaacagaataaagaagatggatattcatggagagtaagatacagtaaggtatttgatataacaggaactaattttattgctgctagtcatcagtactcttctgatggttatcagactctttctgatgtacttgatacttatggccatagcaattactcctacggaggttatgctaatcgctctatgcggaatagtctgacaataagtcagtcaatgggggaatgggggacctttagttttgggggggttagggatgaatatagaggaaatagatcgccacagaattctataaatgcgttatatagcaatagtatggaatggggaacattgtctcttaactggagtcagaataagataactgactcttcgagaagtgtgaaagataagaaagaaaatatcttcagcttttgggtgagtattcctctatacagattacttggaaatacgtctaacaatataaatgcaacaacacagatacagaaatatgataaccaaaaaatgcagtatgaatttggtatgaatggtcgtgcattcaacaggcagttgtactgggacattagtcaacgattggcaccaggaaacgaaaattataatgatgccagcagattaaaccttgagtggtatggtacttatggtcagattcgaggcggatacggttacagcgattctctcagacagatgaacgcaggaatatcaggaaccgccatcgttcacagtaatggagttacgtttggacagaaacagggtgggactattgcccttgttgaggcgcagggggtagacggagcggaagttattggatggcctggtgttaaaacagatttcagaggttatacagcattgggccatcttacaccatatcaggaaaacactgtttcattgaaccccgcttctttccctgaatatgcagaagtattgcagacagatacaaaagttatacctacaaaaggtgcggtggtttcggcaaggtttaaaacatctattggtaaaaaggcgttgtttaagttaacaagacacgatgggaaaaaagttccttttggtgctgtggtttcatcagcaacggcagatgataataagcgcgttgtagggattgtaaatgagtcaggtgaagtgtatatgtcaggcctgtctgaaaaaggacaactggatgtgaaatggaacagtcatggaagctgtaaggcagtttataagctttctgataataaaagcattgttaatatatataatgcatccttgacttgtatataa

SEQ ID NO: 28193 - DNA, 417 bp, Escherichia coli
atggtacttaaaggcttactttctttttttcttgtttgttcttcaacggttatcgctgccgaaattaatcttgagacaagggcattttcaggtagttatttatatgatggtgatattatcgctaccggaagtgtattttgcgatgatggcgaagtatctagagtggtccttttaaatataaaacctgtaaatagttctcagagtaatgtatatcatctacagggaagaaataagccttcaaatgaattgactgttaggatagaaggtaacggatggagtccttcagataaagtcgggaatggcatttataaaaaactgattaataaacaagatcagttttatgtggtgactaatggtcgtcagcatgtgagagctgatatctacacaatcagagcaagttctatatgctctaattag

SEQ ID NO: 28194 - DNA, 486 bp, Escherichia coli
atgaaaaagaaacttattgcagctgcagttctgtttatgacggctaacatggcgaatgctgcaactctggataatacatcttccgtaaaagctgactttgaggttgtcggtggttgcactgtctctggaacatggactggtgagcaagtccctgctgctgtatatcagggctcagctaagcgtgtaggtgtacttggtatttcgttgtctggttgcactagccaagtttatttcgaagggaacgataaaaactcagaaggactgcctcaagccactgatcctaagggtaataaaatagttattattccatcattcgatgcattaaataatcttgtgtctaaagacgctacacttaatgtgttctatagcaaaaattctctgaatgatggtgacactctttctgttgaattcgttaaccgtgaccagtggaatgctaaagctggtaaacatactatgactcttaatgtaggtacttactctatctaa

SEQ ID NO: 28195 - DNA, 273 bp, Escherichia coli
atgattactcgtattcctcgtagttctttctctgcaaatattaataatacagcccagacaaatgaacaccaaaccctgagtgaattgttttataaagaactcgaggataaattttctggcaaggagctggcgacgcctctattaaaaagcttctcagagaactgtagacaaaatggtcgtcatatctttagtaacaaggattttgtcattaagttttccacgtccgtcttacagactgataaaactcagacgctcttgataaacaaaaattaa

SEQ ID NO: 28196 - DNA, 408 bp, Escherichia coli
atgcataaatcagaagctgaaaaaatagattctattctggatgaacatcaacagatatatcgcagacataaccaaataaataacatcctggcgtattgtgcgtgtattgcatggattccctgtattattgctgcgttcggcgttgatggtatatatctgaaaatcctgtttgcggtccttgcctgctgtggtgcggtatgcttttttattttcttcttcaccctcctgccggaatcactcatggtcctcagccgtcagagcctgcttcagcttatgcgtctgactgaagacgtaccagatgtgagacaggaactgcttaaccgtttgttgtccggtaaaaaactgactggtcgggatgaacaggatatccggcgtctctggcaggagaaagtggatgcaatgcactga

SEQ ID NO: 28197 - DNA, 477 bp, Escherichia coli
atgcaacagctttcctttctgcccggagagatgacacccggtgagcgcagcctcattcaacgggccctgaaaaccctgggccgccatcttcatgaacccggcgtggccttcacctccacgcatgcggcacgggaatggctgattctgaacatggcgggactggagcgtgaagagttccgggtgctgtatctgaacaaccagaatcagctgattgccggtgaaaccctcttcaccggcaccatcaaccgtacggaagtccatccccgggaagtgattaaacgcgccctgtaccacaatgccgctgccgtggtgctggcgcacaatcacccgtccggtgaagtcacccccagcaaggcagaccgccttatcactgagcgtctggtacaggcactggccctggttgatatccgggtaccggaccatctgatagtcggtggcagccaggttttctcctttgccgaacatggtctgctttaa

SEQ ID NO: 28198 - DNA, 1101 bp, Escherichia coli
atgagtcggaaatacctcattcgtatcactgagctggaaaggctgctctctgagcaggctgaagccctccgtcagagagatctgcaactgagtctggttgaagagacggaggccttcctgcgctctgcactggcacgtgccgaagaaaagatcgaagaggaggagcgggaaatagaatatctgagggcccagatagaaaaactgcgccggatgctgttcggtacccgttctgaaaaactgcagcgtgaggttgaacaggctgaggcccaactgaaacaacgcgaacaggaaagcgatcgttacagtgggcgtgaggatgacccgcaggttccccgccagttgcgacagtcacgtcatcgtcgtccgttaccagcacatcttccccgtgaaatacaccgcctggagcctgaagaaagttgttgcccggagtgtggcagtgagctggattatctgggtgaagtcagtgctgagcagctggaactggtgagtagcgccctgaaagtgatccgcactgttcgggtaaaaaaagcctgtacaaaatgtgactgtatagttgaagcgccagcgccgtcccgcccgatagcgcgcggcatcgcgggctccggattacttgcccgcgtgttaacgggaaaatactgcgaacacctgccactgtatcgtcagagtgaaatctttgcccgacagggtgccgaactgagccgtgcattaatctccaactgggttgacgcgtgctgccagttaatgactccgctgaatgatgccctgtaccgttacgtgatgaacacccgcaaggttcacactgacgacacaccggtaaaagtgctgacaccgggcagaaaaaaggcaaaaacaggacgcatctggacgtatgtccgggatgaccggaatgcgggctcatcagagccaccggcggtctggttcgcctactcaccagacaggcagggaaaacatccggtacaacaccttcgtcccttccggggtatcctgcaggcggatgcattcagcggttacgatcggctgttcagtgccaaacgtgaaggtggtgcacagacagaagttgcgtgctgggtccatgcccggcgaaaaatacacgatgtatga

SEQ ID NO: 28199 - DNA, 660 bp, Escherichia coli
atgctcgaccggctggaaagtgaaatcctggctgaccgggtgagtgaggaaagccgccgctggctggcatcgtgcggcctgacggtgaagcagatgcaaaaccagatggacccggtgtacacgccggcgcgaaaaatccacctgtaccactgcgaccatcgcggcctgccgctggtgcttatcagcacggaaggggcaacagaatggtgcgcagaatacgatgaatggggcaacctgctgaatgaagagaacccgcaacagctgcagcaactcatccgcctgccgggtcagcagtatgatgaggagtccggcctgtattacaaccgccaccgctattatgatccgctgcaggggaggtatatcactcaggattcgattgggctgaaggggggatggaatttttatgagtatccgttgaatccggttcagtatatagacccttttggattagctgatatgaatttctatgatgaggggatacgcagaaatgtatcactgcatgctgcaacagataaaataaatattcctggcgtttttactattggaggacatggatatcctggttttattacagatgaaaatggaaactatgaaactgctgagggattagccaagagaatcagagctaatccacgctataaaaagggaatgtctgtttga

SEQ ID NO: 28200 - DNA, 1035 bp, Escherichia coli
atgatatatcgggctatatgccaggatccacggcactataatattgttgagctgctgtgcgattacgcgcctgctcgccgttttggcaaagcgggaatggaattatttgatttgcgcctgcacgagcgagatgacgttttacaggccgtattcgacaaaggcacatcaaaatttcagctaacttatgatgacagagcgctacaattttttcgtacttttgtccttgcaaccgaacaagcagcctatttcgagatccctgccgaagactcctggctttttatcgctgacggatctgataaagaacttgattcctgtaccctttcaccaactataaacgaccactttgcctttcatcctattgtcgatcccttatcgcggcggataatcgcttttgaagccattgtgcaaaaaaatgaagacagcccgtcagctatagcggttgggcagcgtaaagaaggggaaatctatacagcggatctcaaaagtaaggcgcttgcattcgcgatggcacacgcacttgacctcggtgataaaatgatttcaatcaatctattacctatgaccctggttaacgaacctgacgcagtctcttttttacttgatgaaataaaggccaatgctctggtgcctgaacaaatcatcgttgaatttactgaaagtgaagtcatatctcggtttgatgagtttgcagaagcgattaaatcgcttaaggctgccggtatcagtgtagcaattgatcattttggcgcaggttttgccggtttgttactcctgtcacgcttccagcctgacagaattaaaatcagtcaggaattgattaccaatgttcataaaagcgggccacggcaggcaattattcaagcgatcataaaatgctgtacatcacttgaaattcaagtcagtgctatgggcgtggcaacaccagaagagtggatgtggcttgaatccgcaggaattgagatgtttcagggagatctgtttgcgaaagctaaattgaatggtatcccttcagttgcgtggccagagaaaaaataa

SEQ ID NO: 28201 - DNA, 1038 bp, Escherichia coli
  misc_feature (58)..(67): n is a, c, g, or t
gtgcttcattatggggaattgcttgtcttctgcatgcaggagcaggaagctggatacnnnnnnnnnngctggatacagcttgcgttgcttcgttttttcatgggaggtgctgaggcttctgcgacacctgcaaatgcaaaaattataggtgagtggtttccaaaatctgaacgtcctgttgctgctggctgggcgggtgtcggtttttctatcggtgcaatgcttgcaccaccaattatttactttgcacatgcgtcatttggttggcagggtgcatttatgtttacaggtgcacttgcaattctttgggttttcctttggtgggcgtgttataacacaccagaagagcacccaaacttaagtaaaaatgaactcaactttatccgacaggataacgaagctcctccggtaaaaatgccttttctgaccgcgttaaaaacagttagtaaaaataaacgcttttatggaatcgctatccctgcatttatggcagagccagcatgggctgtaatgagcttttgggtgccattatatcttgcaaaagcatatggcatggaccttaaacaaatagctctgtttgcatggttaccatttctttgcgctgatttaggaagtattgccagcggatatctgacaaaactctatacccgtctgtttgggttaagcagagtaaattctgttattgcgtcctctgtaagcggagcatttctaatggtttcgcttgctgtgattgcttttatcgacaatccatatattgctattgtacttatctccattggtggttttggtcatcagataatttcctgcatgttaagtgccctggtcgttgaatcttttgataaggggcagatggccactgttaatggaatgcgtggttcagccgcatggattgccagctttttgttctcactgattattggcgttactgctgacaaaataggctttaacccgctatttatcgccatgggattttttgatcttattggtgctttttttctggttacttttattgcagaacgtcgcaaaaaacgcacctga

SEQ ID NO: 28202 - DNA, 600 bp, Escherichia coli
gtgtgtgctccggtaggaaatacaaaacaattgagtaacactttcaatgaattaaggtttagtttactgttgcctgcagatctacccaaagggcgctatgaggttccaattaaatatatcagggggatacagcatcattattataatggctggcgtgagcattataaaatgccctacagtcaggttaagcagttacctgctacaaatactctaatgctgtcatttaataatactggaagttgtcgcccttccgctcaatctcttgaaataaaccacggtaatctttctattgatagtgcccatggtaattatgcaagccaagctgttaccatttattgtgacgtcccggttactgttaaaatctcactattcagcaatacacaaccagcatataataatcagggggttgcggttggtttgggcaatggctgggattcaataatatatcttgatggtgtcaagcgaaatgaggaaacattgcgctggaatactgcaggatccaggacagtgacagttggaagcaagttgtatggtgaagcaggcaagataacttctggtgctttgtctggttcaatgacgataatcatgcatcttccctga

SEQ ID NO: 28203 - DNA, 381 bp, Escherichia coli
atggcgcgactgtcgcaactggcggggaaccagcgggtcatcctcacgcccactgtaacgatcgctttcctgctcgcgttgtttcagcagggcttcagcctgttcaacctcacgacgcagtttttcagaacgggttccgaacagcatccggcacagtttttctatctgagcccgcagatgctctatttcccgttcatcttcttcgatcttttcttcggcacgtgccagtgcagagcgcaggaaggcctccgtctcttcaaccagactcagttgctggtctttctgacggagggcttcagcctgctcagagagcaacctttccagctctgcgatgcgaatgaggtatttctgactcatgaccgtttttataatgcggtctga

SEQ ID NO: 28204 - DNA, 1107 bp, Escherichia coli
gtgaacaccgttggcaaatcggcatttgtggaggctgttggccagccgagtgatgatgcatccggctatctggattttttcaaaggcgagatagggaaaagccatctggctcaggagctgtggacgcagattgataacggtcagcttgcgcctgacctggctgaaatcaggacgtccattacggatgtcagcaatgaaatcacgcagaccgtcaataagaaactggaagaccagagtgcggcaattcagcagatacagaaggttcaggttgatacaaataataacctgaacagcatgtgggctgtgaagctgcagcagatgcaggacggacgcctttatatcgcgggtattggtgccggtattgagaacacccctgacggcatgcagagtcaggtgctgctggcggcggacaggattgcgatggttaatcctgcgaatggcaacacaaagccgatgtttgttggtcagggcgatcagatattcatgaacgaagtgttcctgaaatatctgacggctcccaccattaccagcggcggtaatcctccggcattttccctgacaccggacgggcggctgacggcgaaaaatgccgatatcagcggtaacgtgaatgcgaactccgggacgctcaacaacgtcacgattaacgagaactgccgggttctgggaaaactgtccgcgaaccagattgaaggcgatctcgttaaaacagtgggcaaagctttcccccgggactcccgtgcaccggaacggtggccatcagggaccattaccgtcaggatttatgacgatcagccgtttgaccggcagattgttattccggcggtggcattcagcggcgctaaacatgagagagagcatactgatatttactcctcatgccgtctgatagtgcggaaaaacggtgctgaaatttataaccgtaccgcgctggataatacgctgatttacagtggcgttattgatatgcctgccggtcacggtcacatgacgctggagttttcggtgtcagcatggctggtaaatgactggtatcccacagcaagtatcagcgatttgctggttgtggtgatgaagaaagccaccgcaggcatcagtatcagctga

SEQ ID NO: 28205 - DNA, 906 bp, Escherichia coli
gtggatagcgcacgcgcccttattgcccggggatggggagtaagcttcgtcagccgttgtctccgggtgtcgcgtgcgcagttgcacgtcattctcagacgagccgatgactggaaggacggccgccgcagccgtcacacggatgatacggatgtgcttcgccgtatacaccatgttatcggagagctgcccacgtatggttatcgtcgggtatgggcgctgcttcgcagacaaacagaacttgatggtatgcctgcgatcaatgccaaacgtatttaccggatcatgcgccagaatgcgctgttgcttgagcgaaaaaccgctgtaccgccatcgaaacgggcacatacaggcagagtggctgtgaaagaaagtaatcagcgatggtgctctgacgggttcgagttccgctgtgataacggagaaaaactgcgagtcacgttcgcgctggactgctgtgaccgtgaggcactgcactgggcggtcactacgggcggcttcaacagtgaaacagtacaggacgtcatgctgggagcggtggaacgccgcttcggcaacgagcttccggcgtctccagtagagtggctgacggataatggttcatgctaccgggctaatgaaacacggcagtttgcccggatgttggggcttgaaccgaaaaacacggcggtgcggagtccggagagtaacggcatagcagagagcttcgtgaaaacgataaagcgtgactacataagtgtcatacccaaaccagacgggttaacggcagcaaagaaccttgcagaggcgttcgagcattataacgaatggcatccgcatagtgcactgggttatcgctcgccacgggaatatctgcggcagcgggcctgtaatgggttaagtgataacagatgtctggaaatatag

SEQ ID NO: 28206 - DNA, 1062 bp, Escherichia coli
ttgacaagcagtgttgttcaaaatgacattgcaatctattatttgtttcgtcagatgagtttgtgcatattaatatttctggcattggtgaataaagttagtgaaaacacaaaacagcgcaatttattttccaaaaaaatgactttgtgcataagtttgttttttgttgttggggggccgatagttgctcacatactttctagtcattatgagagctacaatttacacattgccgagttaaccaatgaaaatgatcaggtggtttggaaaacatcatatgttaccataatgattttcatgtggttaaccttgctttcagttaatctatactttaatggtttacgctgtgatatctggaatggagtgacggtgattgctttttgtgccgtactgtacaatgtctctcttttatttatgagcaggtatagcgtgtccatttggtatattagtcgcactattgaagtagtcagtaagttaaccgttatggtaatatttatgtgccatatattcagtgcgctacgagtaacaaaggacattgcacatcgcgattccttaaccaatatatttaacagaaattatttttttaatgaactgacagttcaatcagcatcggccaaaaaaacgccttattgcgtcatgattatggatatcgaccacttcaaaaaagtcaacgacacctgggggcatccggttggcgatcaggtgataaaaacagtggtgagtatcattgggaaaagcatacggccagatgacctttttgcgcgcgtcggcggcgaagagtttggcgtcttgctgacggacatcgatactgaacgtgcgaaagctttagcggaaaggattcgggaaaatgttgagcgtttaactggtgataatcctgaatacgccataccacaaaaagtgacgattagtattggcgctgttgtgactcaggaaaatgcgttaaacccgaatgagatctatcgactggctgataacgcactatacgaggcgaaagagaccgggcgtaataaggtggtagtaaaagaggcagaaattcttatcaaccgcaaggatgatgaatga

SEQ ID NO: 28207 - DNA, 420 bp, Escherichia coli
atgttgtttatcaagcctgcggatctccgcgaaattgtgacttttccgctatttagcgatcttgttcagtgtggctttccttcaccggccgcagattacgttgaacagcgcatcgatctgaatcaactgttgatccagcatcccagcgcgacttacttcgtcaaagcaagtggtgattctatgattgacggtgggattagtgacggtgatttactgattgtcgatagcgctattaccgccagccatggtgatattgtcatcgctgctgttgacggcgagtttacggtgaaaaaattgcaactacgcccgacagtgcagcttattcccatgaacagtgcatattcacccattaccatcagtagcgaagatacgctggatgtctttggtgtggtgatccacgtcgttaaggcgatgcgctga

SEQ ID NO: 28208 - DNA, 240 bp, Escherichia coli
  misc_feature (187)..(196): n is a, c, g, or t
atgaaaagacttcacaagaggttcctgttagctacgttttgcgcgttattcacagcaactctccaggccgccgatgtcactatcactgttaatggtcgggtagtcgctaaaccctgcactattcaaaccaaagaagctaacgttaatctcggggatctttatacgcgcaatctgcaacaacctggtnnnnnnnnnnggctggcacaatattactttgtcattaaccgattgtccggttga

SEQ ID NO: 28209 - DNA, 888 bp, Escherichia coli
atgccactgctggataagctgcgtgagcagtacggggtcggaccgctatgcagcgaactgcatattgccccgtcaacgtattaccactgtcagcaacagcgacatcatcctgataaacgcagtgcccgtgcgcagcgcgatgactggctgaagaaagagatacagcgcgtatacgatgaaaatcacaaggtatacggtgtgcgtaaagtctggcgtcagttgttacgggaaggtatcagagtggccagatgcactgtggcacgtctcatggcggttatgggacttgccggtgttctccggggtaaaaaggtccgtacgaccatcagccggaaagccgttgccgcaggcgaccgcgtaaaccgtcagttcgtggcagaacgacctgaccagctgtgggtggctgattttacttacgtcagcacatggcggggcttcgtctatgtggcgttcatcattgatgtgtttgccggatacatcgtggggtggcgggtctcatcgtccatggaaacgacattcgtgctggatgcactggagcaggcgttatgggcccgtcgaccgtccggcacggtccatcacagtgataaaggttctcagtatgtatcgctggcctacacacagcggcttaaggaagccggattactggcatcaacaggaagtacaggcgactcgtatgacaacgcgatggcggagaacatcaatggtctttacaaagcggaggtaatacaccgtaagagctggaaaaaccgtgcagaagtggaactggccacactcacgtgggtggactggtataacaatcgacgattgctggaaaggctgggccatactcctccggcagaagcagaaaaagcttattatgcttccatcggaaacgatgatctggcagcctga

SEQ ID NO: 28210 - DNA, 285 bp, Escherichia coli
gtgcagaagcgtaacttctggcaactgcaggctgaaatccaccaccggggacgctactgccatccgtacagcatggatatcactgttaccaggaacagtccgactggtcagactatgacaaccgatgcggaagccgcagtcagtgaagccctgcgcgacctggccttctggttgtaccgtcaactggaaaacgagtacgactggctgacctcagacgccgctgtggatgaggccctactcatcaacgaatacaccttcaccgaagccggtctgcgcgccggctga

SEQ ID NO: 28211 - DNA, 513 bp, Escherichia coli
atgttatatatagataaggcaacaattttgaagtttgatctggagatgctgaaaaagcatcgcagagcaatccagtttattgccgtgttgctgtttatcgtcgggttgctgtgtatcagtttcccgttcgtctctggcgatattttaagcacggtagtgggtgcattattaatctgctcgggcgttgcgcttattgtcgggttattcagcaaccgcagtcataatttctggccggtattatccggtttcctcgtcgcagtcgcctatttattgatcggctatttctttgttgcaggggttattcgcctgatgagttggtatcgtcagcgttcaatgaaaggcagctggctacagctcgttattggtatgctggatatcgtcattgcatggatattccttggtgcaacgccgatggtgtctgtaactttggtttccacactggtgggtattgaactgatatttagcgccgccagcctgttcagcttcgccagtttgttcgttaagcagcaataa

SEQ ID NO: 28212 - DNA, 336 bp, Escherichia coli
gtgaccctggagccccgtgtcttcggctggatggaccgtctgtgtgaagactactgcggtggtatctggaatctgtacaccctgaacaacggcggggcatttatggcacccgaaccggatgacgatgatgacgaaacatgggtactgttcaatgccatgaacggtaaccgcgctgaaatgagtccggaagctgccggcattgctgcctgtctgatgacgtacagtcatcatgcctgtcgtacggagtgttatgccatgacggtccattattaccggctgcgggattacgccctgcagcatccggaatgcagcgccattatgcgcatcatcgactga

SEQ ID NO: 28213 - DNA, 162 bp, Escherichia coli
atgcggatgcgttacctgcctgtctccgttctgtaccctccaggaactattatgtttcaccaatttatgtatttttttatttttactgttaagaatgtaaatccagggatcatttttaattttataactgcaggtatcttttacatcaacaggactacctga

SEQ ID NO: 28214 - DNA, 201 bp, Escherichia coli
gtggttaaataccagcgtgatgtcagagaagtcgcgctggcactcgagctcaaccctgaccatttgcgtaaatggatacggttgtataagcaggaacttcagggtattgagccagctggtaatgctattacccctgaacaacgcgaaattcagcagattaaagcgcagataaagcgccttgagatggaaaaagaatactaa

SEQ ID NO: 28215 - DNA, 147 bp, Escherichia coli
atgatgaagcccaatatccatcctgagtatcgtactgtggtgttccacgacaccagtgttgatgagtactttaaaatcggctcgactatcaaaacagaccgtgagattgagctggatggcgttcttttgcggtacgcagagagttaa

SEQ ID NO: 28216 - DNA, 174 bp, Escherichia coli
atggtcgacatggcgtttatcactcaactgactggcctgaccgataagtggttttacaaactcatcagggatggggcctttccggcccccatcaagctgggccgcagttcccgatggctgaaaagtgaagtggaagcctggctgcaggcgcgtattgcacagtcccgtccgtaa

SEQ ID NO: 28217 - DNA, 390 bp, Escherichia coli; identical to SEQ ID NO: 3590

SEQ ID NO: 28218 - DNA, 474 bp, Escherichia coli
atgttttttttacgtcgaggagcaattgaaaactattacgggacgatagaagaaattggaactggaaaaccagatcgtgctgcactagaagctgctggatttgatgctaaaactcagaaagaacttgcaatgtgttataatgatatttatgatgccttaaatcatacggctccaaatcagtttgtcgatgaagatcgtctccttcgtatgaagctcggtgctatgttgacaccagtgatgcttgaaatgacattgaacagtagcgatcaagaacttgatacactagctagatctaccatcggggttgatgcaacagtattcaaattaacgaataaatctactgagcaacagcttaagcttaaagttgatatagtctcaccattgtttgagcgtacgactttcccatttgaaatctccccatcccaaaacccaattaccattataccggaagtattaccaggaattcaggagtaa

SEQ ID NO: 28219 - DNA, 1575 bp, Escherichia coli
  misc_feature (545)..(554): n is a, c, g, or t
atgccaatacacgataaatcccctcgtccgcaggagtttgctgcggtcgatcttggttcaaacagttttcacatggtcatagcccgtgtggtagatggtgccatgcagattattggccgcctgaaacagcgggtgcatctggcggacggcctggggccagataatatgttgagtgaagaggcaatgacgcgcggtttgaactgtctgtcgctatttgccgaaaggctacaagggttttctcctgccagcgtctgtatagttggtacccatacgctgcgtcaggcgctgaacgccactgactttctgaaacgcgcggaaaaagtcattccctacccgatcgaaattatttccggtaatgaagaagcccgtctgatttttatgggcgtggaacatacccaaccggaaaaaggtcgcaaactggttattgatattggcggcggttctacagaactggtgattggtgaaaatttcgaaccgattctcgttgaaagccgccggatgggttgtgtcagctttgcccagctttattttcatggcgggggcannnnnnnnnngctttattttcatggcggggtcatcaataaagagaattttcagcgcgctcgcatggcggcagcacaaaaactggaaacgttaacctggcaatttcgaattcagggctggaacgtggcaatgggcgcttccggtaccataaaagccgcccatgaagtgttaatggaaatgggcgagaaagacgggataattaccccggaacgtctggaaaaactggtaaaagaagttttacggcaccgtaatttcgcatcgctgagtttaccaggtctttccgaagagcggaaaacagtcttcgttcctggactggcgattttatgcggtgtgtttgatgctttagccatccgtgaactgcgcctttctgacggggcgttacgcgaaggcgtactgtatgaaatggaaggacgtttccgtcatcaggatgtgcgtagtcgcactgccagcagcctcgccaaccagtatcacatcgacagcgaacaggcccgacgggtgctggataccactatgcaaatgtacgaacagtggcgggaacagcaaccgaagctggcgcatccacaactggaggcgctactgcgatgggccgccatgctgcatgaggtcgggttgaatatcaaccacagcggtttgcatcgccactccgcttatattctgcaaaacagcgacttgccgggttttaatcaggaacagcagctgatgatggcgacactggtgcgctatcaccgtaaagcgattaaactcgacgatctgccgcgctttaccttgtttaagaagaaacagttcctgccactgattcagctattgcgccttggcgtattactcaataatcaacgtcaggcaaccaccacaccgccaacattgacgctgattactgatgacagtcactggacactgcgtttcccgcatgactggtttagtcagaatgcgctggtactgcttgatctggaaaaggagcaagaatactgggaaggcgtggctggctggcggttgaaaattgaagaagaaagtacaccagaaatcgccgcttaa

SEQ ID NO: 28220 - DNA, 528 bp, Escherichia coli
atgacccagcatattggcgtaaaactgattaacgcctttccgatgacgagacaggcatataacgattttcgtggctggcagcttccagccggagaaaacggcgaggacgaaggctatctggttgaatatctggatggcggaaaacctaacaccgatcgctttgatggctacgttagctggagtccaaaagaagtattcgaaaaggcttatcgtccggtatcagggctaagtttcggccttgccattgaagcgctcaagttggggaataaagttgcccgtgctggctggaatggtaagggtatgtggctggcatacgttacaccgcacactgaggctgttcatactggcagtacgccttgcttttgcagtctcgtctttgagttgcctgaaggtacgcatggagaaccgaaacgatctccgaaacaacttccgtatatcgccatgaaaacagcggacgataaactagtgccgtggctggctagtcagactgatgttctagcagaagactggcaaatcattaccatgtag

SEQ ID NO: 28221 - DNA, 207 bp, Escherichia coli
atgacaaatcagcagcaaatagagttcatccttgagcagatccgaaaaatgcgagaaaagaaccagccagacatgatggaaatatggagacgccagcaggaagaataccgcaagcatatttttggtgagagaaaacaggatggctggagcctatatggctatggcaccaggacaaataaaaatggatacagcctttacgcatactga

SEQ ID NO: 28222 - DNA, 216 bp, Escherichia coli
atgagtacgatagctgagcttgtccgcgccgactttcaggagaacattggtcgtgcaaagcggtactggtctgcttccagacttccgactggcgagagacagaaaaacgcccctaagccacggagctatccgcgtgaccgcgttcttcgccggttggttaaaatcgatactgattttcagtgtgacagaattatccggaacctggatttaaagtga

SEQ ID NO: 28223 - DNA, 189 bp, Escherichia coli
atggaacgtaaatttgaaatttggttggattccggcgcaaacattcattcttgcaaaaagacagttgtaacactcgatgatcttggcttatccgagaatgagtggaatgaaatggatcaggacgaaaaagacgaaaacatgcgtgatgtagcatttgaaacgcttgattggggatggaaggaaatttaa

SEQ ID NO: 28224 - DNA, 189 bp, Escherichia coli
atgaaagtaaaaataactgcttctaataccagttttgttagtgttggtgatattacagaagtaataacaaaccatgatggaacacaagttatgtggtctgatttttgtaaaagatatgagcgagtcacttggtgtaaactcgtatggggcgtcgaatacgaagaattacctgaaatgcatgacgaataa

SEQ ID NO: 28225 - DNA, 459 bp, Escherichia coli
  misc_feature (21)..(30): n is a, c, g, or t
atgcttaaacaggtagaaatnnnnnnnnnnctgggtaatcctggacctgggggttacggcgctattttacgctatcgcggacacgagaaaacctttagcgctggctacacccgcaccaccaacaaccgtatggagttgatggccgctattgtcgcgctggaggcgttaaaagaacattgcgaagtcattttgagtaccgacagccagtatgtccgccagggtatcacccagtggatccataactggaaaaaacgtggctggaaaacagcagacaaaaaaccagtaaaaaatgtcgatctctggcaacgtcttgatgctgctctggggcagcatcaaatcaaatgggaatgggttaaaggccatgccggacacccggaaaacgaacgctgtgatgaactggctcgtgctgcggcaatgaatcccacactggaagatacaggctatcaagtcgaagtttaa

SEQ ID NO: 28226 - DNA, 2520 bp, Escherichia coli
atgcgtggaatgaaagacagaataccttttgcagtcaacaatattacctgtgtgatattgttgtctctgttttgtaacgcagccagtgccgttgagtttaatacagatgtacttgacgcagcggacaagaaaaatattgacttcacccgtttttcagaagccggctatgttctgccggggcaatatcttctggatgtgattgttaacgggcaaagtatttctcccgcatcgttacagatttcatttgttgaacctgcgttgtcaggagataaggcagaaaaaaaattgccgcaggcctgtctgacatcagatatggtcagactgatggggttaacagcagaatctctggataaagttgtttactggcatgatggtcagtgtgcggattttcatgggttgccgggagtggatattcgtcctgataccggagcgggcgtattacgcatcaatatgccgcaggcctggcttgagtattctgatgccacctggctgcctccctcacgctgggacgacggcattcccggactgatgctggattataacctcaacgggacggtttcccgtaattatcagggaggagactctcatcagttcagttataacgggactgtgggggggaatctggggccctggcgcctgcgggctgactatcagggaagccaggagcagagccgctacaacggggaaaaaacgacaaacagaaatttcacatggagtcgcttttatctgttccgtgccattccacgatggcgggcaaacctgacgctgggcgagaataatatcaactcagatatattccggtcatggagttatacgggagccagcctggaaagcgatgaccggatgctgccgcccagactgcgaggctatgcaccgcagattaccgggattgcggagactaatgcccgtgttgtggtgtcgcagcagggacgggtgctgtacgactcgatggtccccgcagggccattcagtattcaggacctggacagttcagttcgcggacgtcttgatgttgaggttattgaacagaatggacggaagaaaacctttcaggtcgatacagcctcggttccttatctgacgcgtccgggacaggtccggtataaacttgtctccggtcgttcccgtggatacgggcatgagaccgaagggcctgtatttgcgaccggagaggcatcctgggggctcagtaaccagtggtcgctgtatggcggggctgtgcttgccggtgattataatgcactggcagccggtgccggctgggacctgggtgtgccggggaccctttccgctgatatcacgcagtcagtagcccgtattgagggagagagaacgtttcagggaaaatcctggcgtctgagctactccaaacggtttgataatgcggatgccgacattacgttcgccgggtatcgtttctcagagcgaaactatatgaccatggagcagtacctgaacgcccgctaccgtaatgattacagcagtcgggaaaaagagatgtataccgttacgctgaataaaaacgtggcggactggaacacctcttttaacctgcagtacagccgtcagacatactgggacatacggaaaacggactattatacggtgagcgtcaaccgctactttaatgttttcggactgcagggtgtggcggttggattgtcagcctcaaggtctaaatatctggggcgtgataacgattctgcttacctgcgtatatccgtgccgctggggacggggacagcgagctacagtggcagtatgagtaatgaccgttatgtgaatatggccggctacactgacacgttcaatgacggtctggacagctacagcctgaacgccggccttaacagtggcggtggactgacatcgcaacgtcagattaatgcctattacagtcatcgtagtccgctggcaaatttgtccgcgaatattgcatccctgcagaaaggatatacgtctttcggcgtcagtgcttccggtggggcaacaattaccggaaaaggtgcggcgttacatgcagggggaatgtccggtggaacacgtcttcttgttgacacggatggtgtgggaggtgtaccggttgatggcgggcaggtggtgacaaatcgctggggaacgggcgtggtgactgacatcagcagttattaccggaatacaacctctgttgacctgaagcgcttaccggatgatgtggaagcaacccgttctgttgtggaatcggcgctgacagaaggtgccattggttaccggaaattcagcgtgcttaaagggaaacgtctgtttgcaatactgcgtcttgctgatggctctcagcccccgtttggtgccagtgtaaccagtgaaaaaggccgggaactgggcatggtggccgacgaaggccttgcctggctgagtggcgtgacgccgggggaaaccctgtcggtaaactgggatggaaaaatacagtgtcaggtaaatgtaccggagacagcaatatctgaccagcagttattgcttccctgtacgcctcagaaataa

SEQ ID NO: 28227 - DNA, 828 bp, Escherichia coli
atgatgcaatctgcaggcattgtcgttaatgatgttgctgtcacctggcgtaacgggcacacagcactgcgcgatgcatccttcacagtaccaagtggatctattgccgctctggttggggtaaacggttccggaaaatcgacgttgtttaaagcgattatgggatttgtgcgtctgaccagcggaaagatatctgttctgggtattcccacgcgacaggcgttacagaaaaacctggttgcctacgtccctcagtcagaagaggttgactggtcatttcctgtactggtggaagatgtggtgatgatgggccgctatgggcatatgggtatgttgcgtatcgccaaaaagagggatcgtcaaattgtcaccgatgcgctagaacgtgtcgatatggtgaattttcgccatcgacaaatcggcgagctttccggtggacaaaagaaacgcgtctttctggcgagagcgattgcacagcagggtgatgtgatcctgctggatgaaccttttactggcgttgatgtgaaaaccgaagccaaaatcatcagcctgttgagggagttacgcgcggaaggcaaaacgatgcttgtctcaacgcacaatctcggatccgtcacgacattttgcgattatacggtcatggtcaaaggcaccgtcctggcaagcgggccgacagacaccacttttacagccgagaacctggagctggcttttagcggcgtactgcgccatgtcacacttaacggctcggaagaaagcattattactgacgatgaacgcccttttgtggctcatcgaccgtcagcggtgcagagggaagaaagatga

SEQ ID NO: 28228 - DNA, 537 bp, Escherichia coli
atgataaaaagcacaggcgctcttttattgtttgctgcactgtctgccgggcaggcaatggcctcagatgtggcattcaggggtaatctgcttgacagaccctgccatgtgtccggtgacagtctgaataaacatgtcgtcttcaaaacccgcgcgtccagggatttctggtatccgcccggacgttcgccgacagagtcgtttgtcatcaggctggaaaactgccatgcaacagcagttggcaaaattgtgacactgacctttaaggggacggaggaggcggccctcccgggccatctgaaggtaaccggagtgaattccggccggttaggcattgcactgctggacaccgatggcagcagtctgctgaaacccggcacctcccataacaaaggccagggggaaaaggttaccggaaacagtcttgagcttcctttcggcgcgtatgttgtggcaacgccggaagccctgcggacgaagagtgtggtacccggtgattatgaagcaacagccacgtttgaattaacatatcgttag

SEQ ID NO: 28229 - DNA, 501 bp, Escherichia coli
atgagtaagagacgtcacgaggtagtaactcgggagcgccttatggaggttctcgattacaataaagaaacaggaattttcacttggaaaaagaaattaagcgccagaggtgctgttgggaaagttgctggcacaatttcttatggatataacgcaattaatattgatggcgtaagatattttgcacatagacttgcctggctgtatgtatatggcgaatggcccaaacaagagattgaccacattgatagaaacagaagaaataacgcaatctcaaaccttagggatgtcagcagagtcgtaaatgcattaaatgtcggacctcgaaatagcaatgctggaatcaagggggtaactttctgtcaagccagaaatcaatggcaagctcagataaatgtctcaggtaaaaacataacccttgggagattcaacaccattgatgaagcggctatagcttataaggcagcaaacatggttgctgaccatctgttgagtaggtaa

SEQ ID NO: 28230 - DNA, 261 bp, Escherichia coli
gtgccttataccgatgtctggacgcataagcccgttcagttctacccgggtaaacatccgtgcgagaaaccggcggatatgctccggcaaataatcaatgccagtagtcgacctggtgatctggttgctgatttctttatgggatccggttccacaataaaagcagcaatggcgctggggcgtcgggcgttaggtgttgaacttgagtcagagcggtttaatcagacggtgaaagaggtaagtgaactggtggggaaataa

SEQ ID NO: 28231 - DNA, 204 bp, Escherichia coli; identical to SEQ ID NO: 4411

SEQ ID NO: 28232 - DNA, 552 bp, Escherichia coli
gtgggtaagcatcattggaaagtggaaaaacaacctgagtggtacgtgaaagctgtcagaaaaactatcgcggcattgcctgggggttacgctgaagctgctgactggctggatgtaacagagaacgctttattcaaccgccttcgtgcagatggcgatcagattttcccgctgggatgggcaatggttttacagcgcgcggctggcactcactacattgcggatgctgtcgcacagtctgctggtggggtgttcgtatcgcttcctgaaattgaggaagtagagaacgccgatataaaccagcgcctgctggaagtcatcgaacagatcgggaattactcaaagcagattcgttcggcaatcgaagatggggtcgtggagccacacgagcagacagcaattaatgatgagttgtatctgtcaatttcgaagctccaggagcatgcagcactggtctacaaaatcttctgcgctccagaaaagagtgacgcccgcgagtgtgcagctccgggcgtcgtggcgttttgtgtctgtggagaaactaacgcatga

SEQ ID NO: 28233 - DNA, 552 bp, Escherichia coli
gtgggtaagcatcactggaaagtagacaaacagcctgagtggttcgtgaaagctgtcagaaaaactatcgcagcgttgcctgggggttacgctgaagctgctgactggctggatgtaacagagaacgcattatttaaccgccttcgtgccgatggcgatcagattttcccgctgggatgggcaatggttttacagcgtgctgctggcactcactacattgcggatgctgtcgcacagtctgctggtggggtgtttgtatcgcttcctgaaattgaggaagtagagaacgcagatataaaccagcgcctgctggaagtcatcgaacagatcgggagttactcaaagcagattcgttcggcaatcgaagatggggtagtggagccacacgagcagacagcaattaatgatgaattgtatctgtcaatttcgaagctccaggagcatgcggcactggtctacaaaattttctgcgttccagaaaagagtgacgcccgcgagtgtgcagctccgggcgtcgtggcgttttgtgtctgtggagaaactaacgcatga

SEQ ID NO: 28234 - DNA, 393 bp, Escherichia coli
gtggcgtggacgctgcgctttggcttctttgcctatggcgatccatcaccaaccgggtttattttgctgttgctgtcgatgattgtttacggttgtgcattcgatttcttcaatatttctggttcggtctttgtcgaacaggaagttgattccagcattcgtgccagcgcccagggcctttttatgacgatggtaaatggcgtcggcgcatgggttggctcgattctgagcggtatggcagtggattacttctcggtggatggcgtaaaagattggcataccatttggctgatgtttgcagggtatgctcttttcctcgcagtgatatttttctttgggtttaaatataaccatgaccctgaaaagataacgcatcgttcagttacacattaa

SEQ ID NO: 28235 - DNA, 885 bp, Escherichia coli
atggaacgcgtatatagaacagatcttaagttgctccgttattttcttgccgtagcggaagagttgcattttggtcgcgcagcagcgcgtttaaatatgtctcagcctccgctcagtattcatattaaagagctggaaaatcaactcggcacgcagctttttattcgccattcgcgcagcgtcgtactgacacacgcgggcaaaatcttgatggaagaatcgcgtcgattgctggtgaatgcaaataatatattggctcgggttgaacaaataggtcggggagaagcagggcggattgaactcggggttgtgggaacggcaatgtggggacggatgcgcccggttatgcggcgattccttagagaaaatcctaacgttgaagttctgtttcgcgaaaagatgccagcgatgcaaatggccttgctggaacgccgcgaacttgatgccgggatctggcgaatggcgacagaaccaccgactggttttaccagcttacggttgcatgaatcggcgtttctggtggcgatgcctgaagagcatcatctctcatcattttccaccgtcccgctggaagcgctacgtgacgagtatttcgttacaatgccgcccgtgtacactgactgggattttttgcagcgagtttgccagcaggtgggattttcaccggttgttattcgcgaagttaatgaaccgcaaacggtactcgccatggtcagtatgggtattggtatcacattgatagcggacagctacgcgcagatgaactggcccggtgtcatattccgtccgctcaaagaacgcatcccggcagacttatatattgtttatgaaacgcagcaggtgacgcccgcgctggttaaactgctggcggcgttggcgcagtag

SEQ ID NO: 28236 - DNA, 1371 bp, Escherichia coli; identical to SEQ ID NO: 11837

SEQ ID NO: 28237 - DNA, 261 bp, Escherichia coli
atgtgtccaaccattgagccaggagatctcatcttcgttgatgtcagcatcaatcagtttgatggtgatggtatatatgtctttggttttgatgacaaaatatacgttaaaagacttcaaatgattcctgacaaactgctggtgatttctgataaccagatttaccgtgaatggggaattactagcgaaaacgaacaccgattcatggtctttggaaaggtcttaatcagtcagtcgcaaacccttaagagacataattaa

SEQ ID NO: 28238 - DNA, 204 bp, Escherichia coli; identical to SEQ ID NO: 4411

SEQ ID NO: 28239 - DNA, 390 bp, Escherichia coli
atgaagctgatcctgcctttcccgcccagcgtgaacacgtactggcgacaccccaacaaaggggcatttgctggtaagagcctgataagcgcggcggggcgaaaatttcagagcgcggcgtgcgcagcaatagttgagcagttacgtcgtctgccaaaaccaacgtcggcacctgctgcagtggagatcgtgttgtttcctccggataaccggatccgcgatctggacaactataacaaggcgctgtttgacgcgttgacccacgcgggtgtgtgggaagacgacagacaggtgaaaagaatgctggtggagtggggaccggttatcccggaagggaaggtcgagatcaccatcagtaagtacgagaaaacggcgggtgcagccgcctga

SEQ ID NO: 28240 - DNA, 519 bp, Escherichia coli
  misc_feature (460)..(469): n is a, c, g, or t
atgaaatacaataacgttattttcctcggtttatgtctggggttaaccacctattctgctttatccgcagatagcgttattaaaattagcgggcgcgttctcgattatggctgcacagtctcatcggattcgcttaattttaccgtagatctccaaaaaaacagtgccagacaatttccaacgaccggtagcacaagtccagccgtcccttttcagattacattaagtgaatgcagcaaagggacaacgggagttcgggttgcatttaacggtattgaggatgcagaaaataatactctgttgaaactggatgaaggaagcaatacggcctccggtttgggtatagaaatactggacggaaatatgcgtccggtgaaattgaatgaccttcatgctgggatgcagtggatcccattggtaccagaacagaacaatattttgccttactccgctcgtttgnnnnnnnnnnatccaggactggtgagcgcttcggcaacctttacccttgaatttcaataa

SEQ ID NO: 28241 - DNA, 510 bp, Escherichia coli
atggtcgggaagcgctgtcatgagcgcactgaccagcgtatccagttcccagccggtgcgggccgatacggcaacaaccggatgtacgggccggaacagacggaataccgcctccgttttctcccgaatattctgtgcctgtgcaggagaaggctgaatgccggccacatcccattcatggcagggctccgttttatcggcctgcgtcaccacaaacagcacctgctgatgtccgcgttgcagtatgtgtcgccagaaatactcatccacagacagggcacggtcatcggctttaatcagccacagtaccaggtccagctcaggcagaatgtcacggtacagggcttcatactctgcatccctgtcccggctctcgcccaccccgggcaggtcagtgataaccatgctgtgaccgtggccactcagacggaagcgctgcacttcccgggtgccggcgtgaacatcactgaccggggtgacctccccctgaaacagtgcattacagagtga

SEQ ID NO: 28242 - DNA, 309 bp, Escherichia coli
atggtattactgactattctcagtgccagtggttctaacgctgcggatttatttactcaattaacaagcattgctgttttgttaactatgttcccatatttttactcggctattgaccttattcgttttgaaagtgcaacttcaaaaagtattttgagtctgatcgcttcagcgtttgctatgttgttctgttttgctgcgctggctggtgcagagcattatgaaataactgcaacaattattatttcattattaatattcgctttctacgcaagaaagctgggtggcattcagcacaaaaatatttaa

SEQ ID NO: 28243 - DNA, 297 bp, Escherichia coli
atgacagcagaattaatcaccctggaagaagtgaaactccattgccgcattgatggcaatgaggaagaccagttaatcagcggatacatcgccgccgcgcttgaggtgtgccagaaacacatcggcaggcgctttgatgacgggctggagttcacgccagccataaagattggctgcatgatgtacgtgtcgcaactgtacgaatacagggccacggtcggggatgcagacacaaaagaaatcccgctggctgtagggatgctctggtcggtttatcgtgatgtgggggtgtactga

SEQ ID NO: 28244 - DNA, 339 bp, Escherichia coli
atgagagcggggagcatgagggatcgcattgtcatcatgagcgcgaaactttcccgcctcccttccggtgcaatgaaaagcacatgggaggatgttgccaccgtatgggcggaggtgaaagggatcagcggacgggaacgcatgaccgcaggtgcagaaacggcacaggcaaccgtaagagtctggatccgttttcgtggggatgttacggcatccagccggatacgggtactcacgggggcttattccggcaatgagcttgatattgttggcccccccgttcccgacggtaaaaggactcgtctggaaattctttgtaaaacaggtgcgccacgatga

SEQ ID NO: 28245 - DNA, 1170 bp, Escherichia coli
atgccgagaattatcgaattgcgccagcagaaaaccgccatcaaaaatcagatgcgcgacatgctggagaacgcggaaaaagaaaaccgcagccttaacgacgccgagggcgcaaaatttgacgaattacgcgctaaagctgaatccctcgataaagacatttcccgccttgaagccgttgccgacgaagagcgcagcaagccaggtaaagccagccagaccactgaccccgcagaacttcgcaactacatcgtaacgggtgacgttcgctcattatccaccaccaccaacggcggcaaggacggtggttataccgttatccctgagcttgatcgcgaggttatgcggttactgagtgatgaaagcgtcatgcgaatgattgcgacggtgaaaacggcgaaatcaaacgaataccagaaactggtttccacaggtggcgcaacggtggggcgtggcactgagggcaacaagcgaaccgaaacagaaaccccgaaagttgagcgcgtaagcatcaaacttaacccgatctatgcctacccgaaaaccacgcaggaaatcctggatttttcagaagtggatgtgctgggctggttatcgtctgaaatcgccgacacgttcgccacgaccgaagaagatgattttgtaaatggtgacggtactggcaagccgaagggtttcctgaattacacccgtgataccaacaacgacaaagcccgcgcctttggcaccattgaaaaaatggttacaacaaccgacgccattacagcggacgaactgatcgacatcctctacaagctgaaagcgaaataccgtaagaacgccgtatgggtgatgaactcgagtacagcggcagcattgcagaagctgaaaaaccagagcggtgattacgtatggcgtgacagcctcaaagagggcgcacctgacacattgctgggccgtcctgtttattacctggaaagtatgccggacatcggcaaaggcaaaacgccgctggctgtcggtgactttaagcgcggttatttcatcgttgaccatgaaacggggatccgtacccgaccggacaacattacagagccgggtttctacaaggtacacacggacaaatacatcggcggcggggttgttgactcccgcgcgataaaagtcctcgagatgaaaaacggcggttaa

SEQ ID NO: 28246 - DNA, 261 bp, Escherichia coli
atgccagtaaccacagaggaaattaaacgacaccgcgaattattcggccttgaacatccggcccacacgacaacggagcgttatcgccagcacctggcggcgggggcgatattctgggttgatcatcatggttttttacgcagcacgctttccggtgaaattctggcggctggtcctgaacagattgatgcgctcatcgcatatctggaaaaggtgaagccccgcacagtgcaatcagtaccaccggaagacgttaattaa

SEQ ID NO: 28247 - DNA, 258 bp, Escherichia coli
atggtacatgaccgcatagcggaagaactcgaggcgaaaggcttttaccggagagcgtcggcgcgatggggtgaagtcatgctactggtggagacagacaaggaacgggagcacatcacgatgcgacggctggaatgttgcagaaaatcgacaaggccagcactcgggccggacaatttcagcgatattaaaaaagccgctgatcgtgtttatgctgaaatgggattagataaattaaagggggaaacatgccagtaa

SEQ ID NO: 28248 - DNA, 369 bp, Escherichia coli
atgagtcaattaaacagcgtctgggtctttagcgataatcctgaacgttatgctgaactgtttggcggcgcgcagcaatggggccaacaggtgtatgccattgtacaaaataccgaccaggcgcaggcagttatgccttatggtccaaaatgtatttatgttcttgagcaaaatgatgcgctgcaacgtactgaaaattacgccgaaagcattgctgccctgctgaaagataaacacccttctatgttgctgctggccgcgacgaaacgcggtaaagctctggcagcacggttaagtgtgcaactgaatgcggcgctggtgtcaacgccacgatgtttgaccgttatttgccattttcatgcccgctaa

SEQ ID NO: 28249 - DNA, 162 bp, Escherichia coli
atgctcttgattattgagttgcgtcgcaaagtcattaaagctcaactggcgcatgccaacggcggatctgtgcgttggatttataaccatgctcagtatctcgataagcgcagagaaatgatgcagtggtgggaggactggatcgacggtgatgtcacataa

SEQ ID NO: 28250 - DNA, 762 bp, Escherichia coli
atgcaaaacagaaaatggattttgacctcgctggtaatgacttttttcggcatccccattctggtgcagtttttggcggcggttattgccatgctgggggccgggcttgccgctattcttgagttttgcaatttactctttacgccaacaatttatcttctactcaacgtctttatgctgacgctgggcgcattactgctatttttctctgggcgagtgtgggcgggtgatagcgcaccagaaaacagagaaatagccgcctggcgacaatgtctttttttagttcccgctttattaatcctggttggctggataatcgcgctacatctggcagattatcaatttcgccagatggtttcaggttggttggcagatcttatgcttccctggctgggtgttttgttagtctcattattcggtggtgagtactggtggatagtcattattcccgttggaacgcatatcagtttttcgctgggatacggctggccgacaaggcatcctttaaccggcacgtccgggctacgttgccgtaacttactcctgtttctacttctcttacttggtattgtcgctgggtatcaggcccatttatataagcagcaaaaccctggtgttggtgtacgtgaaaatattgatatctgggcctggcgacccgataaactcaataatcgactgacgccgctgcgtggcaaaccgcaaattcagtttacgcaaaactggccgcgaatcgatggtgccacggcggcgtacccaatttaa

SEQ ID NO: 28251 - DNA, 1089 bp, Escherichia coli
  misc_feature (276)..(285): n is a, c, g, or t
atgcttccaattaggttaaaaaaagcccgattgaatgctgggttaactcaagaacagttgggaatacttgttggcattgatgaatgctctgccagtgctcgcatgaatcaatatgagaaaggtaaacatatgcccgatttttcacttactaaaaaaatcgctgatttattaaatgtccctgtctcatatttttacacacccgaagatgacttggcagaaattattttgttgattaataaactagacaaaaaacagcggttaattttattaaaaaannnnnnnnnngttatacttaaagtgcaggagtgtgctgcgtggtggattttggagagacaaagtaaactaacaaagttaatgtcagaaacaatgtccataaatccgtttatgaccccttttatttttgattatcattcccttaatgattttgatgaactagttgaagcaataattgctaagcatttaatgactgggcatgatactggctttggaaaattgattgatgaaaaaatacttcctagagtgtttggtgcatataaattagataaaagttatagagctgccaacgagccttttatacacccttgctttgatgaaatagatcatgtaatacaaagggatgatggtagaattgagcttttatctcttaaggcagggaaatggactattcaattgacgatggctgtccaactaaataaagcatttcacgaaatcataaataattatcctggagtggctgacaatatagtggttggggttttttatggaaatagccatggattaactgataagtatagaatcttacgaggtatcaatactggtgcaaaccacaatgtgattgatattcgtgacaaagtgcatgtatatgctggtaaagaattttggtcatggcttaacaatggtgaggctgaaacccagcattgggtacttgaaggtatagaacgtgctgtaaaagaagcagatataaaagaaaaaaataaagatcttattgaaaaattcaaagaacatgttgcaaagaagtacaatgagcaagttctaaatgctgatggcacagctcaatggcacaaattacttgaaatgattaatgaataa

SEQ ID NO: 28252 - DNA, 1245 bp, Escherichia coli
ttgtctagtaaaaagtttatttcgctatttagtggcgcaatggggttagacttaggtctcgaagaggctggctttgagctcgtagcttgcgttgaacaagataaggcagctctaaaaacaattaaaactaataagccaaatcttgctgtattcgaaggtagtattgttgactgcactggctctgaattattagcactagccggagtgaatgataaagaagaaatagatttagttgctggcggtccaccgtgccaagcatttagtgtttttggaaataggttagggctagaagatgccagagggcagcttattttcgaatacgttcgaatgattaaagaattaaacccaaaagttttcgtaatggaaaacgtacgcggtttattatcaatgtctatagttccagcttctaaaaagaaggagctatcaggcacaatcgcagcatctgctttcgaaaaaggctctctaataaaaagggtagctaacgaattcaataaactaggttatcatgtggattgctttgtagttaatgctgccaactatggagccccacaaattagggagcgtgttattttaattggtaatcgcttcggaatgatagccaatttcgcctcccctttattcagcaatagagtagaagataatcttccgccattcaaaacgctgggggatgtaattggcccagagagcggttttgttgataaatatccagaagtcatgaatttttcgccaagaaaactgaaatatctttcaatggttccacctggcggaaactggagaagcatgccagaagaaatgcaaaaagaatctatgggaaaaagctggtatcttaaaggaggaagaagtgcttactggaggaaactatctttccagtttccttcacccacagtagtaacaatgccaaatcatgcgggaacaagtatgtgccacccaactgaacttagagctatttctgttggtgaagctgccgcgatacaagagtttcctgattactggaaatttgaaggtacaactacagaaaaattcagacagataggtaacgcagttcctgtccggttaggtaaagttgcaggggaagctgctatggaacttcttcatcgtatacaagaaaataaggttgctgatttagtaactccagattatatagaaacccatattagaccgcatattagaaccagatctttctttaaaaatggtcaagcatatagtggagatgtttcttactacgaccttgaagaagaagtttag

SEQ ID NO: 28253 - DNA, 660 bp, Escherichia coli
atgtttaagcccaggatttgcagctggataggtttacttcccctgtttatgctgagtcttccagtacaggcggaacttcgatgtgttgcaaatgcagttgatattgaaccatttttttctgcggctaccgctgaagataaacaacaagttgaacaagctatcaacagtagcgtgaatcttgtccccttcggtttatctgcatcggactggaaagtgcatcgtggcgatttagtggtagaaggtaatatagagagtaatcaaaaattgattgttcttggcaatttgacagtcaaaggtaatatttccactttctctctttctaatccatgggttattctcggtaacgtgacggcaacgaatatagttacggattcaccactgttaattaccggttcgataaatgcaagtggactggtatttatcgactcatattacgataatccgtctacgattaagggaagtattaatgcgcgcgggatatttatcaatgacataattgcacctgttgttgtgtcttcgacaaatagtgaattcatggtccgtgcgggagacaaaaatgacactgaaaatgtcaaaaaagcgctgacgataataaatcctgatgcatattattggggcctaataaatgatgaagatgctctgaaagaaatttttaagtga

SEQ ID NO: 28254 - DNA, 1434 bp, Escherichia coli
atgcgattttccagatttatcatcggattgaccagctgtatagcgttcagtgttcaggccgcaaatgttgatgagtatattactcaactccccgctggtgccaaccttgccctgatggtgcaaaaagtcggcgcgtcggcccccgctattgattaccacagtcagcagatggcgctgcccgccagtacgcagaaagtgattacagcgctagcggcgttgattcaactcggccccgattttcgttttaccacgacgcttgaaaccaaaggtaatgtggaaaacggcgtacttaagggtgacttagtggcgcgatttggtgccgatccgacgttaaaacgtcaggatattcgcaatatggtcgcgactttgaaaaaatctggcgtcaaccaaatcgatggcaatgtgttgatagatacctccattttcgccagccacgataaagcccccggctggccatggaatgacatgacacaatgctttagcgctccgcctgccgccgccatagttgaccgcaactgtttctccgtctcgctctacagtgccccaaaacctggtgatatggcttttatacgcgtggcatcttattaccccgttacgatgttcagccaggtacgcaccctcccccgtggttctgccgaagcgcaatactgcgaactggatgtcgtaccaggcgacctgaaccgctttacgctgacgggatgcctgccgcaacgttctgagccgctcccgttggcttttgccgtgcaggatggagccagctatgccggggcaattctgaaagatgagttaaaacaggcgggtatcacctggagcggaacactgctgcgccagactcaggttaacgaacctggaacggtagttgccagtaaacagtcggccccgctgcacgatctgcttaagattatgctgaaaaagtcggacaacatgatcgccgatacggttttccgcatgataggccatgcgcgcttcaatgtgcctggaacatggcgggccgggtcggacgccgtgcgtcagatcctgcgccagcaagccggtgtcgatattggaaacaccattattgccgatggttcagggctttcgcggcataacctgattgcccccgccaccatgatgcaggtgctgcaatacattgcccaacacgacaatgaacttaactttatctccatgctgccgctggcgggctatgacggctctttgcagtaccgtgcaggtctgcatcaggcgggcgtggatggcaaagtctcagcgaaaaccggttcgttgcagggggtatataacctggcgggattcattaccacagcgagcgggcaacgaatggcatttgtacaatatctttctggctatgcagtagaacccgcggatcagcgtaatcgccgtattccgttagtgcgttttgaaagccgtttgtacaaagatatttatcagaacaattag

SEQ ID NO: 28255 - DNA, 291 bp, Escherichia coli
atgacaaaaaatattggcaataaaactttaaatgaacgcgataccgcaggaggtacagctgccggcatcgttatggtgatttttgggtttcgagctaagcgacaaaatatttcaccggttgcttatgccgtgccctggactacgcccggacctttaattgctttcctcggaaccgggggaaactggctggcgttactggtgggttttttatgtttaggtgtggcgacaatgatctatttaccttttgttattgccgccaacaaggtcaataacatgacaactaacggataa

SEQ ID NO: 28256 - DNA, 1809 bp, Escherichia coli
atggaaaattgttttaattttaagcctaatttagcaaacctaagagattgccagaaagaggcgtatttaacggttagagattactttgcagatcccgctaatacagaaaatcatattttagtacagttgcctacggggacaggaaagtcagcggtaattgctatatcgccttatgaagtagctaaaggtaaagttttggttctaacaccaaacttgacacttgcaaatcaaattgagcaagatattgatatattcgaaaatcccactagtaatatatataagaaattaggaattttttctgaagacttttatacagaaagcgaggcttatcctctgcggttaaatgatagtgttagttcgaatgatatagatgagcatcaaataattatagctaactatcaacagttaaatgacgttgaaaaatggtttaagggtaaagaagaacaggttgatttaataattatagacgaggctcatcaccaaaaagctaaaacttatcaggaagtcattggctttttccctcaggctaaaattttaagccttactgcaactccttttcgttctgatggtaagcctctagatggcaaggttgtttatacttatcatttttcagacgccataagaaatggatacattaggaatattaaggtctgtgatatagccccagagtctatttcgttagtaggtttgtttaatgataaggatggtaaagaatactctctcgaagatattcttgagttaaaagaagaagcatggtttagacgtggaatcgccttatcacaagattgttgcgacagcatagcaagtaaatcttttgaaaagcttttggagctaagaaattcaaatccaaatgatactcaccaaattattgcagcagcaatatcaaaacgacatgctagagaatttgttaagccagcatttgaacgtctgggcttgaaagtcggcttggttagcactgatgagaaaaataatgaacatactatacagaagttaaagcaaggaaaaatcgatgtgatagtcaatattggtatgcttggtgagggatttgaccataagcctttaggtgtggcagctattttcagaccttttgcttctttgaatccatatatccaatttttaggaagagttattagagaaaatggtagtacaaaaaattgctgggttgtttctcatttagggttgaaccaaatatctagattcaatgagtttaaattgtttgatgctgatgataaggagattcttgaaaagcttttgtctggaaagaatactgaaggggtaggtggtgaatcttcttttgtcgatatacaagacagaaacccaattgaagttacaattaaagaaattggtgatagtcttgtggagtttaacgaagattatgtagatctttcaaaagtggataaagttgaaagagcgattaaaaggcttaatgagggcgaggctagagaattattgactagactcggtcttgatgcaaattcaataaatgctgttacgacccgcaaaaaaagagttaaacctataaataagaaaaaagctgcgcaatctagtttaaatgaagcgtctaaatctattgctgtggatatactctccgaattaaatttgaagatgtacgatagaaactttaacccattgaaaacgaattttgtctgggttaaatcaaaaattgataaagaaataaacaagaagctagggattaagcaagccgaaagaaaaaaagtgacaaatgctcagtatgatgaattttctaaaagtggtgaattgaatttaataagagaaaactgcttggagtattttaaaagcaaggtttga

SEQ ID NO: 28257 - DNA, 351 bp, Escherichia coli; identical to SEQ ID NO: 13801

SEQ ID NO: 28258 - DNA, 393 bp, Escherichia coli
atgaagttgagctataagctggttatcgctgctttcttcgttactgtcattggttctttcatctggtcagccaaccactactacaacaaatatcagtacgaaaagaaacgtgctgatgaggctgtacgaaatgctgaatcagcaacagccattaccaataacgtcctgcaatcactacaaatcgtcaatacagttctggaggctaaccagcatgcaaaacagcagatcgcactggagtcacagagaacccaggaagatatcaaagtggctgttgcggatgatgattgtgcttcacgtactgtgcctgctgccgctgctgaccggttgcggaagtacgcggacagtttacgtgcaggttccaacgatgccgttaccggcgaacctgctcgctga

SEQ ID NO: 28259 - DNA, 525 bp, Escherichia coli
gtggatcagacagcatttttacacgttgatttcaaacaaccggaggagatggagtttaaccgtgccaggctccgaagggcatttgttcaaatcgggcgtgtctatatgcgtgatgcccggcggctggtgatgcgacgtggtcggtctgctccaggtgaaaaccccggctatcagaccggacgacttgcgcgttctataggttattacgtcccccgtaaaagctcccgtcgttctggcctgatggtcaggatttcccctaaccagaaaaacgggcagggtaaccggcgttttcctgaaggttctgcgtattatccggcgtttctgtattacggtgtgcgtcatgccgcatacgggatgagcaaaaaggataagcgccagaaaaagcagcattcatcccgctggcggctggcaccacgtaataactttatggctgatgtcatcgaccagcgtcgttactggacacaaaagttactgtcccgtgagttacagcggtcattacgtcctgtaagaaggaaaaaaacatga

SEQ ID NO: 28260 - DNA, 396 bp, Escherichia coli
atgaacagatacgcattaattaaaaacaatattgttgttaatatcgttgtttgggatggcgcaggagatatgtttgccgattttaaggcagttaatatctctggtgttgcagttgatattggatggatctatgacggaaataatttcacagccccccccgaacctgagaaaactaaagaacagttaatccaggaagcagaactcgaaaaagaagggcgcatacgtgctgcaaatgattttattaacagcaagcagtggcccggtaaagcggctattggtcgtctgaaaggtgacgaactggagcaatataatttgtggctggattatctggacgcactggatgctgtagatacttcaactgcaccagaaatagactggcctcagcaatcagaataa

SEQ ID NO: 28261 - DNA, 1260 bp, Escherichia coli
atgaccaatattaatacagcttgtgtaaaaaataatgccagttatcaattaaataacgcattacctaacaaagaaaccatctccagcaatttttgtgaacgactggcacaatggggtaataagtcgcttaataatggtgaagaaagagcaattgccgtagagcgaattaaagaagcttacaattcgaacatggcatctcttgatttgtcatatcttgatttgagtgagttaccgcctatcccctcgacagttaacacgttaaatctggaaaacaattgtctcacttgtcttgactttactgacaatgccagcctcgtcaatatcaacctcagctttaataaaattaaaacgataacctttccaaatgaatcaaaactggaaaatatttatattgatcacaacaatctggaaagtttggattttaaaaatcagcattcattggttaacctggaagcgcaaaataacaatctgacaaaaattaatatttctgatagttataaactgaaatttcttaatcttgattataacaagctagcatcgctggatctctcccggcaagaatctctgattgagttaagtgcccatcataatatgatcaatgacattatattacacaatcaccccatagtggagaaaatcactttaaacgacaaccatattgcacatttaaacgcgaaaaccactacaaaactggaatatttaaacttaagcaataacaatttattgccaacagatgacattgatcaattaatatcatcaaaacatctttggcatgtattagttaacggcatcaacaatgatccacttgcccaaatgcagtactggactgcagtaagaaatataattgatgacactaatgaagtgaccattgatttatcttataacctggcaatcacaaatatcgataccagcgatgaacatcttgtagaagtaagcgagaattccgaaggaaatcatataaaagacaatgactcaatgtccattcgttatagatcaaaatattattccagagagtacgctttaatagaagaagaaacaatattttctgacgcagaactaaaagccattctgcctatgcatcgcatgtacggggttggtgactataagtcaaattcctcttctctaccctcacactcggggctaaaggacccaacgggcacacccgtctgttattatattcataatgaggataaaccttccttaggttttggtccaacatccaataattggttaagccaatcctttacaacagagttataa

SEQ ID NO: 28262 - DNA, 222 bp, Escherichia coli
atgttagaactgataggtaatgcccgttgcgacgatgttatcggtgcgaatatctacggcacgggtaaagtcgctttcatcaatcaggttgattttataatcaacataggtcgacatatttttgttgaagaaatacgtcgcaccaacgtcgatatactcaatcatgtcctggtcgccgtagcggcccagatctctgcctttcgatttcaggtaagcgagtga

SEQ ID NO: 28263 - DNA, 2055 bp, Escherichia coli
atggttcaggattcatcagcattagcccccttctttcgtgctcaaattgaaaaaaataatcaatacaattcagtttggggcaaacactaccgccagcttgtagaacagattcaggccgaaaaaccaaacttttctgaagccacgattcggcaggtatggtatgaacgtgacaatggtgtctccagcctgatgcaaggagggatgtcattggttgaatttgaaaatgcacaaaaagaccttctaacgctcacccgtcagatagcagaagagtgtacacaagaaaattataatcgggtcattgaacgccttatcaaacttaaagcggacggagtattaaataaggtatatagggctctttgtaatcgtgcttttgcagcaatatacccatcaaaaattagcagtgtcgtgaatgttaataatttttttagttgctacaattattgcaacaaccatttccagctaggtctttccggagaacgggagtggctggctcgcaatgttgatcttaaagaaacgctaaatcgtgcgctgggtgatgatatcgaccctattgagctgaatatgtcactttggcatctctatgcgtatgaaattcaggataaaaatgctatcggtttagttggaagcgaaagtgctttacaagaaaatgagcaagaagatgatgttataagttcgccattgcctaaaaacacaattctctatggcccgccaggtacaggtaaaacatatcgtactattgagattgctgtacaaatttgtgatccgatcgcttactccctgcaggagggtaaggatgagagtgaaaaacgtcgcgagttgaaaaagatttatgatcagcttatcaaagataatcgagtgcgttttatcacctttcatcagagctttggttatgaagagtttattgaaggtttaagagctgagactactgatgacggtaatgtaaaatacgaaataaaggcaggtatttttaaacagatatgcgaggatgccgcctttggtcatgctggtgcgcaggaaatgttggatagcgcacttactcgcctacaagaacgtttatctgaaggtgaaaatatcacgctggaaacacaacagggtaaggccttccagctgacgtataaaagtcaaaccaactttggaattttcccgtcacaatcgaaaaaagaggatttaggacagggttacaatgcctatttgaaggatattcggcaagtttatcaggatccacgagcaaaagtacataatccatcttatgtacgcagtatccttaactatttaattaatcaacgttatctgcctctgaatactcagagcgtagcttcagaaaaaaaggaaaactatgttctcattattgatgaaataaatcggggtaatatttcaaaaatttttggtgaactaattactcttattgagccatctaaacgggctggtgagccagaatcgcttagcgtattgctgccatactcttccactccatttagtgtaccgaataacctttatttaattggtaccatgaacactgctgatcattcgcttactgcacttgatactgcactacgtcgcagatttgattttgaagcgatgctgccagatattactgttctgaaagatactgtcattaaaggtattgatctgcctcgtctattgcagacgcttaacgatcgcatccaggttttatacgatagagaacatatgctggggcatgctttttttatccctgttgtgcaggcaaaagaagacgaagctctggcatttgaaagattcaaacggattatgcgaaataagatactaccattgctggaagaatatttttacaatgactggcaaaaaattcgcatggtactggctgataaccaaaaagaggaagcaccagatcttcaatttgtacgtgaggtgaaataccagaaaaagtatgccgatctctttggtgataacggaacagatgacttgggaaccagttttcacctggcagcagaggatgacaacgtttgggacaatccaatcgcctggcagcaaatttatgcacctcaaaaagaaaaacgcaggagtgcggaatga

SEQ ID NO: 28264 - DNA, 786 bp, Escherichia coli; identical to SEQ ID NO: 9891

SEQ ID NO: 28265 - DNA, 354 bp, Escherichia coli
atgccatactttcagtatcctgatgagtttcccctgagctcgctgcctccactcattcgtgatgccgttattgaagctcagcaaattacgcaggctccccttgggcttgtggcagcgtctgccctgggcgctgtttcacttgtctgccagaatctgattgatgtctgcagactgaatacactgcgggggccggtttctcttttcttactgacgcttgctgagtccggagaacgaaaaaccgcagtggacaaattattaatggagcccctgtaccagcaggagatgctgttatattccagacacaaaaatgaactgacgacatggaaaaataaggaagagcttttaaaggcgtag

SEQ ID NO: 28266 - DNA, 1371 bp, Escherichia coli
atgttgaataatgctatgagcgtagtgatccttgccgcaggcaaaggcacgcgcatgtattccgatcttccgaaagtgctgcatacccttgccgggaaagcgatggttcagcatgtcattgatgctgcgaatgaattaggcgcggcgcacgttcacctggtgtacggtcacggcggcgatctgcttaaacaggcgctgaaagatgacaacctgaactgggtgcttcaggcagaacagctgggtacaggtcatgcgatgcagcaggccgcacttttctttgccgatgatgaagacattttaatgctctacggcgacgtgccgctgatctctgtcgaaacactccagcgcctgcgtgatgctaaaccgcagggtggcattggtctgctgacggtaaaactggatgatccgaccggttatggacgtatcacccgtgaaaacggcaaagttaccggcattgttgagcacaaagacgccaccgacgagcagcgtcagattcaggagatcaacaccggcattctgattgccaacggcgcagatatgaaacgctggctggcgaagctgaccaacaataacgctcagggtgaatactacatcaccgacattattgcgctggcgtatcaggaagggcgtgaaatcgtcgccgttcatccgcaacgtttaagcgaagtagaaggcgtgaataaccgcctgcaactctcccgactggagcgcgtttaccagtccgaacaggctgaaaaactgctgttagcaggcgttatgctgcgcgatccggcgcgttttgatctgcgcggtacgcttactcacgggcgcgatgttgaaattgatactaacgttatcatcgagggcaacgtgactctcggtcatcgcgtgaaaatcggcaccggttgcgtgattaaaaacagcgtgattggcgatgattgcgaaattagcccgtataccgttgtggaagatgcgaatctggcagcggcctgtaccattggcccgtttgcccgtctgcgtcctggtgctgagttgctggaaggtgcacacgtcggtaacttcgttgagatgaaaaaagcgcgtctgggtaaaggctcgaaagccgggcatctgacttacctgggcgatgcggaaattggcgataacgttaacatcggcgcgggaaccattacctgcaactacgatggtgcgaataaatttaagaccattatcggtgacgatgtgtttgtcggttccgacactcagctggtggccccggtaacagtaggcaaaggcgcgaccattgctgcgggtacaactgtgacgcgtaatgtcggcgaaaacgccctggcgatcagccgtgtgccgcagactcaaaaagaaggctggcgtcgtccggtaaagaaaaagtaa

SEQ ID NO: 28267 - DNA, 150 bp, Escherichia coli
atgaaaagtcagaccataacgcgaaagtacacggagaagctcgtctctctgtactttgtcgttaaatttaattcgaccgtgcgcttccggttgtggcaatccgcgaaatggcgcggcggtaagtatggcggggttattccttccccttga

SEQ ID NO: 28268 - DNA, 372 bp, Escherichia coli
atggtgaaggggcgcagcgtgattatcgtcaccgtgtctgacgtcatgagcgtgttgcatgacagctacgacaacggcaaatccggggaaaaatttttacaggagctttgcggggttgatttgctggtcctggatgaaataggcgttcagcgggagacgaaaaacgagcaggtggtattgcaccagataattgatcgccggacagcatcactgtgcagtgtcgggatgttaacaaacctgaatcatgccgcaatgagtacgcttcttggtgagaggattatggaccgcatgaccatgaacggtggtcgatgggtgacgtttaactgggatagctggcgtccaaatgtcagcaatatgagggttgtgaagtaa

SEQ ID NO: 28269 - DNA, 927 bp, Escherichia coli
atggctctccagtacatccaggcgaccaccggattccagaaccacgccgtcagccttaccgttttccaccgcgaaattgcccagacggttgctgccaagaaccgttgcagcagtactggtaaccagtgcccctccctgattctgagtaacatcaacagcgacaccaccggcattcacctgcagtttgcccttgtgattaacggtggtattctcagccactgcaccatccttcaccacctgccagccgtcactgttaacaacagtgtcagacgctgtaccgccgttgtgcacatactggttaccgccgttcagtgtggtatccagcgcgtagccatgtacagtctggtctccgccggcataaaccatagtggtatttgctgttccttcagcagccacaatctgacgaccatttttattgatggtggtacgtacggcatttccgcgaacaaactgcccggtatcaccattttctgcatccggtcccccttccgcgccggtattcacaacggtgtctgttgccactgcgccgggtttgacgacctgccagcccttatcattaatgacggttcctgtggctatcgcaccctcatgcatccactgctcgccaccattcagcgtggtgttcagtgccagtcccttcagactttgtccgcctccttcattgattattgtgtctgtagcctttcccccggcacctacaaactggagaccgccgctgctgatggcggtattactggctgtgccgccatcctgtacccattgcccgccggtattggcctcgttatccggcccatactccagaccggtactgatggtcattccgttggccgtaccgagaacaatctggttgtcatgatttgtcagtgttccgccgctcacggtttctcccgcctgtacaaccgtgtcagcagccagtgccgggactga

SEQ ID NO: 28270 - DNA, 330 bp, Escherichia coli
atgaaaatcgaagctaattcccttactcatccctatgactacaacgcctcactgaacaattatttacattattttgagaatttctctcgtaatgactggaataaagattcatgtggaggaatagtgtcatgctggtatagtaaccatgaagatgataaaatgaatatcatcgtcgatgctgatacagaacaatttatccctttaggttcttgcttacctcctgatattactttatcagtaataaaagattttttcaaaaatcctttagagaaatcaaaaaaagtaaaatggatgaatgcagatgacattgactggtcatctgtgtattaa

SEQ ID NO: 28271 - DNA, 288 bp, Escherichia coli
gtgcgtaataaaaaagcccctcagaccgtctcagcgcgtcatgacgcccgtgaacacctcagcattgaggcttaccataagctcaaccgcgccagcgccgtatcccggtttgttgggggtgatttgattcaccgtgaactctccggcctgcatcagctctacattccgcatattttcagctacctgaatgaagatattgattttgtgctgaatgagctgaaagccaaaggcctgtgccgcgattttctcgcccagcagaaagaccggggagacaggacgcatgtttga

SEQ ID NO: 28272 - DNA, 2853 bp, Escherichia coli
gtgttcacaaatgggggaaatgtcctgtttaaggataatttggattttggtagcggtggtattatctttgacgaaggccatgaatataacataaacggtcagggatttacatttaaaggagcaggaattgatatcggaaaagaaagcattgtaaactggaatgcattgtattccagtgatgatgttttacacaaaataggccccggtactctgaatgttcaaaaaaaacagggggcaaatataaagataggtgaaggaaatgttattcttaatgaagaaggaacatttaacaatatataccttgcaagcggaaatggtaaggtaatactaaataaagataattcccttggcaatgatcaatatgcggggatattttttactaaacgtggtggcacgctagatttaaatggacacaatcagacttttactagaattgccgccactgacgatggaacaacaataactaactcagatacaacgaaagaagccgttctggcaatcaataacgaagactcctacatatatcatgggaacataaatggcaatataaaactaacgcacaatattaattctcaggataagaaaactaatgcaaaattaattctggatggtagtgtcaacacaaaaaatgatgttgaagtcagtaatgccagtcttaccatgcaaggccatgcaacagagcatgcaatattcagaagcacagcgaatcattgctccctggtatttctttgtggaacggactgggtcaccgttttgaaagaaacagagagttcatataataaaaagttcaattctgatcacaaaagtaataatcagcagacctcatttgatcagccagactggaaaaccggggtgtttaaatttgatacattacacctgaacaatgctgacttttcaatatcacgcaatgccaatgttgaaggaaatatatcagcaaataaatcagctatcacaatcggcgataaaaatgcttacattgataatcttgcagggaaaaatattactaataatggttttgacttcaaacaaactatcagtactaatctatccataggagaaactaaatttacaggtggcatcactgcacataacagccaaatagccataggtgatcaagctgtagttacacttaatggtgcaacctttctgaataatactcctataagtatagataaaggagcaaaagttatagcacaaaattccatgttcacaacaaaaggtattgatatctccggtgagctgactatgatgggaatccctgaacagaatagtaaaactgtaacgccgggtctccactacgctgctgatggattcaggctgagtggtggaaatgcaaatttcattgccagaaatatggcatctgtcaccggaaatatttatgctgatgatgcagcaaccattactctgggacagcctgaaactgaaacaccgactatatcgtctgcttatcaggcatgggcagagactcttttgtatggctttgataccgcctatcgaggcgcaataacagcccccaaagctacagttagcatgaataatgcgatctggcatctaaatagccagtcatcaattaatcgtctagaaacaaaagacagtatggtgcgttttactggtgataatgggaagtttacaacccttacagtggacaaccttactatagatgacagtgcatttgtgctgcgtgcaaatctggcccaagcagatcagcttgttgtcaataaatcgttgtctggtaaaaacaaccttctgttagtcgacttcattgagaaaaatggaaacagcaacggactgaatatcgatctggtcagcgcaccaaaaggaactgcagtagatgtctttaaagctacgactcggagtattggcttcagtgatgtaacaccggttatcgagcaaaagaacgatacagacaaagcaacatggactctgatcggctataaatctgtggccaacgccgatgcggctaaaaaggcaacattactgatgtcaggcggctataaagccttccttgctgaggtcaacaaccttaacaaacgtatgggtgatctgcgtgacattaacggtgagtccggtgcatgggcccgaatcatgagcggaaccgggtctgccggcggtggattcagtgacaactacacccacgttcaggtcggtgcggataacaaacatgaactcgatggccttgacctcttcaccggggtgaccatgacctataccgacagccatgcaggcagtgatgccttcagtggtgaaacgaagtctgtgggtgccggtctctatgcctctgccatgtttgagtccggagcatatatcgacctcatcggtaagtacgttcaccatgacaacgagtataccgcaactttcgccggccttggcaccagagactacagctcccactcctggtatgccggtgcggaagtcggttaccgttaccatgtaactgactctgcatggattgagccgcaggcggaacttgtttacggtgctgtatccgggaaacagttctcctggaaggaccagggaatgaacctcaccatgaaggataaggactttaatccgctgattgggcgtaccggtgttgatgtgggtaaatccttctcgggtaaggactggaaagtcacagcccgcgccggccttggctaccagtttgacctgtttgccaacggtgaaaccgtactgcgtgatgcgtccggtgagaaacgtatcaaaggtgaaaaagacggtcgtatgctcatgaatgttggtctcaacgctgaaattcgcgataatcttcgcttcggtcttgagtttgagaaatcggcatttggtaaatacaacgtggataacgcgatcaacgccaacttccgttactctttctga

SEQ ID NO: 28273 - DNA, 510 bp, Escherichia coli; identical to SEQ ID NO: 9710

SEQ ID NO: 28274 - DNA, 987 bp, Escherichia coli; identical to SEQ ID NO: 6009

SEQ ID NO: 28275 - DNA, 405 bp, Escherichia coli
gtggctgattttacttacgtcagcacatggcagggcttcgtctatgtggcgttcatcattgatgtgtttgccggatacatcgtggggtggcgggtctcatcgtccatggaaacgacattcgtgctggatgcactggagcaggcgttatgggcccgtcgaccgtccggcacggtccatcacagtgataaaggttctcagtatgtatcgctggcctacacacagcggcttaaggaagccggattactggcatcaacaggaagtacaggcgactcgtatgacaacgcgatggctgagagcatcaatggtctttacaaagcggaggtaatacaccgtaagagctggaaaaaccgtgcagaagtagaactggccacactcacgtgggtggactggtataacaatcgatga

SEQ ID NO: 28276 - DNA, 426 bp, Escherichia coli
gtggtgacgcaggccgacaaaacggagccctgccatgaatgggatatggccggtattcagccttctcctgcacaggcacagaatattcgcgaaaaaacggaggcggtattccgtctgttccggcccgtacatccggttgtggccgtatcggcccgcaccggctgggaactggatacgctggtcagtgcgctcatgacagcgcttcccgaccatgccgccagtcccctgatgacccgactgcaggacgagctgcgcacggaatctgtccggtctcaggcccgtgaacagtttaccggtgcggtggaccggatatttgacacggcggagagcgtctgtattgcctctgttgcacgcacggttctgcgtgccgtccgtgacacggtggtctctgttgcccgtgcggtatggaactggattttcttctga

SEQ ID NO: 28277 - DNA, 204 bp, Escherichia coli
atggcgaagctggggatcgttgaacaacgcgaacgatacagccgtaccgcgattaacaacatcaaaaaattctggtcgctgaccgcgaaaggctgcatgttcggcaagaacatcaccagtcctgcaaatccgcgcgagacgcagccgcatttcttcgaatcccgattccctgagctgttaaagctgctcgataccgttcattga

SEQ ID NO: 28278 - DNA, 330 bp, Escherichia coli
atgaaagatgatgtgacacatccaggctccaggaagcaattactgggggacaatagtacctcagaaaatataatacaatatagtgcggatcttaatgtcacatcatgttttcctcctgtgtttttactccattgttgtgatgatgatcttgtgtcaattgaaaacagtctgctcatgtaccgtggcctaatagagaaaggcgtttctgctgaaatgcatctctatgagaaaggagggcatggttttagtattcagtgggccacagatcttcctgttggaggatggataaaactgtttatggactggatgtattctcatggatttaaataa

SEQ ID NO: 28279 - DNA, 525 bp, Escherichia coli
gtgcaccccatgctagaggcattacgctcgggtatcccagaacgcattgctcgttattctgatctagtcgttcccgagattgataaacggttaatccaacttcagctagatatcgcagcgatacaagaacaaacaccagaagaaaaagcccttcaagagttagataccgaagatcagcgtcatttatatctgatgctgaaagaggattacgattcaagcctgttaattcccactattaaaaaagcgtttagccagaatccaacgatgacaagacaaaagttactgcctcttgttttgcagtggttgatggaaggcgaaacggtagtgtcagaactagaaaagccctccaagagtaaaaaggtttcggctataaaggtagtcaagcccagcgactgggatagcttgcctgatacggatttacgttatatctattcacaacgccaacctgaaaaaaccatgcatgaacggttaaaagggaaaggggtaatagtggatatggcgagcttatttaaacaagcaggttag

SEQ ID NO: 28280 - DNA, 762 bp, Escherichia coli
atgatcttgaatgagttgcatcaacatgtttttttaaaaggcgatgcgattaccccttgtatcttccttggggatcatacaggcgatagatttagtactatttttggtgataaatatatccttactttgctaaattctatgcgaaatatggagggtaataaagatagtcgtataaataaaaatgtcgtcgttctggctggaaatcatgaaatcaattttaatggtaactatagtgcacgactagcaaatcataaactctcttccggtgatacatatgacttaattaaaacgctcgatgtttgtaattatgactcagaaacgaaagttttaaccagtcatcacggaataataagaaatgaagaaaatgaatgttattgtctaggtgctttgcagattccatttaatcagatgaaagacccaattgatcctgaggaattagcaaatatatttaataaaaaacataaacaacacatggatgatcgtcttatccatctaattagaagcaatgctatagcatccacacctgtatatgacaattattttaataacactactgctttcagaccaaaacctgaagatatcttcaaatgtggacagacgctcaaaaaaagtaaacagaaatatggccattatggattaggggtagatcagcatcaaaaaattgataattataccatggggctaaattcctggaagatagcacctaacgaacgtggtgataaaaaaggtgtcccagggcttagttgttttcaatctcattaa

SEQ ID NO: 28281 - DNA, 210 bp, Escherichia coli
atgacctgcctgactgtctttattatctctgttgcgttactgatggtaggtctgtggaatgcgacgttattactcagcgagaaaggtttttatggactggctttcttcttaagcttgtttggtgcagtagcggtgcagaagaatattcgtgatgccggaataaacccaccaaaagaaacacagattacccaggaagaatacagcgaataa

SEQ ID NO: 28282 - DNA, 261 bp, Escherichia coli
gtggggaatctttaccggctgatgcgcggctatgccaccggcggttatgtcggtacaccgggcagcatggcagacagccggtcgcaggcgtccgggacgtttgagcagaataaccatgtggtgattaacaacgacggcacgaacgggcagataggtccggctgctctgaaggcggtgtatgacatggcccgcaagggtgcccgtgatgaaattcagacacagatgcgtgatggtggcctgttctccggaggtggacgatga

SEQ ID NO: 28283 - DNA, 501 bp, Escherichia coli
atggccgacagtttccagaatgaagttcccgccgctcgtgtaaatatcaagcttgatctgcatacaggcaatgcaaaaaagaaagttgaactccccctcaagcttcttgccgtaggcgattacagtaacggaaaagagcagcgtccgctgtccgaacgggacaagattgatatcaataaaaacaacttcaacagcgtcatggctgagttttcgcctgcggttaatttaacagtagaagatacgctaagcggaaacggtaatgaacaaaatatcgcgcttgagtttaaaagcctgaaggattttgaacccgaacaggtagcaaaaaatattccgcagcttcgtgtattactcgctatgcgcaatttactacgtgacctgaaatccaatctgctggataacgcaacgtttcgccgtgaactggaaaatatcctgaaagacccgacgctcagttcagaactgcgtgatgaactggcgaaaattgcgccgcaggagaacgtttaa

SEQ ID NO: 28284 - DNA, 2076 bp, Escherichia coli
atgcgggatttaatcaagtcccagccagtatatgagattcagtattacggcaaaaccttccggatgaacgctgcccaggtactgcatgataaatatatgatctggtgcggtgagcagctatggtccgcattcgttctggcgtctgtcgtggccctggttatttgcctgatcaccttctttgttgtctcctggattctggggcgtcagggtaaacaacagagcgaaaatgaagtcacaggtggtcgtcagctgacagacaatccgaaagacgttgcccggatgctgaaaaaagacggcaaggactccgatatccggattggcgacctgccgattatccgggattccgaaatccagaacttctgtctgcacggcacggtcggggccggtaagtcggaggttatccgtcgtctggccaactatgcccgtcagcgcggtgatatggtggtgatttatgaccgttcaggggaatttgttaaaagttactatgatccctccatcgataaaatcctgaatccgctggatgcccgctgtgccgcatgggatttgtggaaggagtgcctgacacagccggattttgataataccgcaaatactctgatccctatgggtacaaaagaggacccgttctggcagggttcaggacgtaccatttttgcggaagcggcgtacctgatgcgtaatgaccccaaccgcagctacagcaaactggtggacacactgctttccatcaaaattgaaaaactgcgtaccttcctgcgtaattcaccggcggccaacctggtggaagagaaaattgagaaaacggcgatttccatccgtgctgtgctgaccaactacgtgaaagccatccgttacctgcaggggattgagcataacggtgagcccttcaccatccgtgactggatgcgtggtgtccgggaagatcagaaaaacggctggctgtttatttcgtcgaacgccgacacccatgcctccctgaagcctgtgatctccatgtggctgtccattgccattcgtggtctgctggcaatgggagaaaaccgtaaccgtcgtgtgtggtttttctgtgatgagttacccacgttacacaaactgccggacctggtggagatcctgccggaagcccgtaagttcggtggctgttatgtgtttggtatccagtcctatgcccagctggaagatatctacggtgagaaagcggcggccacgctgtttgacgtcatgaacacccgtgcttttttccgttccccgagccataagattgcagagttcgctgccggtgagattggtgagaaagagcacctgaaagccagcgagcagtattcctacggtgctgacccggtacgtgacggggtatcgaccggtaaggatatggagcgtcagacactggtcagttattccgacattcagtctctgccggatctgacctgctatgtcactctgcccggaccgtatccggcagtaaaactctccctgaaatatcaggcacgaccgaaggtcgctccggagtttattccgcgtgacatcaacccggaaatggagaaccgtctgagtgccgtacttgctgcaagggaagcagaaggtcgccagatggccagcctcttcgaaccggaggttgcctccggagaaggcgtgactcaggctgaacagccacaacagccacaacagccacaacagccacaacagccacaacagccacaacagccacaacagccacaacagccacaacagccacaacagccacaacagccacaacagccacaacagccacaacagccacaacagccacaacagccagtgtcttctgtcatcaatgataagaagtcagatgcaggtgtgagtgttccggcaggggggatcgagcaggagctgaaaatgaaaccggaagaagagatggaacagcaactgccacccgggatcagtgaatccggtgaagtggtggatatggccgcttatgaggcatggcaacaggaaaatcatccggacatccagcagcagatgcagcgtcgtgaagaggtgaacattaatgtgcaccgggagcgcggggaggatgttgagccgggagatgatttctga

SEQ ID NO: 28285 - DNA, 1059 bp, Escherichia coli
gtgcgggtattacttagacctgttctggtgcctgagcttgggctggtggtccttaagccgggccgtgaatccatacagatatttcataatcctcgagtgctggtggagccggaaccgaaaagcatgtgcggcctgccatccggagtcgtccctgccgttcgccagccgctggcggaggataaatcattactgccatttttcagcaatgagcgtgtgattcgtgctgctggcggcgctggtgcactgtctgactggctgttgcgccatattaaatcctgccagtggccacacggtgattatcaccacagtgaaaccgtcattcaccgttatggtaccggcgcaatggtgttgtgctggcactgcgacaaccagttgtgtgaccagacctcagaatcacttgagcaacttgctcaccaaaacttgtcagcatggatgattgacgtcatccgtcacgcaatcagcggtacgcaggagagggagttatcgctggccgaattatcctggtgggcggtctgcaatcaggtggctgatgcgcttccggagtctgtattgtgtcgttcactgggattaccggtggaaaaaatccgctccgtataccgtgagagtgacatcgtaccgggagaacagactgccaccagcatactgaagcagcgcacaaaaaatattgcgctgccacttcacgtccaccagcaacagcccccactccaggaaaagacgttagtaagcatcgccgttgatccggagtctccggctcagtatctccagcgccagaaaccacaacgggaagagatgcctgtatacacgcgctgggtaaaaacgcagaaatgcatgacgtgcggtaatcaggcagatgatccgcatcacatcattgatcatggcctgggaggtatgggaacaaaggctgatgatttgtttgttattccgctgtgccgtaaatgtcataacgaactgcacgccggggtaaaagattttgaagaaaaacacggcagccagctgttgttgctgattcgttttttaatgcacgcgagaaattcgggtgtcctgaagtggaaagcatga

SEQ ID NO: 28286 - DNA, 537 bp, Escherichia coli; identical to SEQ ID NO: 27243

SEQ ID NO: 28287 - DNA, 192 bp, Escherichia coli; identical to SEQ ID NO: 28060

SEQ ID NO: 28288 - DNA, 291 bp, Escherichia coli; identical to SEQ ID NO: 4611

SEQ ID NO: 28289 - DNA, 276 bp, Escherichia coli; identical to SEQ ID NO: 17738

SEQ ID NO: 28290 - DNA, 276 bp, Escherichia coli; identical to SEQ ID NO: 13339

SEQ ID NO: 28291 - DNA, 1476 bp, Escherichia coli
gtgcggaaacgggaactcagcgatgccgcacgtcgtgcagcggaagcccttaacctgaccattcccgctgcgaatgcctcagcggataccctgcgggaattcattgccacgctgccgcaggaatgcgggaacgcgtgggagatgaccccggagttcctggcgatgagcgggaaggtgaacgacatcgaacgtgaggggaatgcgctgctgaaagagcaggccattctcgaaaaggagatgaccggactcaaaaaagcacgccctgtcgcgtcccttctgtcagagattcccctgatgacatgggctgaaccggaataccgcaaaagacaactccgtttctggaaactcgggaaacagattgaatctcttcgccgcacctacagggccgtgaaagaacgggacattcccgcccgtcgtcaggcctttgaaacgcagtggaatacgtggattgcgccgggaatggcagagctgaaagaaaaactgtcagcacgggaagcggagcggcgcagggaggaagccgaagcggaagcgcgccggaaggaacaggagcatgaggcgcggctgaaacgtcatgataaccaccgtctgagccgtgaaacggcattagtcggggttattacggagctggggcgtgccagagagccgggaacgggcaggataacccgctacatgatgttgagtaacagagccggagaattcacggtatggggtgatgagctggcgcattacccccagagtgttcatgacccggtgaatgtttacctgtcgccaggcggggctgtgatggtctcggatatacgcgagggaatgccagaatctcatgagacgatggcgcggcctgagcgtgtgagaatgtattccggtgcgacggtccggcatgtactggaacagatgcgccaggggtggccctcttacggttttccggcgctgccgcatcactggccggataatttttatttcagcgacgaccgcaggcccgtagcctctccgctgccgtcagcgcaccgggtggatatcaccgctgatgctgtaccggaacaactcatgcctgttgtattttcgagagagggaaacagcaggacgctgaatctgttgttatgcaaagggccggaggaaatgcttgtcgggtttgttcgccgggaaggagggttttgccccgttcttgtgcttccgtcgccggattacagtcatctgatagtcagcaccatcacggagaacggggtatgcctggcaggttacggagaagctataaaccatgatgaggatactccgtacccaccggaaccgcacctgatgcagttccggctcaaaggccatcatgacaggcttttggctgctgtccacaaaccggaagagatgccggattatctcttccgtcaactcggttttaatcagacctggcatgagtggaagcgggacgaacagcacaggcaacaacaacgccgccccgggcacttccggggcatgagtatgtga

SEQ ID NO: 28292 - DNA, 330 bp, Escherichia coli; identical to SEQ ID NO: 8750

SEQ ID NO: 28293 - DNA, 369 bp, Escherichia coli; identical to SEQ ID NO: 9121

SEQ ID NO: 28294 - DNA, 3693 bp, Escherichia coli
atgggaaaaggtggcggtaaggcacacacgcctcgtgaggcgaaggataatctcaaatccacgcagatgatgagcgtgattgatgcgattggtgagggaccgatagaaggtccggtgaagggactgcagagtatcctggtgaacaaaaccccgctgacggacacggacggtaatcccgtgatacacggtgtgacggcggtctggcgcgccggggagcaggagcagacaccaccggaaggctttgagtcctccggtgctgaaaccggactgggcgtggaagtgacgaaggcaaaaccggtgacgcgcaccattacgtccgcgaacattgaccgcctgcgggttaccttcggggtgcagtcactggtgcagaccacgtcaaagggcgaccgtaatccttcctctgtccggattctgattcagttacagcgtaatggccgctgggtgacggaaaaggatgtcaccattaacggcaagaccacctcgcagttcctggcctcggtgattctggataatctgcctccccggccctttaacatccggatggtcagggagacggcggacagcaccacggaccagctgcagaataagacgctgtggtcgtcatacaccgaaatcatcgatgtgaaacagtgctacccgaacacggccattgtggggctgcaggtggatgcggagcagttcggcggccagcagatgacggtgaactaccatatccgcggtcgcatcatccaggtgccgtcaaactatgacccggaaaaacgcacgtacagtggtatctgggacggcagtctgaaaccggcatacagcaacaacccggcctggtgcctgtgggacatgctgactcacccgcgctacggcatgggaaaacgtctgggggcggcggatgtggacaagtgggcgctgtatgccatcgggcagtactgcgaccagacggtcccggatggtttcggggggaccgagccgcggatgacctttaatgcgtacctggcacaacagcgtaaggcgtgggacgttctcagtgatttctgctctgcgatgcgctgtatgccggtatggaacggccagacgctgacgttcgttcaggaccgtccgtcggatgtggtgtggccgtacaccaacagcgatgtggtggtggatgataacggcgtgggtttccgctacagcttcagtgccctgaaggaccggcacacggcagtggaggtgaattacaccgacccgcagaacggctggcagacctccacggaactggtggaagacccggaagccatactgcgctacggacgcaacctgctgaagatggacgcgttcggctgtaccagccgcggtcaggcccaccgtgccgggctgtgggtgataaagaccgaactgctggaaacgcagacggtggatttcacgctcgggtcacaggggctgcgtcacacacccggtgacatcattgaaatctgtgataacgactatgccgggaccatgaccggcggacgtgtcctgtccatcgatgccgccagccgtaccctgacgctggaccgggaggtgacactgccggagaccggcacggccactgttaatctgattaacggcagcggtaagccggcgagcgtggccatcaccgcacaccccgcgcctgaccggatacaggtcagcaccctgccggatggtgtggagacatacggtgtgtggggactctccctgccgtcactgcgtcgtcgcctgttccgctgtgtctccatccgggaaaacacggacggcacctttgccatcacggcggtgcagcacgtacctgaaaaagaagccatcgtggataacggggcccgctttgagccgcagtcagacaccctgaacagcgttatcccaccggcagtgcagcacctgacggtggaggtgagcgcagctgacggccagtatctggcgcaggctaaatgggacacgccgcgggtggtgaagggcgtgcgcttcagtctgcgcctgaccagtggtaagggaacggatgccagactggtgaccaccgccatcaccgcagacacggagcaccgtttcagcggcctgccactgggggaatacaccctgacggtgcgggccattaacagctacggccagcagggcgaacctgcgaccaccaccttccggattgccgcaccggcagcaccgtcgcggattgagctgacgccggggtattttcagataacggcggtcccgcgtcttgcggtgtatgacccgacggtacagtttgaattctggttctcagaaaaacgcatcacgaacacggcacaggtggaaaaatctgcccgttatctggggaccggcagtcagtggactgtccaggggagccggattaagccggggacggatttctggttttacgtgcgaagcgtcaacctggtgggaaaatctgcttttgtggaagccagcgggcagcccagcaatgatggtgaagggtatctggaaattttccgggggctgatagatgagacgcttctgggccaggcactgaaagagcgcattgatgcttcagcgctgcgtacggaggtcacgcaactggaagaagacatccgtcagcggatggacacggatatcgcagaagtgacccggaaaatcgggaaggcggaaaacagcctcacgcagctggttgcgaaaaagaatgaggaccagacactggccatcgcgcaggtgagccagaaagtggaccgggtgagcagtgaaatctcacagactgtcagccaggggcagtcagaaaacgcccgacagatagcacaggtccgccagtacgtggataaaaaagggagtgaaattacctcgaccacggataaaaagctgggtgaccaggccgtgaccatacagcaaatccagcgggttcagtcagacacgcgcaatgagctgaatgccatgtatatgctgaaggtgcagaaaacaaaaaacggtattccctatgtggccgggattggtgcggggattgaggatgttgatggtcagacgctgagcagtattctgctgcaggcggaccgtatcgcgatgattaccccggagaatggcaacaccacgccgctgtttgtggcgcaggggaatcagctgttcatgaacgacgtgttcctgaagcgactgtttgcggtgagcatcacgtcatccggcaatcctcctacgttttccctgacgccggatggcaggctgacagcccgcaatgcggatatcagtggagccatcacggcgaataccggcacgctcaataatgtcaccattaacgagaactgtgtcatcagagggaaactgtctgcaaaccagattgaaggcgatctcgttaaaacagtgggtaaggctttcccccgtgactcccgtgcaccggagcgttggccatcaggaaccattaccgtcagggtttatgacgatcagccgtttaaccggcagattgttattccggcggtggctttcagcggtgccagacatgagcgggagaacagcgatacttattcgtcatgccgcctgatagtacggaaaaacggtgctgaaatttataaccgtaccgcgctggataatacgctgatttacagtggtgttattgatatgcctgctggtcgcggccacatgacgctggagttttctgtatcagcatggtgggtaaatggctggtatcccacagcaagtatcagcgatttgctggttgttgtgatgaagaaagccactgcaggcatcacgattagctga

SEQ ID NO: 28295 - DNA, 1602 bp, Escherichia coli
atgaaaacgtccaccattcccacccttctggggccggacggcatgacatcgctgcgtgaatatgccggttatcacggcggtggcagcggatttggtgggcagttgcgggcgtggaacccaccgggtgaaagtgtggatgcagccctgctgcccaactttacccgtggcaatgcccgcgcagacgatctggtacgcaataacggctatgccgccaacgccatccagctgcatcaggatcatatcgtcgggtcttttttccggctcagtcatcgcccaagctggcgctatctgggcatcggggaggaagacgcccgtgccttttcccgcgaggttgaagcggcatggaaagagtttgccgaggatgactgctgctgcattgacgttgagcgaaaacgcacgtttaccatgatgattcgggaaggtgtggccatgcacgcctttaacggtgaactgttcgttcaggccacctgggataccagttcgtcgcggcttttccggacacagttccggatggtcagcccgaagcgcatcagcaacccgaacaataccggcgacagccggaactgccgtgccggtgtgcagattaatgacagcggtgcggcgctgggatattacgtcagcgaggacgggtatcctggctggatgccgcagaaatggacatggataccccgtgagttacccggcgggcgtgcctcgttcattcacgtttttgaacccgtggaggacgggcagactcgcggtgcaaatgtgttttacagcgtgatggagcagatgaagatgctcgacacgctgcagaacacgcagctgcagagcgccattgtgaaggcgatgtatgccgccaccattgagagtgagctggatacgcagtcagcgatggattttattctgggtgcgaacagtcaggagcagcgggaaaggctgacgggctggattggtgaaattgccgcgtattacgccgcagcaccggtccgtctgggaggcgcaaaagtgccgcacctgatgccgggtgactcactgaacctgcagacggctcaggacacggataacggctactccgtttttgagcagtcactgctgcggtatatcgctgccggactgggtgtctcgtatgagcagctttcccggaattacgctcagatgagctactccacggcacgggccagcgcgaacgagtcgtgggcgcactttatggggcggcgaaaattcgtcgcatcccgtcaggcgagccagatgtttctgtgctggctggaagaggccatcgttcgccgcgtggtgacgttaccttcaaaagcgcgcttcagttttcaggaagcccgcagtgcctgggggaactgtgactggataggctccggtcgtatggccatcgatggtctgaaagaagtacaggaagcggtgatgctgatagaagccggactgagcacctacgagaaagagtgcgcaaaacgcggcgacgactatcaggaaatttttgcccagcaggtccgtgaaacgatggagcgccgtgcagccggtcttaaaccgcccgcctgggcggctgcggcatttgaatccgggctgcgacaatcaacagaggaggagaagagtgacagcagagctgcgtaa

SEQ ID NO: 28296 - DNA, 546 bp, Escherichia coli
atggaagtcaacaaaaagcagctggctgacattttcggtgcgagtatccgtaccattcagaactggcaggaacagggaatgcccgttctgcgaggcggtggcaagggtaatgaggtgctttatgactctgccgccgttataagatggtatgccgaaagggatgctgaaattgagaacgaaaagctgcgccgggaagttgaagaactgcggcaggccagcgagacagatctccagccagggactattgagtacgaacgccatcgacttacgcgtgcgcaggccgacgcacaggagctgaaaaatgccagagactccgctgaagtggtggaaaccgcattctgtactttcgtgctgtcgcggatcgcaggtgaaattgccagtattctcgacgggctccccctgtcggtgcagcggcgttttccggaactggaaaaccgacatgttgatttcctgaaacgggatatcatcaaagccatgaacaaagcagccgcgctggatgaactgataccggggttgctgagtgaatatatcgaacagtcaggttaa

SEQ ID NO: 28297 - DNA, 774 bp, Escherichia coli; identical to SEQ ID NO: 10811

SEQ ID NO: 28298 - DNA, 1476 bp, Escherichia coli
atgaagtccagatatcgaacctggcttgctgtcccgcctgaggagacagaagccgtaaaaaatgcagttcccccgttaaatggccgcaaagctgtcgcatgggatccagaaaaaaagctctggtatgcccgggcgggtaccgaactttcactgctggagcgctggttaccccggccacaggaactgtcgatggatgccggcgatccggtcactgaatttgctcaggtcctggaaaacgccgggctggttattcagggattgccacagatggacggagccatacacagagtggccacccgggatgacaaaaaaggggccaaaagtggcgcatacagggcctatcttgatggtcgtcccgccggctggtaccgcgactaccggagcgccgatgacagtcccacaaactgggtattttccggcggagaacaacacgatcctctggccagactgcatctgcgggcattcgctcagcaacagcgcgatgataacgctcgtaaactgcagcaacagtataacaaacaggccggctatgcccgctcctatattaacaggttgccacaggcaacagcacatgaatacctgacgcgcaagggcatccgggccgcgcctggcgtgcggctgaacaataaaaatgagctggttattcccttcagcaacggccggggagaaatacgttcgtaccagcgtattccggtcaccggcgggaaggatgcccgcattctgaaagactccgagaaaaccggcaactggttcaccttcggaaccccggaaaatggccgccccctgttatttgcggaaggttacgctactgccgcctccctgcacgaagcaaccggccttccggttctgatgacagttgatgccagcaatatgattgccgtggcagaaaatgcccgccaaatctggactgacagcccctttgtcttctgtgccgacaacgatcatcaacgggaaattaacaaaggggtttttagtgcaacaaaggccgcagaagtcacgaatggcgaagtcattattccggcctttacggaggcggaaaaagcacagggactgaccgatttcaatgacctggacgccagccggggacgggacaactttcagaatgccatgaatgcacagttaaaacatatcggtatccccacacccaacagtgacactgccgaccatcgtgaggctgtcgtgatcgacaacctgatattcacaccggtaaaagatgagaagccacaaatgtcccctgaaaacagacagagcacagccccggaaacggagctggcgacacaggatacgccttatgacacccactccgacgatacagaaaaccaggcatatgaagatgactatgccgcctatgcatccctgcaatcagtaactgcggagacgttatccccggataaaccactggagaatattgcgtctgccgctgataccggcacagagaatacctctgtgcctaccgctggcgaccaggaagactga

SEQ ID NO: 28299 - DNA, 558 bp, Escherichia coli; identical to SEQ ID NO: 3851

SEQ ID NO: 28300 - DNA, 558 bp, Escherichia coli
atgaatctaggcgccgcgctgttccgactggaacgtccgtttgcctatcttgatacggataacgtgtataaagagcagggtaaccaggttaacaacggccttgagttaaccgctgccgggaatgtgtggcaggggctgaatatttacagcggcgtgaccttcctcgacccgaaactgaaagatacggcgaatgcctcaaccagcaataaacaggttgtcggcgtgccgaaagtgcaggccaatctgttggcggaatacagtttgccgtccataccggaatgggtttacagcgctaacgtccattatacgggcaaacgcgcggcgaacgataccaacacctcttacgccagcagctataccacatgggatttgggaacgcgttacaccacgaaagtgagcaacgtcccaaccactttccgcgtggtggtaaacaacgtgtttgataaacattactgggcttctatcttcccatcgggtaccgatggcgataacggttccccaagtgcgtttatcggcggcggccgcgaagtgcgtgcatccgtcaccttcgatttctga

SEQ ID NO: 28301 - DNA, 540 bp, Escherichia coli; identical to SEQ ID NO: 7602

SEQ ID NO: 28302 - DNA, 333 bp, Escherichia coli
atgaaaggacagcaacagcgttatattcgcaaatataatcctgatactgatgaagattcattagtgatggaaatgccggcatgttcccatttaatgagtaaccataatggtattctctatgttggtgatggttcaggtagtccggttgatgttaaagatacctgcagttataaaattgaaaatgatccctggatttacattcttagcagtaaaaataaaaaaatacataaattggtgaaacataatagttcctggagggtacagaaaggagaccggcaggtaacgcacccgcatccaccaggtcatggggcccttcgtggcaaaaggcgatag

SEQ ID NO: 28303 - DNA, 735 bp, Escherichia coli
atggctaagggtgatattaaaaagttgaagtttgaatctttctacgatagtgaatcgaataacgaagttattcgattaacgccaacagatattctttgccatcgcaattatttttatcaaaaatgttttacaaatgatggtaaaaaattgattttcgctgctgagtttgattgtaaccggaattattatcttatggatttggtaactcagacagcgaaacaactcactgaaggagctggagataacacctttggtggcttcctgtcccctgatgataattatcttttttatgtgaagaatgaaaaacatttgcagcgtgttgatttgaccacattagaagaagttaccatatacacagtaccggataattgggtggggtacggaacatgggttgctaatactgattgtacggaaatcgtcggaatcgaaatcagtaaaactgactggaccccgcttagcgactggaaaatatttctggaattttatcataagaatccacgatgccgtttaattacgattgatctggaaaccggaaacgctgaagtgatattggatcgtaatacttggttagggcatccaatttttcgtccgaataataacgatactatcgccttttgccacgaagggccccatgacctggtggatgcgggtgcgttacctgccggtctcctttctgtaccctccaggaactattatgtttcaccaatttatgtatttttttatttttactgctaa

SEQ ID NO: 28304 - DNA, 519 bp, Escherichia coli
atgagcaatcttttacagacgggcgcggagttcgagaaaaagctgaaagagagagccgaatctacagagacaatgctgaacaacgagttcaggaggctcggcgaatctgtaagcgaggctgtgacatcaaacgagacgaaaatcagagacgctatagccctgttcacagcctcgacagaggaatcgctggaaaaacaccgggaaggggtgaaagaggcgatgatgcagcacaggagggacgtgttaaagctggcagggaatacgggcatgatgttactggggatagtctttctcctgtttaccgcgagtggcgggacgctctggtatcttggagggaggatacaggcgaacctggaagaaatcaggatacaggaagaaacattgcagaaactgaacgcgaagacatggggcgtggagtttgtgcaggacgggagcaggaaatttctggttatcccgccggggaaatcggcaacggtgattccctttcaggggaaagagtgggtacatctgaaggagtga

SEQ ID NO: 28305 - DNA, 234 bp, Escherichia coli
gtgacagagctggaaacacatttgctgaacgccttagagcagctgcaacaggactatatgcagcggctgaacgaatgggagagcgccttcgtggaattgcagaaaatgttttcgcttacgcaacgggacaacgcgatgctgaacgagcgggtcatgcagttgagtcagcaggtgcagcacttgagcgagcagacagaacgcttgagccagttatacagcgagaactggagataa

SEQ ID NO: 28306 - DNA, 162 bp, Escherichia coli
atgtgttatccctggaacgggagcgtcagccggaaatacaggaacgcacgctggatggcccttcgctgggatggtgaaaccatgaaaaatggcagcttcagtggattaagtgggggtaatgtggcctgtaccctctggttgcataggtattcatacggttaa

SEQ ID NO: 28307 - DNA, 315 bp, Escherichia coli
atgagagttgagcagaataatttcagggacatgttctccgtttatctctccggcccgccgcagacgcagcatgtgttttgtgtatccccggcggcccgggtcgcgcacacgggtctggcaggcgaagaatggctgaaagccttcccgctgcaggctttccagtacggtgatggtggggatgtacgtatagttctggcttcgggacgtgtgtttatcttccccgaaaatccccggcacatagtgcatcagttcttcgtgtgtcagcggacggtcacggcgtatctggttcgcagcataaccaaaacgactggctag

SEQ ID NO: 28308 - DNA, 708 bp, Escherichia coli; identical to SEQ ID NO: 25464

SEQ ID NO: 28309 - DNA, 1431 bp, Escherichia coli
atgcagacggaaaacgtgaacggcttcagctggagcaccaacagcaccacgtcgtttggtcagatgatgtaccagaccggcagtggcgcaactgccacacagacccgtgacggtaatatggtgatggatgcgagcggggcgatgtcccggttaccggttggtatcaatgcaacgcgtcagattgcagcggcacaacaggaaatggcccgggaggcgtcgaacagagcagaaagcgccctgcatggtttcagcagcagtattgccagtgcctggaactcgctcagccagtttggttctaaccgggggagcagtgattctgtcacaggtggtgctgacagcacgatgagcgcacaggactccatgatggccagccgtatgcgcagtgcagtggaaagctatgcgaaggcgcataatatcagtaatgagcaggcgactcaggaactggcatccagaagtacgagagcttctgccgggatgtatggagatgctcatgctgaatggggggttaaacctaaaattcttggtgttggtggaggattaggcgttagaggtggtggtcgggctggtattgattgggaagataatgatgcgcatacggcaagtagtaatactcagtcgagccataatgctcgtcatgatatcgatgccagagctacacaagactttaaagaggccagcgattactttaccagtcgcaaggtcagtgagtccggcagccatactgacaataatgctgattcccgtgtggatcagttgtctgcagccctgaattcagcgaagcagagttacgaccagtacacgacgaatatgacccgcagccatgaatatgctgaaatggcatcccgtactgaaagcatgagtgggcagatgagtgaagacctgtcgcaacagtttgcacagtatgtaatgaaacacgcgccacaggatgcagaagctattctgacaaacaccagttcaccggagattgcagaacgtcgtcgggcgatggcgtggtcttttgtgcaggaacaggtgcagcctggtgttgataatgcctggcgtgaatcccgtggcgatattggtaaaggaatggagagcgtaccttcgggtggtggcagccaggatattattgctgaccatcaggggcatcaggccattattgatcaaagaacgcaggacagtaatatccggaatgatgtaaaacatcaggttgataatatggtcacagaatataaagggaatataggtgatactcagaacagcgtacgtggcgaggaaaatattgtaagaggacagtattctgaactgcagaatcaccataaaacagaggcattatctcagaataataaatataatgaagaaaagtcggctcaggaaagaatgcccggggctgacagtccacaggaacttatgaaaagggcaaaggaatatcaggataagtataagcaataa

SEQ ID NO: 28310 - DNA, 924 bp, Escherichia coli
gtggcaaagcaaaagttcaaaatcaccaactggcccacctacaataaagccctcatcaaccgtggctccataactttctggctggatgatgaagctattcaggcctggtatgagtcagcaacaccttcttcacgaggcagacctcagcgctattctgaccttgccatcacgactgtgctggtcattaaacgcgtattcaggctgaccctgcgcgctgcgcagggctttattgattccattttttctctgatgaacgttccgctacgctgcccggattacagctgtgtcagcaggcgggcaaagtcggttaatgtcagtttcaaaacgcccacccggggtgaaatcgcacacctggtaattgattccaccgggctgaaggtcttcggtgaaggcgagtggaaagtcaaaaagcatggccaggaacgccgccgtatctggcgtaagctgcatctcgccgttgacagtaaaacacatgaaatcatctgcgctgacctgtcgctgaacaacgttacggactcagaggccttccccgggttaatccggcaaacccaccggaaaatcaggtcagccgccgccgatggcgcttacgatacccggctatgtcacgatgaactgcggcgtaagaaaatcagcgcgcttatccctccccgaaaaggtgcgggttactggcccggtgaatatgcagaccgtaaccgtgcagtggctaatcagcgaatgaccgggagtaatgcgcggtggaaatggacaacagattacaaccgtcgctcgatagcggaaacggcgatgtaccgggtaaaacagctgttcgggggttcactgacgctgcgtgactacgatggtcaggttgcagaggctatggccctggtacgagcgctgaacaaaatgacgaaagcaggtatgcctgaaagcgtgcgtattgcctga

SEQ ID NO: 28311 - DNA, 429 bp, Escherichia coli
atgaaaaaatttattaatgtttacattaaatcagattatgacatagttattcttcgcctgtctgttattataatatttatactcttcgggacctataaatggtttgattttgaagtgatggccctcaagcccctgatttctcccacgtggctgaatatcctgtacattatgtttggtgttcatggggggagctatttcctcggcatagtagaaactatcacttttctagcactgagtatcggcttcttcaggcctgctgctggcatactgggagatattatcgttattgttacaggtttagtcacactaagtctgttaccacaactgggaaaagttgacagttttgtcatcaaagatgtgctgctgttaggtgctggtagtgtcctgctgaaatatgatttgaaaaattatttaaatatcaaaaactga

SEQ ID NO: 28312 - DNA, 258 bp, Escherichia coli
atggatgaagaaagggtgttttcactcagctatgaacaactgacccggtttgcggaaaaacgcatccgggaatgcaatctggacagccagggcgcgatttatctctgcgagtcagccaaagccggagccgtgctgatcttctggcatgaactggccataaatggctatgcctcaatgaatgccataaagagacaggagctcattgacgccgactttcagcgcctcagaaacctcatctggccggaggatgacaggtaa

SEQ ID NO: 28313 - DNA, 384 bp, Escherichia coli; identical to SEQ ID NO: 5770

SEQ ID NO: 28314 - DNA, 321 bp, Escherichia coli
atgaacatgcgtaatattaatgctattacagccctttctgtaccgggtaaaactatgtcagatgattttatgcatgctgttctcagtaactgcaccacaagaatcgtccttcctgcaccgaaggaattcagttctgaatcattgccgcacaattttaatatggctgctgtcggtgtgatgaaggagggaatgtcgatgcgtttattttcttctcctgggcatattgtggttgccggacaattcggtggcggaaaatctgcttcggtgaaagaactaatcgacagaattattcagaaatataaggaacccttcgatgaataa

SEQ ID NO: 28315 - DNA, 282 bp, Escherichia coli; identical to SEQ ID NO: 15041

SEQ ID NO: 28316 - DNA, 540 bp, Escherichia coli; identical to SEQ ID NO: 19425

SEQ ID NO: 28317 - DNA, 528 bp, Escherichia coli; identical to SEQ ID NO: 15035

SEQ ID NO: 28318 - DNA, 456 bp, Escherichia coli
atgattcacctgttcaaaacctgcatgattaccgccttcattctggggttaacgtggtctgccccactccgggcacaggatcaacgttacatcagtatacgcaatacagatacgatatggctcccgggaaatatttgtgcttaccagttccggctggataatggcggaaacgatgaaggatttggccccctcaccatcactctgcaactcaaagacaaatatggtcagacgctggtgaccagaaaaatggaaacggaagcttttggtgacagtaatgccacgcgaaccacagacgcatttctggaaacggagtgcgtggaaaatgtcgccacaaccgaaatcattaaagcaactgaagaaagtaacggccatcgtgtcagtctgccgttatcggttttcgatccccaggactaccatccactgctgattaccgtttccggaaaaaacgttaactga

SEQ ID NO: 28319 - DNA, 186 bp, Escherichia coli
gtgattgcagagccaccggataagcgtcgtcgcgacctggacaatatcctgaaagcaccgctggatgcgctgacgcatgcgggagtgttaatggacgatgagcagtttgatgaaatcaatatcgttcgtggtcagccagtatctggtggacgtatgggggtgaagatttaccccataatgcattaa

SEQ ID NO: 28320 - DNA, 270 bp, Escherichia coli
atgctatgcgtttctcagttcatccaaaatttgacgagctggaaaacgactttaatcagttcttttctgatattgatttctatacccggtatggtcagtcaggtatgcgtaaagtgctcttcactggccccccaggaacaggcaagacaactatcgcaaaagctttgggggcaaagtatcaggataagtatgtttttgtttatgccgatgattactttaaagatgtttgctacgccgctgctcagaagaaaatacccgtcattattatag

SEQ ID NO: 28321 - DNA, 708 bp, Escherichia coli; identical to SEQ ID NO: 19407

SEQ ID NO: 28322 - DNA, 348 bp, Escherichia coli
gtgagtatatttactaatccggtttttattaaaggtgtttttttaattgtcttaatgcacaaatatgtactttcagatattaaaaatgagaaaattatagtgctttataacttatatgttttaggtgtattagctatggttgcattgagtgggatggctattctttcaggccgtctttcatcctttctgacactaggtgaaagcattttaattgtatatgctctgttctacaaaagaaatacacctctggcgtttctaattttttcttttttaacaattgtgcaattaggatatgatctatttatttctaatgtgcatcctgagcttactctgattatatttgggtga

SEQ ID NO: 28323 - DNA, 765 bp, Escherichia coli
atgaacgcagaatatataaatttagttgaacgtaaaaagaaattagggacaaatattggtgctcttgattttttattatcaattcataaggagaaagttgatcttcaacataaaaactcgcctttaaaaggtaacgataaccttattcacaaaagaataaacgaatacgacaatgtacttgaactatctaagaatgtatcagctcagaattctggcaatgagttttcttatttattgggatatgcagattctcttagaaaagttggtatgttggatacttatattaaaattgtttgttatctaacaattcaatctcgttattttaaaaatggcgaacgagttaagctttttgaacatataagtaacgctctacggtattcaaggagtgattttctcattaatcttatttttgaacgatatatcgaatatataaaccatctaaaattgtcgcccaaacaaaaagatttttatttttgtacgaagttttcaaaatttcatgattatactaaaaatggatataaatatttagcatttgataatcaagccgatgcagggtatggcctgactttattattaaatgcaaacgatgatatgcaagatagttataatctactccctgagcaagaactttttatttgtaatgctgtaatagataatatgaatatttataggagtcaatttaacaaatgtctacgaaaatacgatttatcggaattaagttcgataagaaaaaaaatgtttatggaaaagatcttgttagtataa

SEQ ID NO: 28324 - DNA, 603 bp, Escherichia coli; identical to SEQ ID NO: 5081

SEQ ID NO: 28325 - DNA, 1044 bp, Escherichia coli
atggagcctgtcggtgagtgccgtgaggatgccggaacataccgctgtctgccggagccggaagcggtgctgaccgaggcggaagaagaacgtctgaacgaactgatggcacgttacgacgcgctggaaaaccagtgtgaggaatctgacctgctggaagcagaaatgaagctgatgcgctgcatggcgaaggtcagagcgtggacgccggagatgcgtgccggaggtggagtggtggtgtcctggtgttatggaaacgtatgtgtccagcgtggtgtgcagttacgcagtgaggatgatgcggctgacgacgctgaccgcacggaacaggtgcaggaaaaagcgtcagtggaggaaatcagtctgccactgctgacgaaaatgtcttccgaacgcacgctggcagtccaggcagcactgatgcagcaaccggacaaatccctgacactgctggcatggacgctctgcctgaatgtgtttggcagcggagcgtacagtaaaccagcacaaatcagcctggaatgtaaacattattcgctgaccagcgatgcgccatcggggaaggaaggtgccgcattcatggcgctgatggcagaaaaagcccgtcttgctgccctgttaccggagggatggtcacgggacatgacgacattcctgtcactcagtcaggaggtgctgttatccctgctcagtttctgcaccgcatgcagccttaacggtgtccagacccgtgagtatggtcacacgtcacgcagtccgctggacacgctggagagcgccatcggctttcacatgcgcgactggtggcagccgacgaaagcaaactttttcggacacctgaaaaagccgcagattatcgcagccctgaatgaggcaggactatccggtgccgcacgggacgcggagaagatgaagaaaggcgatgcggctgaacatgcagagcaccatatgaaagacaaccgctgggtgcctggctggatgtgtgcaccacgcccacagacggatgccactgaacgcaccgataacctggctgatgccgcctga

SEQ ID NO: 28326 - DNA, 234 bp, Escherichia coli
atgagcgaatatttcagaatacttcaggggctgcctgacggctcctttacccgcgaacaggccgaagccgttgccgtacagtaccggaacgtctttatcgaggatgatcacggcgaacagtttcgcctggttgtccgtaataacggtgcaatggtctggcgtacctggaattttgaggacggtgccgggtactggatgaaccatgtcatccgtgatttcgggattcttaagtaa

SEQ ID NO: 28327 - DNA, 867 bp, Escherichia coli
gtgctggagccgaaaccggaccgggaggtcatgaatgcagagcggctgttcagtacggcgcgggaactgcgggacgtggcggcagggcgtgctgttctccgtcaggcggggctggccgtgggagacagtccggcacggtttattgcaccggggcgcaaatatccgcagccgtatgtggcactgccggcgtttgaccgtaacggcaagtcagcaggtatctggctgaacccactgaccacggatgacggaaacgggctgcggggattcagtggtgaaggacgggtgaaaggcagcggggatgcgcagttcgtggccctgcagggcagccgtaacggagagagcctgctggctgataatatgcaggatggtgtccggattgcccgtgataatcctgacagcggtgtggtggtgagaatcgccggtgaaggtcgtccgtggaatcccggtgccatcaccggtggtcgcgtgtggggggatatcccggacaacagtgtccagccgggagccggaaatggcgaaccggtcacggcagaggtgctggcacagcggcaggctgaagaggccatccgtcgtgaaacggaacgccgcgcagatgaaattgtccgtaaaatggcagagaacaaacctgacctgccggatggcaaaacagagcaggctgtcagggagattgccgggcaggagcgtgaccgggctgccataactgaacgggaagccgcgctgccggagagtgtgctgcgtgaacctcaacgggtgcgggaagctgtcagggaaattgcccgggaaaatctgctgcaggagcgacttcagcagatggagcgggatatggtccgtgacctgcagaaagagaaaaccctgggcggagactga

SEQ ID NO: 28328 - DNA, 198 bp, Escherichia coli; identical to SEQ ID NO: 6538

SEQ ID NO: 28329 - DNA, 198 bp, Escherichia coli; identical to SEQ ID NO: 10430

SEQ ID NO: 28330 - DNA, 159 bp, Escherichia coli; identical to SEQ ID NO: 25286

SEQ ID NO: 28331 - DNA, 816 bp, Escherichia coli
gtgcgattatttgctcaattaagctggtatttccgtcgggaatggcgtcgctatctcggggctgtcgccttgcttgtcattatcgcgatgctgcaactggttccgccaaaagtggttggtattgttgttgatggcgtgacagaacaacactttactaccgggcagatcctgatgtggatcgccaccatggtgctgattgccgttgtggtttatctcctgcgttacgtctggcgcgtattgctgtttggtgcgtcttatcaactggctgttgaactgcgtgaagattattaccgccagctaagccggcagcatcctgagttttacctgcgtcatcgcacgggtgacctcatggctcgtgcgaccaatgacgtcgatcgcgtcgtgtttgccgccggagaaggggtgctgacgctggtggattcactggtaatgggctgcgctgtgttgattatgatgtctacgcaaattagctggcagttgaccttatttgccctgttgccgatgccagtgatggcgatcatgatcaagcgcaacggcgatgccttgcatgaacgctttaagctggcacaggcggcgttttccagtcttaatgaccgcacccaggaaagcctcaccagtattcgcatgatcaaagcctttggtctggaagatcgtcagtcggcgttatttgccgcggatgccgaagataccggcaaaaaaacatgcgggtggcgcgtattgatgctcgtttcgacccgaccatctatatcgcgattggtatggcgaacttgctggcgattggcggcggtagttggatggtggtacagggcagtttaa

SEQ ID NO: 28332 - DNA, 360 bp, Escherichia coli; identical to SEQ ID NO: 19537

SEQ ID NO: 28333 - DNA, 282 bp, Escherichia coli
atgactgcaacgtatggttatagtcaggataaccacggacaggtaaaccaatatacgggggtatctggttctctgttggagcagcataatctcagttataacatacaacatggttttgctaatcaggataatagcagtagtggttctgttggtgttaattatcgtggggcatatggttccttgaattccgcctacagttacgataatgaaggtaatcaacaaataaactatggcatcagtggtgctcgaaaatggtcttacgttgagtcaaccattaggtga

SEQ ID NO: 28334 - DNA, 3057 bp, Escherichia coli
atgactacactacccaatacattctctgaaggtgatctagttacttctcttttgtttggcggaatcgccaaaattgtacgtcttcacccgcctggcaaggctcagatcgcctggtttgtctcacctctcgaatacgaggttaaccgccagatggcggagaccgtatcactgacgccggcaaaactgtatgaagagagcacggtattcttccgctcacccgagagcggactgtggtgtcgggggcgttatggcgggcaacgtccggataataagcatctggtgatcgtccgctctgataagaacgtcgtcatcgatctagctgatattttttatccaaactacggacagggactggcaatgaacccggcccatttcctcgccgctcgcgccaacgacgcaccttttttctacccactgcgcgagaagtttgtaagtgcatggatcaaacagcgcgccgcctgtcggtcaatgtcgtcgttaatcagcagtcgggtggagattgagcctcatcagatagcgattgtccgccgcattctccaggatcagaaccccaaatacctgctagcggacgaagtaggactgggcaaaaccatcgaagcgggactggtcatccgagagcatattctggagtgtaaacgtgaagcccgcgtattggtggtggtgcctcaggtattgcaaggccaatggacgcaggaactggtcgatcgttttgcgctacaggaagtgatgagcggaggacgacacacccagattcgtctgtgccttccggaagaactttgccagccggaactgatcggctggaagcccacgatggtggtgatcgacgaggcccatcaactgactcgacaggcatgggccgatgatgaagatgacctggcgcagtatgccgctatggccgcgttgtgccatcaggcccgtattgtgctgctcctgtctggcacaccgatgcacggtaacgagcgtcacttcctggcaatgctgcactgcataaatccacaggcgtggcagcttaatgcacagggaatcgaaaaatttatgcaacgcgtggcagagcgcgagcgtctggggggaatttacagctctctgacccctgaaacaccaaacggggtgctggaagagatcctcgaagagttacgtctgctttttgctgatgatgagcaactccaggcgcgcattgttggtctgagtccgttggttgatttttttgcacctgatgaaagcgaagagcgaacggcgggcattttggcattacgacagtggataggagagcgctaccgtctttttcaccgcttgctgcgtaaccgacgtgaagatcccgcgctggaatacctatttccaggtctggccgggttggaaaaatgtgtctggcccgtcgcatcgaccgagatcacgcttgatgaaacccttgatgcctggcgtgccgcggcctggcgcaaccccgcacagcatcaacatctggattccacaacgcttgatgaatgggtggaagcgctgtttctcaacccgctggtgatgtcccgccaagccaaaaaggcactggtaaaagggaccgccagcgaagaagagttcaattttcttgagcagattattgaaacgtcccagcaggagcagaaagccaaagatgtggcgctaatgaaggcgctgaccgactggtttgaaaaatgtcctgatggcaaagcagtcatcttttgcggtgaaggatcagaagccgccttcctgtttaccaaactgcaaattcaggccccctgggcggtagttcgccatgcgccggaccagcgtaagcagagcgagttgttggatgacagttggcaggtattgatctgcgataggcgcggcgaagacggactgaatctgcacggaaacaaccggcttgcggtccactatagtctgagccgcgactttaatcgctttgaacagcggttggggcgctttaaccgctattccggaaatctacgcggcgttaagccagtgaaaagcctagttttactgcctgagcgtgatgggctgcgtgctgactgggtgaaattactggacgaaggcacgggattgtttcatcgaagcgtcgccagcctgcaatttgttctgtctgaacaattagacgtggtatggcgcgattacgttgggcaggggcttgccgtcttccatgaggcgcaacagcgcttttcgggagaaaatggcttcatcgctcaggagcgtaagcgcgttctggctcaagaaaacttgttatcgatggaacaggaggtcattgctgcccgcgagttttctgagcaactggccgaatctgaagatgatgccgaagagcaggcaaaggatatgctggcttggatgtgcaaggcattagggtttaagcgagaaaaatatcctgaaggcggatttcgcctgcgcttcgagcgtggcgaatatcaacggcaaacgctggtggacgtgggaacttttattgataactgcctgctcggtctggatttttcagagggatatccaccctccacggcgatgatgagcctgtctcgtacggaagccggcaaccataaacatgtttaccccttgcgctacgggcagcctttcgtcgaaaccgtatggcaactgatgcagagcgatccgcgaggtgccagtatggcgctgcttcgggttctctcctccgcggttgcgctgaagcaaccccacacctggttccattttcagtggctgagtgaagcacaggttgaaggtgaaaatcagctagccgcgcagcgtcgtggtgatgagtgcttcagcccagtggtccacaatttctggctggatgacggtggaaaagaggctgacccgcagatcgtcgtctccctgctggataaaccttacgatgaagagggcaaccgtttgttccaggatatcaatctgcgagaagaggtctggacgcgaatgccggactggtttgatccgcatagctggaaagagaccgtactcgctgcggcggagcaggcccggcagaacgtgcatgctcactatggtgatcggcccgtccgccatcaattgcttgcaatgaaggcgattattctgtgtacccgtgacatgctgtaa

SEQ ID NO: 28335 - DNA, 891 bp, Escherichia coli
atgggcgtcgttaagttagctgattacaggcataaccctgtacaacatcaggaggcatccagtatggggtatgtctctatacaccgccagtttatggacagcaggctctataaggactctcaggcagtacatctttggcttcacttaatcctcaaggctaatcacgaatctactgtcgtcaatacggatatcggtccgataactgttgatcgcggtcagatgataactggacgcccgtcgctggtcagagaaacattcatccccgacaacaaagttcggagcttattacggacttttgagtcgaaaggtatgcttaatatttgctcgatggggaagaaatttagcctgtttacaatcgttaaatatgacgattttcaggcaaaaaattgtccaacggttgtccaacggttgtccaacgcaaacaccagtaatggcgcggctctcagcggagattgtccaacggttgtccaacggttgtccataaacaataatataaataatatctctaatactgacgtattagagagtgccacagcagacaaaaagtctgacaagaaaaaaccttccgttagctgtcaggatgttgtcgatgcttaccacgaaatccttcctgaagcgccaagaatccgcgcactgaatgacaagcgtaaaaaccagatccgaacgttctggcgcaaagccggagtgataacccgccagcttgacgggcatgggttcacgatgcaggactggagaaattatttgagctacgttggcgaaaattgccgatggatgttcgaagagcgcacaaaccatcaacgcggaaccgtctggcacaaaaagggatttgatttcctgcttaacgataatacctacctgaaagttcgtgagggtgaacacgatgaccgataa

SEQ ID NO: 28336 - DNA, 1182 bp, Escherichia coli; identical to SEQ ID NO: 8788

SEQ ID NO: 28337 - DNA, 738 bp, Escherichia coli; identical to SEQ ID NO: 5288

SEQ ID NO: 28338 - DNA, 738 bp, Escherichia coli
gtggcactacctttcgctgctgacgcttgtctggtcgcctcatcttttgaagcagacgcagatgatgccgatgacgccgctgaactggctgacgatgcggctgccgccttagaggaagcagcattgtctgctgaagtctttgcatttgtttcagaggtttttgctgcagaagcagacctcgctgctgcagtggcttgctcagtggctttgccagccttcgttgtggctgttgaagcggatgatgcggcgctttctgccgattttccggcggcggtggcactggctgaggcctgcccggcacttgttgacgcggcactggcagataatgcagccgctgtttttgaacctgccgcagctgaggcgctctgtcccgctgctgtttcagaagacttagcgttcgtctcggacgtttttgccgccttcgcggaatttcctgccgccgttgccgaggaagctgcactactggcacttgatgatgcattcgtttctgaagatttcgctgcctcttttgaggccgccgcaccccgtgccgaggtggcagcttctgacgccttcgtggtcgctgtggatgcagaagtggctgccgatttttgtgatgctgcggcattcgtttctgacgttttcgcggcactggcgctggtagctgccgcgctttttgatgactctgcagcagcagcactttttgctgcttcacgggcctttgtcgatgccgttcctgcgctggaagacgctgactga

SEQ ID NO: 28339 - DNA, 1491 bp, Escherichia coli
gtgtatgacccgacggtacagtttgaattctggttctcagaaaaacgcatcacgaacacagcacaggtggaaaaatctgcccgttatctggggaccggcagtcagtggactgtccaggggagccggattaagccgggtacggatttctggttttacgtgcgaagcgtcaacctggtgggaaaatctgcttttgtggaagccagcgggcagcccagcaatgatggtgaagggtatctggaaattttccgggggctgatagatgagacgcttctgggtcaggcactgaaagagcgcattgatgcttcagcgctgcgtacggaggtcacgcaactggaagaagatatccgtcagcggatggacacggatatcgcagaagtgacccggaaaatcgggaaggcggaaaacagcctcacgcagctggttgcgaaaaagaatgaggatcagacactggccatcgcgcaggtgagccagaaagtggaccgggtgagcagtgaaatctcacagactgtcagccaggggcagtcagaaaacgcccgacagatagcacaggtccgccagtacgtggataaaaaagggagtgaaattacctcgaccacggataaaaagctgggtgaccaggccgtgaccatacagcaaatccagcgggttcagtcagacacgcgcaatgagctgaatgccatgtatatgctgaaggtgcagaaaacaaaaaacggtattccctatgtggccgggattggtgcggggattgaggatgttgatggtcagaccctgagtaacattctgctgcaggccgatcgcattgcgatgattaccccggagaacggcaacaccacgccgctgtttgtggcgcaggggaatcagctgttcatgaacgacgtgttcctgaagcgactgtttgcggtgagcatcacgtcatccggcaatcctccgacgttttccctgacgccggatggcaggctgacagcccgcaatgcggatatcagtggagccatcacggcgaataccggcacgctcaataatgtcaccattaacgagaactgtgtcatcagagggaaactgtctgcaaaccagattgaaggcgatctcgttaaaacagtgggtaaggctttccctcgtgactcccgtgcaccgaagcgttggccatcaggaaccattaccgtcagggtttatgacgatcagccgtttaaccggcagattgttattccggcggtggctttcagcggtgccagacatgagcgggagaacagcgatacttattcgtcatgccgcctgatagtgaagaaaaacggtgctgaaatttataaccgtaccgcgatggataatacgctggtttacagtggtgttattgatatgcctgctggtcgcggcgacatgacgctggagttttctgtatcagcatggtgggtaaatggctggtatcccacagcaagtatcagcgatttgctggttgttgtgatgaagaaagccactgcaggcatcacgattagctga

SEQ ID NO: 28340 - DNA, 600 bp, Escherichia coli; identical to SEQ ID NO: 16671

SEQ ID NO: 28341 - DNA, 222 bp, Escherichia coli
atgaaaattatcacccgtggtgaagccatgcgtattcaccaacaacatccgacatcccgtctttttccgttctgtaccggtaaataccgctggcacggcagtgctgaagcgtataccggtcgtgaagtgcaggatattcccggtgtgctggccgtgtttgctgaacgccgtaaggacagttttggtccgtatgtccggctgatgagcgtcaccctgaactga

SEQ ID NO: 28342 - DNA, 348 bp, Escherichia coli
atgatcccgttaccttccgggaccaaaatttggctggttgccggtatcaccgatatgagaaatggcttcaacggcctggctgcgaaagtacagacggcgctgaaagacgatcccatgtccggccatgttttcattttccggggccgcagcggcagtcaggttaaactgctgtggtccaccggtgacggactgtgcctcctgaccaaacggctggagcgtgggcgcttcgcctggtcgtcagcccgtgatggaaaagtgttccttacgcaggcgcagctggcgatgctgctggaaggtatcgactggcgacagcccaagcggctgctgacctccctgaccatgctgtaa

SEQ ID NO: 28343 - DNA, 300 bp, Escherichia coli
ttgctgtccgcacaaggggcaacgctgttaagaacagcaatgctggattattataaccaggacactacgggaacctcggggatagtcggcatgggattcaacaatgaagattccattacagaccttcgtgagggcagctttaaaatgccggacgggacaacattcagcgatcctgtcgtggcaatgtcagacaatggtatgcaggctactattctgacctctatcagaagcgggtatgcgaagggtatcactgtcagaccccgtagcattgcacttaattacattgtgagggcagtttaa

SEQ ID NO: 28344 - DNA, 384 bp, Escherichia coli; identical to SEQ ID NO: 2052

SEQ ID NO: 28345 - DNA, 477 bp, Escherichia coli
atgcaacagctttcctttctgcccggagagatgacgcccggcgagcgcagcctcattcaacgggccctgaaaaccctggaccgccatcttcatgaacccggcgtggccttcacctccacccgtgcggcacgggaatggctgattctgaacatggcgggactggagcgtgaagagttccgggtgctgtatctgaacaaccagaatcagctgattgccggtgaaaccctcttcaccggcaccatcaaccgcacggaagtccatccccgggaagtgattaaacgcgccctgtaccacaatgccgctgccgtggtactggcacacaatcacccgtccggtgaagtcacacccagtaaggcagaccggcttatcaccgaacgtctggtacaggcactgggcctggtggatatccgggtgccggaccatctgatagtcggtggcagccaggttttctcctttgccgaacatggtctgctttaa

SEQ ID NO: 28346 - DNA, 201 bp, Escherichia coli; identical to SEQ ID NO: 7085

SEQ ID NO: 28347 - DNA, 564 bp, Escherichia coli
atgaggggatctctcagtacccataatccgccgatccgcgtgtttgagtcaggctcgattctgctttatctggcggagaaatttggctacttcttgccgcaggatctggcaaagcgtactgaaacgatgagctggctgttctggttacagggcgcggcaccgttcctcggcggtggttttggtcacttttaccattacgcgccggtgaaaattgagtacgccatcaaccgctttactatggaagccaagcgccttctcgacgtgctggataagcaactggcgcagcataagtttgttgcgggcgatgagtacaccattgcggatatggcgatttggccatggtttggcaatgtggtgttaggcggcgtatatgacgccgcagagtttcttgatgcgggcagttataagcatgtacaacgctgggcgaaagaagtgggcgaacgtccggcagtgaagcgtgggcgtattgttaaccgcatcaacggaccgctgaacgagcagttgcatgagcgccatgacgccagtgatttcgagacaaatacggaagataagcgtcaggggtaa

SEQ ID NO: 28348 - DNA, 249 bp, Escherichia coli
atgatttttaccaaaatcattaggggattcatcagcgttacgcgtgtatttaacatgcttgttaacgaaggcgctgatctgcaaatccgccgtcaatcgccccatacactcttaatccacgtcaatcgctcaggcgtgacactttggtttgaagcagatgaagaacagcctggtgatccgcagaattatatgctgatggcatttggtttgacacatcgcgattacgatgcaagatttcaatattcataa

SEQ ID NO: 28349 - DNA, 867 bp, Escherichia coli
atgttgattcaatgctcgctggcccgtggtgatttagataacgcccgtagccagctgaaccgtctggaaaacctgctggggaatggcaaatatcacagcgactggatctctaacgccaacaaagtccgggtgatttactggcaaatgaccagcgataaagccgccgctgccaactggttgcgtcatacggctaaaccagagtttgcgaacaaccacttcctgcaaggtcaatggcgcaacattgcccgtgcacaaatcttgctgggcgagtttgaatctgcggaaattgtcctcgaagaactcaatgaaaatgcccgcagtctgcggttgatgagcgatctcaaccgtaacctgttgctgcttaatcaactgtactggcaggccggacgtaaaagtgacgctcagcgtgtgttgctggacgcattaaaactggcgaatcgtaccggatttatcagtcattttgtcatcgaaggcgaagcgatggcgcaacaactgcgccagcttattcaactcaatacgctgccggagctggaacagcatcgcgcacagcgtattctgcgagaaatcaatcaacatcatcggcataaattcgcccatttcgatgagaatttcgttgaacgtctgctaaatcatccggaagtgccagagctgatccgcaccagcccgttgacccaacgtgaatggcaggtcctggggctgatttactccggttacagcaatgagcaaattgcaggcgagctggaagtggcggcaaccaccatcaaaacgcatatccgtaatctgtaccaaaaactcggtgtcgcccaccgtcaggccgcggtacaacacgcgcagaaactgctgaagatgatgggatatggggtgtga

SEQ ID NO: 28350 - DNA, 186 bp, Escherichia coli
atgatgacgctgattattccgcgaaaggaggctcccgtgtccggtgagggtacggtggtcatcccgcaaccggcaggcgacgagccggtgattaaaaacacgttcttttttcccgatatcgacccgaagcgcgtccgggaacgtatgcgccttgagcagaccgtcgccccccgcccgtctgcgtga

SEQ ID NO: 28351 - DNA, 309 bp, Escherichia coli
atggcggagacgaatgcggagctgtacgagtaccgcgaacagaaaatagccgccggttttacgcgtctggcggacgttccggcggacgacatcgacggtgaaagtatcaaagttttttactacgagcgcgccgtgtgtgcgatggcgaccgcgtcgctttatgagcgttaccgcggcgtggatgccagtgcgaaaggcgacaagaaggccgacagcattgacagcaccattgatgaactgtggcgggatatgcgctgggcagtggcgcgtatccaggacaagccgcgctgcatcgtgagtcaaatctga

SEQ ID NO: 28352 - DNA, 1080 bp, Escherichia coli
atgtcagacattctaattacttatgatgaacggaaagataaatttgagtcctatgcccttactcttaaatcgttattaaccacgttaattcgcaatgaaaaaatttcaattcactcacttgaatcaagagttaaaacaaaaaaaagccttgaaggtaagattaataaaaagggaaaatacaagtctatagatgatattactgatatcgttggtatcaggatcatcacacattatgctgatgatgttgataagatagctgctatagttgaaaaggagttcaccattgaccaagagaactctattgataaaagaacctcaattgcgcctgataaatttggttacctatcacttcattatatagtaactttaaactcaaccagaacaaacttaaaagaatatgaagtatataaaaacatcaaagccgaattacaaatacgatcaatccttcagcatgcctgggcggagattgaacacgacattggttataagtcggccacaggactgcctaatgaaataagaagatacttttcacgcttagctggtcttttagaaatggccgatgatgaatttattaaaatcagaaaaaagatttctgaacggcagaaagaggttgcaaaagaactagagcaaggaactagtgattcagttttagatattttcactttggatgaattcttaaacacaagtcgaattatgagtgaactttcagaagagataaaagaaaaaacaggaatcacagtacatggccgatacaaggataaagatttgggatacctactaaatggtttaaacctagccaacataactacaatagaacaactcaatcaaaaactctcacaaatgaaaaagcagatcgtagatagaatattctgcttcggagaaccatttattaattattgcagagaaacccccatgccaaaagaagctcttttgagttatttatgtcaaattatcgttgcgtttcaaaactcaccttcgttagaatctgaatttaataacaaagcaggtttaaatctgaaaaacagcaatatctccgattttttctcgaatataagagaaaacataagcacacaaccttag

SEQ ID NO: 28353 - DNA, 162 bp, Escherichia coli
atgttagggctggatctcggtgtctatggcgcgccagaaacgttccttattgacggcaacggcatcattcgctatcgccatgcgggcgatctcaatcctcgcgtctgggaagaagagatcaagccactgtgggagaaatacagtaaggaggccgcacaatga

SEQ ID NO: 28354 - DNA, 204 bp, Escherichia coli; identical to SEQ ID NO: 27934

SEQ ID NO: 28355 - DNA, 390 bp, Escherichia coli
atgggtggcgcggtaaaccagactacgatcaataatggagtgctacaggtttatggcgcggcgactgatcccacgattaaaggagggcgcttaattgttgaaaaagatgggattgccgtctttgccgttatagaaaagggagggctactggaggttaaagcaacaggtgatttcaaaatattcgtgacggacaccggtgccagcccggcagcaggagataaccttacactggtaacaacgggcgcggtgatgcggcatttacgttgggcaatgccggaggcgttgttgatatcagtacgtatgaatataccttgctggataatggcaaccatagctggagtctcgcagagaatcgcgcacaaatgcccccttcaaccacggatgtgctga

SEQ ID NO: 28356 - DNA, 993 bp, Escherichia coli
gtgcgggtattacttcgacctgttctggtaccggaactcgggctggtgatcgttaagccgggccgtgaatccatgccggtattccacaatacccgggtactggtggagccggaaccgaaaagcatgcgtaatctgccgtccggggtcgttcctgccgttcgccagccgctggcggaggataaatcattactgccatttttcagcgacgaacgagtgattcgtgctgctggtggcgctggcgcattgtctgactggttactgcgccatgttaaatcctgccagtggccacacggcgattatcaccacagtgaaaccgtcattcaccgttatggtgccggcgcaatggtgttgtgctggcactgcgataaccagctgcgcgatcagttcacggaacggctggaatcaatggcaacggataactgtgcccgctgggtgttgtctgttgtgcgtcgggatctcggttttgatgatagtcacgttgtgacaatgccggaactgtgctggtggctgattcgtaatgacctggcggatgccttaccggaaagtgcagcccgtaaggcactgagattaccgaagcctgttgtgccatctgtcacccgggaaagtgaccttgtgccttcagttcctgccaccagcatcatccaggataaagcgaaaaaggtgctggtactgaaagtggatccggagtcgccggagtcttttatgttacgcccaaaacgtcgccgctgggttaatgaaaagtacacgcactgggttaagacgcagccgtgcgcatgttgtggaaagcctgctgatgatgcccaccacctgataggtcacggtcagggtggaatgggtacaaaagcgcatgacctctttgtgttgcctttgtgcagaaagcatcacgacgagctgcatgcggataccgtggtatttgaagagaagtatggctcccagttggagctgatatttcgttttattgatcgtgcgctggcaattggcgtgctggcgtaa

SEQ ID NO: 28357 - DNA, 558 bp, Escherichia coli
atgatttttaccaaaatcattaggggattcatcagtgctggacgttttcgtgaagatctttattatcgtctggcggttattcctataaccatgccgccactgcgtgaacgtctgaacgatattattccgctggcagagtcgtttattaaaaaatatgccacggtgctggtgaaaaatatcaccctgtccgaatccacacgccgggcgctacttaattaccgctggcccggaaatgttcgccaactggaaaacgccattcagagaggaatgatcttaaaccgcgacggcgtgatttacccggatgccttaggcctgccggaaactgacattgccgaccacagcgaactgcaatggcctgttcagcccgccgtccacattgccgaaacccgcgatttaggccagcacggacgaagtgcgcagtatcaatatatcgccgacctgatgcgtaaatatcagggcaaccgcagcaaaatcgccgacctgttaggcattaccccgcgcgcactgcgctatcggctggcctccatgcgcaagcaaggtatcgaagttttctcctga

SEQ ID NO: 28358 - DNA, 390 bp, Escherichia coli
atgaaacgttatttacgctggattgtggcggcagaatttctgttcgccgcagggaatcttcatgccgttgaggtagaagtcccgggattgttaactgaccatactgtttcatctattggccatgatttttaccgagcctttagtgataaatgggaaagtgactatacgggtaacttaacgattaatgaaaggcccagtgcacgatggggaagttggatcactataacggtcaatcaggacgttattttccagacttttttatttccgttgaaaagagacttcgagaaaactgtcgtctttgcactgattcaaactgaagaagcactaaatcgtcgccagataaaccaggcgttattaagtacgggcgatttggcgcatgatgaattttaa

SEQ ID NO: 28359 - DNA, 1248 bp, Escherichia coli
atgactgatcaatcagaaaaaaaacactctgcattttggggtgttatggttatagccggtacagtaattggcggtgggatgtttgctttacctgttgaccttgccggagcctggtttttttggggcgcttttattcttattatcgcctggttttcaatgttacattcagggctattattattagaagcaaacttaaattatcccgtcggttccagttttaacaccatcaccaaagatttaatcggtaacacctggaacataatcagcggtattaccgttgccttcgttctctatatcctcacttatgcctatatctctgctaatggtgcgatcattagtgaaacgatatcaatgaatttgggctatcacgctaatccacgtattgtcgggatctgcactgccattttcgttgccagcgtattgtggataagttcattagccgccagtcgtattacctcattgttccttgggctgaagattatctcctttgtaattgtttttggttctttcttcttccaggtcgattactccattctgcgcgattccaccagcaccactgcggggacgtcttacttcccgtatatctttatggctttgccggtgtgtctggcgtcatttggtttccacggcaatattcccagcctgattatttgctatggcaaacgcaaagataagctcatcaaaagcgtggtcttcggttcgctgctggcgctggtgatttatctcttctggctctattgcacgatggggaatatcccgcgagaaagctttaaggcgataatctcctcaggcggcaacgttgattcgctggtgaaatcgttcctcggcaccaaacagcacggcattatcgaattttgcctgctggtgttctctaacttagctgttgccagctcgttttttggtgtcacgctgggattgttcgattatctggcggatctgtttaagattgataactcccacgccgggcgtttcaaaaccgtgctgttaaccttcctgccacccgcgttgttgtatctgatcttcccgaacggctttatttacgggatcggcggtgccggactgtgcgccaccatctgggcggtaataattcctgctgtactggcaatcaaagcccgcaagaagtttcccaatcagatgttcacggtctggggcggcaatcttattccggcgattgtcattctctttggcataaccgtaattttatgctggttcggtaacgtctttaacgtgttacctaaatttggctaa

SEQ ID NO: 28360 - DNA, 552 bp, Escherichia coli
atggctatcaatggattgtttgtcagaacggatccgcaacgtcgccgctatggcgttgcgttacttgtgggtgtactttcaggaattatttcagcatttgttaaatggggagcggaagtccccttgccaccgcgcacattttccggtggtcgcgatgaatttaacccgccgtatatctttctacgagattatttaggtatcgacccaacccaaactgtgtacacattctcggaacatattatcaacccggtgatggtgacgcatatcatcttctcactggtttttgcgatagggtattgtgttgtcgcggaaatttttccgaaagtgaaattatggcaggggatattagcagggcttattgtgacagtggcagtccacggtatattttgcccggcgctgaatttaacgccgccgctcactcaattgccttttgacgaatatgcgtctgaaatcctggggcatattttctggttttggataatagagattatgcgccgcgacttacgtaatcgcattactcatgagccagatccggaagtcgcaattcggtga

SEQ ID NO: 28361 - DNA, 513 bp, Escherichia coli
atgcggcaattcataatctctgaaaataccatgcaaaaaacttcttttagaaatcaccaggttaagcgattcagctcgcaacgttctaccaggcgtaaacctgacaaccagcccacgcgtgtgatcctgttcaataaaccctacgatgttcttccgcagttcaccgatgaagccggacgcaaaacattaaaagaattcatcccggttcagggggtgtatgcggcaggtcgtctcgaccgcgacagcgaagggttactggtgctgaccaataacggcgcgttgcaggcgcgtttaacccagccgggtaaacgcaccggaaaaatctattatgtgcaggtggaaggtattcccaccagctggctgaagatcaccttatatgaaggacgtaatcgccaggtgcgccgcatgaccgcccatgttggtttccccacgctgcgactgattcgctatgcgatgggggattactctttggataatcttgccaatggcgaatggcgagacgcgacagattaa

SEQ ID NO: 28362 - DNA, 186 bp, Escherichia coli
atgcgtaaagatcagatcccggatttcgttgatgagatcttcgccaccggctgcccaatcaccgcagtaggacaagattgctatgttttgcagagagcgatctgctggcagaagacttcgaccgtgttggtgaggtggtcgataaaatctgccagcgataaggaaagcgtgaccatctgttgctga

SEQ ID NO: 28363 - DNA, 552 bp, Escherichia coli
atggaactccagtgctctcggctgcttgcccgacaagatcgtcaaggcttgccagtgccgctcgatcgtcaggatcgtggcttgtgggatcgattgctcatacgtcgaggtctggagatagttgagcgagcatgccgcatgtcgtctcccactggatggtatcttctgcaagcgttgatttctgcttgtcacgcgcgggctgcgagctttcgagacaccaattggcgagagatactggcgagatatgacgcgctcttcctgttgagccctacatacgtagttgccctcaatcgagcagtcgctgtgtcgtgggccatgaaccccgctgcagggatggcggtccttaaggcgattgaggacgagtgggacgtggagacctacccgctttttcacgcgacgcgggcggatttcctttcgcgtcttggtttccaagaccaagctgcggcagcctatcaggctgcggccgtactcagcaccaacctacctcaaaagttgttcttggtcacgcgcgctgaggaatgcctggcagggtctcggacagatgttggataa

SEQ ID NO: 28364 - DNA, 390 bp, Escherichia coli
atgaacaccaagcttcatgccgtaacggatgcgagtggtcgcccgatcagcttcttcataacggcaggccaggtcagcgattacaccggtgctgccgccttgcttgatgaacttcccaaggccaaatggttgctggccgaccgtggctatgatgccgactggtatcgtgacgctttacaggcgaaggggatcactccctgcattccaggtcgaaaatcccgcaagaagaccatcaaatacgacaaacgccgctacaaacggcgcaaccggatcgagatcatgttcgggcgtctcaaagactggcggcgtgtcgctacgcgttacgaccggtgcccaatggcctttctctccgccatcgctctcgctgcgaccgttatcttctggctatga

SEQ ID NO: 28365 - DNA, 351 bp, Escherichia coli
atgagtaatttgttttggctgacggacgagcaaatggctcgtcttcagccctatttccccaagagccatggccgccagcgcgttgatgatcgacgcgttctgagcggcatcatcttcgtcaaccgcaacgggctgcgttggcgtgatgcgccgaaggaatatggcccggcgaagacgctttataaccgctggaaacgctggggcgacaagggcgtatttatccagatgatggaaggtctggccgtgcctgaagccgcagagcacaagaccatcatgatcgatgcgacctatctcaaggcccaccgcacggcttccagcttgcgggtaaaaaagggggcgcgggccgcctga

SEQ ID NO: 28366 - DNA, 828 bp, Escherichia coli
atggcaatccgaatcttcgcgatacttttctccattttttctcttgccactttcgcgcatgcgcaagaaggcacgctagaacgttctgactggaggaagtttttcagcgaatttcaagccaaaggcacgatagttgtggcagacgaacgccaagcggatcgtgccatgttggtttttgatcctgtgcgatcgaagaaacgctactcgcctgcatcgacattcaagatacctcatacactttttgcacttgatgcaggcgctgttcgtgatgagttccagatttttcgatgggacggcgttaacaggggctttgcaggccacaatcaagaccaagatttgcgatcagcaatgcggaattctactgtttgggtgtatgagctatttgcaaaggaaattggtgatgacaaagctcggcgctatttgaagaaaatcgactatggcaacgccgatccttcgacaagtaatggcgattactggatagaaggcagccttgcaatctcggcgcaggagcaaattgcatttctcaggaagctctatcgtaacgagctgccctttcgggtagaacatcagcgcttggtcaaggatctcatgattgtggaagccggtcgcaactggatactgcgtgcaaagacgggctgggaaggccgtatgggttggtgggtaggatgggttgagtggccgactggctccgtattcttcgcactgaatattgatacgccaaacagaatggatgatcttttcaagagggaggcaatcgtgcgggcaatccttcgctctattgaagcgttaccgcccaacccggcagtcaactcggacgctgcgcgataa

SEQ ID NO: 28367 - DNA, 432 bp, Escherichia coli
gtgacgctcgaatggaaatacaacgacgactctgtcgattggaacgaactctccgccttgtacaaagccgcccccttgggcgataaacagccgatgcatttgcagaaggtcttcgccaacagcatgtttaagtgcttcgtctatgaaggctccaagctggttgctgcaggcagagcgctcgccgatggagcagattgctcgtacatctgcgacatcgccgcattgcctagtcatcaaggtaccggactgggcaagcaagtcgtagctcatttggtcgaagtctcgcgcggtcacaagaagatcatcctgtacgctgtgccgggcaaagagcccttctatcggaagtttggcttcttgcgcatgaagacggcgatggccatattcgagaaccagcaacaacaggtagagcgaggctatctcagtgaagcctaa

SEQ ID NO: 28368 - DNA, 294 bp, Escherichia coli
atgcagaataaaaccagcaaaagcgaaattggcgctacgttcaaattgggtgatggcgtccagcacgttgttcagacagtcggctttgctggtggggccaggacgcgcgcagactaccttatgcacgttcgggaagcgagcgcacacttcgtcaacatcacgctgagtatcggggtcgttggggtaggtgccaacaaagatatgatagttttcgtagtcgagcgtggtcgccgccagctcggccatattgccgatgacgcccgtttcattccacgccggaaccataatcgctaa

SEQ ID NO: 28369 - DNA, 735 bp, Escherichia coli; identical to SEQ ID NO: 5378

SEQ ID NO: 28370 - DNA, 327 bp, Escherichia coli; identical to SEQ ID NO: 13453

SEQ ID NO: 28371 - DNA, 171 bp, Escherichia coli
atgggcaaaaatttttccgtttctgggaaagttttacctaacaccatgaaaattaaacctataccaagagaaaatataataagtaatccccaagttgcagcgagtataatgatgtttaaaaatgaaaattcttctccaagtagacctacaattgacatgaggattatgtaa

SEQ ID NO: 28372 - DNA, 210 bp, Escherichia coli; identical to SEQ ID NO: 8156

SEQ ID NO: 28373 - DNA, 222 bp, Escherichia coli
atgatttttaccaaaatcattaggggattcatcaggattgagtatgttgcattaattcctatcctgttgacctgtggtctgccggtctttatctggtcaagaaaagaaaaaaatgatggtcagccgatatttaccaaaaaagagctgatttatctgattatgctgttgctgtgcgatattatcgtcgttgccctgtttattggtggatatttaaaggtataa

SEQ ID NO: 28374 - DNA, 528 bp, Escherichia coli
atggcaggaaaaacgatgataccgttactcgcctttgctgcatggagtggcaccggaaaaacaacgctgctgaaaaaattgatcccggcattatgcgccagagggatccgtccggggctgattaagcatacgcaccatgatatggatgttgataaaccgggcaaagatagttatgagctgcgcaaggctggcgcggcgcaaaccatcgttgccagccaacagcgatgggccttgatgacggaaacaccagacgaagaagagctggatctacattttctcgcaagtcgaatggatacctcaaagctggatttgattctggtcgaagggtttaagcatgaagagatcgcaaagattgtgctgtttcgcgatggagccggacatcgaccggaagaattagtgatagacaggcatgttattgctgtagccagtgatgtgccgcttaatcttgatgtcgcgttactggatattaatgatgttgaggggctggctgattttgtggtggagtggatgcaaaagcaggacggataa

SEQ ID NO: 28375 - DNA, 585 bp, Escherichia coli
gtgaatctgatgacgatgataacaggcgttgtgctggcgggcggtaaagccagacgaatgggcggcgtagataaaggattgcttgaattaaacggcaaaccattatggcagtatgtcgctgacgcgcttatgacgcagctttctcacgtcgtggttaatgctaatcgtcatcaggaaatctatcaggtaagcggtctgaaagtgattgaagattcactggcggattaccctggtcctctggcaggaatgctttcagtaatgcagcaggaagcgggtgagtggtttttgttttgcccgtgcgatacgccttacattccccatgatttagccgcccggcttactcatcagcgcaaagatgcgcctgtcgtgtgggtccacgacggtgaacgcgatcacccgactattgctctggtaaaccgcgcaattgagcctttattactggaatatctgcaagcaggagaacgccgggttatggcatttatgcgtctggctggcggtcatgcggttgatttcagcgatcgtaaagaggcatttataaacgtgaatacgccagaggagcttgcccgatggcaggaaaaacgatga

SEQ ID NO: 28376 - DNA, 270 bp, Escherichia coli
atgaaatgtaaacgtctgaatgaagttattgaactcctccagccagcctggcaaaaagagccagaccttaacctgctgcaatttttgcagaaactggcgaaagagtcaggttttgacggcgaactggcggatttgacggatgacattctgatctatcacctgaaaatgcgtgattccgcgaaagatgcggtgatcccgggtttgcagaaagattatgaagaagatttcaaaacggcgctattacgcgcacgtggcgtaattaaagagtaa

SEQ ID NO: 28377 - DNA, 987 bp, Escherichia coli; identical to SEQ ID NO: 9105

SEQ ID NO: 28378 - DNA, 1431 bp, Escherichia coli
atgatacgtaagtcagctacaggtgccattgttgcgttagccgtaatctggggtggtggcacatggtacacaggtacgcaaattcagcctggtgtcgaaaagtttattaaaggttttaacgatgctaaaaagaaaggtgaacatgcctacgatatgacgttaagttataaaaattttgacaaaggcttttttaattcccgttttcaaatgcaaatgacatttgataacggtgcacccgatctcaatatcaagccaggccagaaaattgtatttgatgtggatgttgagcacggtccgttgcccatcacaatgttaatgcatggtaatgtcatcccagcactggcagcggcaaaagtgaacttagtgaataatgagctgacacaaccgctatttatcgccgcgaaaaataaatcgcccgtggaagcgacattgcgattcgcgtttggtggctcattctccacgacattagatgttgcccctgcagagtatggaaagttttcttttggtgaaggccagtttacttttaatggtgatgatagttcattgtctaacctggatattgaaggcaaagtcgaagatattgttctgcaattttcaccaatgaacaaagtaacggcgaaaagttttaccattgattctctgacacgattagaagaaaagaaatttccggttggtgaaagcgagtcgaaatttaatcaggttaatattatcaaccagggggaagtcgttgcccaaatcgatgctttcgttgcaaaaaccaggctggatcgcgttaaagacaaagattatatcaatgtcaatctgacctacgaacttgataagttaacaaaagggaatcagcaactcggtagtggtgagtggtcattgattgctgagtctattgatccctcagcggtgcgccaatttatcatccagtataacattgcgatgcagaagcagcttgctgcacaccctgagttagcaaacgatgaagttgctctgcaagaagtgaatgctgcattgttcaaagagtatttaccgttattacaaaaaagtgagccgaccattaaacaaccggtaagatggaagaacgcactcggcgaactaaatgccaatctggatatcagtattgccgacccagccaaatcttcatcatccacaaacaaagatattaaatcgctcaattttgatgtgaagttaccgcttaatgtcgccacagaaaccgcaaaacagcttaatttatctgaagggatggatgcggaaaaagcgcaaaagcgggctgataaacaaatcagcgggatgatgacattaggtcagatgttgcagttaatcacgattgacaacaataccgcctcgctgcaactgcgttatacaccgggtaaagttgtttttaacggacaggagatgagcgaagaagaatttatgtctcgtgccggacgttttgctcattaa

SEQ ID NO: 28379 - DNA, 933 bp, Escherichia coli
atggctaaccttttgaataaattcattatgacgagaatactcgctgcgataacccttttgctgagtatcgtattgaccattttggtcactattttttgttccgtcccgatcatcattgccgggattgtaaaactattgctacctgtgccagtcatttggcgaaaggtttcgcgtttttgtgattttatgatgtattgctggtgtgaaggtctggcggtattactgcatctgaacccacacctgcaatgggaagttcacgggctggaagggttaagtaagaagaactggtatctacttatttgtaaccaccgtagttgggcagatattgtcgtactgtgcgtgctgtttcgtaagcacattccgatgaataaatatttcctcaagcagcagctggcctgggtgccttttcttggcctggcgtgctgggcgctggatatgccgtttatgaagcgttattcccgcgcttatttattacgtcatccggagcgacgtggtaaagatgttgaaaccactcggcgttcttgtgaaaagtttcgcctgcatcccaccactattgtcaatttcgttgaaggctcccgtttcacgcaagaaaaacatcagcaaacccactccacttttcaaaacttgttgccaccaaaggcggcaggcattgcaatggcgctaaatgtactgggtaaacaattcgataaactgcttaatgttacgctgtgttatccggacaataaccgtcagccgttcttcgatatgttaagcggtaaactgacgcgaattgtcgtacatgtggatttacagcctattgccgatgagttacatggcgactacatcaatgacaaaagctttaagcgccattttcagcaatggctgaactcattgtggcaggaaaaagaccggcttctgacatcgttgatgtcatcacagcggcaggaaaagtaa

SEQ ID NO: 28380 - DNA, 186 bp, Escherichia coli
atgagtttttcaccgcttttcgtgaaaatcttttgtagatcttctggatcgctcgcaaatcgtcatgtggataactttgtgcataaattatttacatcgcttttaatttattatcatgctttttacagcatggtgtttatctttgtttttcatgcagttaaaaataaagccatccctaataattga

SEQ ID NO: 28381 - DNA, 2787 bp, Escherichia coli
atggttcagatcccccaaaatccacttatccttgtagatggttcatcttatctttatcgcgcatatcacgcgtttcccccgctgactaacagcgcaggcgagccgaccggtgcgatgtatggtgtcctcaacatgctgcgcagtctgatcatgcaatataaaccgacgcatgcagcggtggtctttgacgccaagggaaaaacctttcgtgatgaactgtttgaacattacaaatcacatcgcccgccaatgccggacgatctgcgagcacaaatcgaacctctgcacgcgatggttaaagcgatgggactgccgctgctggcggtttctggcgtagaagcggacgacgttattggtactctggcgcgcgaagccgaaaaagccgggcgtccggtgctgatcagcactggcgataaagatatggcgcagctggtgacaccaaatatcacgcttatcaacaccatgacgaataccatcctcggaccggaagaggtggtgaataagtacggcgtgccgccagaactgatcatcgatttcttggcgctgatgggtgactcctctgataacattcctggcgtaccgggcgtcggtgaaaaaaccgcgcaggcattgctgcaaggtcttggcgggctggatacgctgtatgccgagccagaaaaaattgctgggttgagcttccgtggcgcgaaaacaatggcagcgaagctcgagcaaaacaaagaagttgcttatctctcataccagctggcgacgattaaaaccgacgttgaactggagctgacctgtgaacaactggaagtgcagccaccggcggcggaagagttgttagggctgttcaaaaagtatgagttcaaacgctggactgctgatgtcgaagcgggaaaatggctacaggctaaaggagcgaaacccgcagccaggccgcaggaaaccagtgttgcagacgaagcgccagaagtgacggcaacggtgatttcttatgacaactacgtcaccatccttgatgaagaaacactgaaagcgtggattgcgaagctggaaaaagcgccggtatttgcatttgataccgaaaccgacagccttgataacatctctgctaacctggtcgggctttcttttgctatcgagccaggcgtagcggcatatattccggttgctcatgattatcttgatgcgcccgatcaaatctctcgcgagcgtgcactcgagctgctaaaaccgctgctggaagatgaaaaggcgctgaaggtcgggcaaaacctgaaatacgatcgcggtattctggcgaactacggcattgaactacgtgggattgcgtttgataccatgctggagtcctacattctcaatagcgttgccggacgtcacgatatggacagcctcgcggaacgttggttgaagcacaaaaccatcacttttgaagagattgcgggtaaaggcaaaaatcaactgacctttaaccagattgccctcgaagaagccggacgttacgccgccgaagatgcagatgtcaccttgcagttgcatctgaaaatgtggccggatctgcaaaaacacaaagggccgttgaacgtcttcgagaatatcgaaatgccgctggtgccggtgctttcacgcattgaacgtaacggtgtgaagatcgatccgaaagtgctgcacaatcactctgaagagctcaccttgcgtctggctgagctggaaaagaaagcgcatgaaattgcaggtgaagaatttaacctttcttccaccaagcagttacaaaccattctgtttgaaaaacagggcattaaaccgctgaagaaaacgccgggtggcgcgccgtcaacgtcggaagaggtactggaagaactggcgctggactatccgttgccaaaagtgattctggagtatcgtggtctggcgaagctgaaatcgacctacaccgacaagctgccgttgatgatcaacccgaaaaccgggcgtgtacatacctcttatcaccaggcagtaaccgcaacgggacgtttatcgtcaaccgatcctaacctgcaaaacattccggtgcgtaacgaagaaggtcgccgtatccgccaggcgtttattgcgccagaggattatgtgattgtctcagcggactactcgcagattgaactgcgcattatggcgcatctctcgcgtgacaaaggcttgctgaccgcattcgcggaaggaaaagatatccaccgtgcaacggcggcagaagtgtttggtttgccactggaaaccgtcaccagcgagcaacgtcgtagtgcaaaagcgatcaactttggtctgatttatggcatgagtgctttcggtctggcgcggcaattgaacattccgcgtaaagaagcgcagaagtacatggacctttacttcgaacgctaccctggcgtgctggagtatatggaacgcacccgtgctcaggcgaaagagcagggctacgttgaaacgctggacggacgccgtctgtatctgccggatatcaaatccagcaatggtgctcgtcgtgcagcggctgaacgtgcagccattaacgcgccaatgcagggaaccgccgccgacattatcaaacgggcgatgattgccgttgatgcgtggctacaggctgagcaaccgcgcgttcgtatgatcatgcaggtacacgatgaactggtatttgaagtccataaagatgatgtcgatgccgtcgcgaagcagattcatcaactgatggaaaactgtacccgtctggatgtgccgttgctggtggaagtggggagtggcgaaaactgggatcaggcgcactaa

SEQ ID NO: 28382 - DNA, 633 bp, Escherichia coli
ttgactaatttgaattatcaacagacgcattttgtgatgagtgcgcctgatattcgccacctaccttccgataccggaattgaagtggcttttgcaggccgttccaacgcaggtaaatccagcgcgctgaacacgctgactaaccagaaaagcctggctcgtacctcaaaaaccccagggcgcacccagcttatcaacctgtttgaagtggctgacggcaagcgtctggttgacttgcctggatacggttatgcggaagtcccggaagagatgaagcgcaaatggcagcgcgcgctcggcgagtacctcgaaaaacgtcagagcctgcaaggtctggtggtgctaatggatattcgccatccgctgaaagatttggatcagcagatgattgagtgggcggtagacagcaatatcgccgtgctggtactgctgaccaaagcggacaaactggcaagcggcgcacgtaaagcgcaattgaatatggtgcgtgaagcggtgctggcgtttaacggtgatgtgcaggttgaaacgttttcttcgctgaagaaacaaggcgtggacaagctgcggcagaaactggatacctggtttagcgagatgcagcctgtagaagaaacgcaggacggcgaataa

SEQ ID NO: 28383 - DNA, 510 bp, Escherichia coli
atgaaaccatcatcttcaaactcacgcagcaaaggtcatgcaaaagcgcgtagaaaaacacgcgaggagctggatcaggaagctcgtgaccgtaagcgtcagaaaaaacgtcgtggtcatgcgccgggcagccgcgcagcgggtggtaacaccacgtcaggcagcaaaggccagaacgcaccaaaagatccacgtattggcagtaaaacccctattccattgggcgtggctgaaaaagtcaccaaacagcacaaaccgaagagtgagaaacctatgctttcaccgcaggcggagttggagttactggaaacggatgagcgtctggatgcgctgctggaacgtctggaagcaggcgaaactctgagcgccgaagagcaatcctgggtggatgccaaactggatcgtattgatgagttgatgcagaaacttggcctctcttatgacgatgacgaagaagaggaagaagacgagaagcaagaagacatgatgcgtctgctgcggggcaactaa

SEQ ID NO: 28384 - DNA, 1374 bp, Escherichia coli
atgtctgtacagcaaatcgactgggatctggccctgatccagaaatataactattccgggccacgatacacctcgtacccgaccgcgctggagttttcagaagacttcggcgaacaggcgtttttacaagccgtggcgcgctatcctgagcgtccattatctctctacgtacatattccgttctgccataagctttgttacttctgcggttgcaataagattgttactcgccagcagcacaaggccgatcagtatctggacgcgctggagcaagaaatcgtccatcgtgcaccgctgttcgccgggcgtcacgtcagccaattgcactggggcggcggaacgccgacgtatctgaataaagcgcaaatcagccgtctgatgaagctgctgcgcgaaaacttccagttcaatgccgatgcggagatctcgatcgaagtcgatccgcgggaaatcgaactggatgtactcgatcatttacgcgccgaaggctttaatcggctgagcatgggcgtgcaggacttcaacaaagaagtgcaacgtctggttaaccgcgagcaggatgaagagttcatctttgcactgcttaaccatgcgcgtgagattggctttacctccaccaacatcgacctgatttacggcctgccgaaacagacgccggagagtttcgcctttaccctgaaacgcgtggcggagctgaaccccgatcgtctgagcgtctttaactacgcgcatttgccgaccatttttgctgctcagcgcaaaatcaaagatgctgacctgccgagtccgcagcaaaaactcgatatcctgcaggaaaccatcgccttcctgacacaatcgggctatcagtttatcggtatggatcactttgcccgtccggatgacgagctggcggtggcccagcgtgaaggcgtgctgcatcgtaacttccagggctacaccactcagggcgataccgatctgctggggatgggcgtttccgccatcagcatgattggcgactgctacgcgcagaaccagaaagagttgaagcagtactatcagcaagtggatgaacaaggcaatgcgctgtggcgtggtattgcgctaacgcgtgatgactgtattcgccgcgatgtgattaagtcgctcatctgcaacttccgtctggattactcccctattgagcaacagtgggatttgctcttcgctgattactttgcggaagatctcaagttgctcgccccgttagcaaaagatgggctggtggatgtggatgagaagggaatacaggtgacggcgaaaggtcgcttgctgatccgcaacatttgcatgtgctttgatacctatctgcgccagaaagcgcggatgcagcagttctctcgggtgatttaa

SEQ ID NO: 28385 - DNA, 1410 bp, Escherichia coli
atgcaacgagggatagtctgggtagtcgatgacgatagttccatccgttgggtgcttgaacgtgcgctcgctggagcgggtttaacctgtacgacatttgagaacggcgcggaagtactggaggcgctggcgagcaaaacgccggatgtgctgctttcagatatccgtatgccgggaatggacgggctggcgctgctcaagcagattaaacagcgccatccgatgcttccggtcatcattatgaccgcacattccgatctggatgctgccgtcagcgcctatcaacaaggggcatttgattatctgcccaaaccgtttgatatcgacgaagccgtggcgctggttgagcgcgccatcagtcattaccaggaacagcagcagccgcgtaatgttcagcttaacggcccaacgaccgatatcatcggtgaagcgccagccatgcaggacgtgttccggattatcggtcggctttcgcgttcttctattagcgtgctgattaacggcgaatccggcaccggtaaagaactggtcgctcatgccctgcatcgccacagtccgcgagccaaagcgccgtttatcgcgctcaatatggcggctatcccgaaggatttgatcgaatccgaactgtttggtcacgagaaaggcgcatttaccggcgcgaataccattcgtcaggggcgttttgaacaggctgatggcggtacattatttctcgatgaaattggcgatatgccgctggatgtgcaaacgcgtttgctgcgcgtgctggcagacggtcagttttatcgcgttggcggctatgcgccggtgaaagtagatgtgcggattatcgctgccactcaccagaatcttgaacagcgggtgctggaaggcaagttccgtgaggatctgttccaccgcctgaacgtcatccgcgttcatctgccgccactgcgcgaacgtcgggaagatattccccgtctggcacgccattttttacaggttgccgcgcgagagctgggcgtagaagcgaagttgctgcatccggaaaccgaagccgcgctgacgcgtctggcgtggccaggcaacgtgcgccagctggaaaacacctgtcgctggctaacggtgatggccgccgggcaggaagtgttgattcaggatttgcctggcgaactgtttgaatcaaacgtaccggaaagcacttcacacatgcagccggacagttgggcaacgctgttagcacagtgggcagacagagcgctgcgttccggtcatcaaaacctgctttccgaagcacagccagagctggaacggacgttactgaccaccgcgctgcgacatacgcaggggcataaacaggaagcggcgcggctacttggctggggtcgcaacaccctgacgcgtaagttaaaagagctggggatggagtga

SEQ ID NO: 28386 - DNA, 1050 bp, Escherichia coli
atggcaacaggcacgcagcccgatgctgggcagatcctcaactcgctgattaacagtattttgttaatcgatgacaatctggcgatccattacgccaaccccgccgcgcaacaactgctcgcccaaagctcccgcaaattgtttggtacgccgttaccggaactgttgagctacttctcattaaatatcgagctgatgcaagaaagtctggaggcggggcaaggttttaccgataacgaagtgacgctggtcatcgacgggcgctcgcatatcctttctgtgacggctcagcgtatgccggacggcatgatcctgctggagatggcaccgatggataaccagcgccgcttaagtcaggaacagctacagcacgcccagcaggttgctgcccgtgatttagtgcgcggcctggcacatgagattaaaaatccgcttggcggtttacgtggcgcggcgcagctgctcagcaaagcattacctgacccgtcactactcgaatataccaaagtgattatcgaacaggcggaccggctgcgaaatctggtcgaccgtctgttggggccgcagctgcccggtacgcgcattaccgaaagtattcacaaagtggctgaacgcgtggtgacgctggtgtcgatggaactgccgaacaacgtgcggttgattcgggattacgaccccagcctgccggaactggcgcacgacccggatcaaattgaacaggtcttgctgaatattgtgcgcaatgcgctacaggcgctggggccggagggtggtgaaatcattctacgtacccgcacagcgtttcaactgaccttacacggcgagcgctatcggctggcggcgcggattgatgtggaagataacgggccgggcattccgcctcatttgcaggatacgctgttttacccgatggtcagcggccgcgaaggtggcaccgggcttggcttatccatcgcccgtaatttgattgatcagcattcaggcaaaattgaatttaccagttggccaggtcataccgagttctcggtttacctgcctatcaggaaataa

SEQ ID NO: 28387 - DNA, 1410 bp, Escherichia coli
atgtccgctgaacacgtactgacgatgctgaacgagcacgaagtgaagtttgttgatttgcgcttcaccgataccaaaggtaaagaacagcacgtcactatccctgctcatcaggtgaatgccgaattcttcgaagaaggcaaaatgtttgacggctcctcgattggcggctggaaaggcattaacgaatccgatatggtgctgatgccagacgcatccaccgcagtgattgacccgttcttcgccgattctaccctgattatccgttgcgacatccttgaacctggcaccctgcaaggctatgaccgtgacccgcgctctattgcgaagcgcgctgaagattacctgcgttctactggcattgccgacaccgtactgttcgggccagaacctgaattcttcctgttcgatgacatccgtttcggatcgtctatctccggttcccacgttgctatcgacgatatcgaaggtgcatggaactcctccacccaatatgaaggtggtaacaaaggtcaccgtccggcagtgaaaggcggttacttcccggttccgccggtagactcagctcaggatattcgttctgaaatgtgtctggtgatggaacagatgggtctggtagttgaagctcatcaccacgaagtcgctaccgcaggtcagaacgaagtggctacccgcttcaataccatgaccaaaaaagctgacgaaattcagatctacaaatatgtcgtgcacaacgtggcgcaccgtttcggtaagaccgcgacctttatgccaaaaccgatgttcggtgataacggttccggtatgcactgccacatgtcgctgtctaaaaacggcgtcaacctgtttgctggcgacaaatacgcaggtctgtctgaacaggcactgtactacattggcggcgtaatcaaacacgctaaagcgattaacgccctggcaaacccgaccaccaactcttacaagcgtctggtcccgggctacgaagcaccggtaatgctggcttactctgcgcgtaaccgttctgcgtctatccgtattccggtggtttcttctccgaaagcacgtcgtatcgaagtacgtttcccggacccggcggctaacccgtacctgtgctttgctgccctgctgatggccggtcttgatggcatcaagaacaagatccatccgggcgaagccatggacaaaaacctgtatgacctgccgccagaagaagcgaaagagatcccacaggttgcaggctctctggaagaagcactgaacgaactggatctggaccgcgagttcctgaaagctggtggcgtgttcacggatgaagcgatcgatgcgtacatcgctctgcgtcgcgaagaagatgaccgcgtgcgtatgactccgcatccggtagagtttgagctgtactacagcgtctaa

SEQ ID NO: 28388 - DNA, 1824 bp, Escherichia coli
gtgatcgaaaaattgcgtaatatcgccatcatcgcgcacgtagaccatggtaaaaccaccctggtagacaagctgctccaacaatccggtacgttcgactctcgtgccgaaacccaagagcgcgtgatggactccaacgatttggagaaagagcgtgggattaccatcctcgcgaaaaacaccgctatcaaatggaatgattaccgtatcaacatcgttgataccccggggcacgccgacttcggtggtgaagttgaacgtgtaatgtccatggtagactcagtgctgctggtggttgacgcatttgacggcccgatgccgcaaacgcgcttcgtaaccaaaaaagcgtttgcttacggcctgaagccgattgttgttatcaacaaagttgaccgccctggcgcgcgtcctgattgggttgtggatcaggtattcgatctgttcgttaacctcgacgcgaccgacgagcagctggacttcccgatcgtttacgcttctgcgctgaacggtatcgcgggtctggaccacgaagatatggcggaagacatgaccccgctgtaccaggcgattgttgaccacgttcctgcgccggacgttgaccttgacggtccgttccagatgcagatttctcagctcgattacaacagctatgttggcgttatcggcattggccgcatcaagcgcggtaaagtgaagccgaaccagcaggttactatcatcgatagcgaaggcaaaacccgcaacgcgaaagtcggtaaagtgctgggccacctcggtctggaacgtatcgaaaccgatctggcggaagctggcgatatcgtggcgatcacgggccttggcgaactgaacatttctgacaccgtttgcgacacgcaaaacgttgaagcgctgccggcactctccgttgatgagccgaccgtttctatgttcttctgcgttaacacctcgccgttctgcggtaaagaaggtaagttcgtaacgtctcgtcagatcctggatcgtctgaacaaagaactggtacacaacgttgcgctgcgcgtagaagaaaccgaagacgccgatgcgttccgcgtttctggtcgtggcgaactgcacctgtctgttctgatcgaaaacatgcgtcgtgaaggtttcgaactggcggtatcccgtccgaaagtaatcttccgtgaaatcgacggtcgtaaacaagagccgtatgaaaacgtgacgctggacgttgaagaacagcatcagggttctgtgatgcaggcgctgggcgaacgtaaaggcgacctgaaaaacatgaatccagacggtaaaggccgcgtacgtctcgactacgtgatcccaagccgtggtctgattggcttccgttctgagttcatgaccatgacttccggtactggtctgctgtactccaccttcagccactacgacgacgtacgtccgggcgaagtgggtcagcgtcagaacggtgtactgatctctaacggtcagggtaaagcggtcgcgttcgcgctgttcggtctgcaggaccgtggtaagctgttcctcggtcacggtgcagaagtttacgaaggtcagattatcggtattcatagccgctctaacgacctgactgtaaactgcctgaccggtaagaaactgaccaacatgcgtgcttccggtactgacgaagccgttgttctggttccgcctatccgcatgactctggaacaagctctggagttcatcgatgatgacgaactggtagaagtgactccgacctctatccgtattcgtaaacgtcacctgacggaaaacgatcgtcgtcgcgccaaccgcgcaccgaaagacgattaa

SEQ ID NO: 28389 - DNA, 711 bp, Escherichia coli; identical to SEQ ID NO: 8875

SEQ ID NO: 28390 - DNA, 981 bp, Escherichia coli; identical to SEQ ID NO: 8876

SEQ ID NO: 28391 - DNA, 1266 bp, Escherichia coli; identical to SEQ ID NO: 8877

SEQ ID NO: 28392 - DNA, 789 bp, Escherichia coli
atgagtatcatcgaagtgacaggtaatccacgccatgaccaactcgttcatctaatcgcagaacgcggttatatgaatattgaagaactggcacaactgctggatgtttcaacgcaaaccgtgcgccgggatatccgaaaactcagtgagcagggcttgatcacccgtcatcatggaggggccgggcgcgtctccagcgtcatgaataccgcttttgagcaacgggaactttcgctcaccgccgagaaacgggcgatcgctgaggcagtcgccgattaccttcccgaacgctgtaccgtctttatcaccatcggtacaaccgtagaagccgttgccagggcattactcaaccggcgtgatttacgcattatcactaatagcctgcgtgtggcacagattctttataagaatcaggatattgaagtgatggtgccgggaggcactttacgcgctcataacggtgggattatcggcccaggagccgtggattttattgaaggcttccgcgcagattatttaatcaccagtataggtgccattgaacatgacggcaccctactggaatttgatgtcaatgaagcgttagtcgcgagaacgatgattaaacatgcgcggaatacattgttagtggccgatcatacgaagtttaccgcgtctgctgccgtttcaattggcaatgcacggaatgtcagggctttttttactgatgccccgcctcccaattctttctgccagttgttaagtgaagagaatgttgaactggtggttgccgagcaagaagtatcctga

SEQ ID NO: 28393 - DNA, 897 bp, Escherichia coli
atgaccagaattgcatgcgtgggtatcacagttcaggacagaatttattctttgcccactctgccggagggtggcgggaaatatcaggcaaatcattatcttgagattggtggcggcccggcagcaacagccgctgttgcaatcgcaaagcttggcgtggaggttgatttcatcggtcgcatcggcgatgacagttgtggaaataccttacttgcagaacttgagggttggggcgtcaataccgcattttgccgccgatatcctaacgcccgttcgtcgcaatcagcgatcctcgttgatcagcatggcgaacggattatcgttaattatccaagtcctgatctcggtactgatgccgaatggttagaagcgatcgatttctctcgttatgatctgattctggccgatgttcgctggcatagcggtactgaaaaagcattctcgctagcgcgccttgcgggtgtgacaacgcttttagacgccgatatgacaccgcaggatatttctccacttgtcgcgcttgccgatcacgccgtgttctcaacaccagggctgaaacgcatgactggcctgcagtcacctgaagaaggtttgttccaggcaacgacacaaacagcaggtaaagtgtatgttacgctgggttctgaaggatcgttgtggattgaagatggtcatttgtgtcaacaggaggcattttctgtcaatgtggttgataccactggagcaggcgatgtttttcacggcgcactcgcggtagcgttggcagaaaaaatgccaacaaaagaggctattcgttttgccagtgcggttgccgcgatgaaatgtacccagcctggcggtcgggccggcattcctaatcgtgagcaaaccgaatcatttttgtcactttatgcgtaa

SEQ ID NO: 28394 - DNA, 879 bp, Escherichia coli; identical to SEQ ID NO: 4823

SEQ ID NO: 28395 - DNA, 888 bp, Escherichia coli
atgtcatcccacttcaccccatttacgctgaaagatatctcccgcccaggtggtggattcgccatgttagctgtcgatcagcgtgaggccatgcgcctgatgtttgcggcagcagggcagccaaaacccatcgccgacagtgtactcaccgattttaaagttgccgcgacccgaatcctttctccttatgcttctgccgttctggcggataaacaattttgtcttgaacaaatagtcgagcagggcgctgtggctaattcttgcggcctgattgtcgctgccgatctttttatcccaggtaatggcatcccggttgatagcgttgaaatagatatgtccgtcgacccgcataaagcccgtgaaatgggggctaaggcaatgaaattacttgtactctggcgtgaagatgaacccgcagaggaacgtctggcaatggttgataaatttgttcgtcgctgccgtagtgccgggctggttagcattattgaacctgtggtgcgtccacctcgtcgcggttgggactttgatcgtgaaagcgccattgttgccgccgccgcagagcttggtggaacagaggctgatctttacaaagccgagatgccattagggggcaaaggcgatgaaaaaaccttacttgccgcctgtcagcaacttaacgatcagatgaagatgccgtgggtaattctttcttctggcgttgatgccgatatttttggccgtgcagtaagtattgccatgaaaggtggtgcgtcgggcttcctggctggacgagcggtttgggcgtcggttgttggtgcacaagatccacaaaccatgctgcgcgatgtctccgttccacgcttgcaacggctggctgaaattgtcgatgaaggtatcgcgcaacgctaa

SEQ ID NO: 28396 - DNA, 1011 bp, Escherichia coli
atggataaaattacccaggttttattttcagatattgggaaagtcaccactcaatatgttgaagtaccacaccagcaacttaaaccgcacgaagtacggattgcgcccgtgttctacgggatatgcggttcggatctgcatgttctgaaaggcggtcatccgtttgccaaaccgcctgtcgtccccggtcatgaaattgcagcgcgcgttacggaagtgggcagcgacgttaaaaatgtacagccgggcgatcatgttgtggtcgatcccatcatggcttgcatggaatgccgagcctgcaaagcaggacgttttaatctttgtgaaccaccgcaggttgctggtttccgcgcaccgggctttgctcgctcacaacacattgttcctgcgcgtaattgccatgtcgcaccagcctctttaccgctaaaagtgttggcctttgccgaaccggcggcttgtgctcgtcactgcgttaaccgaatgccgaaagcttctctggaaagcgtactggtgattggtgccggaacgataggcttatccatcgtgcaggcactgcgcattatgggggcaggtaagattaccgtgattgaacctgacgctgccaaacgcgcgctggcgttaaagctgggcgcagcagaagtttgggcaccaggtgagctggccgcagatgtgcgatttacgggggcgattgatgtcgttgcagcgcaggccacgcttaacgatgcatgtacccgtgtatatgccggaggcaccgtcgtgtgcatgggcgtaccaagtgggccgcgtgaaataccattaccgatgatgcaacgtttcgagcgtgacttgctcaactctggcatgtacatccctgaagatttcgatgctgttatcgaatggctggcggatgggcggtttgataccagtgaactggttaccgatttatttgccattgaggatgcagcggcggcattcgaacgcgcgcagcaaaatgattccataaaggtcatgctgcaatttgcgccggaatga

SEQ ID NO: 28397 - DNA, 1434 bp, Escherichia coli
atgagtcaaatcaccagtcctgcaacttattcaattagtcggccacaggacgtaattgatattgttaataagaactctgcaatcaacaccagtatcggcgttatttttattgctttgggcggcatattgattgatgcctaccaggcggcgatggtggggtttggtaataaatacattgccgctcaattcggcatttcgccgggtcttgctgcaaccgtcaatgcatcagtattaatcgccgcgttaattggcggtttattagcgaaccgagtaataaaccgctttgggcaaaagcgggcatttattattggcatggggctgtgcaccatcggtgctgcagcggtagctattgctcccagtatctggtgggtgctggtgtgccgcgtcatcatgggctttggtttaggcatcgacttccctttggcaaccaatgccgtggcagagcttcgtggttcaacgtcgaagaaaaccggcacgtcggtcaacctctggcaaatggcctggtatgtttcgacaaccgttgtttatttggtgcttttgccgctgcttctgtcgggtatcgctgaagaacaattgtggcgttacggaatattcatcggagctatttttgcagtcatcttcatgattttgcgttacttctttattggtgaatccgcaatgtgggccgcacgcgtcgggcgttaccaggaagcgtgcgacattctgggaaaacgttatggtgttcaggctcgcgttgcggcatcgggtacaacagaagcgaaattctcggaaaaagcagagaataaatacagtggtggatatggcatcttatttaatgatcgttaccgcaaacgcaccattcttggctgtgtcgtggcaaccatgcaggcgtggcaatataacgccgtaggtgtttatcttcctcttacgttggcgggaataataagtggcgggcttactggcgcgttaaccggttctgccgtcgtgaatgccctttgtggggtgacaggcgggatgatcggctcgtttattctccaacgactgggtactcgccgacagtcgatgtatggatttgctgttgtgaccttagcattgctgtcgttaggcgcactggcaacgactaatccctggctgtctttagggttattgggatcaattattttcttccattcagcgggtcctggtgggctgggcatgaccattgccacactctcttatcctcccgctattcgccctactggggtcggatttgcccgcgctattatgcgcacaggggcaattgcaggactcattttctggccgatgctgtggggtgcgttgaaaactgaagcgttttactggttggcaatcgtgccattcctgggattcctgacctgtgtattgattaattgggaaccactgggtgcaaatgttgatgctgaggacgcagaggttctggctgaattgaagaaataa

SEQ ID NO: 28398 - DNA, 1350 bp, Escherichia coli
atgtctgaaaagttacccgcaccgcgtgaagggctttccggtaaagccatgagacgtgtcgttatgggcagtttcgcaggcgcgttaatggaatggtatgacttctttatttttggcacggcagcaggactggtatttgcaccgctgttttatccagacagcgatccttttataggtcttatagcttcctttgcgacctttggtgtcggttttctgactcgtcctttaggtggcatcgtctttggtcattttggcgataaaatagggcgaaaaataacgcttatctggacgttggctattgtcggttgctccacatttttgattggttttattccgacgtatcaggaaattgggatctgggcaccgctcatattaatggtgctacgtttaattcagggctttggtcttggtggcgagtacggcggagcggcattgatgaccatagaatcagcgcccgaatcccgacgcggatttttaggttcactcccgcaaacggctgcgtctgtgggtattatgctggcaaccggtatttttgctctctgtaaccattttcttacttcggagcagtttctctcctggggatggcgcattccgttttggctttctgcggtgatgttgatcgttgggctgtttatccgcctgcataccgaagaaacgctggattttcaaaagcaaaaaacgacgaataataaagaaaagtccgttcctccgttgattgaattattcaaaaaacatccacgaaatattttattggcactgggtgcgaggctggcggaaagtgtctcctctaatattattaacgcctttggtattgtctatatttccagccaattagcattgtcgcgagatattcccctgacgggtatgttgattgcctcggcgatcggtattttcagttgtccattggttggatggttatcagatcgtataggtcaaaaaagtctgtatttgtcgggagcaggattttgtgtcctgttcgcgtttcctttcttcttattactggatagcaaaagtacgctcatcatctggtgcagtatgatcctcggctacaacttaggtccgacgatgatgtttgccgtgcagccaacacttttcacccgcatgttcggtaccaaagtacgatataccggcctttcttttgcttatcaattttccgcgattcttggcggactaagcccccttatcgcctcaagtttgctggcgctagggggaggaaaaccgtggtatgtcgctctgtttttatttgctgtctcagttctttcctttgtttgcgtctggctgattgagccgaccgatgaacaagaaaccgcttcttaccgctacatcagggaacaatctcatgaaaactga

SEQ ID NO: 28399 - DNA, 888 bp, Escherichia coli
atgaaaactgaacgaaaaaacgagcattacctggcgctacaacaggcgtttgacgcgccatggcctgggcctgtaggagagttagtgatgctggaaaaaggcaatattcacctgcagatttatccgcatgatggtgccaggataacctcgttaaaggcatttggttctgaagtattacgccaatggcagccgcagcgcagagcttttcagtatggctgtttcccaatggtgccgtgggcagggcgactggggaatgcgacgctgaatgctggtgggcaatgttattctttacccgccaataaaccaccacatgcgttgcatggtatggcttgttactcaacgtgggaaatcatcgacaaaacagcagattccctgactttacgtatgcccctggcttcaccgtggccctggcaaggggaagtgattcagacttttttgctggagaacgatgcgctggttttgcaactggaagtccattcatatgccgatacattcccggcctccgcaggctggcatccgtggtttgcgaaaaagctgactccgcaaaatacagaatcgttgcaggtgctttttgatgcggactggcaagaagaagcgggtagtgatgaactgccaactggaaatcgtatctctcctcaagttggtccctgggatgactgttttggtttttatgacggggtgaaggttaagttactgtggcctggtaaactcgcgatgaccatgacctcttctgcaaacagtctggtggtatttgataaacagcccgatgccacctgtattaacccgctgactcaggcacctaacgcaataaatctaacgccggaatttgtgacaccagataagccgctggtcatcgaaactcgttggcaatttacacctgaatcttaa

SEQ ID NO: 28400 - DNA, 600 bp, Escherichia coli
atgctctatatctttgatttaggtaatgtgattgtcgatatcgactttaaccgtgtgctgggagcctggagcgatttaacgcgtgttccactggctacgcttaagaagagtttccacatgggcgaggcgtttcatcagcatgagcgtggggaaattagcgacgaagcgtttgcagaggcactgtgtcatgagatggccctgccgctaagctatgagcagttctcccacggttggcaggcggtatttgttgcgctacgaccggaagtgatcgccatcatgcataaactgcgtgagcaggggcatcgcgtggtggtgctttccaatactaaccgcctgcatactaccttctggccggaggaatacccggaaatccgtgatgctgctgaccatatctatctgtcgcaagacttgggtatgcgcaaacctgaagcacgaatttatcagcatgttttgcaggcagaaggtttttcacccagcgatacggtctttttcgacgataacgccgataatatagaaggagctaatcggctaggcattactagtattctggtgaaagataaaaccaccatcccggactatttcgcgaaggtgttatgctaa

SEQ ID NO: 28401 - DNA, 873 bp, Escherichia coli
atgctaaaaaccattcaggacaaagccaggcatcgtacccgtccactatgggcctggctaaaactactctggcaacgcattgatgaggacaacatgacaaccctggcaggtaaccttgcctatgtgtcgttgctctcattagtgccgctggttgccgttgtttttgcgcttttcgccgcttttcccatgttttccgacgtcagcattcagttgcgtcactttatttttgccaactttctgcctgctactggcgatgttatccagcgatatatcgaacagtttgtcgccaattccaacaaaatgaccgccgtcggggcgtgcgggctgatcgtcacggcgttattgttgatgtactccatcgatagcgcgttgaataccatctggcgcagtaaacgagcgcgacccaaaatttactcgtttgccgtgtactggatgattttaacgctggggccgctgttggcaggggccagtctggcgatcagctcctatctgctctctctgcgctgggcgagcgatctcaatactgtcatcgataatgtgttgcgtatttttccgctgctgttgtcgtggatctctttctggctgctgtacagcatcgttcctaccatccgtgtacctaaccgcgacgcgattgtcggcgcgtttgtcgccgcgctcctgttcgaagcaggaaagaaaggtttcgcgctttatatcaccatgttcccatcatatcagctcatttacggtgtgctggcggtgatccccattctctttgtttgggtctactggacatggtgtatcgtcttgcttggcgcggaaattactgtcactctcggggaataccgcaaattaaaacaagctgctgaacaagaagaagacgacgaaccatga

SEQ ID NO: 28402 - DNA, 438 bp, Escherichia coli; identical to SEQ ID NO: 3029

SEQ ID NO: 28403 - DNA, 942 bp, Escherichia coli
atgtatcaccttcgggttccacaaacagaagaagaattagagcgttactatcagtttcgctgggaaatgttgcgtaagcccctgcatcaaccaaaaggttcggaacgcgacgcgtgggatgcgatggcgcatcaccagatggtcgtcgacgagcagggtaatctggtagcggtaggccgactgtatattaatgccgacaatgaagcgtccattcgctttatggccgttcatcccgacgtgcaggacaaagggttaggcacgctgatggcgatgaccctggagtcggtggcacgtcaggaaggcgttaagcgcgtgacctgtagcgcccgtgaagacgcggtggagtttttcgccaagctggggtttgttaatcagggtgaaatcaccacgccaaccaccacgccgattcgccattttttgatgattaaacccgtcgccactctggatgatattttgcatcgcggcgactggtgcgcgcagctgcaacaggcgtggtacgaacatatcccgctaagcgaaaaaatgggcgtgcgcattcagcaatataccgggcaaaaatttatcaccaccatgccggaaacaggcaatcagaatccgcatcacacgctgtttgccgggagtttattctcgctggcaacgctcactggttgggggcttatctggctgatgctgcgcgaacgccacctcggcggaacgattattctggcggatgcgcatatccgctatagcaaaccgattagcggaaaaccccatgcggtagccgaccttggtgccttaagtggcgatctcgaccgtctggcgcgcggacgaaaagcacgggtgcagatgcaagtagaaatctttggcgacgagacgccgggtgcagtgtttgaaggcacgtatatcgttctgcccgcgaagccatttggtccgtatgaagagggcggaaacgaagaagagtag

SEQ ID NO: 28404 - DNA, 909 bp, Escherichia coli
atggcactggaaaaaggaattgcagagttagtcgaagagtttatcgctgcgggtcgcccctcatcgcgccaacaaagtattacgcagcgcagagagggctatatcgccagcgctgtccttgcgggtgagacagaaacgcgggtagatattcagactatcgaacttgaagggatgaccttacgaatagtgtcaccgctgaatgccccgacattactcccgacgataatttattactacggtggctgttttgttagcggcgggttcgcaactcacgacaaccagctgcgccagttagcctattacgggcaatgtcggattattgccgtccagtatcggctggcaccggaacatactttccccgccgcccatgatgatgcacaacgaggtgcagaattagtccggcaacacgccgaacgactcggcgttgataaacaacgaataactcttgccggtgacagtgcgggcgggcatctggcgctggtaactgctttgcgattgaagcgtgctggcgagtggcaaccagcacaactcatcttaatttatcctatgcttgatgcgactgggcatttcgaaagctacatacgcaatggtcacgattacatcatcacacgcgacactttactgagcggctttgagatgtacctgccaggcattgaacgcaggcatcctgaagccagccctatttggcgcaatgatttcaatggcttgccacctgtacatatcattaccgctgaatacgacccactttgcgatgaaggtgaagcgttgtatcaccgcatgacagggcaaggagtgcaatgcacctgccaacgctaccttggcgttatccacggattttttcagttaggtggtatcagtgaggctgcgcgatcggcgctacgggatgttgcctggagagcgggaaggtaa

SEQ ID NO: 28405 - DNA, 312 bp, Escherichia coli; identical to SEQ ID NO: 3032

SEQ ID NO: 28406 - DNA, 291 bp, Escherichia coli
atggataaggcactttttgagcggttgactcacagcatggcccagatgaatgaaattattgaaggaacgcgacagccttcacggacttttgaagttgatgctatgaaaatcaaagaaatacgccgcgcttcagggttgtcacaatctaaatttgccgatcttatttccgtaagcgtagacacgttgcgtaactgggagcaggggcgacgttcaccgaccgggcctgcaaaggctttgctgcgagcgattgccaatgatccgcaacatgtgctgcaagcacttaaccgttag

SEQ ID NO: 28407 - DNA, 213 bp, Escherichia coli; identical to SEQ ID NO: 3034

SEQ ID NO: 28408 - DNA, 279 bp, Escherichia coli; identical to SEQ ID NO: 3035

SEQ ID NO: 28409 - DNA, 219 bp, Escherichia coli; identical to SEQ ID NO: 3036

SEQ ID NO: 28410 - DNA, 930 bp, Escherichia coli
atgagtattcgcataatcccgcaagatgagctgggttcgagcgagaaacgtacggcggatatgattccgccgttattgttccctcggctcaagaatttatacaaccgccgcgccgagcgtctgcgcgagctggcagaaaataatccgctgggtgattacctgcgctttgctgcgcttatcgcccacgcccaggaagtggtgctgtacgaccatccgctggagatggatctgaccacgcgcattaaagaagccagcgcacaaggcaagcccccgctggatattcacgttctgccgcgtgataagcactggcaaaagctgctgatggcgctgattgctgagctgaaacctgaaatgagcggcccggcgctggcagtgattgagaatctggagaaggcatcgactcaggagctggaagatatggccagcgcactgtttgcctctgatttctcgtccgtcagcagcgataaagcgccgtttatctgggctgcgctgtcgctctactgggcgcagatggctaatctgatccccggcaaagcccgcgctgaatacggcgaacaacgtcaatattgcccggtatgtggctctatgccggtgtccagcatggtgcaaattggcaccactcagggtctgcgttacctgcactgcaacctgtgtgaaactgaatggcacgtagtgcgcgtaaaatgcagcaactgtgaacaaagcggcaaactgcattactggtcgctggatgacgaacaggccgcgattaaagccgaaagctgcgatgactgcggcacttacctgaagattctttatcaggaaaaagaaccgaaagttgaagccgtggcagatgacctcgcctctctggtactggacgcgcgaatggagcaagaaggctatgcccgtagttccattaacccgttcctgtttccgggtgaaggggagtaa

SEQ ID NO: 28411 - DNA, 636 bp, Escherichia coli
atgaaacgacgtgacaccatcgtgcgctacaccgcgccggaacgtatcaaccactggatcaccgccttctgcttcatcctggcggcggtgagcgggctgggctttttgttcccgtccttcaactggttgatgcaaatcatgggcacaccgcagctggcgcgcattctgcacccgtttgtcggcgtggttatgtttgcctcgttcatcatcatgtttttccgttactggcatcacaacctaatcaatcgggatgatatcttttgggcgaagaatattcgtaagatcgtcgtcaacgaggaagtaggtgacaccgggcgttataacttcggtcagaaatgcgttttctgggcggcgattattttcctggtcctgttgctggtgagcggcgtgattatctggcgtccttattttgcgcctgctttctcaatcccggtgatccgattcgcgttaatgctgcattcatttgccgcagtggcgttaattgtggttatcatggtgcatatctacgccgccctttgggtgaaaggcacgattaccgccatggtggaaggatgggtgaccagcgcatgggcaaagaaacatcacccgcgctggtaccgtgaggtccgcaagacaacggaaaagaaagctgaatga

SEQ ID NO: 28412 - DNA, 903 bp, Escherichia coli
atggcttatcaatcgcaagatatcattcgtcgttccgcgactaacggtctgacccccgcgcctcaggcgcgggacttccaggaagaagtggcgaaactcatcgacgttaccacctgtatcggctgtaaagcctgtcaggtggcgtgttcagagtggaacgacattcgcgataccgtcggcaataacattggggtgtacgacaaccccaatgatttaagtgccaaatcgtggacggtgatgcgattctcggaagtggagcagaacgacaaactggaatggctgatccgcaaagacggctgtatgcactgttccgatccaggctgcctgaaagcgtgcccggcggaaggggcaattattcagtatgccaacggtatcgtcgacttccagtccgagcagtgcatcggctgcggttattgcattgcgggctgtccgttcgacattccgcgcctcaacccggaagacaaccgcgtctacaaatgtacgctgtgcgttgaccgcgtggtggttgggcaagaaccggcctgcgtgaagacctgcccaacgggcgcgattcacttcggtacgaaagagtcgatgaaaacgctggcgagcgagcgcgtggcggagctgaaaacccgtggttacgacaatgcgggtttgtacgacccggcaggcgtcggtggtacacatgttatgtacgtgctgcaccatgctgacaagccaaatctgtatcatggcttgccggagaacccggaaatcagcgaaaccgtgaaattctggaaaggcatctggaaaccgctcgcagctgttggctttgcggctaccttcgcagccagtatcttccactacgtgggtgtcggtccgaaccgtgcggatgaggaagagaataatctgcacgaagagaaagacgaggagcgcaaatga

SEQ ID NO: 28413 - DNA, 2415 bp, Escherichia coli
atgaccaaccactgggtcgacatcaagaatgccaacctcgtcgtggtgatgggcggtaacgccgctgaagctcacccggtcgggttccgctgggcgatggaagccaaaattcacaacggcgcgaagctgattgtgatcgatcctcgctttacacgtacagcggcggtggctgactactatgcccctatccgttccggtactgacattgctttcctgtcaggcgtattgctgtacctgctgaacaatgaaaaattcaaccgcgaatacaccgaagcctataccaacgccagcctgatcgtgcgtgaggattacggctttgaagatggcctgttcaccggctacgacgcggaaaaacgcaagtacgataagtccacctggacttacgaactggacgaaaacggcttcgccaaacgtgatactaccctgcaacatccacgttgcgtgtggaacttgctgaaacagcacgtttcccgttatacgccagatgtggttgaaaacatctgcggtacgccaaaagacgcgttcctgaaagtctgcgaatacatcgccgaaaccagtgctcacgataaaacagcgtcgttcctctacgccctcggctggacgcaacactccattggtgcgcaaaacattcgtacgatggcgatgatccagctgctgctcggcaacatggggatggcaggcggcggcgttaacgccctgcgcggtcactccaatattcaggggctgacggacctggggctactgtcgcagagtctgccaggttacatgacgctgccaagcgagaagcagaccgatctgcaaacttaccttaccgccaacacgccgaaaccactgctggaaggccaggttaactactggggcaactacccgaaattcttcgtctctatgatgaaggcattctttggtgataaagcgacggcggaaaatagctggggctttgactggttgccgaagtgggataaaggctacgacgtcctgcaatacttcgagatgatgaaagaaggcaaggtcaatggctatatctgccagggctttaaccctgttgcctcattcccgaacaaaaacaaagtgatcggctgtctgtcgaagctgaaattcctcgtgactatcgacccgctgaacactgaaacctctaacttctggcagaaccacggtgagctgaacgaagttgactcgtcgaagatccagaccgaagtgttccgtctaccatcgacctgcttcgcggaagagaacggttctatcgttaactcaggtcgctggttacagtggcactggaaaggtgcggacgccccggggattgcgctgactgatggcgagatcctctccggtatcttcctgcgcttgcgcaagatgtatgccgaacagggtggcgcgaacccggaccaggtgctgaacatgacctggaactacgccattccgcatgagccatcttcagaagaagtggcaatggagagcaacggcaaagcgctggccgatattaccgacccggcaaccggtgcggttatcgtcaagaaaggccaacaacttagctcgttcgcccaactgcgcgatgacggcacaacctcctgtggctgctggattttcgccggtagctggacgccggaaggcaaccagatggcgcgtcgtgataacgccgatccgtctggcctcggtaacacgctgggctgggcatgggcatggccgcttaaccgccgcattctgtataaccgcgcctccgcagatccgcagggtaacccgtgggatccgaagcgtcagttgctgaaatgggacggcactaagtggaccggctgggatattccggattacagcgcagcgcctccgggcagcggcgtagggccgtttatcatgcagcaggaaggcatgggacgtctgtttgccctcgataagatggcggaaggtccgttcccggaacactacgagccgtttgaaacgccgctgggaactaacccgctgcatccaaacgttatctcgaatccggcggcgcgtatctttaaagacgatgccgaagcattaggtaaagccgataagttcccgtatgtcggaaccacctatcgtctgaccgagcacttccactactggaccaaacacgcgctgttgaacgcgattttgcaaccagagcagtttgtggaaatcggggagtcgctggcgaataaacttggcattgcccagggcgatactgtgaaagtctcctccaaccgtggctatatcaaagccaaagcggtagtgaccaaacgtattcgcacgctgaaagcaaacggcaaagatatcgataccatcggtattcctattcactggggctatgaaggtgttgcgaaaaaaggctttattgccaatacgttgacgccattcgtcggtgatgcgaacacgcagacgccggagtttaagtccttccttgtgaatgtggaaaaggtgtaa

SEQ ID NO: 28414 - DNA, 588 bp, Escherichia coli
atgcaggtcagcagaaggcagttctttaagatctgcgctggcggtatggcaggcaccacggcagcggcactgggttttgcacccagcgtagcactcgcggaaacccggcagtataaactgctgcgcacccgcgaaacccgtaatacctgcacctattgttccgtaggctgtgggctgttgatgtacagcctcggtgacggagcaaaaaacgccaaagcatctatcttccatatcgaaggtgacccggatcacccggtcaaccgcggagcactttgtccgaaaggcgctggcctggtggatttcatccactccgaaagccgcctgaagtttccggaataccgtgcgccaggttctgataaatggcaacaaatcagttgggaagaggcgtttgatcgcatcgccaaactgatgaaagaagaccgcgatgcgaactacattgcgcaaaacgccgaaggcgcgactgttaaccgctggctctccaccggaatgctgtgtgcttccgcgtcgagcaacgaaaccggctatttaacgcaaaaattctcccgcgcgctgggtatgctcgcggtcgacaaccaggcgcgtgtctga

SEQ ID NO: 28415 - DNA, 834 bp, Escherichia coli
gtgaaaaaaacacagcaaaaagaaatcgagaatgtgacaaatatcacaggtgttcgtcaaattgagttatggcggcgtgatgatttacaacacccacggttagatgaggtggcggaagaagttcccgttgcgctggtctacaacggcatttcgcacgtggtgatgatggcgtcgcccaaagaccttgagtactttgcgctcggtttttcgctttccgaaggaattatcgaaagcccgcgcgatatcttcggcatggatgtcgttccttcctgtaatggcctggaagtacaaattgagctttccagccgccgctttatggggttgaaggagcgccgccgggcgctggcgggacgtacgggctgtggcgtatgcggtgtagaacagcttaacgatatcggtaaaccggtgcagccgctgccgttcacccagatgtttgatctcaacaaactggatgatgcattacgtcatctcaatgatttccagccagtggggcaactgactggttgtactcacgccgctgcctggatgttgccatctggcgaactggtcggcgggcatgaagacgtgggtcgccatgtggcgctggacaaactgttaggccgccggtcacaagaaggggaaagctggcagcaaggtgcggtgctggtttccagccgtgccagttatgaaatggtgcaaaagtcggcgatgtgcggcgtagagattttgtttgcggtgtctgccgcgaccacacttgctgtagaagtggctgagcgctgtaatctgacgctggtgggcttttgtaaaccgggtcgggcaacggtttatacccatccgcagcgtttgagcaattaa

SEQ ID NO: 28416 - DNA, 555 bp, Escherichia coli
gtggcgttaacgcctgcgctgcaacctattgatggcgtggcggtgagttatattgatgctgccgtagcgttgggtaataccattaacgaaatggataaatattacacccaggaaaattataaagacgatgcgtttgcgaaagggaaaacattccactactactctctggcagtcatgatttcagcgaaacaaattaataacctgatatcgcaagataagtttgatgcagaagcggcaatgaagaaagtgtctgaactggaaacgctggtggcgcaagccaaagaagcggataaaagcggcatgaatttctcgtttattaattcggcaggccagtatcaactcgaggctaaaaaatacgttcgccgcatcagagataaagtcctgcactctgactgggataaagagcaacttcaggacgcaaactcaagctggatggccgaagactcatttccacgagcgttatgcgattacaacgaaatggtcgatgaaatattacagttaattgtaatcgcggggcgggtttgtgatgagcacggatatgtcacgaagtcgtaa

SEQ ID NO: 28417 - DNA, 1374 bp, Escherichia coli
atgaaaaaatcgacattatctttagccatcggtttattattggcatgtagtaccggtatggcaaaaacacagcatttaacgctggaacaacgcctggaagcggcagaaatgcgggcagcaaaagcagaggggcaggttaaacagcttcagacacaacaagccgccgagatccgcgaaattaaaaccgcacagggcaacacgccggtaaacggtcaatcaacgacggagtcagagaagaaaaacgccaccccgcctaatctcctgctttcagggtatggcgatttaaaaatctacggtgacgtagaatttaatatggatgcggaaagtaatcatggcctgctggcaatgaccaacgctgatgtgaatagcgatcccactaatgaacagtggaatctcaatggtcgtattctgttaggttttgatggtatgcgaaaactggataatggctatttcgctgggttctccgcacaaccgctgggggatatgcacggttcagtaaatatcgatgatgcggttttcttctttggcaaagaaaacgactggaaggtcaaagtaggccgttttgaagcctacgatatgttcccgctgaatcaggatacctttgttgaacattccggtaatactgcgaacgatctttatgacgatggcagcggttatatctatatgatgaaagagggccgcggacgttctaacgctggcggtaatttcctcgtcagcaaacaactcgataactggtattttgaattaaacacgttactggaagacggaacatctttatataacgacggtaattatcatggacgcgatatggaacagcagaaaaatgttgcttatctgcgtccggtaattgcctggtcgccgacggaagaattcaccgtttccgcagcgatggaagcgaatgtggtaaataatgcttatggttataccgatagcaagggtaattttgtcgatcagtccgatcgtaccggttatggcatgagtatgacctggaatggcctgaaaaccgatccggaaaatggcatcgtggttaatcttaataccgcctatttagatgctaataatgaaaaagatttcacggcagggattaacgcgctgtggaaacgtttcgagctgggttatatctatgcacataataagattgatgaatttagtggcgtggtttgtgataacgattgctggattgatgatgaaggaacatacaacattcacaccattcatgcgtcttatcagttcgctaatgtgatggatatggagaactttaatatttacctcggcacgtattactccattctggatagcgacggcgataagatacacggcgacgatagtgatgaccgttacggcgcacgcgttcgctttaaatacttcttctga

SEQ ID NO: 28418 - DNA, 315 bp, Escherichia coli
atgatccgcaaagcctttgtcatgcaggtaaaccccgacgcccacgaagagtatcagcgtcggcataatcccatctggccggaactggaagcagtgctgaaatctcacggtgcgcataactacgccatctatctcgacaaagcgcataatctgctatttgccacggtagagattgaatctgaagaacggtggaatgcggttgccagtacagatgtttgccaacgttggtggaaatatatgaccgacgttatgcccgctaatgcggataacagcccagtcagtagcgaactgcaagaagtgttttacctgccttaa

SEQ ID NO: 28419 - DNA, 1821 bp, Escherichia coli; identical to SEQ ID NO: 10034

SEQ ID NO: 28420 - DNA, 681 bp, Escherichia coli; identical to SEQ ID NO: 9059

SEQ ID NO: 28421 - DNA, 786 bp, Escherichia coli
atgagtacagcactcgcaacgctggcagggaagctggctgaacgtgtcggcatggattctgtcgacccacaggaactgatcaccactcttcgccagacggcatttaaaggtgatgccagcgatgcgcagttcatcgcattgttgatcgtcgccaaccagtacggccttaatccgtggacgaaagaaatttacgccttccctgataagcagaacggcattgttccggtggtgggcgttgatggctggtcccgcatcatcaatgaaaaccagcagtttgatggtatggactttgagcaggacaatgaatcatgtacatgccggatttaccgcaaagaccgcaatcatccgatctgcgttaccgagtggatggatgaatgccgccgcgaaccattcaaaacccgcgaaggcagagaaatcacggggccgtggcagtcgcatcccaaacggatgttacggcataaagccatgattcagtgtgcccgtctcgccttcggatttgctggtatctatgacaaggatgaagccgagcgcattgtcgaaaataccgcatacactgcagaacgtcagccggaacgcgacatcactccggttaacgatgaaaccatgcaggagattaacactctgctgatcgccctggataaaacatgggatgacgacttattgccgctctgttcccagatatttcgccgcgacattcgcgcatcgtcagaactgacacaggccgaagcagtgaaagctcttggattcctgaaacagaaagccactgagcagaaggtggcagcatga

SEQ ID NO: 28422 - DNA, 573 bp, Escherichia coli
atgctgcgtctgcggcgggccggagagataaacggagaacatgtccctgaaatcattctgctcaactcccatgacggtacctccagctaccagatgctgccgggttacttcaggttcgtctgccagaacggatgcgtctgtggtcagtctctgggggaagtgcgtgttccgcaccggggaaatgtggtggacagagtcattgaaggggcttacgaggtggtgggcgtgtttgaccggatagaggagatgcgtgatgccatgcagtcgctgattctgccgccaccggcacgccaggcgctggcacaggcggcactgacttaccgttatggtgacgaacatcggcccgtcaccaccgccgacattctgacgccacgacgccgggaggattacggtaaggacctgtggagtacttatcagaccatccaggagaatatgctgaaaggcgggatttccggtcgcagtgcaaaaggaaaacgtatccacacccgtgccattcacagcatcgacaccgatattaagctcaaccgcgcattgtgggtaatggcagaaacgctgctggagagccagcgctga

SEQ ID NO: 28423 - DNA, 261 bp, Escherichia coli
ttgcattaccttgccgaccgcgccggtatcaggggccggttcagcaatgcggatgcataccatctggaccaggcttttccactgctgatgaaacaactggaactcatgctcaccagcggtgaactgaatccccgccatcagcataccgtcacgctgtatgcgaaagggctgacctgcgatgccgacaccctcgggtcctgtggttacgtttatctggctgtttatcctgcgaccgaaacggaaagtaaccctccggaatag

SEQ ID NO: 28424 - DNA, 249 bp, Escherichia coli
atgaattatatttttaacggttatagattttacttattaccagtagaatcaataagtagcctgtcatcgatttatgaatgtatgtttagtggcaggttgttgtttgggaactctccacataaattaaccatgaatgagatgattatactattctattatgttttccatgggtggaatgtagcaagtattgcttatcagtttggtatgagttcaaagactgtgtatactctgtctcttatacacatctga

SEQ ID NO: 28425 - DNA, 174 bp, Escherichia coli
atgaaacaactggaactcatgctcaccagcggtgaactgaatccccgccatcagcataccgtcacgctgtatgcgaaagggctgacctgcgatgccgacaccctcgggtcctgtggttacgtttatctggctgtttatcctgcgaccgaaacggaaagtaaccctccggaatag

SEQ ID NO: 28426 - DNA, 318 bp, Escherichia coli
atggatgatccaagaaattcactttttatgcattataaatctctcttaaatgagataaaaccaaacggttttatttttgaaaatgttgctggtttgttgaatatggaaaaaggtaaggtctttgaaagagtcaaagaagaattctcatcaaccatgaaaactatgaatggatggatattaaactctgaacattatgcaatccctcagcgccggaaaataaatcgatataataaccagtattacctatcgccttctctatttctttcgcaatcagaaaagctaaaaatgggggcactgcattaccgatttgggtattaa

SEQ ID NO: 28427 - DNA, 690 bp, Escherichia coli; identical to SEQ ID NO: 10368

SEQ ID NO: 28428 - DNA, 1215 bp, Escherichia coli
atgttgttaactaagttagctaaaaaaatatgccaatccaaagaatatattaacggaatttctctatacaaaaaaaaagaatgggagaaggcattattgttctttgagaaatcaatcataaaaaaaacaaaacatgcggagagctattttaaagcaggaatatgcaatcttaaattgcatagatatgaagaggcatttaaatatataagtaaagcattagaattggaaccctcaaatatacagtggaaagaacaactcgaacagtgtgcaaggcatcttgataagttaaataatcatatggtgagcaaatcatctactgaagaagatttattaagggaaaaacttaatacagactttaataatccaaaattacacgatagacttgctgaggttcttcataaaaaagggcgttggtggcaggaagttgatacgctgaaaaacgcaataaaattagatccttcaatacctgaacgttatttcaaacttggcaccgcattagaaaagatggggcgttttaatgaggctagtatatattataaaaaaggacttgaatttaataaaaaacatgatgctatttggtattatgcactcggatattcgcttgaatctgatgaaacaaacaatgtagaaaatgtccgtagttctaaaatagcatatgcgacagctatatcgttagacaaaaaattaaatagtaataaatttggaataggagcatttcatcaatataagggacgctgggctaaggctattgatgcgtatgaaaaacatacatccataaatccattatgtgcagagctatattataggctcggattatcttatgatagatgttatcaatgggataaagccgcagagaattatcgcaaggcattatcactcgatgaaaatcatccttattggcattataggctagggtttgttttagagagaagtcaaaagtatcttgatgctgctgttgcttatcaatttgcagcacaaagcaatatcaaacatatctcgatttggtactatagatctgggtacgcatatgctaaggctaataaatacaggcaatcctgtgaaatgtatataaaagcatatgactcttctcaggtaattcatttagaggaaaatacaaccctctctcattattatattgctcaatatcatacgcatagtaaattactggtctattcattacaaaaaaatcgaaagcaatacttgaataatctgtga

SEQ ID NO: 28429 - DNA, 231 bp, Escherichia coli; identical to SEQ ID NO: 15042

SEQ ID NO: 28430 - DNA, 231 bp, Escherichia coli; identical to SEQ ID NO: 15042

SEQ ID NO: 28431 - DNA, 915 bp, Escherichia coli; identical to SEQ ID NO: 11095

SEQ ID NO: 28432 - DNA, 228 bp, Escherichia coli
atgcccgtctggtctcattacttggaatggcgacgtaaaccgccgagccctgtgcagcgcgtttccgtattatccaccgacgagaaggttgcattatttcgtcggttgtttcgtgggcgtgatgatatatgggcccttcgatgggaaagcaaaaccagcggcaaatcagggtacttgcgggcctgtgctaacgaatggcagccgggaatagcggtaaactccggataa

SEQ ID NO: 28433 - DNA, 861 bp, Escherichia coli; identical to SEQ ID NO: 5314

SEQ ID NO: 28434 - DNA, 2382 bp, Escherichia coli; identical to SEQ ID NO: 17730

SEQ ID NO: 28435 - DNA, 1302 bp, Escherichia coli; identical to SEQ ID NO: 17731

SEQ ID NO: 28436 - DNA, 588 bp, Escherichia coli; identical to SEQ ID NO: 17157

SEQ ID NO: 28437 - DNA, 495 bp, Escherichia coli; identical to SEQ ID NO: 17159

SEQ ID NO: 28438 - DNA, 456 bp, Escherichia coli; identical to SEQ ID NO: 12502

SEQ ID NO: 28439 - DNA, 222 bp, Escherichia coli; identical to SEQ ID NO: 8150

SEQ ID NO: 28440 - DNA, 747 bp, Escherichia coli; identical to SEQ ID NO: 22330

SEQ ID NO: 28441 - DNA, 354 bp, Escherichia coli
atgactagtctaaaaactagtattaagactatcacttatttaagtgatattggttgtctggagattcagggggccagtctaagtagttatagcaatatgatttccgtgcgtctgaaggacccgcgcggtgctggttatacgcaactatggctaagccgcggaacaggtgcttacacctacgactggacgccagaaacacgctacggcagcatgaagagcatcagtttgcaacgtattcaaccgctgactgagcaacttaatctcgggttgacggcaggtaaagtgtggttcaacaccccaaccgatgattataacggtctgcaacttgcagcccacctgatctggaaattctag

SEQ ID NO: 28442 - DNA, 144 bp, Escherichia coli; identical to SEQ ID NO: 9158

SEQ ID NO: 28443 - DNA, 444 bp, Escherichia coli; identical to SEQ ID NO: 9157

SEQ ID NO: 28444 - DNA, 417 bp, Escherichia coli
atgcagctctgtattcgcacaaataaaagaatgcaggataatatatctgaatttctgggggggtatggaataaatcactcagcatatatggttctcaccacattattcgcagcggagaaccattgtctgtcaccttcagagataagccagaaacttcagtttaccagaactaatattacccgcattacagattttttagaaaaagccggatatgtaaaaaggacggatagcagggaggatcgccgtgctaaaaaaatcagtctgacatctgaaggtatgttttttattcagaggctcactcttgcacaaagcatgtatctgaaagaaatctgggattatctgacccatgatgaacaggaactgtttgaagtcattaataaaaagttactggcacatttttctgatgccagctcataa

SEQ ID NO: 28445 - DNA, 474 bp, Escherichia coli
atgaaaacattgtctcagaacaccacctcttcggcctgtgcaccggagactggcctgcaacaactggttgccaccatagtccctgatgaacagcgcatcagcttctggccgcagcattttggcctcattccacagtgggtgaccctggagccccgtgtcttcggctggatggaccgtctgtgcgaagactactgcggtggtatctggaatctgtacaccctgaacaacggcggcgcatttatggcacccgaaccggatgacgatgatgacgaaacatgggtactgttcaatgccatgaacggtaaccgcgctgaaatgagcccggaagccgccggcattgctgcctgtctgatgacgtacagtcatcacgcctgccgtacggagtgttatgccatgacggttcattattaccgtctgcgggattacgccctgcagcatccggaatgcagcgccattatgcgcatcatcgactga

SEQ ID NO: 28446 - DNA, 660 bp, Escherichia coli
atggtagagactaaacgtagcagcctgaaaggttttctttccttgcctcaaaagctaataaagattcgtgcggctaagcgtaaaggcaaatttgatcacccccctcttaactgtagtgtcaagaagcaattgcttgaaagtgttggtgtttataatgaggtaaaacatgataatgagattagttggcctgtctttgaatcacatgcacatttgcgaaatcagcatatcaatgttgtaacgatctgtgataagtttacttatgaatgctttcgctatgaggcaaactttattccgttaaccaagcaaaattggaaatcagagattgacgaatcacacccagtaatgttatttcttgaatcagcttggaatggtaataatggtgagtggacatataccatggtgagttataaaaaacatttgggtgatccacttcgcaaagttatcaaatactgtcaatccaagaatattcctgtagtattttggaataaggaggatccaaccaactacgaagtctttattgatgttgcagctgattgtgactatatattcacaactgatgggaatatcttagaaaaatacaagtctcgtgttggacataatagagtatacgcacttccttttgcggcacaatcagctgcaacatcaataaagacttcgtag

SEQ ID NO: 28447 - DNA, 486 bp, Escherichia coli
atgacaacctcttcgcataattccaccacaccttctgtttccgtggccgctgcatcagggaataaccagtctcagttggttgccactcccgtccctgatgaacagcgcatcagcttctggccgcagcattttggcctcattccacagtgggtcaccctggagccccgtgtcttcggctggatggaccgtctgtatgaagactactgcggtggtatctggaatctgtacaccctgaacaacggtggcgcatttatggcacccgaaccggatgacgatgatgacgaaacatgggtactgttcaatgccatgaacggtaaccgcgctgaaatgagcccggaagccgccggcattgctgcctgtctgatgacgtacagtcatcacgcctgccgtacggagtgttatgccatgacggttcattattaccggctgcgggattacgccctgcagcatccggaatgcagcgccattatgcgcatcatcgactga

SEQ ID NO: 28448 - DNA, 132 bp, Escherichia coli
atggctgaatggaatggctattattgcacggtccttaattataacattcataccgacatgattatcttctgtccggaagaatcagaggctgcggtttcagactgtctgccggtacattcctctctccgttaa

SEQ ID NO: 28449 - DNA, 312 bp, Escherichia coli; identical to SEQ ID NO: 9190

SEQ ID NO: 28450 - DNA, 324 bp, Escherichia coli; identical to SEQ ID NO: 10127

SEQ ID NO: 28451 - DNA, 129 bp, Escherichia coli
atgttcttaaacggtgaagagggttttatcgagaagaacaaacaaaaggcgctgcactggttgaacctgagctgtatggaagggtttgataccgggtgtgaagagtttgaaaaattaaccaacggttaa

SEQ ID NO: 28452 - DNA, 2424 bp, Escherichia coli
atggcgaaaaatgactttaaagcgtttgcaacggatcgaaatgccaatgttatatcgcaggaggaatgggaagcgttgcccgcgcttttatccggatttacagcagggaaagcctccagtgcgcaagtcaataaggttattcggcaggccagctttattgctgcagctctggcccagtttgtaagtgataaaacgcaacgggatgtgcttgataatggtgatctgcccggttttgttgaattgctgggatcggggtttgctgttgaatacctgagccgcaagaatccgtttggtgatatcaaatcggatggcacggtagaacgcgctcttgaaaatctggggttacaggatgtaaaagctggttcattgaacaatctgtacactaaccattcccgtagtgtcttaatggaattgccgttattattcccggactacgatacggtgctggctgctcagtctggtgcggaatatatgtatccacagggatttgtggtgacaggagaaaaaatctatctgagttataccgttgagccaaagcagacacggaacgttatagttcagtacacaacatccggcgaatatgagggatattattatgtcgataatggaggtcgtggcgttgtcagcgaaggccttgtggtgacaacggattacggtggattacgtttgttcatgtcaggagaaaatggattactgaaacagttttcgcttgatggggcaattcctggttcagtattgccgttaattgatgaacatgatgtcggtgtttacaaccagttcagctatcgtaaaaaccgctgggtggttgaacagtcagcgccggaagtaggaggcctgatcacccgcacagtatttgcggtgtatgattttcagtttcgtcggacagggacattcacattaccgttgcatgattccggatatatcacggaaagcacagacagctatgcaagacgcttcacaaaacgtcagggaattgctgtgggagacgattatattgcctgttcttatggtggctattttaataccggggcatcagccggatttaaccagtttcagggggttaaggtcttttctccggatggagtaaagcagcaggaatccattcttcatccccaaaaaatgatagatgtgcttaccaggcagggttttacaccttcgcgcattgagaacgaaggaatttgtatttctgacgacggcggcagtatatattcgctttatatctttctggagcgtgggttaccacaggcttatcagaaaggaattgttctgatgaaagagttcagtactggcagagatgctattgattttcgtcaggcagcctggttgtacacggggtttgatgtgtctcatgccagtattggaacatttccccgtagtgcccaggggttggtaaacccggtgttggggacggtattcacatccctgtctgaaattctggcatatatgcgttctgtgagtcagaaatggttttgtctgcatacaaccacgacaccgattaaagatctgagtggaaatgacattcctgctgacaattatgtgttcatcaagaatgctaataaccagacattctatataacgcaggagtcagctgaaggtggaataaaatataaagctgtcactacagacagcggagaatatggttttcagcgacaaagagaggcaatctggtccaatgttatcaccatcgcacaaaagagcgatggtgaggatcagtttaatcgtattatcgctgcctcgaaaagtggttcaggtaaaaatcaggataaaatactggtagttgaccaacaggcatcagaggggaataacacgctggtaattggcggtggttcatctgtgttcaggtcagcgacagtgattgattttgcaacgaatcaggatgcaaatgccacaggaggagaaaagagatggcgcatagattcatcaggaaatctccgcccttatacagataatacgtattcgatcggttatgcctcatggcgacccgcacaggtttattcagctacgggaagtatcagtacatcagaccggactcataaacaggacgaaacaattctgtcggatgcagaaaaaagggttgccagaaagctgctcgggtatatctgtcggttccgtttcagggatgcagtgtccagcaaagggaacgcagccagatggcatgtaggagtgattgctcaggacgtacagaaggtcttctctgaggaagggctggacgcttttgattacggtattttgtgtcgtgatgaatatccggcagaatatgaagtggtttacgggactcgtatggagcttggtcctgacggactccttacaatggaagaatacgataccggagagcgcaagctggtcagggaggctggtgaaataatgtctgtaaggaatgatgagctgcattatttcatgctggcatcgctgtctggccagtga

SEQ ID NO: 28453 - DNA, 753 bp, Escherichia coli
atgcccgtttctttaagcgctcaacttggtagcaaagaacaggccgatgtaagacttgctggctctgtcatgtcggcgctgcgtgtttctatgcccggcatcgtccagtcatttgatccggacacggtaacagtggttgttcaacctgcgattaaaggctatgagccggactcaaatggaatcaaccagtcgacgacattacccctgctggtggatgtgccagtggtatttccgcgcggcggaggctgtacgttgacttttccagttaaagccggtgatgaatgtttggtgatttttgccgatcgttgtattgatttctggtggcagagtggcgggatacaggagccggtcgatgacagaatgcatgatttatcggatgcgttttgtattgtcggtccccagtcgcaggcaaggaagattagcggtattaataccagtgccacacagttgcgtagtgatgacggcagcacctattttgagcttaatcctgataccaggaaaattaaaattgtcgctccggggggccttgatgtggttgcccctctggctgatttttctgagaaagtaaccattcatggcctgttaacctggatgggaggtatggtggggtctgttgtttctggcgtggcttcaaaaatcactggtgctgttgagttcttggggagcgttaaggctaacggcaagccaatcgatgatacgcacactcatggcggtgttcagcgcggtggaagcagtaccgacggggtaaactga

SEQ ID NO: 28454 - DNA, 219 bp, Escherichia coli
atgttcggatttgataaattaataactccaaaaatcatcaacgttctgtatggcatcacaatgttacttctggttgttgccgccattataacgtttgttaatgggaaggctgctggcgctttagtgcttttgtgcttttgttatgtgctgtattttgccgaatattctttgagtgcatcatggtttcatttaaaaacaatgagtatcttcgccgaatag

SEQ ID NO: 28455 - DNA, 336 bp, Escherichia coli
gtgaaaaaagtatttttttgtttattcttggccctgccgttaacagtttcggcggcaacgcagtgcggaccattccgctttgatgctggtaatgatggcctcatgcacatcaatggtcaaaagccagaaacacaaaaaatgacctttttgaaacaaaaagacgatttcgataatgtcatgatgcaatggatgttacctgatcctaatactggacgttggttaggtatggactacatcaaacgaaacaaaaaagcgatcctcaacgttgaagttatccgcaaaaatatggacgagcctcgggagttctggacgtatgattgccggaaggtgaagtga

SEQ ID NO: 28456 - DNA, 1035 bp, Escherichia coli
atgtcgaaaaactggatgcgtcactttgaattattgcttgttgatgataagggcgacgggataaaaatttctgagcttaaagtcactttcaatattcagaaaatgcctgcgaccatatttaatggattcgttggaaattttaaggtttataacctgtctcctaccactcagaaccggattatgcagaaggagttttcgcgtatacaggttattgccggatacaaggggcaaccggatgcagcaggtaattatcctgatgaaaacgttggtatgatattcaatggagatatccgttttactgtcactggtaaagataatgccacagacagttggatcatgttgcagtgtattgacagctgggaaggccacctgaacgcaagtgtgaaaaccacagtggcagctggctggaagtacagagatcttttcagtctgggtatgaaatcattcgaaccatatggcatcgaatccggcgcagttcctgacatgcctgaaacggtatttccccggggtcgcgttgtttatcaaaacacatcaaggttgatgaatcatatcgcagggcagtgtaaggctaactggtggtatgaaaataatctggtaaatattgttcctgaagataaatatattggtgttgctacggtgttgaatgctaacaccgggcttatcggtatgccacagcagacgatgggagctggcgtaaatgtcagatgcctgattaatccaaatattaagctcggtgggcttattcgtctggatcaggcatctgtataccgtgcctctttgagtaatgaccaggtagcgaaatcgccagcacgactggatgagtctgaaagcgacggtaatctctacgttaacggtctggcaggcatgtcacagcctgccagcattaatactgacggtgattacattgtgggcagcattgattatactggcgacacccgagggcaggcgtggtatatggacctgctttgcctggctaaaggtggcaaagaactattggcaaaaggcactttggacaaagtcggagatgtagagtga

SEQ ID NO: 28457 - DNA, 303 bp, Escherichia coli
atgcaagccgtagaaatcccactggttgctgacaatcagacttttgccaccacaattaacggttcggtttatcacctgtctgtcatctggcgaggcgagtactgggttctggatcttgctgacagcaatggctccgccattatatcaggtataccgatgattactggggctgacctgctggcacagtatcgatatatggatctgggtttttctctggtggtgctctgcgacgtggcagggcaggagaatccgacgcaattcgatcttggaacgctctcacacctctatgttttcacggagtaa

SEQ ID NO: 28458 - DNA, 651 bp, Escherichia coli
atggactttttatctgttttactgcagcagcgaacccgctcaataggaatcattattcctgatgtggttattaccgaaaagcacactgacgccctggaaattacggaacatccggttgaacagcccacgaatgctggtgccagtggtgagggcgctggttatatatcagaacacgcattcaggcgcccttctgaggttgtgatggaaaccggtttttccggaggcggatcgctgcttgattttgccagtaacctgacggctaccagtttactggggctgagcccgaaagaactgtatcaggaactgcttaacctgcagcggaatcgtattcctttcgatgtgacaaccggcaagcgtatttacaacaatatgttgataaaaacgctggaggttacgaccgataagagtagtgaaaatgtgcttctggcgacacttaccctcagggaagtaattattacctccacgcagtcagtcagggttgccccgaaaaacaatatgaccgagggagtcggaacgtctgctgtgcagaatacaggcaccaaaacaacggtgctgccgaataattccattctgaaatcgctgccacagatggcgcaagaaggtatctccactgttgatgggtatttgagcaatttatttctgggaaggtga

SEQ ID NO: 28459 - DNA, 435 bp, Escherichia coli
atgattactaatggatggtattacctgcatcaaaatggtgatcttatttataagccatcaccagatgcaattattgatattcgtgattctgatttagcggtttgctcatggccattagatgttagcagccgtaaaactgcatgggacattctggttgagtccatggctcttggtgccaacaaagagcgcgttaatgagctggctggcaaatggaattgcaatgatgatgacgctgataaatatgcagaggtcgttggcgtgacaatcgagttagatggaaacgcttggtgtgcacacgctcataattttgttgatttacaggaatctcctgctggattcggcaataccaaacttgaggcgatggcttctcttgctaagcaacttggtttatcaggcggccacatgtggagaagttcattttctgatttggtttag

SEQ ID NO: 28460 - DNA, 288 bp, Escherichia coli; identical to SEQ ID NO: 11880

SEQ ID NO: 28461 - DNA, 390 bp, Escherichia coli
atggctttaagattaaattttgtttttatacttgcggtgatttgcagtatccaaatttgtagcgctgctattttaagtaaaagctattcacataatgatattcatatcactctgccattattatttaatgagtacgatgatgtgctcagtcagtatgacggggcaaaatatttataccctagttcatttgctcttgatgatgataataatatttatattcagtatatttttgagccaaaaaaaaaggaaattaccttgggtactataagataccaagtggtgggcgaggcggggccggcgaaggtttggctattatacaagactataatgggtttaatgttgtatatgtcgtttcgaatacgggaaccttgcaaagatacaatatggtga

SEQ ID NO: 28462 - DNA, 1053 bp, Escherichia coli; identical to SEQ ID NO: 11597

SEQ ID NO: 28463 - DNA, 303 bp, Escherichia coli
  misc_feature (16)..(25): n is a, c, g, or t
atgacacgctggaggnnnnnnnnnntcattaaagtggaggcctttccttacacccgatatggttatctggtgggtaaggtgaaaaatataaatttagatgcaatagaagaccagaaactgggactcgtttttaatgtcattgtttctgttgaagagaatgatttgtcaaccgggaataagcacattccattaagctcgggtatggctgtcactgcagaaataaagactggaatgcgaagcgtaatcagctatcttcttagtcctctggaagagtctgtaacagaaagtttacatgagcgttaa

SEQ ID NO: 28464 - DNA, 228 bp, Escherichia coli
gtgattgttgcgaacaatcactctgctgaacagggcttgcccctgttaatattggatttatccaaaaaagatcgcgatgttgtattaaatagtaataaaaaagtaaaaaataaaatgaaaaatattaaaatgataacactctttcatccctatgagaaaacaccatttatgatctgtattgtaaacaaagtagaagatactgaacatggaataaaactcactcattga

SEQ ID NO: 28465 - DNA, 222 bp, Escherichia coli
atgaaaatcatcacccgtggtgaagccatgcgtattcaccgtcagcatccggcatcccgtcttttcccgttctgtaccggcaaataccgctggcacggcagcactgaagcgtataccggtcgtgaagtgcaggatattcccggtgtgctggccgtgtttgctgaacgtcgtaaggacagttttggcccgtatgtccggctgatgagcgtcaccctgaactga

SEQ ID NO: 28466 - DNA, 210 bp, Escherichia coli
atggggctggattgcgtgcctatatcaacctactgccgcgacgcgggagaaacggttgatgccgttaacaaacggatacaaagaggaatatggaaagaaggggttcatgtattaaaagtcgacggagttaaagaacgctgggtcgacttaatagaggtttcaaaatgggcaagaaagaacaaggattattatctctgccaagaggagtaa

SEQ ID NO: 28467 - DNA, 1179 bp, Escherichia coli
atgggcaagaaagaacaaggattattatctctgccaagaggagtaactattcgtaagcataaaactgcttcaacactagttatcactttcacatataaaggggttctttgcagggagcccctgtctcggcttgaggcaaatacacgtggtattaaatatgctgaacgcctgctaggggagatacaaaatcagatcgccagcggaacgtttgaatatgcgaaatatttccccagttccaaaaaactggagttattcggtatagtaaagaaaaccaaaaatattaagtcctatcttgatgaatacctgaaaatttgcatgaaccgcaatctgtcgccgtcaaccattggcggttacgaaaaatgtctatcagcactatcagaactacataaactacatgtaacagaattgacgcctgcggtactaaaaaattggatagccagccgaaaaactaagctgaaaacaatcaggaataacctgtcatttctgcgcagcgccattgatgaggctgtaactgatggcctgttgactattaacccggtaactcttgtcagcgccagccggtatcacgtggtcgacagtaaaccgaacgccgacgattacgaagttgatccgtttgcgcctgcggaaaccagtgccatatatcagcactgcaagtatcaggaatggcagaatctgttccgcttcgccttcaatacagggctacgcagctctgagctatgcgcattacgttggaccgatatcgactttataggtaatacagcgcacatacaggcggccagtgtcgtaggggtacttaaaggcaccaagacaaaagccggtacccgtaaggtggagctgaacagtgaggcgctggcggccctgcaggcgcagaagcaatacacctttatgaaaagtgagttcatattcagcgatccgaaaacgggagatccttggacgaacgccgacgctatccgtaaaaaagcatgggtgccgaccctgaaaaaagctggtgtgcgctaccgtaacccgtaccagacgcgccacacattcgccaccagacacattagccagggtgtaaaccttttctggcttgccgggcagatggggcataaggggccggaaatgctgttccgcaattacggtaaatacctggctgaatacgacgggaaaaccgcaatggaagctggaatgaagaagtga

SEQ ID NO: 28468 - DNA, 768 bp, Escherichia coli
atggctcctgcgttaataccttcatataacaaggacttgaacatcacgccatttggcgaaaaacgtcttattgagtcattctattttttcactgccgaggctggcttactgagggctgatgagtacattgtcagttctggtgagtttcagtactacttggatgtgtatcaactgggatgttccaccgacgacttttttttagactatggcagtgaccttcttgattcgaaggttccaatgcaggatctggtcaataccctcttgggtcttgatatggtagacgataacaaaacgataagaataggtcgtatacagttcaacgactttaattttatcgaagagaacggtcagatgatgaccggaaagcaagtgaaaagcgctgttatcgcacaggatttccaatcagcaggtttggcgcgtgagatctataaaatgcttgcgcgaaagcatgattttctcatctgcgataacattcaaagtattgccggtggtgctctttgggccagtagcatcattcgaattgccgaggtacggatctacaattcacgcacgaagaaatttatggacatacttggtccaggtgcgcgtggtgtttcaggtactttgccatggagtgcgaatgatctgtctgtagatgagattgttcgctggggtcgtgcgtatgatgatgaaaactgttgtcgtcacattgtacatgttatctgtaaggaccgactcattgacgatcaatttcatgattatgtttcgataggtggcgcgacagaataa

SEQ ID NO: 28469 - DNA, 342 bp, Escherichia coli
atgagaacagtagcgagaagatcgatacagacgattgagcgtcggactcaactcgtcagttcttttgttgactcaaacacagcaaacgagttcttcgtgagaagactgagtgatcgtgtctccccggcacgtcagctgtttattgtgacattgaacaatgaggttcgtgacggtgacgtgatcccgttcgctgagatcgccatgaacaaagaaaaattgcgctatgttgtgaagccagcagatcagtatcctcagtatgtaagcagtaatctgctgaagaaaattgaagcggcaattgctctatacatgcagaagaactacagggaaattaactaccattaa

SEQ ID NO: 28470 - DNA, 318 bp, Escherichia coli
atgtctaattatggtcttttcgttaagggtaaaatgttgggagcccgccaacgtaataaagttaatggtcagggctattataatgaaattggtattggccttgaaatacctgatggttttggtggtacaaagcaggatcaaattattattcgagtttctcaggctctcgttaacgcaggtctaatgaaccaggcgaatgctttcattgggaaattagttcaaattcctgtctatgtccgtgcgtggtcaatggagggtagggaaggtgtaacttataatgtttcttccgatggtggcatcgcagagatcaaaggttaa

SEQ ID NO: 28471 - DNA, 1053 bp, Escherichia coli
gtgatcgattggcttaccgggattttcccttgcacacacaaaccgcttccggcggggagtgttgtcagcgttgatgctgacggtgcaattgagtgggaaaccgttaagcgactgactgttcgcggctcgcatgaagcaacgatgaaagtacgatcgataggatctaatggcgaaggtaaagcgacacatttgtacattgatggtaatccttccaagtttctgcaggggcattctgttgttgggtcggatgatatacaagggctcatgttgacggtctatgccaggattttatccttattgaatattcctcatgatttagcgtcttataaagccgttatggcaggtcagtataaaatttcacgtgttgacattaattacatgtattcattatctacgctggaaaatgtcagatcatggctttatgccgccgaatttaaagctaaaacacgccatggtcgcgcatgtgggaaaggcggtacagtttatttaggtaaaaactcccgtcgatggagtctgaaattttattcaaaatatgatgaacacgtttctggtaaaaaagggcaccagatagccgaagagtttgtacgagccgggttactggactggacgaaagataaattacgtattgaattaacattaagaacaactgagcttattgatttaaatttaacgcttggcgctaactggaatatgaaaacaccacgtcaattattctctgaatatgtagggagaatagaaatgaatcagaatgctattttaagtgatgaaaaaataacgaaactgccaagaaaaatacagtcaacttatttactttggaaacaaggggctaacatgaaagaaatgttacctcataacactttttatcgccatagaagagaattgctttcgttcggtatcgatattaatttctattgtgattcaccagactctaataacgttgttccgctaataagaacgctggaagccaagccagcggaaatccccttatggatttatgagaaaggttttattttcgattacaaccgtatttcgcacgccagtagctggcattaa

SEQ ID NO: 28472 - DNA, 285 bp, Escherichia coli; identical to SEQ ID NO: 21423

SEQ ID NO: 28473 - DNA, 246 bp, Escherichia coli
atgcaactggtcaccgcattctgggcaacgctggcacttatgtatatgtcgtttgcggcaggcaccgggaaatatccggtgcgacccggaaaaatgaaatgtatccgggtggtaaccgcagatgaacgtctgaaggacgtttatacggaagacgcttccctgccgggaaaaatcagtaaatgtcctgtttatcttcctgatgacagaacaaacagaaacaacggagataaaaatgaacatgcgtaa

SEQ ID NO: 28474 - DNA, 249 bp, Escherichia coli; identical to SEQ ID NO: 25922

SEQ ID NO: 28475 - DNA, 1041 bp, Escherichia coli
gtgaacaccgttggcaaatcggcattcgtggaggccgtcggtcgggcgagcgatgatgcggaaggttacctggattttttcaaaggcaagataaccgaatcccatctcggcaaggagctgctggaaaaagtcgagctgacggaggataacgccagcagactggaggagttttcgaaagagtggaaggacgccaacgataagtggaatgccatgtggggcgtcaaaattgagcagaccaaagacggcaaacattatgtcgcgggtattggcctcagcatggaggacacggaggaaggcaaactgagtcagtttctggttgccgctaaccgtatcgcatttattgacccggcaaacgggaatgaaacgccgatgtttgtggcgcagggcaatcagatattcatgaacgacgtgttcctgaagcgcctgacggcccccaccattaccagtggtggcagtcctccggtattttccctgacatcagacggaaagctgaccgctaaaaatgcggatatcagtggcagtgtgaatgcgaacgccgggacgctcaacaatgtcacggtaaatgaaaactgtacgattaagggcatgctggaggcgactcaggtcagaggtgacttcgttaaagctgtatccaaatcatttccgaaacaggctggtacgtggggtaacacggaaacaccaaacgggacggttacagtcaccatcagcgatgatcataactttgaccgtcaaatcattattccgcccattatctttaacggaatagcgtatagcgatccgggaagtggtaataacccgggaggtacaagatacacgggttatggttttgaagttcgcaaaaacggtgtattaatcgcatccagagaaactaaaggggccattcccggtagctacagtgcggttattgatatgccgagtggcaggggaagcgtcactctggagtttaaggttttccataaaggcaatcagtgggcaggtaatatcaccgactgtacggtgattgtgaccaaaaaagccgcttccggcatcagtattcgttga

SEQ ID NO: 28476 - DNA, 540 bp, Escherichia coli
atgcaaccacttacataccaacagactagcggatttagcccgactgcggtgataaatcgttctcaaacaaaacaggcgccaggccacgaaaaaatccgtgatgccgtccgcgcctggtcggctgcagataatcaggatgttgttgccgcactcattgtgaatgagtatcgggagcagggcggcggcaccatcgattttcctgatgatgtcagccgtgcacgccagaagctgttccgcttcctcgataacaaattcgattctgaaaaataccgaaataacgtgcgtgaactgaccccggcaattctggcggtactaccgctggaatatcgcggccacctggttgagcaggatagcttcatggctcggctggctgaaatggaaaaggaactcagtgaggcaaaacaggctgtcattctcaacgcaccacgccaccagaaactgaaggagatgagtgaaggcattgtgtcgatgtttcgtgtggacccggatctggctggtccactgatggcgatggtcaccaccatgctgggggcaatatga

SEQ ID NO: 28477 - DNA, 231 bp, Escherichia coli; identical to SEQ ID NO: 7374

SEQ ID NO: 28478 - DNA, 438 bp, Escherichia coli
atggagcgcgcctcccagccggctgtcgggctgggggctactgccgcttacggggccggtgatgtcctgaaaataggtatcggtggcggtgcatcgaaagccgcacagacgctcagtgactactacatcaaacgtgctgagcagtatcacccggtgataccgattggtgcgggcaatgaagtgacggtggtgttccaggatggcttccagctgaaaaccgtggaggaaatggcgctggagcagtcacagagtacagcggaagagggtaacccggaaagccctgtgccgaatcttccctcggcagaaagccacctgaacggttttaacaccgaccagatgctgaaacagctgggcaatctgaatccgcagcagtttatgtccggagacaagaacccgcagggcggggatgccggcagggagggcggaaatggcgggtga

SEQ ID NO: 28479 - DNA, 198 bp, Escherichia coli
gtgattaatccgctgttgccggattcccggactgaccaggggcaggcgcagcgcctcggcgtgaaatatttcccggccatgatgctggttgacccgaaacagggcagtgttcgtccgttatcatacggctttatttcgcaggatgacctggcaaaacaattcctgaacgtttctgaagattttaaaccgaacttctga

SEQ ID NO: 28480 - DNA, 153 bp, Escherichia coli
atgctgctgaacgagaacggcgtcacagagtggacgccgctgttttatgaagaccatccggcgcgggagttctgtgtccagtacggggaaagcgacctggcgtttctgtcccggctgtgggcggaggaggggatttttgtagtggtcaagtaa

SEQ ID NO: 28481 - DNA, 213 bp, Escherichia coli
atggctgctggtaaaggcgacctgatggctaaaggtcaggaaacggttaaggcgaccttcggtaagaactccagtatcgttaaatggattgttctggctgaggtgctggtcggtgcggtcatgtacatgatgaccaaaaacatcaagttcctggtcggctttgccatactctctgtatttattgcagtaggtatgtctgttgccggattctga

SEQ ID NO: 28482 - DNA, 1656 bp, Escherichia coli
atgaacctaaagctcaaaagatgcgaatattggatggcggcacaaaagcagatgaaacgggttgtgccgcttcttctggttattatgcctgcatgttcaatcgcgggaatgcgctttaaccctgcttttctgtcgggtgatactgaagctgttgctgacttatcccgcttcgagaaagggatgacttatcttcctggtagctatgaagtcgaagtttgggtcaatgattcccctttactctctcgtactgtaacttttaaagcagacgatgagaatcaactgattccctgcctttcacttgctgacttattaagccttggaattaacaaaaatgcgctgccagagcaggctttggcttcatctgaaaatagttgccttgatttgcgtatctggtttcccgatgtgcattacatgccggagctggatgcacagagacttaaactgacctttccacaggcgataataaaacgtgacgctcgcggatatattccaccagaacagtgggataacggtattacagcttttttgctgaattatgacttttctggtaataacgatcgtggtgattactcttcaaataactattatttaaatcttcgcgctgggatcaatattggtgcatggcgttttcgcgattattcaacctggagtcgtgggagtaattcagcaggtaaactggagcatatcagtagtacgttgcagcgcgttattattcctttcagaagtgaattaacgctaggagatacatggtcatcatcagatgttttcgacagtgttagtattcgtggcataaaactggaatctgacgaaaatatgttgcccgatagtcaaagtggtttcgctcccacggtgcgcggaattgcgaaaagtcgcgctcaggtaacaatcaaacagaatggttatgtcatttatcaaacctatatgccgccgggaccgtttgagattagcgatcttaacccgacatcatctgcgggagatctggaagttaccatcaaagagtctgataattcagaaactgtctataccgtaccttatgccgctgtccccatcctgcaacgagaaggtcatttaaaatattctactacggttggccaatatcgaagcaatagctataaccagaaaagtccttatgtatttcagggggaattaatttggggtttaccctgggatattacggcttatggtggggcacaattctctgaggattaccgggcgttggcgctcggccttggcctgaatctgggtgtatttggtgcaacatcgtttgatgttactcaggctaacagttcgcttgtggatgggagcaaacatcaagggcaatcttatcgttttctttattccaaatcgttagttcagacaggaacagcattccatattattggctatcgttattcaacccagggcttttacactttaagtgatacgacataccaacaaatgtcagggactgttgttgatccaaaaacgttagatgataaagattacgtttataactggaatgatttttataacttgcgttatagcaaacgtggaaaatttcaggctagtgtatcgcaacctttcggtaactacgggtctatgtatttatcggctagtcagcaaacatactggaatactgataaaaaagattctttataccaagttggttataactga

SEQ ID NO: 28483 - DNA, 207 bp, Escherichia coli
atggttacagtcgctgaactgcaggcgctgcgtcaggcgcgccttgatttattaaccggtaaacgggtggtgtctgtccagaaagatggtcgcagaattgaatatacggcggcttctctggatgagcttaaccgggcgatcaatgatgcggagtcggtactggggacaacccggtgtcgccgtcgtccgctgggagtgaggttatga

SEQ ID NO: 28484 - DNA, 855 bp, Escherichia coli; identical to SEQ ID NO: 8849

SEQ ID NO: 28485 - DNA, 630 bp, Escherichia coli
gtgatattggatcgtaatacttggttagggcatccaatttttcgtccgaataataacgatactatcgccttttgccacgaagggccccatgacctggtggatgcaagaatgtggatgattaaccgtgatgggacaaatgagcgtaaagtgcatgagcaccaacttggtgaaagttgtacacacgagttctggatccctgatggatctgcactggcttatgtttcctatatgaaaggacagcaacagcgttatattcgcaaatataatcctgatactgatgaagattcattagtgatggaaatgccggcatgttcccatttaatgagtaaccataatggtattctctatgttggtgatggttcaggtagtccggttgatgttaaagatacctgcagttataaaattgaaaatgatccctggatttacattcttagcagtaaaaataaaaaaatacataaattggtgaaacataatagttcctggagggtacagaaaggagaccggcaggtaacgcacccgcatccatcattttctccagataataagtacgttttatattcttgcgatgccgaaggtgaaccagcactatatatggctaaaattcctgaggaaatcttaacccagcaataa

SEQ ID NO: 28486 - DNA, 810 bp, Escherichia coli; identical to SEQ ID NO: 6004

SEQ ID NO: 28487 - DNA, 312 bp, Escherichia coli
gtgccgaaaataatcagtggttattttaatgtggagcagcgtgcggcaggactggggtttatttataatgtaggttcacttggtggagcatgtgcgcctattcttggtgcagttgttgcgtctcatacaagtcttggtacagcaatgtgttctcttgcttttatcttaacatttgttgttcttgtccttattggttttgatatgccatcacgtgtacagagatggatccatccagaagctgcgcttgaatatgatactgtcgatggaaaacctttttatggagcaagaaaaaagaatgttgcagaagaataa

SEQ ID NO: 28488 - DNA, 1026 bp, Escherichia coli; identical to SEQ ID NO: 24115

SEQ ID NO: 28489 - DNA, 174 bp, Escherichia coli
atgcagcgtgtggccgggaaaaaccgttaccccattgatgtggtgaaaatcccgatggcggccccactgaaacaggcatttgatgagaatgttgaccgtatccggcgtgaacgcctgcctaaagaactggcatccgcgctgaaacaacaactgaggattgcaataaaacgatga

SEQ ID NO: 28490 - DNA, 174 bp, Escherichia coli
atgcagcgtgtggccgggaaaaaccgttaccctattgatgtggtgaaaatcccgatggcggccccactgaaacaggcgtttgatgagaatgttgaccgtatccggtgtgaacgcctgcccggagaactggcatccgcgctgaaacaacaactgaggattgcgataaaacgatga

SEQ ID NO: 28491 - DNA, 543 bp, Escherichia coli
atgaaatcgcacctgatgaacaaaaaaactatggcgcaaagctgccgcgtaagtgcgacagcgttcgacaagtggggagtaactcccgttgagcgtaaaggccgtgaggcgttttatgatgttgctagcgtgatagacaatagggttaacaatgcaattaaccagcttacaaacgacaaaggcgagattgatgatgatgaacttttacgcgtaagaatcagattaatgacggcccaggcggaagcgcaggaacttaaaaacgagcgcgaacgcggcgaggtgattgatacaaagttttgcatctacgcgatttcaaaactagcgagtcagatttcatcaatcatggacagcctcccgctcacaatgcaaaggcgctttcccgatataaggccgtatatgctggatgaactaaaaagggaaatagccaaagcatgtaacgcatgtgcaagacttgacgaaaacctgccacagatactggctgattacctgatggaaactaccggaaacgcgcctgagaagttgctagagaacaaaggcgagtaa

SEQ ID NO: 28492 - DNA, 1041 bp, Escherichia coli
atgagtgatttatattcgccagccatgttaatacaggttgttaatgccgaagatattcaatggcagattaattctttatttataaacctgttttttaagcgagtcgttacatttgagacgcgggatattgcgcttgatattattgacgatccagacatcccgatggctgcattttgttcccctatggttggtagtaaagtctcacgcgatgaaggctacgaatcaaaagtaattcgccctggctatatgaagccaaaaagtagtatcgacccaaataaaatagccgttcgtcaaccaggcgtatcacctgaacaattcaatacatattcatcacgcagtttcaaaataaagcgagcgttagtaagacaagcgcaggcaattcgtgcgcgtattgagtggcttgctgttcaggcggttacaacggggaaaaatatcattgaaggcgatggaattgaacgttatgaactggactggaatataaaaccacaaaatattatcacgcagtccggcggcacggagtggagcggtagagatttatcaacatttgatccaaacgatgacatcgaagagtacgcagaaatcagcgaaggtactacaaatatcatcgtaatgggccgcaacgtatggaaaaaataccgcgcctttaaagcagtaaaagattgccttgatactcgacggggatctaattccgttcttgaaacggccctgaaaaatcttggggattctgtaagcttcaagggttacgttggcgatgttgctattgtggtatatagcggacgttataccgacgaggacggcaaagaaaaatatttccttgatcctgatttgatggtgcttggcaacacatcattacagggcatcgttgcctacggtggcattcaggatcctgagttaatcagaatggggctgactaaagccgaacttgcgccgaaaaattacatcgtaccaggtgatccggctattgaatatgtgcagacgcacagcgcaccgcaaccaataccggcccgcatcaatcgttttgttaccgttcgcattggttaa

SEQ ID NO: 28493 - DNA, 138 bp, Escherichia coli
atggctgtttggtggagtatcaatgcgcatcaatttatggtcagtcgaaatcatgactttccagtttggatgatgttgtacaacttcctgaccaaggtgttcgacgaaagctgtccgactaaccgctttttccgttaa

SEQ ID NO: 28494 - DNA, 417 bp, Escherichia coli
atggaacttagattaaaaaatgttaccagttataagaaagacgccttcacaatactgaatcttgaaaaaagagtaaacatactatacggccaaaatggttgtggcaaatctaccatttcaaattatttctacgactctacacacacagattataacgagtgtgaatgtacccttcttgacaattacaaacctcttgtttacaacactaaatttattgaagataacttctataatgcacaggaacaaaaaggtgtttttacattaagtaaagaaaatgcagatattgaaaaacaattaattgaaaaagaagcaattaaacagcaactcacagagcaatatagacaaaaaaaaggagtgttattgaaattagaagcagaaatggaaaaaaaagaaaatgaatacatcgaatcgatctga

SEQ ID NO: 28495 - DNA, 402 bp, Escherichia coli
atgaaaatagatcacgagtatttgaaaggtcttttggacgctttcgaggcgtctgaagagccgcatactgatataaagcagctgcagctggctgggtatgactacagcaccgatgaatttttattccatatgcgtttattggctgatcgtcaactaattgctagaacagacggcaagtatgggtttggtttctctgaggctgctgatggaggatcatggttcgttataccgttacgcttaacttcaagcggtcatgacttccttgaagctctcaggaataaagaggtttggaattctctcaagaccggctttaaagatgcaagcattggaacattagttgacgtttcaaggcgtttgctggatggttatattcagaaaaaaattgacgacttaattggctaa

SEQ ID NO: 28496 - DNA, 189 bp, Escherichia coli
gtggttcttacagctaagcagtttgaagaccttgcatccttcgcgaaggaagatagccagcctcaatacaccatcgctaccggaatcatcccagaattcgaagatgattgtgagtttatccccgtttatgcctggctcatcgcttatttagagttactgaagcacggtgtattgcaactcgaccactag

SEQ ID NO: 28497 - DNA, 393 bp, Escherichia coli
atgaagttaagctataagctggttattgctgctttcctttttactgtcgtcagttctttcatctggtcagccaactactactacagcaaatatcagcacgaaaagaaacgtgctgatgaggctgtacaaaatgccaaatcggcaactgccattaccaataacgtcctgcaatcactgcaaatcgtcaatacagtactggaggctaaccagcatgcaaaacagcagagcacactggagtcacagagaacccaggaagatatcaaaatggctgttgcggatgatgattgtgcttcacgtgctgtgcctgctgccgctgctgaccggttgcggaagtacgcggacagtttacgtgccagttccagcggtgccattaccggcgaatctgaccactga

SEQ ID NO: 28498 - DNA, 1065 bp, Escherichia coli
atgaaacgccccaattttctgttcatcatgaccgatacccaggccaccaatatggtcggttgctatagcggtaagccgctgaatacgcaaaatattgatagtctggcggcagaaggtattcgctttaattctgcctacacctgttcaccggtttgtacacctgcacgggccggactattcaccggtatctacgctaaccagtccggcccgtggaccaacaacgtcgcgccgggcaaaaacatttccaccatggggcgctactttaaggatgcgggctatcacacctgctacatcggcaaatggcatctcgatggacatgactatttcggcactggcgagtgtccgccggagtgggacgctgattactggttcgatggcgcgaactatcttagtgaactgacggagaaagagattagcctgtggcgcaatggcctaaacagcgttgaggatttacaggcgaaccatattgacgaaaccttcacctgggcgcaccgcatcagcaatcgggcggtggattttctgcaacagcccgcgcgcgccgacgaacctttcctgatggtgatttcgtatgatgagccgcatcacccgttcacctgtccggtggagtatttagagaaatacactgatttttactacgaactgggtgagaaagcagaggatgacctggcgaacaaaccggaacatcaccgcttatgggcgcaggcgatgccatcgccagtcggtgatgacgggctttatcaccatccgctctattttgcctgcaatgactttgttgatgaccaaatcggacgggtcatcaacgccttaacgccagagcaacgtgaaaatacgtgggttatttatacctccgatcacggcgaaatgatgggcgcacataagctgatcagtaaaggagcggcgatgtatgacgacatcacccgcattccgctgatcatccgttcgccgcaaggggagcggcgacaggtcgatacgccagtcagtcatattgacttactgccgacaatgatggcgctggcagatattgaaaaaccagagattctgccgggggaaatatccttgccgtaa

SEQ ID NO: 28499 - DNA, 285 bp, Escherichia coli
atgttgtcaggtgcatacctgcaacgtgcgggggttttctctctccagcaaccaatgccaccagggattaagcccccgcaacattgcgcctcaccggaacccttccggcttgccgctgattctacgactgtttttctgttccggaatccgtcacttcttcactctgtgctgcgcattccgcagaatattatccgcttgcaaccgttgcatttttcttacgaaaaaggccgcagagtttccctctgcggcctggtccgggcgcaaattgccattacggcagcctga

SEQ ID NO: 28500 - DNA, 1749 bp, Escherichia coli
gtgaaaatatctttttttggcgtaaataactttaggacaatatcaggtggcattggtaataatagaataatatttaaagataccaatacgcttttcatttacggggcaaataatgctggaaaatcaacttatttaaaagcatatatgtttttttacagtaatgaaaaacctatcattgatgatttctttaaacgagacgacaataattctattgagttcgaattagaagttcaacttgatgacttggataaagaaagaatagaagccaaagcaccgaagcaaaaggaaagttataagaagtatttaaataatgattttattagaattaagaaagtatggagtaaaaatggaacaagaatagaggataaaaattatacttatgattatagtaaaggagatagcggcgagtatgatgaagttggatatgcaacaattggtttgcatcaggtcttccaatcttgtttgccaaaacctgtatttataaaggctatgccaacagaggaagaagctaagaagattcttaatgaaatcctaaagatgatggctgaaaatacacttaaaacatctgatcttgatgaattaaaagcagctcagaataaaataaaagaattacaagacaaaatgtatgatccagaattaattgaaacctatcagaattcagttaacggatactttaacaagatattcggtgatactgctatatgcttcaaagatcaaaaagatagggttgtttggacggagaataagcttggcagagattttgaaattgagtttatgaaaaaaaatagccaaggggagtttgatggcaatatcccttcaagttatagcagtgtaggtcatggaactattaggactgcaatatttacattattattgatgagagatgtagcagagcgttttgaaagaaggcttggacgtaaagattacatggttctgtttgaggagcctgagctatttctctatcctagaatggtgaaggaacttcgtgaattgatttatcaggtgagcactgaagaccttccatatcaagtactttgtgcctcacattcatcttccatgatagatctttcaaagcctaaatcttcgataatacgattagttaataattctactggaactaaatcatatcaaattaatgatcaatttttgaaggatgcaaaaggcattgctacaaatgctgaacttaaacaagaaatgtatgaagttttgaggttcaacccttatatttgtgaatcattctacgctgatgaggtacttctgattgaggggccaacagaagaaataatatgtagagcttttttacaagaaaccccatcagataaatctatattcgtattgaactgtggtacggttaataacattcctttttatcaaaaaatcttctcaaggtttaatataaaatatcatgtgatctgtgatacagataaagcagaaatagttaccgtagatcaatttggcaatgcagattttgattctggaatacagaaaacaatttcagaacagtataggaatgattgtactgcaatgaatggtaatataggactacttcgaactcataacattacatttgaacctgctcatcaagatgttagtattcctgactttttgagatttgttgattgcggtgatagaagcaaaccatttaatgcaaacttgtactggaaggatattttaaggccaaatatatcacatcaagatataaataaagtgcctataattaagtatttgaatgaaataatagcacattaa

SEQ ID NO: 28501 - DNA, 387 bp, Escherichia coli; identical to SEQ ID NO: 12817

SEQ ID NO: 28502 - DNA, 477 bp, Escherichia coli
atgcataaatcagaaaatgaaaaaatagattttattctggatgagcatgagcggatatccagaaaacagggttctttgtgtatggcactgggtaagggatttttagttatagctattctttgtggtgttgccacattctgtgtttctggcctgtatctgaaatccctgtgcctgtccgttgcctgctgttgtggggtattcagtcgtatttttaattattacagcgtaccggaggaatcacgcatggtactcagtcgtcaggaattactccggcttatgcgtctgactgaagacgtaccagatgtgagacaggaactgcttaaccgtttgttgtccggtaaaaaactgactggtcgggatgaacaggatatccggcgtctctggcaggagaaagtggatgcaatgcaggagtctgccacccgtcagcgtgaacaggataccatcaggaagtttactgaagagaaaaaatccgaatga

SEQ ID NO: 28503 - DNA, 393 bp, Escherichia coli; identical to SEQ ID NO: 15238

SEQ ID NO: 28504 - DNA, 906 bp, Escherichia coli
gtgacttcaccatttattcaacaaattgctgataaccgggtatgtcaggtactcacctgtcttcctgaaaaatttgtggttgatttcgcaaacggaatcgatgttgcacaggagcatatccgcacggccggagagcgcacgttcttccggcgtttaaaagaggggctgaccggcgaaggcgctgcacggcagaatgccatcaatgcgtcgcttgcacagggcgttgaggcgtccctgcgctggctgacggagatgacaacgtcacttgccaccacaaactacgcgattacccgggtaaacgacagggtcagttcactggtcagtgatacagccaggctggcgcattattccgcagatacgcgggagcagttactcaccctggccgatcaggttcaccataaactgaatcatcttgaagaaaaactccaccgtgttgaccaggttcagcgggcgcagttacatcttgagcagatattctcatggtggagcgccgggcgatatgcgtcattttcccctgccggacgttgttatgtggcacttgaagagcttcgctggggcgcgtttggtgatgtgatacgtcagggcgaaacaggccaggttaaccagctactggatattctcagacataaagcattaacgcagatggcacaggagagtggcggtagtgcaaccgtgcgtctgaacactctggactggcttggtggtcagggccgggagcaggcagataacgagtggcatgacgcgattaactggctgggagactggtgcagtgaagagcagcatccgatgatctggtcaaccacgcaggctgcagaacacttaccggttcgcatgcctcgcctctgctctgcagaacgcctctctgaaagtatggtcgatgaaatatttcagaagggggctgcatga

SEQ ID NO: 28505 - DNA, 2397 bp, Escherichia coli
atgcacgaaaagaacatcgccctgctttgtgatgaagccgaccgacttttgcaactgaacattaatctgctccggcaaatggttgaggagccagatgtgttatctgacagtaagaacgaaaacagactgctttttgataaacagaaagcactgaaaagaattgaggagctggagggcgaacaaatcaaaaccgcccgcagggagatggtgctggctgttgtcggcacgatgaaagcaggcaaatcaaccaccatcaacgccattgtggggcaggaaattctgcctaaccgtaaccgccccatgacctctgtaccgacgctcatccgccacgttcccggaaaaactgagccggttctccatctggaacatattcagcctgtccgcaatttattaatcacactgcaggaaaaactcgccaccccggcaggacagcaggtcgcacagaccctgcagcaaatcggggatacccgcgaactgctggatattctgacggatgatggctggctcaaaaatgaataccacggggaggaggaaatctttaccggactggcatcgttaaacgatctggttcgtcttgctgcggcaatggggactgaatttccttttgatgaatacgcagaagtgcagaaactgccggtgatcgacgtggaattcagccatctggtggggatggatgcatgccagggaacactcacactgctggatacccccggccctaatgaggccggacaaccgcagatggaagtgatgatgcgggatcaactgcagaaagcctctgcggtgctggctgtgatggattacacccagatgaactcaaaagcagatgaagacgtccgtaaagagcttaatgccattgctgacgtatcagccggccgcctgtttgtactggtcaataaatttgatgagaaataccgcaatggcgatggggcagatgccgtacgccagaaagttccggcaatgctgaacagcgatgtgctgcccgcctcccgcgtttatcccggatcctcacgccaggcatacctggctaaccgtgcgcttcatgagttacggaaaaacggaacccttcctgttgatgaagcctgggtcgatgattttatcagaggtgccttcggttgcatgaaaaaagaatacgtctgtaaagacagtgaactggcaactgaaggggcgacagacctgtgggaaggctcacttatcgatcaactgataacggaagtcatacagagctcacattccagagctgcggcactggcggttgactctgccgccgcaaaactgatgcagaatgcagaaaatatcagtgaatacctgttgttacgccatcaggggctacagcaaagcattcagtcactgcagtcgcatatcaccagcctgcttgcggatatccgggaaatcgcggactgtcaggagcagatgaccgctgatgtcagaatggccatggaggagatcgatactaaaacccgggaattactgacgggggtctgcacctcactggaagaggagctgaatgactatttcagaagcggtaaacgcaaagaacagcaaatgttggaggaagaagacgcagaacaacgaaggtctcagtccggattatgggggaaaatttctcaatggtccggtatcaacaaccagggccgggaggattacaggaaacgagattttgccccggacagccccgaaataaaattcagtgatcgcagggaagcccttgaactgatgacgcaaatcgaatcgaccgtgaccagcctgcaccgtgaggctgaagcacagttccggcctgagctggagaaaatcgtcagcgggattgaaacaggttttcgtggcacggccctgtacgccacagaaaacattgccggtcgcatcaatgcccgcctggaggatgagggctttaccgtaaaaatcagttttccggcagtcagccagttacagacccggctcgcggtaaaaataaatctgagtgcgcttatggaggaaagaacggagaccgtcacccgtcgccgtcggcagagtggcgtatggggaaccgtttgtcgatggtttggcaccagtgacctgggctgggaaaactatgacgaggatgtgagtcgcagcgtgatcaatatcaacaaggtcagagaggaagttatgtcactgacccgggcatatttcggggagctgcaggcatccattgagcaggatattaaccagcccgtccgccaggaaatcgatgcctttttctgcgcattcagggagaaagttgaacaactgcgtaacacgctgattcagagctctgaagatcataaacgcgatcagcaggcgcaggaacggcttaccgggcgacttcaggcattaaatgaaagggttcctgagctcattactgacagtaaggcgctgagggaagagctggagacaatgctgtga

SEQ ID NO: 28506 - DNA, 264 bp, Escherichia coli; identical to SEQ ID NO: 9295

SEQ ID NO: 28507 - DNA, 339 bp, Escherichia coli; identical to SEQ ID NO: 5239

SEQ ID NO: 28508 - DNA, 207 bp, Escherichia coli; identical to SEQ ID NO: 28483

SEQ ID NO: 28509 - DNA, 297 bp, Escherichia coli
ttgccgccttcgcagaatttgctggcgctcgaggctgcgttcgtttctgatgattttgccgcctcttttgaagccgacgcatcccgtgctgaagtggctgcttctgacgctttcgtggtcgcggtggatgcagaagtggctgctgattgttgtgacgctgcggcattcgtttctgacgttttcgcggcactggcgctggtagctgccgcgctttttgatgactctgcagcagcagcactttttgctgcttcacgggcctttgtcgatgccgttcctgcgctggaagacgctgactga

SEQ ID NO: 28510 - DNA, 513 bp, Escherichia coli
atggggctttatgatacccgcaaaataccagaagaaaatatctctgggaaagtatttgtagagccagtagttttagaaggtggtgctggtggcaattggacagtatttgatgaggttttagattcaaatgtaataaagcaattgactttaacaggctgtggagcggcctgtggggaaatgttgcttagggataggtatatttttgtcacgcaaaatgtaattggaacagaattaacatctatgacgtcgctggcaaacaagcttaataaatttgatgtcggctgggaagggaatgcagtgagcgaatctagtttatatgccctcagtaatactggttcatggggagcaatgatgtgggattctggaagtaaagtagggcattgggtacttgttaagggtgttgatgatgctgggaatgtgataatatatgatccatatcaagggagtcgatatctgatgactgaacaggaatttaaggaggtatggaatgggcatagtgtttacaaaccataa

SEQ ID NO: 28511 - DNA, 177 bp, Escherichia coli
atgacggcgacaggtgcggtaacctttttgaataaactcaccaactttacgatttttgaagtccagcagacgccagccttcatcaatgacgttcagtttcttgagggtacgcggcgtgcggtacatccggttctcgatgtaaatgataaggctgaacatcaccgcaaccagcagtga

SEQ ID NO: 28512 - DNA, 213 bp, Escherichia coli
atgctgaacacatgtaggttagcctcttacgtgccgaaaggcaaggagaagcaggctatgaagcagcaaaaggcgatgttaatcgccctgatcgtcatctgtttaaccgtcatagtgacggcactggtaacgaggaaagacctctgcgaggtacgaatccgaaccggccagacggaggtcgctgtcttcacagtctacgaacctgaggagtaa

SEQ ID NO: 28513 - DNA, 315 bp, Escherichia coli
atgttgctctgcccgcacctgggcggggcgaatcacccgggtctgctgtccgcccgacaacgtgacactgtcaccggaaaccgctgtcaccgtccagacgctgttggccacataaccacgctcccggtcactcttcgtgaagcgcatccggtcaccggtccctacccggatggtgtccggggtgtacagtgtgacgccttcagccaccgcctcccggggcgaaatcagccgcgtattaccttccgcatcctgcagggttatcagcccgtcatccttactgataccggcaatccggtgatacacattatccactag

SEQ ID NO: 28514 - DNA, 633 bp, Escherichia coli
atgtgtctcccaggtggagagacgacgcagctctccgtcgcgtatattcgctgtgttcaggacaggcaccatgacctgctctttccccagctcaccggccttttcccgtgcatcatgaatcatgctgttcagtacgcgccggtcctcattcaggtgcgtgacaatcagcgtctgctcccgtgcttccggtgttctgccggtatagtcgcggacaatggcttcatacagtgtcatggggatatccgggaaagcctcgcctttcagcatcgccttctgctgcgcttctgccagtttcgcttcctggctgtgactgaactccgtcacagagtgctccggtgcccatgcgccctccagacgtggcacctgagacggtttcacactctcaagcccggacagtgccctttccacatcccggttaatcaggctgtataccgcctcccgcagttccggcgtctgacgcacaatctccttcatgatggccacatcggcagcactgcgcgtctgctggagacggaaaggctgaccgggcgcgatggcctgcagctggtccgtgtcaccgctggccacggcacgaccaccaccggccgcaatcagggcgtatgcccgtgccatgtcggtattgcccaccattga

SEQ ID NO: 28515 - DNA, 315 bp, Escherichia coli; identical to SEQ ID NO: 28513

SEQ ID NO: 28516 - DNA, 633 bp, Escherichia coli
atgtgtctcccaggtggagagacgacgcagctctccgtcgcgtatattcgctgtgttcaggacaggcaccatgacctgctctttgcccagctcaccggccttttcccgtgcatcatgaatcatgctgttcagtacgcgccggtcctcattcaggtgcgtgacaatcagcgtctgctcccgtgcttccggtgtcctgccggtatagtcgcggacaatggcctcatacagtgtcatggggatatccgggaaagcctcgcctttcagcatcgccttctgctgcgcttctgccagtttcgcttcctgtctgtgactgaactccgtcacggagtgctccggtgcccatgcgccctccagacgtggcacctgagacggtttcacactctcaagcccggacagtgccctttccacatcccggttaatcaggctgtataccgcctcccgcagttccggcgtctgacgcacaatctccttcatgatggccacatcggcagcactgcgcgtctgctggagacggaaaggctgaccgggcgcgatggcctgcagctggtccgtgtcaccgctggccacggcacgaccaccaccggccgcaatcagggcgtatgcccgtgccatgtcggtattgcccaccattga

SEQ ID NO: 28517 - DNA, 591 bp, Escherichia coli
gtgaaggctaacccatgtgcaggtgtaagtaaattcaaggccaaaaaccgcgaacgatatgtaaccgacaaagaataccaggcagtattaagcgtggcaccccttcctgtttttatcgcaatggaaattgcctatctgtgtgcagcgagggtttccgatgtgttatcgctgaaatgggagcagattggaaacgacgggatctttatccagcaagggaaaacagggaaaaaacagataaaagcatggagtccacgattacaggcagcggtcgaaaaagcaaaacagttaccaaaatccgcctatgtgatcagcaatcaatacggcaaccgatatatgtacaaaggctttaacgaaatgtgggtagaagcaagaaatcgcgcaggcaaagtttcaggtattttaaccgacttcacctttcatgatctgaaggcgaaaggaatttcagactatgaaggaagcagccgggataagcaacttttctctggtcacaaaaccgaagggcaagtgctaatctatgaccggaaggttaaagtttcaccaacacttgatgtcccgttacctgaaaatattccaagaaaatattccaagtaa

SEQ ID NO: 28518 - DNA, 510 bp, Escherichia coli
atgctctgcgattttgtcatcgacgtaatcctgcgtcgccatcactgtgctggcatcaatactcagctcaacggacgccacattgctgacaataataaccatgcggcaggtctgcgcgcgcccggagccttcagcgagttcaggcttatagctttccgccatgttagcaaccgcaatcagtgttccggcatcgtcatacagacccagctcacgcatccagaagccgcccacttcgggcggtacaaccagttcagccacgatatagtttttattcttgttatccacgctgactttattcagagcgtgacgccagacctcatgcaccagtttcgtctgaccggcatccggcaccggcaatttgccattaccgtcacccacggccattgcagacagagttacttttttcccgccggggacagtggcggctgccagcttcgcggctccggcagtagtgataacggttttaaatttcgtgctcattgtttctcacttatccgggataaacagtaa

SEQ ID NO: 28519 - DNA, 192 bp, Escherichia coli
atgaatacagcatttgcacttgttctgacagtttttcttgtttccggagagccagttgatactgcagtcagtgttcacaggacaatgcaggagtgtatgactgcagcaaccgaacagaaaattcccggtaactgttacccggtcgataaagttattcaccaggataataacgaaatcccggcaggtctttaa

SEQ ID NO: 28520 - DNA, 270 bp, Escherichia coli
atgagaagatatcaaaatatccttaaagaacatggtattaaacaaagcatgtccagaaaaggcaattgtctggataatgctgtggtggagtgtttctttggaaccttaaagtcggagtgtttttatcttgatgagttcagtaatataagcgaactgaaggatgctgttacggaatatattgaatactacaacagcagaagaattagcctgaaattaaaaggtctgactccaattgaatatcggaatcagacctatatgcctcgtgtttaa

SEQ ID NO: 28521 - DNA, 453 bp, Escherichia coli
atggctgtaacaccaccaccggcaagtactattcctagtagtaccactgcatttgcggaaggtgagatcgaaataactaacaattgtagggttactatcaccacccctagaaaaattgtacgtccggctacagaggccccacaagctgataatgtgacttttactattactcaaaatcagtcttgtgcagatataggctccagaattgcttattggtctgaaggaagtcagtcagcttttcgtatggtcaataaaagtaatccttctttattttacagttttactaattttagcgaagctcctgcaacaactacattaactggtagtaaacaatattcgttagctaataaaaaggttaagagcgtaacagtgagtatcccaattcccaaatcaggtgtttatgttcctggtcattatacacttggtcttaacgcaggcttggtcataaactaa

SEQ ID NO: 28522 - DNA, 858 bp, Escherichia coli; identical to SEQ ID NO: 6882

SEQ ID NO: 28523 - DNA, 588 bp, Escherichia coli; identical to SEQ ID NO: 17157

SEQ ID NO: 28524 - DNA, 234 bp, Escherichia coli
atgcggcgtggcgttatgccagagctgcgctgttttcgtgaacacgcggcggacagcctcacttcccaggcgctggcgggcctgaataacggcactgggggcaacgaaggggcgattgcccggcagcatgatgtccaggcgattcacaatctggtgaagaggttctttacgctcaagcgccatgccaacaatacaccagaccatcatttcgaggggaagacggcgcttgcgtag

SEQ ID NO: 28525 - DNA, 435 bp, Escherichia coli
atgtacggaacatgcgaaacgctatgccgggagctggcagcaaagtatccgggagacacgccgctgatgctggttatctggtccccggaagaaattcaggccctcgctgacggaatggatatttccctgtccgatcatgaaatcaggactgtcctggcgcgcctggaggacatcccggaagaccagcggactgaatccggtatttcttccggtgcggcgatggagatcatcaataacgtgagagaaaaccgccaggtaaccgtccctgctgaactgctggcgtccctgattcagaccgctgaacaggcattgtggaaacgtgaatgggccgcccgggatcatggcctcgccgtcccggaatgcgtcacccgccgtcaggcggtggttaatcaggtccgcatcctgctgaaaaacaacacacacgaaaacgactga

SEQ ID NO: 28526 - DNA, 141 bp, Escherichia coli; identical to SEQ ID NO: 11045

SEQ ID NO: 28527 - DNA, 519 bp, Escherichia coli
gtggcgatagcccacatatgcggccttcgatgtgtaggttttggtaaacaccaggtggccaaccacgctgaatcccgcatttttccaggcggccataaagcgatcgacgcggttccagccgtagaagctgaccatcagcgcatcttttttcagcacgcggtacatttcattacaggccggttgcagccattcatcggttttatcgccggcgatggtgcgcccggaacggtcacggaaaccgacgagatacggcgggtcggtgaggatgaaatcgacagcattgcccggaaacgtggccataacacgcacgcagtcacccaggataaaacgggacataacagcactccttctcttacagaggacaccgggagggcacccctgtggtgcccgttccccgctgcctgtgggctgttcaccgcgtccggtaacgggtcaggccgaccgtggaataccgcagccgtcgtctttttgacggcaaggctatgccgcgaaagcggcttgaagggcgttcatcagtaa

SEQ ID NO: 28528 - DNA, 234 bp, Escherichia coli
atggcacccgaaccggatgacgatgatgacgaaacatgggtactgttcaatgccatgaacggtaaccgcgctgaaatgagcccggaagccgccggcattgctgcctgtctgatgacgtacagtcatcacgcctgtcgtacggagtgttatgccatgacggtccattattaccggctgcgggattacgccctgcagcatccggaatgcagcgccattatgcgcatcatcgactga

SEQ ID NO: 28529 - DNA, 222 bp, Escherichia coli; identical to SEQ ID NO: 8150

SEQ ID NO: 28530 - DNA, 996 bp, Escherichia coli
atgaatgaatttataaaagaacggttttcgtatttagcagataataaaaaagaaaacgccccagagctaaatgtttcctacggtatcgataagaattttttgtatggtgctggcgtttcaatttcttccgttttgattaataattcagatattaattttgtctttcatgttttcactgattatgtggatgatgattatttaaagtcatttaatgaaacagcaaaacaatttaatacctcaattattgtatatttaattgacccaaaatactttgctgatctgccgacgtcacagttttggtcgtacgcgacatacttcagggtattgtcctttgaatatctgagtgaaagtatttccacactgctgtatctggatgccgatgtcgtttgtaaaggaagtctgaaacctctcacaaaaattatatttaaagatgagtttgctgcggttattcctgacaatgatagtactcaggcggcatgtgcaaaacgtcttaacattcccgaaatgaatggacgttatttcaatgcaggcgttatctatgtcaatcttaaaaaatggcatgaagcaaatttgacaccgtatttactcacgcttttacgaggggaaactaaatatggctctcttaaatatttagatcaggatgcgttgaatatcgcatttaatatgaataatatctacctcgcgaaggattttgatactatttataccctgaaaaacgaacttcatgatcgtagtcatcgaaagtatcagcaaaccattaccgataaaacagtattgattcactatacagggataactaaaccatggcatagctgggctggatatccgtctgcatcatactttaatatcgcgcgtgaacaatctccctggaagaaatatcctcttaaagaggcgcggactgttgcagaaatgcagaaacaatataagcatctgtttgcccatggtgagtatattaaaggtataacttcattaattaagtacaagcttaagaaataa

SEQ ID NO: 28531 - DNA, 930 bp, Escherichia coli
atgccgattcgtgtgccggacgagctacccgccgtcaatttcttgcgtgaagaaaacgtctttgtgatgacaacttctcgcgcgtctggtcaggaaattcgtccgctaaaggtgcttatccttaacctgatgccgaagaagatcgaaactgaaaatcagtttctgcgcctgctttcaaactcacctttgcaggtcgatattcagcttttgcgcatcgattcccgtgaatcgcgcaacacgcccgcagagcatctgaataacttctactgtaactttgaagatattcaggaacaaaactttgacggtctgatagttaccggcgcgccgctgggcctggtggagtttaatgatgtcgcttactggccgcagatcaaacaggtgctggagtggtcgaaagatcacgtcacctcgacgctgtttgtctgctgggctgtacaggccgcgctcaatatcctctatggtattcctaagcaaacccgcaccgacaaactctctggcgtttacgagcatcatattctccatcctcatgcgcttctgacgcgtggctttgatgattcattcctggcaccgcattcgcgctatgctgactttccggcagcgttgattcgtgattataccgatctggaaattctggcagagacggaagaaggggatgcatatctgtttgccagcaaagataagcgcattgcctttgtgacgggccatcccgaatatgatgcgcaaacgctggcgcaggaatatttccgcgatgtggaagccgggctagacccggatgtaccgtataactatttcccgcacaatgatccgcaaaatacaccgcgagcgagctggcgtagtcacggtaatttgctgtttaccaactggctcaactattacgtctaccagatcacgccatatgatctacggcacatgaatccaacgctggattaa

SEQ ID NO: 28532 - DNA, 444 bp, Escherichia coli
atggttattagtattcgacgctcacggcatgaggagggggaggaactcgttgcgatttggtgtcgttctgtcgatgccactcacgattttttatcagcagagtatcgggccgagctggaagagctggtgcattcctttctgccggaagcaccgttgtgggtcgcggttaatgagcgggatcggccggttgggtttatgttgttaagtgggcagcatatggatgcgctgtttatcgatcctgatgtgcgcggctgcggcgtgggtcggatgctggtgaagcatgcgctctcaatggccccggaactgacaaccaatgttaatgagcaaaatgagcaggcggttgggttctataagaaggtgggttttaaggttacgggacgctctgaggtggacgatttggggaaaccgtatccattgctgaatctggcatatgtgggggtgtag

SEQ ID NO: 28533 - DNA, 384 bp, Escherichia coli; identical to SEQ ID NO: 2052

SEQ ID NO: 28534 - DNA, 444 bp, Escherichia coli
atgaaatttgaacgccatcatgaaatattgaaacgactcagtaaattcggttctgtaaaagtatccgatctgtccaatagcctcaatgtaacgaaagaaactattcgatcagatcttaatgaacttgccaggcttggctatctgactcgatgtcatggcggtgcttttatcgtcctagactcgcttgatactattgcgaaaaatgaaatcgcttatgcgcttgaaaattatgatacagcccagggaataaaaaaaggccactcaactatgaaaagtcaagtatgcgttattggttcgtttaatgttgatatcatcagttatttgccgaggcttcccactatcggagaatcgcttctggcaagtaattttatattttcaccgggggaaaaggctgtaaccaagcgctggcagcaagctttgccgatactgatgtttatttcataa

SEQ ID NO: 28535 - DNA, 306 bp, Escherichia coli
atggacctgatttatttcctcatcgattttatcctgcacattgacgtgcatctggcagagctggtcgcggagtacggcgtctgggtttatgccattttgttcttaattttgttctgtgaaaccggtctggtggtaacgccgtttttaccgggtgattcattgctgtttgttgccggagcgttggcatcactggagaccaacgatctcaacgtccatatgatggtggtgctgatgctgatcgccgcgattgtgggtgacgcggtcaattacactatcgggcggttggtaatgactccaacttattga

SEQ ID NO: 28536 - DNA, 612 bp, Escherichia coli
atgaataacgcgatattaaatgatgaccttattgccgtacaggcaggaaacatcgtcgtttataactatgatggtgagacacgggaatatatttccgaatcaactgaatatcttgctgcgggtgtcggtattccggcaaattcctgtttagatgccccgggcgcacataaagcgggctatgctatccgccgttcggagaatttaaattcatgggagtatacgccagatcatcgtggtgaaaccgtctatagcactgacacgggaaacaccgaagaaatcacgacgctgggtgactacccgaaaaatacaaccactatcgccccgttaacaccatacgataaatgggatggtgaaaaatgggtgacagatactgaggcacaacatggtgccgcagtagaagcggcagaaaccaagcgccagtcactggctgatgcggcaatggcttccataagtctgattcagttgaagttgcaggccgggcggaagttgacgcaggcagaaaccacccggcttaacgccgtgctggattatatagacgcactgaacgcaatggatataaacatggcaccagatatcaactggccggaaataccactggcagcagccagttga

SEQ ID NO: 28537 - DNA, 306 bp, Escherichia coli
atgggtaaccaatggcaacaaaaatatcttcttgagtacaatgagttggtatcaaatttcccttcacctgaaagagttgtcagcgattacattaagaattgttttaaaactgacttgccgtggtttagtcggattgatcctgataatgcttatttcatctgcttttctcaaaaccggagtaatagcagatcttatactggatgggatcatcttgggaaatataaaacagaagtactgacacagggacaagcatgccacaggctatgccatacagaacagcattatatccccatataccttcattaa

SEQ ID NO: 28538 - DNA, 258 bp, Escherichia coli
atgcgctttgaagggaatgcttctacaaggaaatctattcaacaacgtcttaagcaggcttcagatgcacgagctcaggaagtcgccggtagcgaagtgctttactccggtgatgccaacctgactgatgaacagatcgctaaattaccttttgcgttatatcgccagggctacgagtactactggaaaacccacgcacacccaaacatattcagaagcgtgagggatatagtgccatcaaagcgctggctgctgtaa

SEQ ID NO: 28539 - DNA, 297 bp, Escherichia coli; identical to SEQ ID NO: 26770

SEQ ID NO: 28540 - DNA, 504 bp, Escherichia coli
gtggaattgttgtctgaatatggtttgtttttggcgaaaatcgttaccgttgtgctagcgattgcggcgattgccgccattattgtcaatgttgctcaacgtaataaacgccagcgtggcgagttacaggtcaacaatctcagcgaacagtataaggagatgaaagaagaactggccgcggcgctgatggatactcatcagcaaaaacagtggcacaaagcgcagaagaaaaagcacaagcaagaagcgaaagccgcaaaagcgaaagctaaactgggcgaggtagcaactgacagtaaaccccgcgtctgggtgctggattttaaaggcagcatggacgcccatgaagtgaactcgctacgtgaagagataacggcggtactcgcagcattcaaaccgcggatcaggttgtgctccgtctggaaagccctggtggcatggtgcatggttacgggttggcggcttcgcagttgcagcgtctgcgtgataaaaacattcctttaa

SEQ ID NO: 28541 - DNA, 1488 bp, Escherichia coli
gtggcagatcgtaatttgcgcgaccttcttgctccgtgggtgccagacgcaccttcgcgagcactgcgagagatgacactcgacagccgtgtggctgcggcgggcgatctctttgtagctgtagtaggtcatcaggcggacgggcgtcgatatatcccgcaggcgatagcgcaaggtgtggctgccattattgcagaggcgaaagatgaggcgaccgacggtgaaatccgtgaaatgcacggcgtaccggtcatctatctcagccagctcaacgagcgtttatctgcactggcgggccgcttttaccatgaaccctctgacaatttacgtctcgtgggcgtaacgggcaccaacggcaaaaccacgactacccagctgttggcgcagtggagtcaactgcttggcgaaaccagcgcggtaatgggcaccgttggtaacggcctgctggggaaagtgatcccgacagaaaatacaaccggttcggcagtcgatgttcagcatgagctggcggggctggtggatcagggcgcgactttttgcgcaatggaagtttcatcccacgggctggttcaacaccgtgtggcggcattgaaatttgcggcgtcggtctttaccaacttaagccgcgatcaccttgattatcatggtgatatggaacactacgaagccgcgaaatggctgctttattctgcacatcattgcggtcaggcgattattaacgccgacgatgaagtgggccgccgctggctggcaaaactgccggacgcggttgcggtatcaatggaagatcatatcaatccgaactgtcacggacgctggttgaaagcgaccgacgtgaactatcacgacagcggtgcgaccatttgctttagctcgagttggggcgatggggaaattgaaagtcgcctgatgggcgcattcaacgtcagcaacctgctgctggcgctggcgacactgctggcactcggctatccgctggctgatttgctgaaaaccgccgcgcgtctgcaaccggtttgcggacgtatggaagtgttcactgcaccaggcaaaccgacggtggtggtggattacgcgcatacgccggatgcactggaaaaagccttacaggcggcgcgcctgcactgtgcgggcaagctgtggtgcgtctttggctgcggtggcgatcgtgataaaggcaaacgtccactgatgggcgcaattgctgaagagtttgctgacgtggtggtggtgacggacgataacccgcgtaccgaagagcctcgtgccatcatcaacgatattctggcgggaatgttagatgccggatatgccaaagtgatggaaggccgtgctgaagcggtgacttgcgccgttatgcaggctaaagagaatgatgtggtactggtcgcgggcaaaggccatgaggactaccagattgttggcaatcagcgtctggactactccgatcgcgtcacggtggcgcgtctgctgggggtgattgcatga

SEQ ID NO: 28542 - DNA, 903 bp, Escherichia coli
atgatgactgatccccgcaaaaacggcgatttgcacgaacccgcgacggcacccgcgacgccctggtccaaaagcgagctggtccggcaattgcgcgacctcggcgtgcgctcaggcgatatggtgatgccgcatgtgtcgttgcgcgccgtcgggccgctggcggacggaccgcagacacttgtcgatgcgctgatcgaggccgtcggccccaccgggaatattctcgccttcgtctcgtggcgcgattcgccctatgaacagacgctgggtcatgatgcgccgcccgccgccatcgcccaaagctggcctgcgttcgaccccgaccatgcgcccgcctaccccggctttggcgcgatcaacgaatttatccgaacctatccggggtgtcggcgcagcgcccatcccgacgcatcgatggcggcgatcgggcccgatgcggcgtggctggtggcgccgcacgagatgggcgccgcttatggcccccgctcgccgatcgcgcgttttctcgcccacgcaggaaaaatcctgtcgatcggcgccgggcccgatgcagtcaccgcgctccattatgccgaagcggtggcgcggatcgagggcaagcgccgcgtcacttattcgatgcccttactgcgcgaaggcaagcgcgtctgggtcaccacgtccgactgggattcgaacggcatcctcgacgaatatgccgcgcccgacggccccgacgcggtcgaacggatcgcccgcgactatctcgcccgcaccagggttgcgcaaggcccggtcggcggcgcgcaatcccggctgatcgacgcggccgatatcgtttccttcggcatcgaatggctcgaggcgcgccacgccgcgccagcggcggcagcgctgaagccgaaacaacgccgcgactga

SEQ ID NO: 28543 - DNA, 393 bp, Escherichia coli
atgattgcccgaggcgatcaggcggcgaatttttgcgcgcgcgcacggtcgcggcggcgcgcgataaaggcgatgggtagccccacgaggaagatatgcgcggcgattaacatcaagccgctgtacgaccgcgtcgtcatcaagcgcaccgaggaagagaaggtctccgccggtggtatcgtgatcccggattcggccaccgagaagccgatcaagggccaggtcgtcgccgtgggcgagggcaaggtgttcgacaacggcaacgtgcgcgcgccgaaggtcaaggtcggcgaccaggtgctgttcggcaagtacgccggcaccgaggtcaagctcgacggcaccgagtacctggtggtgaaggaagacgacatcttcgccgtgctgggctga

SEQ ID NO: 28544 - DNA, 1638 bp, Escherichia coli
atggctgccaaggatattcgtttcggtgaagacgcccgcgcccgcatggtccgcggcgtgaacgtgctcgccaacgccgtcaaggcgaccctgggcccgaagggccgcaacgtcgtgctcgagaagagcttcggcgccccgacgatcaccaaggacggcgtgtccgtcgccaaggagatcgaactggccgacaagttcgagaacatgggcgcgcagatggtcaaggaagtcgcttccaagacctccgacaacgccggcgacggcaccaccaccgccaccgtgctggcccaggccctgatccgcgagggcatgaaggccgtggccgccggcatgaacccgatggacctcaagcgcggtatcgacaaggccgtcacctcggccgtcgaggagctgaagaagatctccaagccctgctcgaccagcaaggagatcgcccaggtcggttcgatctcggccaactccgacaccgacatcggcgagctgatcgccaaggccatggacaaggtcggcaaggaaggcgtgatcaccgtcgaggagggctcgggcctggagaacgagctcgacgtcgtcgagggcatgcagttcgaccgcggctacctgtcgccgtacttcatcaacaacccgcagtcgatgcaggccgagctggaggatccgttcatcctgctgcacgacaagaagatctcgaacgtccgcgacctgctgccgatcctcgagggcgtggccaaggccggcaagccgctgctgatcgtcgccgaggacgtcgagggcgaggcgctggccacgctggtggtcaacaccatccgcggcatcgtgaaggtctgcgcggtcaaggccccgggcttcggcgaccgccgcaaggcgatgctggaggacatggccatcctcaccggtggcaccgtgatctccgaggaagtcggcctctcgctcgagaaggcgaccatcaacgacctcggccgcgcgaagaaggtgcaggtctcgaaggagaacaccaccatcatcgacggcgccggcgacaccgcggacatcgaagcccgcatcaagcagatcaaggcgcagatcgaggagaccacctcggactacgaccgcgagaagctgcaggagcgcgtggccaagctggccgggggcgttgcggtgatcaaggtcggcgccgccaccgaagtcgagatgaaggaaaagaaggcgcgcgtcgaagacgccctgcatgccacccgtgcggcggtcgaggaaggcatcgtcccgggcggcggcgtcgccctgatccgtgccaaggccgcgatcgccgagctgaagggcgccaacgaggaccagaaccacggcatcgcgatcgccctgcgcgcgatggaagccccgctgcgcgagatcgtcaccaacgccggcgacgagccgagcgtggtgctgaaccgcgtcgccgaaggcaccggcgcgttcggctacaacgccgccaacggcgagttcggcgacatgatcgagttcggcatcctggacccgaccaaggtcacgcgctccgcgctgcagaacgcggcgtccatcgccggcctgatgatcaccaccgaagcgatggtggccgaagcgccgaagaaggaagagccggccgctccgggcggcggcatgggcggcatgggcggcatggatttctaa

SEQ ID NO: 28545 - DNA, 1530 bp, Escherichia coli
gtgccgcgcctgaccgcaccccggcggcaggccgaggtgtgcgcgccactgccggccgcccacgccgctgcgcgttacgcgcgccacctgcccgagcgcacgctgctgtacgcgctagtgcaggcgcactacccggacttcatcgcgcgtcttgaggccgaagaccgcccgctgcccgagtatgtgcgcgaggagttcgagacctacctgcgttgcggcgtgctcgagcacggtttcctgcgcgtggtgtgcgagcagtgccgggccgagaggctggtggccttctcctgcaagaagcgcggcttctgccccagctgcggggcgcggcgcatggccgagagcgcgcggcacctggtggaggaggtgtttggcccgcggccggtgcggcaatgggtgctgagttttccgtacccgctgcgcttcctgttcgccagcaagccggaggccatcggcccggtgctgggcatcgtgcatcgtgtgatcgccggctggttggccgatcaagccggcgtcgaccacgccagcgcgcaatgcggcgcggtgaccctgatccagcgcttcggcagcgcgctgaacctgaatgttcacttccacatgctgtggctcgacggcgtgtacgaggacaccaccgagcgtccgcagcgcaagccgcgcctgcaccgcacccgtgcgcccacatcggcgcaactgacggaactggccggcaccatcgcgcatcgcgtgtgccggcacctgtcgcgccgcggctggctcgaaggcgaagacgaatccgtgttcctgtccgacagcgcgggtagcgacgacggcatggatgggctgcggatgagttcgatgacctaccgcatcgccaccggtcgcgacgctggccgcaaggtcgtcacgctgcaaacattgcccggtgacgcaggctcgctggagggcgacgccggcaaggtcggcggcttctcgctgcatgccggcgtggccgcggaagcacacgaaagccacaagctcgaaaagctgtgccgctacatcacgcgcccggcgatcagcgagcagcggctgtcgatctcaccgcagggtagggtgcggtatcagctcaagacgccgtggcgaaatgggaccacgcatgtcgaatgggatgcggtggacttcatcgccaagctggcggcactggtcccgccacctcgcgcgcatctcacccgcttccacggcgtattcgccccgaatgcaaacctgcgtgcgcagctgacgccctcggggcgcggcaggcggcctgcgggcgatgcggtgccggttgacgcaagcgcccacgacgagccgcgcagccccgagcagaagcgccgtgcgatgagctgggcgcaacggctcaagcgggtcttttccatcgacgtcaccacctgtgcccactgcggcggcgcggtgcggatcgtcgccagcatcgaagaccccaaggccattcgcgccatcctcgcccacttcgagaaacacggcgcgctggagcaagcgcactaccggcccgcagcgcgcgcgccgccgccggccgcgtga

SEQ ID NO: 28546 - DNA, 1236 bp, Escherichia coli
atgccacgcaagaagaagacgccggtggtcacgccggccattgatctgccgaaggaatttctcgagaagctgatcccgggtccgatggacgcggccggggtcgaagccgtgttccagcagctgaagaaggccgtgatcgagcgggcgctgggcgcggagctcggcctgcacctggccgacgccgagggcgggagcggcaaccaccgcaacggccgcagcggcaagacggtgctgaccgacgagggtccgctgcgcatcgacgtgccgcgcgaccggacgggtacgttcgagccgcagctgatccccaagcacgagcgtcgcttcgccgggttcgacgatcggatcgtctcgatgtacgcccgcggcatgacggtgcgtgagatccaggggcacctggccgagatgtacagcgtcgaggtgtcgccggagttcatcagcaaggtcaccgacgaggtgatggccgaggtcaccgcatggcaggcgcggccgctggaagcgatgtatccggtggtgttcttcgacgcgctgcgggtgaagatccgcgaggacggcgtggtgcgcaacaaggcggtgtatctggcgctgggcgtgctggccgacggcacccgcgacatcctcgggctgtggatcgagaacaccgagggcgcgaagttctggatgaaggtgttcaacgacctcaagacgcgcggcgtcaacgacatcctgatcggcgtggctgacggcctgaagggcttcccggaggcgctggaagcggtgttcccggcgaccacgctgcagacctgcatcgtgcacctgatccgcaacagcctggactatgcgggctggaaggaccgcaaggcgctggcggcggcgatcaagccgatctacacggccccgaccgccgaggccgcagaggccgagctggatgcgttcgaggccggcgactggggcgagcgcttcccgacggtggtcgccgcctggcgccgtgcctggacgcgcgtggtgccgttcttcgcgttcccgccggacgtgcgccgggtgatctacacgaccaacgcaatcgagagcgtgcatgcgcgcctgcgcaagatcatcaagacccgcggccacttccccagcgacgaggccgccaccaagctgatctggctggcgctgcggaacatcaccgccgagtggagccgcgcgtctcagcactggaaggcggcgatgaaccagttcgcgataatctacgaagaccgattcacgctggctcgctga

SEQ ID NO: 28547 - DNA, 873 bp, Escherichia coli
gtggaattttccgtattaagtaacaatctgaaaatgccgatgatgggatttggtgtttttcaggttaccgataaagacgtgtgcaaacagtcagtgttgaatgctatccgcacgggttatcgactcatcgacactgcagcggtatacggtaatgaagatgccgtcggtgaagccgttcgtgaagccatatctgaaggtttatgtacccgagaagagttatttataacgtctaaattgtgggtgcaggatatgttgaatcaggatattgcagcagcaggtattgaagcatcattaaaaaaatcggggctagaatacttcgatctctatttattgcaccaggccatgcgcgattattttagtgcgtggcgtgcactcgaagatgcctatgaagagggcaaattaaaagcgattggggtttccaatttctaccctcatgttctggcgaacttttgtgaaacggtaagagttaaaccgatggtcaaccaggtcgagttgcatccctattttgcccaaccagaggcgctggcaaccatgaagtattataacgtgcagcctgaagcatgggctccgttaggtggtggacgacataaaccctttgaaaataatctgcttcagagtattgcagatgcccatcaaaaatcgatttctcaggtcattctgcgttggaatattcaacggggagtggtcgttattccgaaatcgacacatcaacagcgtatcgaagaaaattttgctatctgggatttctcactgacagagaaagaaatggcgcaaattagttcgctagatttgggttatgttggggaatcggtaaaacattttaatcctgagttgatcagacatgagataaatgaagggggatccgtgagataa

SEQ ID NO: 28548 - DNA, 279 bp, Escherichia coli
atgctgacaataattttgtttggtgctggctggaaaggtgatgtttgggctctcgagagctacagtcccgttattaaggctcctgatcggacatttaggcttctaaaaagctctgggggtgccccgatcttcgaggatgctgagtttgatgttttcgaatatcagcttggtgatgaaatttatctggttggctgtcatgggaataagcctagtgacgatgtgattatgtcacacatccagcatggtgaccctaagccgaaaccatacaaaacactgtaa

SEQ ID NO: 28549 - DNA, 396 bp, Escherichia coli
atggctgttcaatcatacaaacaccaatccctcttggataagggatatattcgcatcaagctaagtcgttctcagcataaggccatttttagggtaaggaaaattcgtatatgggatacgtatgcgtattactataacggtgaagaggttattgttgagcactttcttgcccgatggtttgtagccctgatttttgtcccttttctgttaattggcactttggcagacggttttcctagcacatggcaggagctaaagaaatgccttttcccgcatagatacggtagcctttcggcagacagctggcgagttatacctggtaaacattctgtggatgagcaacagattgttgattactggttgaagcgtatggctgatgctaaaaaagttgattga

SEQ ID NO: 28550 - DNA, 813 bp, Escherichia coli
atgcgtaacaaaaaaacaacagctttattactctctatcttgttattatctggatgcacttatcaatatgataataaggcatcaacggacgttgagtataaattcgaaaaagaaaaaagagtacctatcaactctgttggtgattttagcagcaaaatactcacaggtaaggaatttaatagaattattgcatcaaagatagatgatggttcatggcgtggatatgtcgttcactcattaacatacgcgccatacaacaacgttttaacatttcaaggtttgtctatccctagaagtatcacatactcaggaacatatcttaaccgtgattttgctgagaatagcggtagtgatagcgtgataacatctcgagatatgtctggatggtatggttttcatgtcgattcctctgaaataacaaagcatggaagctatgttggtgctaatgcttttggaatatctgctgatgtagaagtgttaaatactttaggtgccgaaattatctttggtagtacacaaataaatgaagggaaccctgaaacaatatgggcagatattgatataaaaggacaaatgccaaaagatgttaatgtaaaagaccttagaattgaatatttagcaaagataaatgggttaagcagcaatcatattgatataacatcacctactatttttaacccgtcagatatgagccataaaactcaggtttttatgggtgagttattagccgcgcgcctaataaatattaaaactggagaaatttatccagtacagctagagtgggtgttccgttcgcgtgaggctttcttataa

SEQ ID NO: 28551 - DNA, 774 bp, Escherichia coli
atgagcgcgttagcagtcttttcctttcaggaagagcatcaggtacgtgtagtgatgattaacggcgatccgtggtttgtggcgaatgatatttgcaatgctttaagcatccagaatgtcacacaagctatcgctagattagatgaagatgagcgatctatgtttaacataggccgtcaaggtcaagccaatatcatcagcgaatcaggtctttacaccctcattctccgctgccgtgacgcggtgaagcaaggcacaacagcttggcggtttcgcaaatgggtaacgaacgaagtcttgccctctattcgcaaaaatggagagtacgtttacatcgagcctgagccaatgcgagcagcggagccgttgaacgggaggcagaaagcgtatctgcgagggctgattaacgatatagcacaaagttttcggtgccgaaatgcctggatcagtggaatatggttggctttgcgtcgggcgtgtcgtaatccatccccgaaccccataacggttgatgatttgccagcaattgcggcagaactgcgcaggattttgacggctgctgagtcggcattgaggaacatgcgcacgtatgaacgggagttgttgcgtgatgttgttcgtgggggtaggcggagtatgtcgtgtggtgatttgcccatcatcgatatcaactctgatctggaaaaggcgttacccgcacattttgaactggcagttcaaaaacttgagcatctatccgcgcagttaaagccagcagaaatcactaataaatag

SEQ ID NO: 28552 - DNA, 774 bp, Escherichia coli; identical to SEQ ID NO: 28551

SEQ ID NO: 28553 - DNA, 813 bp, Escherichia coli; identical to SEQ ID NO: 28550

SEQ ID NO: 28554 - DNA, 396 bp, Escherichia coli; identical to SEQ ID NO: 28549

SEQ ID NO: 28555 - DNA, 3996 bp, Escherichia coli
atgacattaaacgatttctatgcggatcgctttggcagcgatccgttctcgctaattgaagcagcacgggatgaactaaccgagctggcacagatggctggtatcaactggcctgcctgttccgacaacatccaactcaaccctcgcgggggggttgagcgttactcttcatacaataaaacatctccagaagctctcgaaaagagcctgaaaggacgcgtagaaatttactccaggctggaacacagcaaagggattgattacccgttcattaacttcgtccataaaggcagcgatgctggctcatggagcggtttctccttcctgttttctgaatatcgccgtgagcaacaacggaataatgcgaccgtggtcgcacaaccggaagaagaacgggaaagaatagaacgtcaggccgaagcacgtcgtcgccgtgaagaacaaaaacgaattaatgacctgaaaaacaaccaaatggaccatgaacgtttgctgggatggctggcattccacagcgcgtgggaacatgctcaggctgaagacggctcatggccatatgcgattaaaaaaggtattcgtgacgtttttagttcatgtgatgtgcgtcgcgtgaccagtcacgacagtgcgaaatggagccgggggccaaccacatatatggctatccctctggctcacctggacggtcgttatgatggtcgtattgtgggttggcagcgaatcgacaaacaaggtgggaaataccagaccagcgcagtaaccagcggcgatttcgtcggtgcctgctttgttatcggtgagctgaaaggggcgcaaaacatcgctgttacagaaggttttgctactggtgcatccatctggcttgccacgaaaaaagataaacgctttgacgctgtggttgtcgctgtatccgctaacaacatggttcatgttgtggaacaactggtaaacatgtacccggcggcaaaaatcacctgcgcactggataatgaccggaaatctgccacagaaggaaaagggaataccggcctgcggactggctatgaaatcttatcgaaattcaacgatgtccgctgcgtctacccaacttttgaagacgatccgcaaatggagtgcagtgacttcaacgacctgcacaaactacgtggacttcgtgaaacagcacgtcaactatttgcaacagcaaaccgcctgaaaaccggcactgatttgctatctctgacgctcaaccgcctgaagacaattaagcgggataaccgtcgtacttttgccaaagagctgctgagagcggtggatattggcatgctaacctgtccggttcctaacagtccgtcagatttgtttaacatgttctgtatcgttctgcgtgaaatggggctggaaaatatctatcgcgctacggtaaaagaccacattgcccgtcgcctgaataaaaaatgccgtattgcccaggctccgcgctctttcagcgaacgcataactgatcccaataaacgccctcaacatatcacctataagcgttttgaaacttcggtaatgaccgatgacgtcctgaagtacgtgcaatcactacaggggatcgtcatcgttcgtgctggtatgggttccggcaaatctactggattgttacgaccgttaatgcatagctcagaacgcggtatctctgtagctcaccgtgtttcccttattggtggcctgtgggaaatgatgactgaaggaaaaggtgtaaaagccgatatcctgcactatcaggaccctggctatcaggaaatggctccatacgccagtaaactgaccatctgcataaactcgattgttaaaaactgctggcaaccgttgatgcgccagcacgactattttggctttgacgaggccacacaagggctacgtgccgttctttccggtcgggctatggaaaacccggtggctgtattcaatacgctaattgacgcgctggccagaacggaacaacacccaataatggtggatgctgatgcgaacgatctgctggttgacctggctgaactggctatgaaacgccgtgaagaactaggtttaccggcatggctgcagatccacgtaattgaattacctgttgatgttcgcaaccgcgaaacaggtgagccaatccgggttttttatacagaaaaagatcgcatcatgaccgaggtggtgaaagctgtatcggatggcgaaaaaatcatgttggccaccgacagctccacctttgcagaagatgtgaccgccaccctgagaatgcattttcctggtaagaaatttctgtgcgtaaaccagaaaagcaaacaggatgaagaagtcgatgcttttaccaaccagccaaaagtaatggtgatgaaatacgatggactgatctacagcccgtcgatttcctccggggtgtcatttgagaaaaaacattttgaccgtcatttcggcatgttctgcggtgaagttgtgcccagcgacgcagtgcaaatgctacgccgcgaccgtacagcaaaagaatttattatcggctttgataaagctcgtgcaaaacgcgagactgatccgcaaaaaatagaacgtgcattcgcccaggcattacttgctaccgcaggcatgaacggtgaactgacggatgtcgttttcgatggcgaccgtatatcaatgggggtggccaataccgactttaccaggatgaaaattaaagctgccgctattgaagcgtctgcgcgtaacgactacgccagcaacatgatctgcatcatgcacagcgacggttataaggtatcgccattagctactgattatgccgcaaatgattttggtaaagagctgcgcaaagaagcgcgggatattgtgtgggaacagacgctggatctgcacctcaatacagagacaccagaagaatcagagcgtgaagaactactaaaaaaacgtgcgctaacgcttgaagaacaggcaaaacttgtccgctgggatattgagaacgaactgaaactaccggttgaagaaggcacgctgaaattctatttcgatggtgctcgagacaaaattcgccgttatgaaacgatgctgcttgatgaagtcacagcccgtcgttatgaccgtgaagaagcggctatcaattttacatacgcataccgccagaccggacagtggcaatattttgtggtgaccgcgatgacacgcgagcaggctgatgatgtattcaaagcgaaatttccgggaataatcgactacaaggtaaaagccaccccagctgttgaggtcggcatgcgcggattctatgcgcttaaatcagcaactctccggcagtattttatcgactgcggtatcgaccctgaaactatgactggcgaagcgacgcaggaacgccttaagttcgctcgagataatctcatgacagcagaacgccgtgacctgttgaataacgttctgcgcattggtggttttatgacaccaaaagggaagcctaaagtgccggaagcactgtttaaaaacatctgcgactctctcggcctaaaaacaggaaaacgtcgcggcagagatggcgataagcgcccgacattgcgttttgttgagcctgagtctgtagcatttatgcttgatattcttacgcaacgtcaggaggacggtatgacgttgaaagctcgcaaggcagaaaaatcaacgaccgaagtggatcgcgatttgtcattaaatatatatatgaatggtgaaacgcgatccacaaacacggaggaacaggatccccctcgttcagctatatcacaggctttggctgtattgccggtggctgttcctgagtcctgggcgatgagtgcgctttccagtgaggagttggccactatgtcatcatggtcatcagccagcatagctatgacgtttgcatccctgtacctcacagagttcatggatcacctttccagcaatgagctgcggcggttacgtgaatacattacggggaatagctcatgcagctacgaagagcagggcgctttctatgggtaa

SEQ ID NO: 28556 - DNA, 597 bp, Escherichia coli
atgaaaacacgaggcgaacgactgaaagcacgccgtttagagatgaagctgacgttgcgagaagttgctgaggctgtcgatatctctatagcaggcgtccaaaacttagaacgtggcgacgtaatgccgtcactggagataggtattgccctggctaagtgcttacgcaagccagtgcattgggtgctatatgggacagaatatgaccctgatcgcattcctgttattggcacaactgaaagtgggccggatgaagagtggaagccgggacaggttccaaatactgagcgattcctgccattcatcagccagcgcaatactgtgtatgcgttaactatcagcaatcttacgcagggaaactatcagccaggcgattttctcctggtcgattctgcgctggaactggtccccggcgaggatgttctggttcgtgatactgcaggaaatatcactatccagcgcctggcccgttttgatgatgaaaattactatctggatggaacaaactcacaacgcgccatcttcaggaaaagcgatcttgaatttgttcaccaaatagtcggaacgatcaaatcattcatggttgaaggtagatga

SEQ ID NO: 28557 - DNA, 711 bp, Escherichia coli
gtggagcttgagtatatacgcagctgcgtctctacggcattggctgatgttcattatcgccagcgtggcattctggaggtccagcttgagcagatgcgtctcggtagatcaggacggtttaacaataaaccagtccggtcaatcagtgtgggggatgataactcatacgaagtgtccgttcctgctgagccggttagattccatcaggggaaaacatttaaacaatcatcaatgttgctcactgatattgattttcagagcgccagctggcgcagggctattggtcagttgaataacgaggaatcagcctggctttattattgctacggatgcaagcctgactacaacaatgatgtgattgtttgtcagtggttatggcttgattttctggttgcgcattcgggtggcgggtttaaaaaaatgaaggcctccacgaaaaaagccatgagaaaattgatttattacgcggcacagcaggttaagtcagaacttacgtgtgctgaggcagttgatgatagagaacaggacaggcagctgagttttctactgaatatatctattgatagctggagacaagattataaagaacgctggcttttaattaagtcgcgatgtctgagcttaaatcgaactgcattattaaatgcggcggagaagcgcagtgaaatcatcaaacgccatcgggcaggaagtgccattctgcctttgtaa

SEQ ID NO: 28558 - DNA, 558 bp, Escherichia coli
atgatcacgtttaccgacaaagaactgattaaagaaatcaaagagcgaatcggtagcctggacgttcgagacaatattgagcgccgtgcttatgaaattgcactggcatcgctggaagcagatccagttgcttatattttcaaacatccggctggaaaattattctgggctttaacggatgaaagcaataaagagcaatcggacgttattcctgtttatgccgcccctccagtgccagtagtacctgaagaaaaaccaatgcctaaccctcttaaaatgtacgcggttgatgctgttgccgctattgcagaggtgagaggctggaacgcctgtcgtgccgctatgcttcagagtcaaggtaattgcattaaggatggttggataagctgtagtgagcaaatgccagatgatggtcgtattcagttttctgtttcacttccagcagcatgtggtggagataaatattttattgatggtgtatttcaacctttgagatatgagcgtgactgtgaaaaagcggttgtggccgctggcggtgtagttaattgggttaagtaa

SEQ ID NO: 28559 - DNA, 579 bp, Escherichia coli
atgaaattttccaaattttctgagttggtgaatcgtatcttgtccaacaaacacagccagcgttgcgatatgaatgtaacgattgttgttcattcaccaggtagcattggttcaacaccatcagttgatgttcagtcaattcaggctggttttgactgggattccggacaagtaatgatttttccagcccagcaactgactacgctaactccagagcaggttgctgatattactgaaagcgtgcgcaaaggacagtcctggcacgcatatcaggaatacaaaaagcataaagagcagttggaaaaattgtctattgagctggaagctgcaagaaagcgaattgtagaacagggaaacaaagtaacaccagtgtcagctgaactgccacctgcaaatgaaagtgttttgttattcgatgctaacggagaaggctggctgattggctggcgttctctctggtacacctggggacaaaaagaaaccggagaatggcagtggacatttcaggtcggggatcttgaaaacgtcaatatcactcattgggcagtaatgccgaaagcaccggaggctggagcataa

SEQ ID NO: 28560 - DNA, 291 bp, Escherichia coli
gtgaatatcgacacaacaatgacggtcgatacggttctgaatactggtctggccctgtttggttatttttacatcatgttcagcgcagggaagtgggcggccactgtttttctaaaacagtggaaaaaacggcgcaaacaggagctacgccagaaggcattagaagcgttctatgacgcatttgaacttaacagcattgaaccaggcacaacagtcagagtggcaaccaaaggtgatctgatgatcatgatgttccgacaggagaaagcagagaaaggggaatccgcatga

SEQ ID NO: 28561 - DNA, 324 bp, Escherichia coli
atgggagtaccgtggtttcagctgaagtcggtgaaatttccggagccggtcatcgccttctccagtaattacgcgctatacgcatcgatgtcgaacagggttatgtctcatctcgaggagctggtgccgggcgtggagcagtacagtattgatgagatgtttctcgacgtgcggggtattggcagctgcatcgatttcgaggatttcggccggcagctgcgtgaacacgtcaggaacgggactggcctgactatcggtgtcggaatggggccaaccaaaacgctagcaaagtcagcacagtgggcttccaaagagtggccatag

SEQ ID NO: 28562 - DNA, 600 bp, Escherichia coli
ttgctttattatgataaaacaatctctagattagaaaattactgtaaaaaagcagatatatcaatacacaatcctgtcatatatgactcagtaacattaccctcaattagcgagatcgctattgattgtataaatcgaaattcgttactgccagtcattcctagtatactgcatggagatctttgctttagcaatattttgcttaactccagattagatagaataaaagttattgatcctcgaggtatgaatcaactcggtgagttaactatatttggcgatcaaaaatacgatcttgcaaaactaagccattctgttatcggactttatgatcatattatatccgggcgttataagttgtcaggtgatatttttagtagtgtgaaaatagattttagtacgaatgaaatagttgacgatattcagagagaatttatgtcaagacgtttcatatcctttattaatactcaagatatcatgccattaaccgttttgctttttctttcaatgcttccattacatgccgacaggccagatagacaaaaagccatgctcgctaatgccttaagactttattctacatttatttatcgcaattaa

SEQ ID NO: 28563 - DNA, 222 bp, Escherichia coli
atgaaaatcatcacccgtggcgaagccatgcgtattcaccgtcagcatccggcatcccgtctttttccgttctgtaccggcaaataccgctggcacggcagtgctgaagcgtataccggtcgtgaagtgcaggatattcccggtgtgctggccgtgtttgctgaacgccgtaaggacagttttggcccgtatgtccggctgatgagcgtcaccctgaactga

SEQ ID NO: 28564 - DNA, 1374 bp, Escherichia coli
atgccacgcattaaacctctttttattctttgtgccgccttactgacggccatacccacagcgtcagcggatgtgaacagcgacatgaatcagttctttaacaagctgggcttcgcctccaataccacacagccgggcgtctggcaggggcaggccgccggttatgcttacggtggctccctgtatgcccgtactcaggtcaaaaatatccagctgatttccatgacgctgccggatatcaatgccggatgtggcggcatcgacgcctatctcggctcgttcagttttattaatggcgagcagctgcagcgttttgttaagcagattatgagcaatgctgccggttacttttttgaccttgccctgcagacaacggtgccggaaatcaaaaccgcaaaagacttcctgcagaaaatggcaagcgacattaacagtatgaacctcagctcctgtcaggtggcgcaggggattgtcggaggattatttcctcagactcaggtgtcacagcagaaggtctgtcaggacattgccggtgagagcaatatttttgctgactgggccgcgtcccgtcagggctgcacggtcggaggacagtcatcgtctgttcgtgacaaggccagtgacaaagataaggaacgggtgctgaagaacatcaatatcatctgggactcgctgtccaaaaacaggatgcttgatggtaacaaagaactgaaagaatttattatgacgctcaccggtacgctgatttttggggaagacagcgagattacccccctgccggcacgcaccactgaccgcgatatcctccgggcaattatggaggggggaacggcaaaaatttaccactgtaacgattcggacaagtgtctgaaggtggtggcggatgcaaatgtgaccatcgcccgggataaagccctgaaatcacagattacaaaactgctcaccagtattcagaataaagcggtgagtgatactccactggatgacagggaaaaaggcttcatttccagcaccaccgtccccgtctttaaatatcttattgatccgcagatgctcggtgtgtccagcagcgtggtttaccagctgacggactatatcggctacgacatcatgctccagtacattcaggaactgcttcagcaggcccgggccatgattgccaccgggaactatccacagaccgtgctggacagtgtgctggagaatctgaatcaggcacagcaacagattgcggttttccaggggcaggtaaaggtccagcaggatgcattgctggttgttgaccgtcagatgagctacatgcgccagcagctttccgcccgcatgctcagccgttaccagaacaactatcacttcggagggagcacgctgtga

SEQ ID NO: 28565 - DNA, 1581 bp, Escherichia coli; identical to SEQ ID NO: 5624

SEQ ID NO: 28566 - DNA, 2586 bp, Escherichia coli
atggcctggtgtctgtgggatatgctgacccacccgcgctacggcatgggtaaacgtcttggtgcggcagatgtggataaatgggcgctgtatgtcatcggccagaattgcgaccagtcggtgccggacggttttggcggcacggagccgcgcatcacctgtaacgcttacctgaccacacagcgcaaggcgtgggatgtgctcagtgatttctgctcggcgatgcgctgtatgccggtatggaacgggcagacgctgacgttcgtgcaggaccggccatcggataaggtgtggacctataaccgcagtaatgtggtgatgccggaagatggcgcgccgttccgctacagcttcagcgccctgaaggaccgtcataatgccgttgaggtgaactggattgacccggataacggctgggagacggcgacagagcttgtggaggacacgcgggccattgcccgttacggtcgtaatgtcacgaagatggacgcctttggctgtaccagccgggggcaggcacaccgagccgggctgtggctgattaaaacggagctgctggaaacgcagaccgtggactttagcgtgggtgctgaagggcttcgccatgtaccgggcgatgtcattgaaatctgcgatgatgactatgccggtatcagcaccggcgggcgcgtgctggcggtgaacagccagacccggacgctgacgctcgaccgtgaaatcacgctgccatcctccggcaccacgctgataagcctggttgacgggcagggtaatccggtgagcgtggaggttcagtccgtcaccgacggcgtgaaggtgaaagtgagccgggttcctgacggcgttgccgaatacagcgtgtgggggctgaagctgccgacgctgcgccagcgcctgttccgctgtgtgagtatccgtgagaatgacgacggtacgtatgccatcaccgccgtgcagcatgtaccggcaaaagaggccatcgtggataacggggcgcactttgacggcgaccagagcggaacggtaaacggtgtcacgccgccagcagtacagcacctgaccgcagaagtcaccgcagacagcggggaataccaggtgctggcgcgctgggatacgccgaaggtggtgaagggggtgagctttatgcttcgcctgaccgtggcagcggatgacggcagtgagcggctggtcagcacggcccggacgacggaaaccacataccgcttcacgcaactggcgctgggaaactacaggctgacagtccgggcggcaaatgcctgggggcagcagggcgatccggcatcggtatcgttccgtattgccgcaccggcagcgccgtcgcggattgagctgacgccgggctattttcagatcaccgccacgccgcatcttgccgtttatgatccgacggtacagtttgagttctggttctcggaaaagcgggttgcggatatcaggcaggttgaaactacagcccgctatcttggcacggcgctgtactggatagctgccagtatcaatatcaagccgggccatgattattatttttatatccgcagtgtgaatactgttggcaaatcggcattcgtggaggctgtcggtcgggcgagcgatgatgcggaaggttacctggattttttcaaaggccagataaccgaatcccatctcggcaaggagctgctggaaaaagtcgagctgacggaggataacgccagcaaactggaggagttctcgaaagagtggaaagacgccaacgataaatggaatgccatgtggggtgtcaaaattgagcagaccgaagacggcaaacattatgtcgcggggcttggcctcagcatggaggatacagaggaaggcaaactgagccagttcctggttgccgctaaccgtatcgcgtttattgacccggcaaacgggaatgaaacgccgatgtttgtggcgcagggcaaccagatattcatgaacgaagtgttcctgaagtatctgacggctcccaccattaccagcggcggcaatccgccggtattttccctgacaccggacgggcggctgacggcgaaaaatgccgatatcagcggtaacgtgaatgcgaactccgggacgctcaataatgtcacgattaaccagaactgtcggattatgggaaaactgtctgccaaccagattgaaggtgatattgtcaaaacggtgggaaaagcctttccgagaaatggcagttatgccagcggtacaataacggtcactgtgtacgatgaccaggcttttgaccgtcagatagtaatcccacccgttctgtttcgcggtggtaagcatgaaaacttcaacagcaacaaccaacagtcatactggtattcaacctgtaagctgcaggtactgaagaacggacaggaaatctttcagcaacccgcgacggatgtcagcagggtattttcatcagtcattgatatgcctgccggacacggccatgtcaccctgactttcaatgtttcttcatatggtgctaataactggacgccaacgaccagtatcagcgaccttcttgttgttgtgatgaagaaatctacagccggtatcagtatcagttga

SEQ ID NO: 28567 - DNA, 399 bp, Escherichia coli
atggcgcagggtcaggggcagattcatcccctccggcagcggaaactgtgtcgctgccgcgttcatataataggcccgggtaatggcgttaaaccgttcagcctgttcaccggaccaggagaactcacgcagcccgtattcaattctgtcaccaacaagctggctggacttcagatggatgcagaacggcactccgcgtggcagtttggtgcgcagcatgtggtcgagcgcctccacaatggactcattcgccccattgatgggaatggcttccagcataaagcccatcgtggtgtcattcatgaacagaccggactcctggttgtaatcacggtacggcagcagacggctgaactgcgggaagctcatttcgcccagcacttcattggcctttgctga

SEQ ID NO: 28568 - DNA, 471 bp, Escherichia coli
gtggggattgtcgggagtatcggcagcgccattggcggtgctgccagtagtggcgcatcagcgtcaggtggtacagccattcaggccgctgcggcgaaattccattttgcgaccgggggatttacgggaaccggcggcaaatatgagcctgcggggattgttcatcgtggtgaatttgtcttcacgaaggaggcaaccagccggattggtgtcggcaacctgtaccgcctgatgcggggctatgcggaaggtggttatgtgggcggtgccggaagtccggcgcagatgcggcgggctgaaggcattaattttaatcagaacaatcacgtggtgattcagaacgacggtacgaatggtctgccaggtccacagatgatgaaggcagtgtatgacatggcccgcaagggtgcccgtgatgaaattcaggcacagatgcgcgatggtggtctgttctccggaggtggacgatga

SEQ ID NO: 28569 - DNA, 663 bp, Escherichia coli
atgattaagattgagaatttgacaaagtcatatcgtaccccaacggggcgacactatgtgtttaaggatttaaacctcgaaatcccttcaggaaaaagcgttgcctttattggtcgcaacggtgcgggtaaatcaacgttgctaagaatgattggtggtattgaccgccccgacagtggaaagatcatcaccaataaaacaatatcatggccagtcggcctcgccggtggatttcagggaagtttaactggacgcgagaacgtaaaatttgttgcgcggttatatgcgaaaagtaatgaactacatgaaaagattgcatttgttgaaagtttttctgagcttggaaaatattttgatatgccgctgaaaacgtattcttcaggcatgcgttcacggcttggttttggcttaagtatggcttttaaatttgattactatcttgttgacgaagtaacagcagttggagatatgaggtttaaatcaaaatgtcttaatgtgtttaactcaaagaaagaagagtcctgttttataatggtatcgcatagtttaaattcattaaaagactattgtgatatagcattcgtttttcacgacgcaacaaaaatagttcgttttaataatattgatgaagcaatatctgagtataaatctattagcaattag

SEQ ID NO: 28570 - DNA, 777 bp, Escherichia coli
atggcaagaagtggatttgaagtccagaaagtcaccgtagaggcattatttctacgagaaatacgaacacgttttggtaagtttcgtctggggtatttgtgggcgattctcgaaccctctgcgcatttgctgatactgttgggcatttttggttacattatgcaccgcacgatgccagacatctcattcccggtgtttttacttaatggcctgattcccttttttatctttagcagcatcagcaatcgttctgtaggcgctattgaagcgaaccaggggttgtttaattatcgaccagtaaaacccatcgatacgatcattgcacgcgcactgcttgagacgctgatttacgttgctgtttatatattgctcatgcttatcgtctggatggcaggtgaatatttcgagataacaaactttttacaactagtgctcacctggagtttgttaatcattctttcatgtggcatcggcttaatattcatggtcgttggtaaaaccttccctgaaatgcaaaaggtcctgccgatactgcttaagccgctgtatttcatctcctgcatcatgttccctctacattcgattccgaagcaatactggtcatatctactctggaatccattagtgcatgtcgtagagttaagccgcgaggcagttatgcctggctatatcagcgaaggcgtgagtctgaactacctggcaatgttcactctggtcaccctgttcatcggtctggcgctataccgaacgcgtgaagaggcaatgctgacgtcatga

SEQ ID NO: 28571 - DNA, 387 bp, Escherichia coli
atgaccacaacgcaaaaaacgactgatgttacggccccccgacgcagccactggtggtggacggtgccgggatgcctggcaatggtgttactgaacgcagccgtcagttacggcattgtcagactgaacgcaccggtgactgccgccttcaacatgaaacagactgtggatgcattttttgacagcgccagtcagaaacaactgtcagaagcacagtcaaaagctctttcagcgcgttttaacacggcactggaagccagcctgcaggcgtggcagcagaaacaccacgcggtcattctggtgtcgcctgccgtggtacagggggctccggatatcacccgggaaatccagcaggatattgcccggcgaatgagggcggaaccatga

SEQ ID NO: 28572 - DNA, 165 bp, Escherichia coli; identical to SEQ ID NO: 17502

SEQ ID NO: 28573 - DNA, 207 bp, Escherichia coli
atgaccagcaatatcatcagcgccattctgacccttgtttttattgagataggcgtaatagcgatctatttgtttcgtaagttaacgggacatgaagaacgctttattgatctcaatattgagtacgtcgccgcttatgccaaagggctttttccggctgccattggcgcggtgctcatagcgtttgttatctggtttatcgggtga

SEQ ID NO: 28574 - DNA, 264 bp, Escherichia coli
atgccgccgcaggctgtaacccttgaacccttggttcaaggtgaatgtgtcgtcgcagttttaaggcttctcggacggaccgagcatgctcaccaaccgcggagcgccacattcttgtggtatgaaatatcggctcaggggactggcccgcttgcgaacatctcagagaaattttgtcttcacggttactctaccacagtaaaccgaaaagtgtcattcaaagttttggttagttttttcggtgatgcgaccttgttcaagtaa

SEQ ID NO: 28575 - DNA, 867 bp, Escherichia coli; identical to SEQ ID NO: 4353

SEQ ID NO: 28576 - DNA, 234 bp, Escherichia coli
gtgctggcagacaatcaaaagcaagacgacaacctgcaattcgtgattgagaaaaccgacgatctcgatacgctttttggtaacaaccatggtttacgacaccatgatcagcaatcaacagcttacgaactcaaagatttcgatcaagagatctggaatattccacaggcttatcgttcaatttatcagccccagcagactccccttgatgagcaggctgtaaatcatgggtga

SEQ ID NO: 28577 - DNA, 306 bp, Escherichia coli
atgaatgaaattaaagaaataccagtagtacgtgatgaatatggctgctggacgcatcctgaatatgaaaaattctgtgatggtagagaatatatttcaacggaagagtttaacgcatggatggaggaaaataatcttcaatggaccatcagaactatggatgaagatgattttaatctggacgcagatggtcccgatattgcctcctggaaaccggagcgcccggaaggtgaaggctggttcattggttccattcatgacactgaagatggtcctgtttgtgtatggctgagaaataaggcttaa

SEQ ID NO: 28578 - DNA, 369 bp, Escherichia coli; identical to SEQ ID NO: 9121

SEQ ID NO: 28579 - DNA, 360 bp, Escherichia coli
atgtatctatttggtttcggcgctgaatggctatttacagcgacatttacctatttcattgttttcaaccttgaacaaccgagaacatttgtttctgagatgaactcattaagcagtatttgtcagttcttctctacagcattctttatgatgtggtgtgccaaacgaggatttaaacgcccatttatcattgctatcttaattgttgtatcttcagtgattggttatgttggtgtgtactatcttaatattccccatctgacctggctcattattggcatcactatctggtttggtctggggacgggggggggtatattacattccgtggagtgtatatgtattccttgccgatgttga

SEQ ID NO: 28580 - DNA, 399 bp, Escherichia coli
  misc_feature (311)..(320): n is a, c, g, or t
gtggggtacggaacatgggttgctaatactgattgtacggaaatcgtcggaatcgaaatcagtaaaactgactggaccccgcttagcgactggaaaatatttctggaattttatcataagaatccacgatgccgtttaattacgattgatctggaaaccggaaacgctgaagtgatattggatcgtaatacttggttagggcatccaatttttcgtccgaataataacgatactatcgccttttgccacgaagggccccatgacctggtggatgcaagaatgtggatgattaaccgtgatgggacaaatgnnnnnnnnnngagcaccaacttggtgaaagttgtacacacgagttctggatccctgatggatctgcactggcttatgtttcctatatga

SEQ ID NO: 28581 - DNA, 246 bp, Escherichia coli; identical to SEQ ID NO: 4533

SEQ ID NO: 28582 - DNA, 246 bp, Escherichia coli; identical to SEQ ID NO: 4533

SEQ ID NO: 28583 - DNA, 246 bp, Escherichia coli; identical to SEQ ID NO: 4533

SEQ ID NO: 28584 - DNA, 246 bp, Escherichia coli; identical to SEQ ID NO: 4533

SEQ ID NO: 28585 - DNA, 210 bp, Escherichia coli; identical to SEQ ID NO: 12517

SEQ ID NO: 28586 - DNA, 183 bp, Escherichia coli
atgcctgcttgtgagcttcgcccggctacgcagtacgacaccgacgcagtttacgcgctgatttgtgagctaaacaggcggagtttgaccaccacgcgtttcgcgtggggtttaacgccaatctgcgcgacccgaacatgcgctaccatttggcgctgctggatggcgaagttgtcggcatga

SEQ ID NO: 28587 - DNA, 510 bp, Escherichia coli
atggcagtaattcctagacgaaacgcaccaagtaaaaaaatgatctggcaatactggattgacaatggaattcaaagaggtttggatgatacgcgctatgataatgcgtgtgatttcaatgtatgtgtctgctgtggccgcgaatcctcgaaattggagagggcgcatattatccctcactcattaggcggaagtaatgatgtctcaaattatattctgctatgcagtaaatgccatagagaaagcccagatattgctaatgaatctgcgcttattgaatggatgaatgagcaacctactgaaatggacagcatgttaaaactaatccaacaggaaatggataaatataataaagaaactcaaatggaagttgatgaggttcagattaaagagattttcagtgatttatttaaaagggcagggacgcatggtggtagattttctgatgcaaccaaggtgtatattattagggaggctttgaaaaaaatatttagtcagactgctttatga

SEQ ID NO: 28588 - DNA, 1386 bp, Escherichia coli
atggaaaacgcccctgccagcctgcattcgctggatgtgaaatcgcgtgatatgcgcgggcagaaatatgtcttgcaggtggcaccggaagattgcaccggctgtaacctgtgcgtcgaagtttgcccggcgaaagaccgtcagaatccagagattaaagctatcaatatgatgtcgcgcctggaacatgtcgaagaagagaaaatcaattacgatttcttcctcaacctcccagaaatcgaccgtagcaaactggaacgtattgatattcgtacatcgcagctgattacaccgctgtttgaatattcaggtgcttgctccggttgtggcgagacgccgtatattaaattgctgactcagctgtatggcgaccggatgttgatcgctaatgccactggctgttcttcaatatacggcggtaacctgccctctacaccgtataccaccgataccaacggtcgcgggccggcatgggcgaactcgctgtttgaagataacgccgaatttggccttggtttccgcctgacggtcgatcaacaccgtgtccgagtgctgcgtctgctcgatcaatttgccgataaaatcccggcagaattactgactgcgttgaaatcagacgccacgccagagattcgtcgagaacaggtcgcagctttacgccagcaactcaacgatgttgccgaagcacatgaactgctacgtgatgcagatgcactggtggaaaaatcaatctggctgattggtggtgacggctgggcttacgatatcggctttggcggtctggatcatgtattgagtttgacggaaaacgtcaacattctggtgctggatacgcaatgctattccaataccggtggtcaggcgtcaaaagcgacaccgctgggtgcagtaactaagtttggcgagcacggcaaacgtaaagcgcgtaaagatcttggcgtcagtatgatgatgtacggccatgtttatgtggcgcagatttctctcggcgcgcagctgaaccagacggtgaaagcaattcaggaagcggaagcgtatccgggaccatcgctgatcatcgcttatagcccgtgtgaagagcatggttacgatctggctctcagccacgaccagatgcgccaactcactgctaccggcttctggccgctatatcgcttcgatcctcgtcgtgccgatgaaggcaaactgccgctggcgctggattcacgcccgccgtcagaagcactggaagaaacgttacttcatgagcaacgtttccgtcgtctgaattcgcagcagccagaagtggcagaacagttatggaaagatgctgcagctgatttgcaaaaacgctatgacttcctggcacaaatggccggaaaagcggaaaaaagcaacaccgattaa

SEQ ID NO: 28589 - DNA, 1248 bp, Escherichia coli
atggttatttatcaaggtggtaagataatatctgaagatgatttttattctcatctttattcgttatgtcagttggataatgtaggggttcttttaggcgcgggagcatcggtcggatgtggcggccaaactatgaagcaggtatggcagttttttaaatatgaacatcctgatctattgaatttgttactagaaaaatacttattggttgacaaaactgaatctgaacaagatatagttaatgttgagcttctaattgatgaagtaactaaattcttgtctgtggccaaaacaagacgtaatgaagacgaacaaaaagaaattagtttaatattaagtgctttgtataaacaagtaacaaaggctgcattgttaactggagaagagtttggttgtaaaaatcaagggaagaaaaaacagtttaagtctcataaagaattaatttcaaagttgatttcaaataggcagccgggacaatcggctccggcactttttactaccaactatgatttggcattagagtgggcagctgaagatttaggaattcagctatttaatggtttttcaggattgcatacaagacaattttatcctcaaaattttgatttggcatttagaaatgtcaatgcaaaaggggaggctagatttggtcattatcacgcttatctatataaattgcatggctctcttacatggtatcaggatgattttttaatagttaatgagataagtgcatctcaggcatatgataattacattaaaaatattattaatggtgacggtttttactatggtcaacatttaatttatccgggggctaataaatatagccatacaattggttttgtttacggtgaaatgtttagacgttttggcgagtttttgtcaaaacctcaaaccgctttgtttattaatgggtttgggtttggtgattatcatataaacagaattgtttttggtgctttgttaaatccgtcatttcatgttgttatttattaccctgatctggagaatgctttagataaagttagtagaggcgttgcttctgaaggtgaaaaggcaattgatgctttaaaaaatatgcaattcaatcaagtgactatcgtgggtgggggggcagatgcttactttgatagttttgtgaaacatcttccttatccggtgttgttcccaagagaaaatactgttgatgacttggttgaagctatttctaaattgtctaaaggggaagggaatgtcgcattttaa

SEQ ID NO: 28590 - DNA, 1821 bp, Escherichia coli
atgtcgcattttaaactatctgaattatctgctattgggtatgtcgttggtctggagggcgaaaaaataaggataaatcttcatgaaggattgcaaggtaggctcgcctctcatagggatggtgttagttctgttactcagcctggagatttgatcggttttgatgccggaaatattctggttgtggctcgagttacagatatggcatttgtcgaggctgataaagcacataaggcaaaaataggtacatcagatatagcagatatgccgttaaggcaaataatagcctatgcaataggttttattagacgagatatagatggatgtgtgtttgtttcggaagactggaggttacctgctctgggagcatccgctgtcccgttaacatctgattttttaaatatcgtatatagtattgataaaaatgatctggataaagcaattgagttaggaatagattcgaggactaaatcagttaaaattttagctagcattgataaattactaaccaggcatatggctgttttgggcagtactggatatggtaaatctaattttaatgctttacttacacgccgcatttcagaacagtaccctaatgcaagaatagtaatttttgatattaatggcgagtattctcaggcttttgaaggtgttgctaatgttaaacatactattttaggtgagttaccaaaaggagagtttccaaaaccacctctacagaaaggagatatattttctgagaatgaacattactactatagaaaaataccttatcaagcattgggatttgctgggttgataaaattactacgccctagtgataagacacaattacctgcattaagaaatgcgcttaatgctataaatagtgttcatttttccgatgattcattctttcttaaggatgaagtagggggcgtatttaatatttttgatgattgtagagatgaagggcaagagcttttatctgcgtggttgagtttcttaagaagagggatgctgtgtaaggcaaataaatggccgccgtttaaaagtattgctaacttggttgcggagtttggttgcgtggcggcggattcgcgaaaagctggatctagtaaacgagatgcttttagctatggtaatgttctgccattgattaagataattcaacagttatcagaggattctagattcaagtatgttgttgatttaaatggaggtggtgaattattaagtgatggcaaacattgggaattagctatgagacaggaagttgattatttctttggtaaagaaaagggagaggagaatgactggaatattcatattgttaattttaagcatctttcacaagatcatgctccaatgctgttaagtgcattattagaaatgtttgctgaagttctctttcttaggggacaaaacaaagcttttccaaccgtgttacttcttgaagaggcgcaccactatttaagagatccttattctgaagttgatgctcaaattaaagcttatgaaagacttgctaaagaagggcgtaaatttaaatgttcacttattgtgagcacacaacgaccatcagagctttcatcaacagtattagcaatgtgtgcaaattggttttcgttgcgcctgacaaatgagcgtgatttgcagactttacggtatgcgatggaaagtggaaatgagttaatgattcggcagatttctgggcttccaagaggagatgcaatagcgtttggtgctgcttttaatatacccgtaagaatttcaattcaccctgctgtacccggtccgagatcgtctgacgcaagttattctcaagaatggcgataa

SEQ ID NO: 28591 - DNA, 423 bp, Escherichia coli
atgtctgaactatatgatgcaaaaattattcatatcaacaacgatttcactaaatttgttatcaataagggtgagaatggaaatatacgtgacgggatggtatttttaatttattcacttggggaaaatattatagatcctgacacaggaatagatttaggccgacttgaaatagtaaaaggtgaagctattgtacatcacatacaagagaaaatgactacattaatttcgcgtgaattcatagaagagccagtaaaggaagaaaccatatataaacgtgagattttcgcgcatcgcagattaattagcgatctctatgagggggtccgtactcctgcgaaaaaagtgagagtctccccagagaaaaaaatcaagcctcttttagatgtaaatataggggattatgttagaagagtgaagtga

SEQ ID NO: 28592 - DNA, 513 bp, Escherichia coli
gtgaactttaatgctttaaaacccagcatttcgtctgctgctataggtggtgcgggcttcttatctgcattagtaactatgtttgtaaacgttcaatctgagctatcggttaaatggtttatatttttaacatggttaagcataactatttttattcttttgattaagcgtattgatgatcttgaaaaagagaacggaaaatcttttcctgcaccatatgaaaagccaattaaaatattaagtggtgatgggcttattctgataaagaaaaacgccaatttctctaacaatataatagttggctgctatcttattaatgatgaatttgaaaagatcgcattttcagcacacgtctatcacatccaggaaaatttattgcagttaaaaataattgatagttattgtacagaagaagagcttgatttaataaatgcaaagggtgcaagctcaatgttaattgtcaggcctaacataccttacgaattactcgaaaagtttggagagagagactaa

SEQ ID NO: 28593 - DNA, 597 bp, Escherichia coli
atggcgaaagcgatattgaataaaatcggcattaccactaaagccggtgatatgactgtttataactacgacgggaaaacgcgcaagtttctgtcgacttccacagagtatcttgcagtaggcgtggggattcctgccaattcctgtaccgatgcgccggtcgatgagaaagaaggttttgccatttgccgcacggccagccttgatgggtgggattatgttgtcgaccaccggggcgagactgtgtatgacaccgaaaccggccagcctgtcgagatgacagggcttggtgattaccctgataatgtgaccaccatcgagccgctgacgccttatgaccgctggaatggtaacgagtgggttacagatgcggatgcgcagaaaagcggccaggttgcagcggctcaacagaaaaaaaactcattgctggccgaggcgcaaagaactgtcagcctgtggcaaaccgagctgcagctcggcatcatcagcgacgatgacaaagtcagcctgattgcatggatgaaatacattcaggcgctgaacgcggtcgacacctccacggcaccgagtatcgagtggccggttaaaccggagtaa

SEQ ID NO: 28594 - DNA, 837 bp, Escherichia coli
atggctaaatttggagatggtgcggctccggctatcgaaagaatcctttcggcttatggacttagctcgcaaaaagaacttggcgaaaaacttggtatttatgccaacaacataagcagttggcttgccagagatagcgttccgggcaatgtatttgttgaatgtgctattgaaacgggcgcagatatcggatggttagtgacaggggagcttgcaaaagcaaactctccacgtgcgaccctgaagggcaaagagctttatgaaaaggtcatggcttcaggtggtaaacctgttctgagacgcatccttgatgcttacggtttttctatgcaaaaggagctgggtgatttactcggtatatcatctggaacaattagcacatgggttcggcgtgattttttcccaggtgatgtagttgttacttgtgctcttgatactggtgtttcgctggaatggttagcaaccggcaaggggcaaatgcgaactaacagagaaatggtcacatcaagtttttcaattaaaaaatttcgccttgaagcgggtgagcttaaggacgctggcgaatggcatccagacccctcgatgataccctctgactcagaggagttgatttttgttgaaggtgttggagcctcttggcttgtcaaccgttctgcttcgaacataagtaatgggcgttggttaattgatattgacggcgctcttgatgtttttgatgtaattcgtcttcccggcggaaaagtcaggttgtcaaataagtctgctgagtttgaatgcagcattacagatatcacaccagtaggtgctgtaattttcacattggaaaaacacgtataa

SEQ ID NO: 28595 - DNA, 228 bp, Escherichia coli
atgctgaaaaatgaaccctcattcgcatctctgctcgttaagcaaagtccaggtatgcattacggtcacggctggatcgcgggtaaagatggtaagcgctggcacccgtgctgctctcagtccgaattattaaaagggctgaaatccaagcagtcgaagtcgtcaggctttttaattattcgtattgtccactttattattaaagggattaagcatgtcacgcgatga

SEQ ID NO: 28596 - DNA, 201 bp, Escherichia coli
atgtcacgcgatgaattaagaattgttttaggagccatgattccgaatatggaagacggttttgaaattaaaacccgcgacggcgcaatacttcgcgttgaccctgagtgggagtgctgcaaagagtttaaggatggcctgaaagctgaaattatcagccaattaaaaagtaaacctgccgttgtatttggctatagctaa

SEQ ID NO: 28597 - DNA, 237 bp, Escherichia coli
atgcatcgactaccaagtgaaataccgcagcaccagacaagaaatattaagttaatggctatcgttcatcgcctgcagcggataatggtcaatgagaatttgtcacccgccgagctggtcgggtgcgccgaaatagtcagggataattacggcaggctgtacgatattagtaatccgaaaattgaggcgtttacaccggcgagaggtccgattattccgccgccccgccgacgatag

SEQ ID NO: 28598 - DNA, 1224 bp, Escherichia coli
atgacgactactagcagcatattcagtaaatttaaagcaaaaaaaaataaaattaaaaatgttgatttatattttacaccctctaaacctattgaggcacctacccatttgaaaggacgtaataacgaggtggaacatatcctcgataccttaactactgatggcaagcattgtatgatttatggagagagagggattgggaaaagctcgctcgccttatctactttagagggagggaaaaatgaaggtgtgttacctagtaatatttttgtagtgcgatgtgataaaaaaacaaaattcaaagatattattgcaaggccagctatatttattgatagtgaatatgccgcaaataaaagagagactactaaaaaagcaggtgttggccttaatgttttgaaattatttagagcggacgtttctgccgaagagaaaatcacgatagaaaaagaagatcttactccaagtaaagcctgttttgcgcttgaagaattgaatgcaatacttttaatagatgaatttgatgttgtcagtgatgacgttaagcatgatgtcgctgagtttgttaaacaacttagcgattccaatagtcctttgaagattttattagttggcatttccagtgacggtgcttcgttgatagcaggtcatccttctgtgaacagatgcctccatgaaattcaactctctcgaattgaagataaatatttacatgaaataattgagactggcgagcgtggcttgggtataacatttagtagtgacgttaaaaactctatagttgaaattagcaatggttttccatatttcacgcatcttataggaaaggaatctgcagatatagtattatcatctggtaaaagcgaagtaaattccgacattcttcctgaagctttgaggcgagcagtagtaaacaccgagggacaacttaaaagagactatgagaacgcagttacttcatccaggactgatgtttatccatcaatactttatgcagcagccaaattcaaagataataaatttaccattcaagaatggattacccaaattcgagaagatacgggaatttcattaagtaactatcacatgagtaactatattgggcgttttactagggctgataaaggagcgatccttacaaaggcagctagaggggtatataaaatttcagatcctcgtatgcctagttatatcagaatgataaatagtaaagacgaagtttaa

SEQ ID NO: 28599 - DNA, 576 bp, Escherichia coli
atgcgtcaggaaacccgttttaagttcaatgcctatctgacccagctcgccaaactgaacggcatcagcgttgatgatgtcagcaagaaattcaccgttgagccgtccgtcacgcaaacgctgatgaacacagtgcaggcgtcatccgcatttctgcagatgattaacattctgccggtcgcagaaatgaagggcgagaaaatcggcgtcggtgtgaccggcaccatcgccagcacgaccgacacatcaggtgacaaggagcgccagaccgcagatttcaccgcgcttgagtccaacaagtacgagtgcaaccagattaactttgacttccacctgacctataaacgcctcgacctgtgggcgcgtttccaggacttccagcgccgtattcgcgacgccattgtccagcgtcaggcgctcgatttcatcatggccgggttcaacggtaccacccgtgctgacacctcagaccgcagcaaaaacccgatgctgcaagatgtggccgtcggctggctgcagaagtaccgcaacgaagccccggcgcgcgtgatgagcaaaatctgcgtattaccgtga

SEQ ID NO: 28600 - DNA, 1401 bp, Escherichia coli
atgtctcgtattgaaagcgatttccttggtgagcgtgaaattccggatgattgctattatggtgttcagacacttcgtggaaaagataatttccatatcactgaaatgccaatgagtcaggagcctttcttcatcattgccttcggttatgtgaaaaaagcagctgcgatggctaataaggagttaggtacaattcctgctgatgttgcggatgctttaatctgggcttgcgaccaattaattgatggtaagtaccgggaacagtttgtgaccgactggcttcaggggggagccggaacgtcaaccaatatgaactgcaacgaagtgatttgcaatcttgctgcagaaaaacttggtggcgttaaaggggattacaaacgcgtttcgccaaacgaccatgctaattttggtcagtccaccaatgatacatatccgacagcattacatctggcattactgctgcgaagcaatgtattgcttgaagctgttgaacacctcgtaggagcattctacaaaaaggctgacgagttcagcacagtgctcaagatgggacgtactcacctgcaggatgcagtgccaatgactctcggccaggagttccatggctggggttttacaattaatgatgaaattcgggtcatccgtaatgcacaggaacacctgcgggttgtaaaccttggtgctactgcgattggtacctgtgttaccgctcacccggattatcccgctttagccgtgaaatatctggcccagatcacaggcattaatttcaggaacagtgaagatctcatcgctgccacaagcgactgtggtgcatatgttgcactcagttcggccatgaagagcctctctgtgaagcttaccaaggtttgtaatgacattcgactgcttgcttcaggcccccgttgcggcctggctgaaattaacctgcctcaattgcaaccgggttcttccattatgcctggtaaggttaaccccgttatcccggaagtaacaaaccagtcttgcttcctggttcagggtctggacaccacagtgatgctggcggcatctgctggtcagcttgagcttaacgttatggagccggtcatcacctttgcgcggttcacctcactcaaggtgatgacgaatgcctgtaacacactccgaactaaatgcattgatggcattacagctaattccgatcgaactgcagagatggtaatgcattcctgcggtattgtgactctcctgaagccacatctgggatataaggtgtgttctgaaatggcgcacgaagcataccatacaggcaaatccctccatcagatagtggttgtcgaacgtaagctactcacacaggaagaatgggagaagacattcaatctggataatctgattgctccgaagttcgaacaataa

SEQ ID NO: 28601 - DNA, 174 bp, Escherichia coli
atggtcgatatggcgtttatcactcagctgaccggcctgaccgataagtggttttacaagctcatcaaggatggggcctttccggctcccatcaaacttggccgcagctcccgctggctgaaaagtgaagtggaagcctggctgcaggcgcgtattgcacagtcccgtccgtaa

SEQ ID NO: 28602 - DNA, 1506 bp, Escherichia coli
atgggtggaaaaccggcggcgcggcagggtgacatgacccgcaagggactggatattgtgcagggttcagcaggggtgctgataggtgcgccaaccggtgtggcctgctcggtgtgtcccacaggggaagccacgccgaaatatggcaatccggtaaacccgctgctgggagcgaaggtgctgcctgctgaaaccgacctggcactgtccggcccgctgccgtttgttcttttccgcgcctacagcagctaccggaccaggacgcccgcgccggtggggggggttgctcccggctggaaagcccccttcgatatccgcttacagatacgcgatgaaggcctgatactcaacgacagcggcggcaggagcattcactttgaacccctgtttcccggcgagataagctacagccgcagcgagtcgttctggctggcgcggtgcggggtgctgaaacagcacaaaggccacccgcttgcgcggctctggcgggcgttgccggaagcggtccgtctgagtccacacatctatatgatggctgccagcacaaccgggcagtggctggtgctcggctggccggagcgggtgccgggggcggacgaggtgctgccgccggagccgcccgcataccgggtgctgacgggcgtggtggacggcttcgggcggacgctggccttccaccgggcggcagagggtgacgtggcgggtgcggtgacgggggtgacggacggcgcgggccgctgttttcacctggcgctgagcacgcaggcgcagcgggcggaagccttccgtaaacagcgcgcctcttctttatcttctccagccggtccccgttctgtttcctcttctcaggttttccccgatacgctgcccgccggtacagaatacggtgccgataacggtatccggctggaggcggtgtggctgacacacgacccggcatacccggatgaacagccgactgcgccgctggcgcgctatacgtacacggccagcggagaactgcgggcggtgtatgaccgcagcgggacgcaggtgcgcgggtttacttatgatgcggagcacgccgggcggatggtggcgcaccattatgcagggaggccggagagccgctaccggtatgatgataccgggcgggtgacggagcaggtcaacccggaggggctggactaccgctttgagtacgggcaggaccgtgtgaccatcacggacagcctgaaccggcgggaggtgctgtacacggaaggcgggggtggcctgaagcgtgtggtgaagaaggagcatgccgacgggagcatcacccgcagcgagtatgatgaggcgggggaggctgaaggcgcagacggatgcggcaggacggcggacggagtaccggctgcatatggcgtctggaaagctgacttcagtgatactgccggacggcaggacggtacggtatggttacaacagccagttgcaactgacttcagtgacatatccggatggtttacgcagcagccggaaatatga

SEQ ID NO: 28603 - DNA, 609 bp, Escherichia coli; identical to SEQ ID NO: 24525

SEQ ID NO: 28604 - DNA, 1275 bp, Escherichia coli
atgattacgggcttttcgccgtcatataaaaagattgttattggtgatgatgaaataacgatgcctggcgataaggttgtaaagtttaaacgcgcatcaactgccacatatatcaataaatcaggcgtatttagtgttgctaaaattgatgagccacgatttgaaaaagaaggtttattgattgaaggacagcgcactaactattttgttaaatccaatatccccgctgaatggacgagtaccagcaatatcgataaaactaataatggtgttgatgaatttggtttttcatatgccaaaatgcgaacaaaagataatatgacaggacaatcatctgcacttagtctgcatacatgcagtgcatcccgggggattgatgttagtggcgataataagtattgcactgtttcatgcagggttaaagctcctgatggtcttcgttgtcgtttgcgttttgaaaaatacgatgggtcggtttatacatttttaggagatgcttatttaactttcggaactctgataatagaaaaaactggcggagcagccaatagaatagcagctactgcaactaaagatccggttacagggtggattttctatgaggcaactatagaagctgttgaaggtgaaaccttaattggcgcaatgattcagtatgcgccgaaaaaaggtggtgtaactgaagcgggagattatatttaccttgcaacaccacaatttgaaaacggcggatgtgcttcatcttttgttattacgacaactgtacccgcaacccgctccagtgatatggtgacgatcccaactgaaaataatatctataatagaccgcttacgtgcctggtcgaggttaatagaaattggggcgatattcctcctaatgtagcaccgcgtatttttgatttttctggtgtgccacctattgagtcaattacatacgcttttaacacaactgagaaatattacggtcagctttatatgcaaacttataaagcgtcgacaagtacttacgtttctagtgtgtttgctggtcgaactgatgttcgaaaattcattggtggttttaatatttattctgatggtactaaacgagtagtttctaacggtgaggctactaaaaccatgaaaacggagtggacgggcgtaaaaacacggacctttattcgaattggaggtcaagccacatcgggaactcgtcatctattcggccatttgagaaatcttcgtctctggcataaagaattaactgatgcgcaaatgggggagagtattaaatga

SEQ ID NO: 28605 - DNA, 282 bp, Escherichia coli
atgaaagatttaacgctcaaatttgcagacagggccgacttttcggcctttatggagagtattggctattatgatgacgagtcgatgcagggtgatattcttattgacgtgataggtaacgtgtacaaagaaaccggagaactgactgaagatggcgaaccggtatgtgttaaggaggacggatattttgtaaacgtgcgcatcattaatgatgcaaaaaaatcgtcaatattcgataaatacgcgattgttgttgagcatcaacttcgtggctggatgtga

SEQ ID NO: 28606 - DNA, 1212 bp, Escherichia coli
atgcctgttaatggcatatgccaatttagccgggcttcatctgcaacgtatattgataagtccgggcatattaccgtggcagggaataacgttcctcgttttgaaaaatatggtttgctgatagagaatcagcgaacaaacatgttcgtaaatagttttaatcctgatgcctggaataaaagcggtggtatatctgtaacatcatcaacagatgaatttgagtttaaatatggacgtttcacggtaggaagcgatatagcaggaacgacaacagggcgaaatatatgcacagttgctggtaacaaaggcatagatgtgactggcgatgatcagtacagtaaaggtccgtatgttaccgcgtcgttcagggtaagaagtgatctcaatgttcgcgcacgtatccgttttgaacggtataactcggaaggatacaccttcctttgcgacgcctatttgtcattacagacccatgaactacaaattactggtggcaatgcccagctattaacagcaaactttgaaatcgatccaggtagtggatggatatattttcaggcaacactgaaatgtctgccagaatggggaatggttggtacgcagctgcaaattgcagccgacagagctgtggggtcttttgcaacaggtgactggatagaagtaaccaccccgcaattcgagtatggtgcttgtgcaacttccttcatcataacgacaactgagccagcgactcgtgcatcagatttatgtaaatttccgctgatgaaaaatatgtataccatgccttttacgttcatggtggaagtccataaaaactggtttatttctcataatgcggcaccgcgtgtcattgattcagaaaatcaccagtccggaggcccatttattatggggtttggttcttctggaactattagtcaggacggttattcgtattgcgatataggcggggctaaccggcgtgtatatgagtcatgcggagtaagagatcttgttatgggattcagggttaaggctgacggcatgacatgctcatttgcaaataagcatataagcacagaaacaaaaacagtatggaaatatattcgtgaagctgctgtgattcgtatcgggggacaaacgacgacaggattacgacaccttaatggtcatataaaaaacctccgtttctggaacagagcattgtcagatacgcagcttaaggaatacgtataa

SEQ ID NO: 28607 - DNA, 270 bp, Escherichia coli
atgcgggatataacattacgattcgataacagagaacagtttaacgcaattgtatatgacagtggcctgttcagtcttgaagaagaaaacggggttcttgttgatgttattggctgcattattgattacgaggagccagaaaacgaaagatgtacaggcattgatcgcggtggttttttcgtaaacatgaggattgttgatggcagtaaaaacatatcttctttaatgcctttcattacgacagatcagcatgtaaggacatgggcttaa

SEQ ID NO: 28608 - DNA, 1092 bp, Escherichia coli
atgattggcggcatgagaggagaaaaagtttccgaatatcgtttcgataataaacaaccgcttccaggaaactacgaacttgatttttatgtaaatcaccagtggcgtgggaaaaaagatatcacgatcccagagtcaccagccaaaccatgtctgcctaaggtgctgctaaccacactgggggtaaagaccgataacctcaatacagaagataattgtattttactggatgaagcggttcatggtggacaatatcagtgggatatcagtgaacaccgactaaatttaacagtaccacaggcgtatatcaatgaacttgaaagaggctacgttcccccagaaagttgggatcgcggcattgatgctttttatacctcctataatttaagtcagtatcgctcttatgacagcaataataacagtaatacagccagttatggccggtttaacagcggattaaatttatttagttggcagttacactctgatgccagttatagcaaacctgatgatatgaaaggcaaatggcaaagtaatactctttacctggaacgtggctggtcgcaaatattaagcacagttcagataggagaaaattacacatcttcactcatattcgactctctgcgatttagcggaatacgcttatttcgcgatatgcaaatgctacctgattctatgcaaagctttacacctttagtacaaggtgttgcgcaaagtaacgccttgataacggtttcgcaaaatggctataccatttaccaaaaagaggttcccccaggaccatttactatcgcagatttgcaactttcgggcagcggctctgatctcgatgtcagtattaaggaagcagatggtagtgttcgttcctttttggtgccctactcttccgtgcccaatatgctgcaacctggtgtttcaaatttcgattttaccgccggacgcagtcagatatatggtgtcaagaatcaggaggactttctcgaggcaaattatatatatggcctcaacaatcttttgacactttatggcggtacgattttatccgataactataatgctataactctgggaaatggttggaataactga

SEQ ID NO: 28609 - DNA, 366 bp, Escherichia coli
atgaacatggttgagaatatgctcgatcaggcattcaaaaagcttaatcctcacgagcatcctgttctgcactctgaccagggatggcagtatcgtatgagaagatatcaaaatatccttaaagaacatggtattaaacaaagcatgtccagaaaaggcaattgtctggataatgctgtggtggagtgtttctttggaaccttaaagtcggagtgtttttatcttgatgagttcagtaatataagcgaactgaaggatgctgttacggaatatattgaatactacaacagcagaagaattagcctgaaattaaaaggtctgactccaattgaatatcggaatcagacctatatgcctcgtgtttaa

SEQ ID NO: 28610 - DNA, 1176 bp, Escherichia coli
atggatataacttgtttagaatgtggcaatgttcttgacgacccaactgtagcttgcgataaatgcggtgccacgcctcatgttgtagtgctgggcaaacaatcgtactttcctattggtgctgtaacagcaaatcttgaaaaaaatgattcaagagcatttgattatcgattaggtgaagtttgggatctaaaaaatgaagtcacatctgaattcataaccagaattgagaaaaaatttagccgaaaaaacaaatttcataacttcctagactcagatcacaacccttcatccattcctacgatcctaaaaaaatacattaataaaaataatgaattcattgatttatctagagctataatagagaagcttaaacataatgctaataacgaatcgagagttgcccaacttcagggggggagcgttgttttcatccactataagtctaccgaaccagaggatttggggaaacttctaatcgtaatggttgataaacaaagcgcctatgactttgattcggataagttgaccccaacaagattaaatccaattaataccgatgccttacggcaggctgcgatgttcgatttaactttattcgaagccagttatccagaaaacaagggtgactcatatgtacatttcttgcaaggtaaatctaaaagcgattttttcaaagactcattaggttgccgacatgattcggacaataaaagaagcattcagcaattattcagtgctatagatatttttgctagtaaaaactcactcggtcgtgtactgcgtgatactattgacaacgaagttaaatccttactggaaaaaaaatcaaaagataaacacggaaataagtccgttaagatagaggatatttcaaaaataattgactcatgcctgactgattcacacaaatgtaagggaacgtttgtcgattttgttaatcttaatggtttccagattgaccctcaatttgaaccaactcctaaagcagctgaaagcgcgcttacaattgaagtggcagataacgacaataattttaagttgaaaataatgcgtggagctattggagacgaaaagtcaaataagcctgtaattctcactgacaacaaatgcgaaattgtgataaaattgagtcaggcaaattatgatgaactcaaaagatatagagacagctaa

SEQ ID NO: 28611 - DNA, 291 bp, Escherichia coli
atgttacgcccaaaacgtcgccgctgggttaatgaaaagtacacgcgctgggttaagacgcagccgtgtgcatgttgtggaaagcctgctgatgatccccaccatctgataggccacggtcaggggggaatgggtacaaaagcgcatgatctctttgtgttgcctttgtgcagaaagcatcacgacgagctgcatgcggataccatggcatttgaagagaagtatggctcccagctggagttgatatttcgttttatcgatcgtgcgctggcaattggtgtgctggcctga

SEQ ID NO: 28612 - DNA, 456 bp, Escherichia coli
atgctttgtgagaagggccgcgaaagcggcccttcagattattggcaaagtgcgcgttgttcatgtcggatgcggcgtgaacgccttatccgacctacaagatcgtgcaaattcaatatattgcaggaagcatgtaggcctgataagcgtagcgcatcaggcagttttgcctttgccatcagtctcaagggccgcgaaagcggcccttcagattattggcaaagtgcgcgttgttcatgtcggatgcggcgtgaacgccttatccgacctacaagatcgtgcaaattcaatatattgcaggaagcatgtaggcctgataagcgtagcgcatcaggcagttttgcctttgccatcagtctcaagggccgcgaaagcggcccttcagattattggcaaagtgcgcgttgttcatgtcggatgcggcgtgaacgccttatccgacctacaagatcgtga

SEQ ID NO: 28613 - DNA, 171 bp, Escherichia coli
atggacgggattgttttccacccatgccctttctggaatcccggtgtcgccggaacattcccttcactggtagagaaatacgagcgatctttctgtgccaccatcgacttacagataaatacggtagctgttccgttctgcaaatcccgggcatacgccgtgttggaataa

SEQ ID NO: 28614 - DNA, 144 bp, Escherichia coli
atgccgcgtttaaccgccaaagatttcccacaagagttgctggattactatgactattacgctcacgggaaaatctcgaaacgtgagttcctcaaccttgcggcgaagtgcagtaggcgggatgacggcattagcgttgtttga

SEQ ID NO: 28615 - DNA, 1014 bp, Escherichia coli
atgcgaaaggcaatatctagagtaacaaataataactcattgagcgaaatgaaaaatgagttggaggcgctgaaaaaagcattaagtgagaaagattaccttatcaactcattaaatgaggactcacttgccttgcaagttcaattggagatcagtcaaggcaaatccgctcaactcgctgttgataatgcagcgttgaatgttcgagtgaatgagcttgaagaaggctatcaaacaaaaaattctgaactggcaatgcttagtaagttgttcttcaaatctgaggagaactctcaacggattgctgcacagttgaaaaagagtcatcttgaactagattgttgtaaaagtgaactcagcaagaccaaagccgctttagatatatctcaaacgaagttaaagaaaattgagtcagaacttggcttattgaaaaaatcacacagtaagatcaagcagaaacttgaggatgaactcggtaagttaaagtctcaattagttaaagaaaaagaatcaaacaatttactttcaacacaggctactgttttacaagatgatttgaatcttagattcagtgagttggccaaacttagtaatattttagaagtaaaagatcgacagttgctggctaaagataatgagctatctatatataaagaacagttagataaattgaaaaaatcctttgcatggaaagcggtagctcccgtacgtgcattgagttataagttcaaaaagaaaaatactaaaagtctgttgcgtcagcatgttgaggttattcaaaattctggtttgttcagtatcgattggtataggaaaaactatcctgagattgatgaatattccatttctccaatagagcattatttgactataggttttaaacttggtttgactcccagtgagcgatttgatggaaatgattatttagcgaggtatccagacgtacaacaagaaggggtaaaccctcttttacattatctcatgtttggtaagaatgaaggcagaacgttctag

SEQ ID NO: 28616 - DNA, 2214 bp, Escherichia coli
atgcataattttgatgctcaatggtatttaaataattataaagatgtcgaactttctggcatggatccgtatcagcattatcaaaaaataggtaaactgattggtcgtcatcctatgcctccaaataaaatagtgactaacaaggcacaaattgttaagagtgcagcaaagcctgcctctatagctaataaagctatctgtggtgatttcaacctgaaagcgggaggtagtagtgaactttatggttggttggcagaaatcggtgactgtgcgccccgtgaagcgttaattagcattgatggtaaacaatataaggttcttgctgatgtcaaacgtgaggatttggctaggaacaaaatcaacaacggtcagcatggttttcgctggcgtttaccggctgaatttgtcgatggtaaacctcatcaattagaactgattgatgccaaaactggacagttactcaagcaagtcacgacgtcttggatgtataatcgtaaatttacctgctttgatgagtttctggccgagtcaatgctcaacccgatgatctatgccccttatagggaagaggataaacgctgcttcgctatgatggagaatatacgtcgtctcttagtggattatactcaaaaaaataaccttgatactttggtcagtgtcattatgccggtatacaaccgggaagataccattactgccgctattagttctgttttagcacaaacttacccatatttcgaactgattattgtcgatgatggcagtatggatgggacaattaatattgttgaagagattgtggatgagcgggttcgtctgattcgcgggcctggacgttctggcgtctctgaagctcgcaatataggcttgcgtgcagccaaaggggagttgatcgcctatttggattccgataatacttggaaacctgaatacctcagtgccatggtcgctgccttgcataagagtcctaatgctcatgctgcctattctggtcaatatctttatcgtggcacgcatcctgagccgtttgcgatccgctttgccagtttcaataagggattactggaaaaccgtaactatattgacttgaactgctttatgcataacaagcaggtctttaaaaagacgggaatgtttgacactaagctaaagcggtttgttgattgggacttgatcctcaagatcagcagtgaattcaccatagtttcggtgccggtgctcctctccaactatttttatgagagagcagagaatgccatcactaatgatcattcgttaaatggttttattgatattgtgcgggagcagcacaatacccgcgaatttatcaaaggacgggcactgttgcgttatggtcaatgcgaaccggtcaaacatcgtttacccaagcccaaactggaacatcacgtaactatcattatcccgaattatgaatcgttggatgatattcaggattgtctctcttctattcgcaattattatgacagtaagcaggtcgatatcatcgtggtcgacaatgcatctgctgagacagttagaacctatttgcgggagttggcggtcaaagagtttgatatcacttatatcgagaatgattttaatgccggttttacttatgctgtaaatcaggggattaaggcggctaagactggcagtgatatagtattgcttaacaacgatgctttgctgacgcgaacagcactggtggctatgcagcagcaggcttatcaggatctcaatattggcctagtagttcctcgacaagtactttttgccaataccaagactattactacccatgtaccgtttgccaatcctgacatagattgcgatgtcaatctctcgcagcatcacaagaatattattagggtgccttggttgcacgacggggaacaggtggagctcaattttgctcccttcttctgtgtctatatgcgccgtgagatcgttgataagattggtggactggatgccgaatttggccgtcactatcgttcggatcggataatgtgtgactatctgcgccatttgctaggaatgacgatcctctataccagtcaggcggtagtttaccataaattgcaaaaagcaaccgatgggatgcgtaaaagcactaaaaagagtgttgagtttgaactgatgttcaagaaaaatcagtggtcaacagatgatatttcgcggcttggtttttctatggcatcatgggatatataa

SEQ ID NO: 28617 - DNA, 885 bp, Escherichia coli
ttgactaatcatcaggttttaataggaaaagatgaatggcttttcctaaaaaatgatacaaatcaattaattcgacaaattacaggggaggtcacagttagtgactcacttattaatcattggtctaatacactaaagctaaggttgtctttttttagagcgagaaaaatttcatacacatatatttgtgcccctaataaagagtgtgtttatgataaatatcttcctgataatattgtcttatcggaaaaaagacctattggaatcttccgccctgtttttgaaaatatattagaagattcattttgttatccattgaaggaattgcagaatggaataatttataccttttctaaaggtgacacacattggaatcaatacggtgcgtttatagcatatgaagcattaatgaaaagcatgggtgttgataataaaataaacattgaagatgtggattttattagtattaaaagaaagggagacttaatgtcaaaagtctccgatactttgttagatgatacagtagttgctaaaattaaaaattcatcttcaattgaaatagaatttgacaatcatgttagaaacagaggtaagttggtggtgattaataattctaaggcacttaatgatgatacgctagttatttttagagattcttttggaagtgcacttattcactttttagcaaggacgtttcgtagggttgtggcggtttggcaacctaatattgatattggaataattgaaattgaatctcctcaatatgttgtatctgagcaagtggagagattcatgatatcaccacctaatgatatttcagataaaacgcataatcaaatatgtgcatcaaaaaaaatgtttaagaaatattacaagactatttga

SEQ ID NO: 28618 - DNA, 1167 bp, Escherichia coli
atgaatataacaattgtaggtactggctatgttggtctttccattgctgtattgctggcccaacaccatcaggttattgcactagatgttgtaccagaaaaagtcgaacttattaatcgccgtcaatctcccattgtagataaggagttggctgagtatctggcgaccaagcaccttaatctaagggcaaccctagataaattctcagcctatgagatggccgactatgtaattatcgcaactcccacagattatgatcccgagaccaactactttaataccactacggttgaggcggtgatccgagacgttatgagcattaacccccatgcggtgatggtgatcaagtctacgattccggtgggctttactgagcgaatgcgtagtgagttgggcaccgagaatctgatcttctctccggagtttttgcgcgaaggaagagcgctttatgataatctgcacccttcccgcattgttgtgggggaacgtagcgagcggtcccggtgttttgccgagctattgcaagagggggctatcaaacaagatattccggtattgctaacgagtagctcggaggcggaagcgatcaagctttttgccaacacttatctggcaatgcgggtggcttatttcaacgagctggatacctatgccctgtctcatggtcttgacagtcgccagattatcgaggggatttgcttggatccgcgcattggcaattactataacaacccgtcatttggttatggtggttattgcctacccaaagataccaagcagttgctggccaactacaacaaggtgcccaacaatctgatccgcgccattgttgatgccaataccactcgcaaagactttattgccgatagcgtgttgcgccgtaaacctagggtggtcgggatccatcgcttagtaatgaaagcgggttccgataatttccgtttttctgccattcagggagtaatgaagcgaattaaggccaagggaattgaagtggtggtctttgaaccgaccatcaaggaggcgtatttcttccactctcgtgtcatccgcgatttagacgagttcaagtctgtgagtgatgtgattttgtgtaatcggatgtccagtgaactggtcgatattgcagacaaggttttcacaagggatcttttcggttctgattga

SEQ ID NO: 28619 - DNA, 903 bp, Escherichia coli
ttgaaattatttattgctgcaattgtcaaaaatgagatagatggattgctcgaatggatcgctttccaccgggtgctcggcgttagtggatttattattgcagacaatggaagtaatgatggctcgcgtgaactgctcggctctttggccaagttaggggtagttactgtatttgatcatccaactgttgggcagcagaagccccaactgcccgcgtataataaaattttgcgctcgtgcccacgtgatgtagacctattggcatttattgatgccgacgagtttttgctccccttgggaagcaatgatttgctcccgacagttacagcgtggtttactgatgatagcgtcagtgcggtcggattgaattggtccattttcggctctaatggtgagtcgtttgctagcgaagggttggtcattgagcgtttcacacagcgtgcacctcttggtttcaatgtgaaccacaactttaagagtattgtgcggcccacccgcgttgatagttttctcaaccctcattttgccattcttcgttacgggcgttatattgatgcctatggtagtgacatggtattacatgccaaacacggtaatggtgtaagtgctcaagtcatttggcatggcatacgagtcaaccattacgcagttaaatcattggaagagtttctgcttggaaaatatttgcgtggtagtgcggcaacggccaatcgagtcaaacataaggcttattttcaggcacatgatcgcaatgacgagagttgtctgctggcggctgcgttagcaccaaaagtgaaggctgagatgatgaagctgagcgagcaattagctgacttgcctgaagaaagacaggagtctagtcaatcttggttagcgagtggcatcaaaaaactgattaaatag

SEQ ID NO: 28620 - DNA, 1188 bp, Escherichia coli
atgcaaaatgaattgcaggccgcgctctttcaggcgttcgataccctgaatctgcaacgggtaaaaacatttagcgttccaccggtgacgctttgcggtccgggcgcggtgagcagttgtgggcagcaagcgcaaacgcgtgggctgaaacatctgttcgtgatggcagacagctttttgcatcaggcagggatgaccgccgggctgacgcgtagcctggccgttaaaggtatcgccatgacgctctggccatgtccggtgggcgaaccatgcatcaccgacgtgtgtgcagccgtggcgcagttgcgtgaatcaggctgtgagggggtgattgcgtttggcggcggctcggtgctggatgcagcaaaagccgtggcgttgctggtgacgaacccggatagcacgctggcagagatgtcagaaaccagcgttctgcaaccgcgcctgccgttgattgccattccaacgaccgccggaaccggctctgaaaccaccaacgtaacggtgattatcgacgcggtgagcgagcgcaagcaggtgttagtccatgcctcgctgatgccggatgtggcgattcttgacgccgcattgaccgaaggtgtgccgtcgcatgtcacggcgatgaccggtatcgacgcgttaactcatgccattgaagcgtacagcgcgctgaacgccacaccgtttaccgacagcctggcgattggcgctattgcgatgattggcaaatcgctgccgaaagcggtgggctacggtcacgaccttgccgcgcgcgagagcatgttgctggcttcatgtatggcgggaatggcgttttccagtgcggggcttgggttatgccacgcgatggcgcatcagccgggggcggcgctgcatattccgcacggtctggcgaacgccatgctactgccaacggtgatggagtttaaccggatggtttgtcgtgaacgctttagtcagattggtcgggcgctgcgaactaaaaaatccgacgatcgtgacgctattaacgcggtaagtgagctgattgcggaagtcgggatcaacaagcggctggcagacgtgggcgcaaccaccggacattacggcgcatgggcgcaggccgcgctggaagatatttgtctgcgcagcaacccgcgtaccgccagcctggagcagattgtcggcctgtacgcagcggcacaataa

SEQ ID NO: 28621 - DNA, 837 bp, Escherichia coli
atggcgcacgacgaacaatggctgaccccacgtctgcaaacggcggcaacgctgtgtaaccagacgcctgccgcgacggaatctccgctgtggctgggggtggatctgggcacctgcgatgtggtgtcgatggttgtcgaccgcgacggtcagccggtggcggtatgcctcgactgggctgatgtggtccgcgacggcatcgtctgggatttcttcggtgcggtcaccattgttcgtcgccatctcgacaccctcgagcagcaattcggtcgccgttttagccatgcggcgacctcttttcctccaggtacggacccgcgtatttccatcaacgtgctggaatctgccggactggaagtgagccatgtgctggatgagccaaccgcagttgcggatctgctgcaactggacaacgccggtgtagtggatatcggcggcggcactaccggcattgccatcgtgaaaaagggcaaagtgacgtactcggcggatgaagccaccggcggacatcacatctctctgactctcgccggaaatcgccgtatttcgctggaagaggcagagcagtacaaacgcggtcacggtgacgagatttggcctgcggtgaaaccggtgtacgaaaaaatggcggacattgtcgcccggcatattgaagggcagggcattactgatttatggctggcgggcggctcctgtatgcaaccgggcgtggcggaactgttttgcaaacaattcccggcgttacaggtgcatctaccgcagcacagtttgtttatgaccccgctggcgatcgccagtagcgggcgagagaaagcggaggggatctatgcaaaatga

SEQ ID NO: 28622 - DNA, 288 bp, Escherichia coli
atgaaactggcagtcgtcactggacaaattgtttgtaccgtacgccatcacggactggcgcatgacaaattgctgatggtggaaatgattgatccacaaggtaatcctgacgggcaatgcgccgtcgccatcgacaatattggcgcgggaaccggggagtgggtgttgctggtgagtggcagttccgcccgccaggcgcataaaagcgaaacgtcaccggtcgatctgtgcgtgattggcatcgtcgatgaggtggtgtctggcggtcaggtaattttccacaaataa

SEQ ID NO: 28623 - DNA, 336 bp, Escherichia coli
atgaacggtcccgttctggaccctgataaagaggaaagcacaatggaagcattaggaatgatcgaaacccggggcctggttgcactgattgaggcttctgacgcgatggtgaaagctgcgcgcgtcaagctggttggtgttaagcagattggcggcggcctgtgtactgccatggttcgtggtgatgttgcagcctgtaaagccgcgaccgacgcaggtgctgcagcggcacagcgtatcggcgagctggtatctgtacacgttatcccgcgtccgcacggcgacctggaagaagtcttcccgatcggcctgaaaggcgatagcagcaacctgtaa

SEQ ID NO: 28624 - DNA, 1017 bp, Escherichia coli
atgattattgaacgttgtcgtgaactggcgttgcgagcgcccgccagagtggtttttccggatgcgttagatcaacgtgtgctgaaagccgcgcaatatttacatcaacaaggtctggcaacgcccattctggtcgccaatccgtttgaacttcgtcagtttgcgctcagtcacggcgtggcaatggacgggctacaggtgatagatccgcatggcaacctcgcaatgcgggaagaatttgcccatcgctggctggcccgtgcgggcgaaaaaacgccgccggatgcgttggaaaaactcaccgatccgctgatgttcgctgccgcaatggtcagcgccgggacagcggatgtctgtatcgcgggcaatctctcttccacggcgaatgtgctgcgtgccggattacgcattattggcttacagccaggctgtaaaacgctctcctccattttcctgatgctgccacagtacagcggtccggcgttgggttttgccgattgcagcgtggtgccacagccgacggcggcacaactggcggatatcgcgcttgccagcgccgaaacctggcgcgccatcaccggagaagagccgcgcgtggcgatgttgtcgttttccagtaacggcagcgcccgtcacccctgcgttgccaacgtccagcaggcgacagaaatcgtccgtgagcgcgcgccgcagttggtagtcgatggcgagttgcagtttgacgccgccttcgtgccggaagtggcggcgcaaaaagcgcctgccagcccgctacaaggcaaggccaatgtgatggtttttccgtcgctggaagccggaaatattggctacaaaatcgcacaacgactcggcggatatcgtgccgtcgggccattgatacaaggacttgccgcgccgatgcacgatctctctcgtggttgtagcgtgcaggaaattatcgagctggcgctggtggcagctgtgccgcgtcagacagaagtgaaccgcgaaagcagtttacaaacactggttgaatga

SEQ ID NO: 28625 - DNA, 804 bp, Escherichia coli
atgaaagatttcatcaccgaagcatggctaagagcgaaccatacgctcagcgaaggcgcagagatccatctccctgcggacagtcgcctgacgccctctgcccgggagctactggaaagccgccatctgcgcatcaagtttattgacgagcagggccgcctgtttgttgacgatgaacagcagcagccgcagcccgttcacgggctgaccagtagcgatgaacatccgcaggcgtgctgcgaactgtgccgccagccggtggcaaaaaagccggacactctgactcacctgtcggcggaaaaaatggtcgccaaaagcgatccgcgcctcggttttcgcgctgttctcgacagcaccattgcgctggcagtgtggctgcaaattgaactggcggaaccgtggcagccgtggctggcggatatccgttcgcgtcttggcaacattatgcgtgccgatgcgctgggggaaccgctggcctgccaggcgattgtcgggctttctgacgaagatctgcatcggctttctcaccagccgctgcgctatcttggtcacgatcatctggtgccggaagccagccacgggcgcgatgctgcgttgctcaatctgctacgcaccaaagtgcgggaaaccgaaaccgtagcggcgcaggtgtttataacccgcagttttgaagtattacgcccggacatcttgcaggcgctgaaccgcctttcgagcacggtctacgtgatgatgatcctgagcgtaacgaagcagcctctaacggtgaagcagatccaacaacgactgggggaaacgcaatga

SEQ ID NO: 28626 - DNA, 702 bp, Escherichia coli
gtgaaaaaactcatcacagcgaatgatattcgtgaagcacacgcgcgcggcgaacaggcaatgtccgtggttctgcgcgccagcattattaccccggaagcccgtgaagtggcagaactactgggttttaccatcactgaatgtgatgaatcgaccccggtaacggcgtccgttcccgcctgcgtgccagccgataaaaccgaaagccagcgtatccgcgaaaccatcatcgcccagctaccggaaggccagtttaccgaaagcctggtcgcgcagctgatggaaaaagtgatgaaggaaaaacagtcactggagcagggtgcaatgcagccgagtttcaaatcggttaccggcaaaggcggcatcaaagtgattgatggcagcagcgtcaagtttggtcgttttgacggcgcacagccacactgcgtcggattaacggatctggtcaccggagacgacggcagcagcatggccgctggttttatgcagtgggagaacgccttcttcccgtggaccctgaactatgacgaaatcgacatggtactggaaggggaactgcacgttcgccacgaaggcgaaaccatgatcgccaaagcaggcgacgtgatgtttatcccgaaaggctccagcatcgaatttggtacgacatccagcgtgaaattcctgtatgtcgcctggccggctaactggcaatccctatga

SEQ ID NO: 28627 - DNA, 480 bp, Escherichia coli
atgaaacgaattgcgtttgtgggtaccgtcggggcaggaaaaacaacgttatttaatgcgttgcagggagattataccctcgccagaaaaacgcaggccgtagaatttaatgataagggtgatattgatacgccgggtgaatattttagccatccccgctggtatcacgccttaattaccacgctacaggatgtggacatgctgatctatgtccacggcgcgaacgacccggaaagtcggttgcctgccgggttgctggatattggcgtcagcaaacggcaaatcgccgtcatcagtaaaacggacatgccagatgctgacgtcaccgcaacgcgaaagttattgcttgagacgggcttcgaagagccgattttcgagctaaacagccacgacccgcaaagcgtgcagcaactggtggattatctggcatctctcaccaaacaggaggaagcaggtgaaaaaactcatcacagcgaatga

SEQ ID NO: 28628 - DNA, 336 bp, Escherichia coli
atggataaagaacgcatcattcaggaatttgtgcccggtaaacaggtcacactggcgcatctcatcgcgcatcccggcgaggaactggcgaagaaaatcggcgttcctgatgcgggtgcaatcggcattatgacgctaactcccggcgaaacggcgatgatcgccggtgatttagcactaaaagccgccgatgtgcatatcggttttctcgaccgttttagcggcgcgttggtgatttatggctcggtgggtgcagtagaagaagcgttatcacaaaccgtcagcggtttagggcgtttattaaattatacgctttgtgaaatgaccaaatgttaa

SEQ ID NO: 28629 - DNA, 2280 bp, Escherichia coli
atggatgaccagttaaaacaaagtgcacttgatttccatgaatttccagttccagggaaaatccaggtttctccaaccaagcctctggcaacgcagcgcgatctggcgctggcctactcaccaggcgttgccgcaccttgtcttgaaatcgaaaaagacccgttaaaagcctacaaatataccgcgcgcggtaacctggtggcggtgatctctaacggtacggcggtgctggggttaggcaacattggcgcgctggcgggcaaaccggtgatggaaggcaagggcgttctgtttaagaaattcgccggaattgatgtatttgacattgaagttgatgaactcgacccggacaaatttattgaagtcgtcgccgcgcttgaaccgaccttcggcggcatcaacctcgaagacattaaagcgccagaatgtttctatattgaacagaaactgcgcgagcggatgaatattccggtattccacgacgatcagcacggcacggcaatcatcagcactgccgccatcctcaacggtttgcgcgtggtggagaaaaacatctccgacgtgcggatggtggtttccggtgcgggtgccgcagcaatcgcctgtatgaacctgctggtagcgctgggtctgcaaaaacataacatcgtggtttgcgactcaaaaggcgttatctatcagggccgtgagccaaacatggcggaaaccaaagccgcatatgcggtggtggatgacggcaaacgtaccctcgatgatgtgattgaaggcgcggatattttcctgggctgttccggcccgaaagtgctgacccaggaaatggtgaagaaaatggcccgtgcgccaatgatcctggcgctggcgaacccggaaccggaaattctgccgccgctggcgaaagaagtgcgtccggatgccatcatctgtaccggccgttccgactacccgaaccaggtgaacaacgttctttgcttcccgttcatcttccgtggcgcgctggacgttggcgcaaccgccatcaacgaagagatgaaactggcggcggtacgcgcgattgcagaactggcccatgcggaacagagtgaagtggtggcttcagcttatggcgatcaggatctgagctttggtccggaatacatcattccaaaaccgtttgatccgcgcttgatcgttaagatcgctcctgcggtggcgaaagcggcgatggagtccggcgtggcgacgcgtccgattgctgatttcgacgtctacatcgacaagctgacggagttcgtttacaaaaccaacctgtttatgaagccgattttctcccaggctcgcaaagcgccgaagcgcgtcgttctgccggaaggggaagaggcgcgcgttctgcatgccactcaggaactggtaacgctggggctggcgaaaccgatccttatcggtcgtccgaacgtgatcgaaatgcgcattcagaaactgggcttgcagatcaaagcgggtgttgattttgagatcgtcaataacgaatccgatccgcgctttaaagagtactggactgaatacttccagatcatgaagcgtcgcggcgtcactcaggaacaggcgcagcgtgcattgatcagtaacccgacagtgatcggcgcaatcatggttcagcgtggcgaagccgatgcaatgatctgcggtacggtgggcgattatcatgaacattttagcgtggtaaaaaatgtctttggttatcgcgatggcgttcacaccgcaggtgccatgaacgcgctgctgctgccgagtggtaacacctttattgccgatacatacgtcaatgacgaaccagacgcagaagagctggcggagatcaccttgatggcggcagaaactgttcgtcgttttggtattgagccgcgtgtggctctgttgtcgcactccaactttggttcttctgactgcccgtcgtcgagcaaaatgcgtcaggcgctggaactggtcagggaacgtgcaccagaactgatgattgatggtgaaatgcacggcgatgcagcgctggtggaagcgattcgcaatgaccgtatgccggacagccctttgaaaggttccgctaatattctggtgatgccgaacatggaagctgcccgcattagttacaacttattgcgcgtttccagctcggaaggtgtgactgtcggcccggtgctgatgggtgtggcgaaaccggttcacgtgttaacgccgatcgcatcggtacgtcgtatcgtcaacatggtggcgctggctgtggttgaagcgcaaacccaaccgctgtaa

SEQ ID NO: 28630 - DNA, 951 bp, Escherichia coli
atgaacgagttagacggcatcaaacagttcaccactgtcgtggcagacagcggcgatattgagtccattcgccattatcatccccaggatgccaccaccaatccttcgctgttactcaaggctgccggattatcacaatatgagcatttaatagacgatgctatcgcctggggtaaaaaaaatggcaagacccaggaacaacaggtggtcgcagcgtgtgacaaactggcggtcaatttcggtgctgaaattctcaaaatcgtacccggtcgcgtgtcaacagaagttgatgcacgcctctcttttgataaagaaaagagtattgagaaggcgcgccatctggtggacttgtatcagcaacaaggcgttgagaaatcacgcattctgatcaagctggcttcgacctgggaaggaattcgcgcggcagaagagctggaaaaagaaggtattaactgcaacctgacgctgctgttttcttttgcccaggcgcgggcctgtgcagaagcaggcgtttttctgatttcgccgtttgtcgggcgtatttatgactggtatcaggcacgcaagccgatggacccgtatgtggtggaagaagatccgggcgttaaatcggtgcgcaatatctacgactactataagcaacaccactatgaaaccattgtgatgggcgcgagcttccgtcgcaccgaacaaatcctcgccttaaccggctgcgatcgactgactatcgcaccgaatttgctgaaggagctgcaggaaaaagtttcgccagtggtacgtaaattaatcccaccttctcagactttcccacgcccagctcccatgagcgaagcggagttccgttgggagcacaatcaggatgcgatggcggtagaaaaactgtctgaaggcattcgtctgttcgccgttgatcaacgcaaactggaagatcttcttgccgccaaactataa

SEQ ID NO: 28631 - DNA, 2004 bp, Escherichia coli
atgtcccgaaaagaccttgccaatgcgattcgcgcactcagtatggatgcggtacaaaaagccaattctggtcatcccggcgcgccgatgggcatggctgatattgccgaagtgctgtggaacgattttcttaaacataaccccaccgacccaacctggtatgatcgcgaccgctttattctttccaacggccacgcgtcgatgctgctctacagtttgctacatctgaccggttacgacctgccgctggaagaactgaagaacttccgtcagttgcattcaaaaaccccaggtcacccggagattggctatacgccaggtgttgaaaccaccaccggtccacttggacaaggtttggcgaacgccgtcggactggcgatagcagagcgtacactggcggcgcagtttaaccagccggatcatgaaattgtcgatcacttcacctatgtgtttatgggcgacggttgcctgatggaaggtatttcccacgaagtctgttcgctggcgggcacgctgggactgggcaagctgattggtttttacgatcacaacggtatttccatcgacggtgaaaccgaaggctggtttaccgacgatacagcaaaacgttttgaagcctatcactggcatgtgatccatgaaatcgacggtcacgatccgcaggcggtgaagaaagcgatccttgaagcgcaaagcgtgaaagataagccgtcgctgattatctgccgcacagtaattggctttggttcgccgaataaagcaggtaaggaagaggcgcacggcgcaccgctgggggaagaagaagtggcgctggcacggcaaaaactgggctggcaccatccgccatttgagatccctaaagagatttatcacgcctgggatgcccgcgaaaaaggcgaaaaagcgcagcagagctggaatgagaagtttgccgcctataaaaaggcccatccgcaactggcagaagagtttacccgtcggatgagcggtggtttaccgaaggactgggagaaaacgactcagaaatatatcaatgaattacaggcgaatccggcgaaaatcgccacccgtaaggcttcgcaaaatacgcttaacgcttatggccccttgctaccggagctgctcggcggttcggcggatctggctcccagcaacctgaccatctggaaaggttctgtgtcgctgaaggaagatccggcgggcaactacattcactacggggtgcgtgaatttggcatgaccgctatcgccaacggcattgcgcaccacggcggctttgtgccgtataccgcgacgttcctgatgtttgttgaatacgcccgtaacgccgcgcggatggcggcactaatgaaagcgcggcagattatggtttatacccacgactcaattggtctgggcgaagatggtcctacgcaccaggctgttgagcaactggccagtctgcgcttaacgccaaatttcagcacctggcgaccgtgcgatcaggtggaagcagcggtgggctggaagctggccgttgagcgccacaacggaccgacggcactgatcctctccaggcagaatctggcccaggtggaacgtacgccggatcaggttaaagagattgctcgtggcggttatgtactgaaagacagcggcggtaagccagatattattttgattgccaccggttcagagatggaaatcaccctgcaagcggcagagaaattagcgggagaaggtcgcaatgtacgcgtagtttccctgccctcgaccgatattttcgacgcccaggatgaggaatatcgggagtcggtgttgccttctaacgttgcggctcgcgtggcggtggaagcaggcatcgccgattactggtacaaatatgttggtctgaaaggggcaattgtcgggatgaccggctatggggaatctgctccggcagataagctgttcccgttctttggctttaccgccgagaatattgtggcaaaagcgcataaggtgctgggagtgaaaggtgcctga

SEQ ID NO: 28632 - DNA, 1044 bp, Escherichia coli
atgcgctatcgcattttccttctcttttttttcgctttgttgccgacgtctttggtgtgggcggcaccagcgcaacgggcgttttccgactggcaggtcacctgtaataatcaaaatttttgtgtggcgcgcaatacgggcgatcataatggactggtgatgaccctgagccgcagcgctggggcgcataccgatgccgttttacgtattgagcgcggcgggttgaagtcgccggatgcgtcggaaggggagatagcgccacggctgctgttagatggtgagccgttggcattaagtggtgacaagtggcggatttcaccatggttattagtaaccgatgatacggcaaccctcaccgcgtttttgcagatgattcaggaagggaaggcaatcaccttacgcgatggcaatcagaccatttctctgagtggcttaaaagcggcgttgttgtttatagatgctcagcaaaagcgcgttggcagtgaaaccgcgtggataaagaaaggggatgaaccgccgctcagcgtaccgcccgcgcctgcgctgaaagaggtcgcggtggttaacccaacgccgacgccactctcactcgaagaacgcaacgatttgctggattatggaaactggcggatgaatggtctgcgctgctcgcttgatccattgcgtcgagaggtaaatgtcactgcgctgaccgatgataaagcgctgatgatgattagctgtgaggcaggggcctataacaccattgatttggcctggattgtgtcgcgtaaaaagccactggcctcgcgcccggttcggttacgtttgccgttcaacagcggtcaggagacgaatgaactggaactgatgaacgcaacattcgatgaaaaatcgcgtgaactggtgaccttagcaaaagggcgcggattaagcgattgtggcattcaggcgcgctggcgctttgacggtcagcgttttcgcctggtgcgttacgccgcagaacccacctgtgataactggcatgggccagacgcctggcccacgttgtggatcacccgttaa

SEQ ID NO: 28633 - DNA, 576 bp, Escherichia coli
atgacgcaacaaatcaccctcattaaagacaaaattctctccgataactatttcaccctgcacaacattacttacgatctcacgcgcaaagatggcgaagttatccgtcataaacgtgaagtttacgatcgcggtaatggtgcgacgatcctcctgtacaacgcgaagaaaaagaccgtggttctgattcgtcagttccgtgtcgctacctgggttaatggcaatgaaagcgggcaactgattgaaacctgcgccgggctgctggataacgacgaaccggaagtgtgcattcgcaaagaggcgattgaagagacgggctatgaagtgggcgaagtgcgcaaattatttgaactgtatatgtccccaggcggtgtgactgagctaatccacttttttatcgccgaatacagtgacaatcagcgcgctaacgccggtggcggtgtcgaagatgaagatattgaagtgctcgagctgccgttcagccaggcgctggagatgatcaaaaccggcgagatacgtgacggtaagacggtgttattgcttaactatttgcaaacgtcacatttaatggactga

SEQ ID NO: 28634 - DNA, 1980 bp, Escherichia coli
atgaatcgttttattatggccaacagtcagcaatgtctgggttgtcatgcttgtgaaatcgcctgtgtcatggctcacaatgatgagcaacatgtcttgagccaacaccattttcatccccgaattacggttatcaaacatcagcagcaacgtagtgcagtgacctgtcaccattgtgaagatgcgccctgcgcccgtagctgccctaatggcgcaatcagccacgttgatgacagcattcaggtcaatcagcaaaagtgtattggctgtaaatcctgcgtggtggcctgtccgtttggtacgatgcaaatcgtcctgacacccgtcgcggcgggcaaagtaaaagccacggcgcataaatgcgacctttgtgcagggcgcgaaaacggtcctgcctgtgttgagaattgcccggcagacgcgctgcaactggtcactgacgccgcactctccggcatggcgaaatcccgccgcttgcgcaccgcacgtcaggagcatcaaccgtggcatgccagtaccgcggcacaagaaatgccggtaatgagtaaagtcgagcaaatgcaggcaacgcccgcgcgcggcgagccggacaaactggcgattgaagcgcgcaaaaccggttttgatgaaatttatctgccattccgtgccgatcaggcacaacgggaagcctcgcgctgccttaagtgcggcgagcacagcgtttgtgaatggacctgcccgctgcataaccatattccgcagtggattgaactggtgaaagccggaaacatcgacgccgccgtcgagctttctcaccagaccaacaccctgccggaaattaccggacgcgtttgtccgcaagaccgtttgtgtgaaggagcctgtactattcgcgatgagcacggtgcggtaactatcggcaacattgaacgctacatttcagatcaggcgttggcgaaaggttggcgtcctgacttaagccatgtcaccaaagtggacaagcgggtggcgattatcggtgcaggtccggcagggctggcctgtgcggatgttctgacccgcaatggcgtggcggtgacggtgtacgatcgccatccagaaattggtggcttgctcactttcggcattccttctttcaaactggataaatccctgctggcacgccgtcgggaaatcttcagcgcgatggggattcacttcgaactcaattgtgaagtgggtaaagatgtctctttggattcgcttttggaacaatacgacgcggtcttcgttggcgtaggcacttaccgttccatgaaagcgggtttacccaatgaagatgcgccgggcgtttatgacgccctgccgttcctcatcgccaacactaaacaggtgatgggactcgaagagctaccggaagagccgtttatcaataccgccggactcaacgtcgtggtactgggcggcggcgacaccgcgatggactgtgtgcgtaccgcgctgcgccacggcgcgagtaacgtcacctgcgcttatcgtcgtgatgaagctaacatgccaggctcgaagaaagaggtgaagaacgcccgcgaagagggggccaactttgaatttaacgtccagccggtggcgcttgagctgaatgagcaaggtcacgtttgcggaattcgtttcctgcgcacgcgtcttggcgagccggatgcccaggggcgtcggcgtccagtgccggtggaaggcagtgaatttgtcatgccagccgacgcggtgattatggcgtttggcttcaatccacacgggatgccgtggctggagtcgcacggtgtaacggtagacaaatggggccgcatcatcgcggatgtggaaagccagtaccgttatcagaccacgaatccgaaaatcttcgccggtggtgacgccgtgcgtggtgcggatctggtggttaccgcaatggcagaaggacgtcatgcggcacaggggattattgactggctgggggtaaaatcagtcaaatctcactga

SEQ ID NO: 28635 - DNA, 1701 bp, Escherichia coli
gtgattgttaaacgacccgtctcggccagtctggcccgggcctttttttacattgtgctgctgtcgattctttccacgggtatcgctctgctaactctggcgagcagtttgcgcgacgctgaggctatcaatattgccggatcgctgcgtatgcagagttaccgcctgggctacgacttgcaaagtggcagtccacaactcaatgcacatcgccagttatttcagcaggcactgcattcaccggtattaaccaatctcaacgtctggtatgtgccagaagcagtaaaaacccgctatgcgcatctgaatgccaactggctggagatgaataatcggctcagcaagggcgatttaccgtggtatcaggccaatattaataattatgttaatcagatagacctgttcgtactggctttacagcactacgctgaacgcaaaatgctgctggtggtggcgatttccctggctggcggcatcggtattttcacgctggtcttttttactttgcgccgcatacgccatcaggtggttgccccgctgaatcagctggttaccgccagtcagcgtattgaacacgggcagttcgactcgccgccgctggataccagcctgccgaatgagcttggcctgcttgccaaaacctttaaccagatgtcgagcgagctgcataaattgtaccgttcgctggaggcgtcagtagaagaaaagacccgcgatctccacgaggccaagcgtcgcctggaggtgttgtatcagtgttcgcaggcgctgaacaccagccagattgatgtgcattgtttccgccatattttgcagattgtgcgcgacaacgaagcggctgaatatctggagttaaatgtcggtgaaaactggcggattagcgaagggcaaccaaacctggaattgccgatgcagattttaccggtgacaatgcaagagacggtttacggcgaactgcactggcaaaatagtcacgtttcatcatcagaaccgctgcttaacagtgtttcgtcgatgctgggacgcggtttgtactttaatcaggcgcagaagcattttcagcagttattgttgatggaagaacgtgcgaccatcgcccgcgaattgcacgactcgctggctcaggtactttcttacttacgtatccagttgacgttactgaagcgttcgataccggaagataacgccaccgcacaaagtatcatggccgatttttcccaggcgttgaatgatgcttatcggcagttacgcgagctgttaactactttccgcctgacgctgcagcaggcagatctcccctccgcgttgagggaaatgctggatacgttacaaaatcaaaccagcgctaaactgaccctcgactgccgcctgccaaccctggcgctggatgcgcaaatgcaggtgcatttgttgcaaattattcgcgaagcggtgctgaatgcgatgaagcacgccaacgccagcgaaatcgccgttagctgcgtcaccgcgccggacggcaatcacacagtctatattcgcgacaacgggattggcatcggtgaaccgaaagaacccgaaggccattatggtctgaatatcatgcgcgaacgcgcggaaagattgggtgggacgctgactttttcacaaccttccggcggcggcacgttagtgagtattagctttcgctccgcggagggtgaggaaagtcagctgatgtaa

SEQ ID NO: 28636 - DNA, 3114 bp, Escherichia coli
atggcgaatttctttattgatcgccccatttttgcctgggtgctggcaatcctgttgtgtctgacaggtaccctggcgattttttcattgcccgttgaacaataccccgatctcgcgccaccgaatgtgcgagtgaccgctaactatcccggcgcatcggcccagacgctggaaaacaccgtgacccaggttatcgagcaaaatatgaccggcctcgataatctgatgtatatgtcgtctcagagcagtggcaccggccaggcatctgtcactttaagttttaaagcaggcaccgatccggacgaagccgtgcagcaagtacaaaaccagctgcaatcagccatgcgaaagttaccgcaggcggtgcaaaatcagggcgtgacggtgcgtaaaaccggcgataccaacattctgaccattgccttcgtctctaccgatggttcgatggataaacaggatattgccgattacgttgccagtaatattcaggatccgttaagccgcgtgaatggcgtcggggatatcgatgcctatggttcgcaatattccatgcgtatctggctggacccggcgaaactcaacagtttccagatgacggctaaagatgtcactgatgccattgagtcacagaacgcgcagattgcggttgggcaacttggtggtacgccttccgtcgataagcaggcgctcaacgccaccattaacgcccagtcactgctgcaaacaccagaacagttccgcgatatcaccttgcgggtgaatcaggacggctcagaggtaaggctgggcgatgtcgccaccgtcgaaatgggggcggagaaatacgattatcttagccgcttcaatggtaagccagcctccgggttgggggtaaaactggcctccggcgcgaacgaaatggcgacagcggagctggtgctcaatcgtcttgacgagctggcgcagtatttcccgcacggactggaatacaaggtggcgtatgaaaccacctcgtttgttaaagcctccattgaagacgtggtgaaaacgctgctggaagctatcgctctggttttcctcgttatgtatctgttcctgcaaaacttccgcgccacgctgatacccactatcgccgtgccggtggtgttgatgggaaccttctccgtactttatgccttcggttacagcgtcaacaccttaaccatgttcgcgatggtgctggcgatcggtctgctggtggatgacgccatcgtggtggtggaaaacgtcgaacgtattatgagtgaggaaggactcactcctcgcgaagccacacgtaaatcgatggggcagatccagggggcactggtcgggattgcgatggtgctttcggcggtatttgtaccaatggccttcttcggcggcaccaccggtgccatctatcgccagttctctattaccattgttgcggcgatggtgctgtcagtattggtagcgatgatcctcactccggctctgtgtgccacgctacttaagccactgaaaaagggtgagcatcacgggcaaaaaggcttttttgcctggtttaaccagatgtttaaccgcaacgccgaacgctacgaaaaaggggtggcgaaaattctccaccgtagcctgcgctggattgtgatttatgtcctgctgcttggcggcatggtgttcctgttcctgcgtttgccgacgtcgttcttgccactggaagaccggggcatgtttactacctcggtacagttgcccagcggttcaacccaacaacagaccctgaaagtcgttgagcaaatcgagaaatactacttcacccatgaaaaagacaacatcatgtcggtgtttgccactgttggttctggccctgggggtaacgggcaaaacgtggcgagaatgtttatccgcctgaaagactggagcgaacgcgacagtaagaccggcacctcgtttgccattatcgagcgtgcaacgaaggcgtttaacaagattaaagaagctcgcgttatcgccagcagcccgccagcaattagcggtcttggtagttctgcaggttttgatatggagttgcaggaccacgctggagcgggtcacgaggcgctgatggcagcacgtaaccagttgctggcgctggcagcggaaaacccggagctaacccgtgtgcgccataacggcctcgacgacagtccgcagttgcagattgatatcgaccagcgtaaagctcaggcgctgggcgttgctatcgacgatattaacgacacactgcaaaccgcctggggttcgagctatgtgaatgactttatggatcgcggtcgcgtgaagaaagtctatgtgcaggcagctgcgccgtatcgcatgctgccagatgacatcaatctctggtatgtccgaaataaagatggcggcatggtgcccttctctgctttcgcgacctcacgctgggagacaggctcgccgcgtctggaacgctataacggttattctgcagttgagattgttggggaagccgcaccgggggtcagtaccggtacggcgatggatattatggaatcgttagtgaagcagctgccaaacggctttggtctggagtggacggcgatgtcgtatcaggagcggctttccggcgcgcaggctccggcgctgtacgccatttccttgctggtggtattcctgtgtctggcggcgctgtatgaaagctggtcggtgccgttctcggtaatgctggtcgtgccgctgggggttatcggcgcgctgctggcaacctggatgcgcgggctggaaaacgacgtttacttccaggtgggcctgttaacggtcattggtttatcggcgaaaaacgccatcctgatcgtcgagtttgctaacgagatgaaccaaaaaggccacgacctgtttgaagcgacgctccacgcctgccgtcagcgtttacgcccgattctgatgacctcgctggcatttatcttcggcgtattgccaatggcaaccagcacgggtgccggttccggtggtcagcatgcggtgggtactggcgtaatgggcgggatgatttcggccactattctggctatttacttcgtgccgctgttctttgtgctggtgcgccgccgcttcccgctgaagccgcgcccggaataa

SEQ ID NO: 28637 - DNA, 357 bp, Escherichia coli
atggttacactttacggcatcaaaaattgtgacaccattaaaaaggctcgccgttggttggaagccaataacatcgattatcgttttcatgattaccgcgtcgatgggctggacagcgaattattgaacggttttattaacgaattaggctgggaagcgttactcaacacccgtggtacaacctggcgtaaactggacgaaaccacccgcaataaaatcatcgatgcggcctctgcggcggcattaatgactgaaatgcctgcaattatcaaacgtccattgctctgcacgcccggtaagcctatgctgctgggtttcagtgattccagttatcagcaatttttccatgaggtgtag

SEQ ID NO: 28638 - DNA, 1128 bp, Escherichia coli
atgtcgtgcccggttattgagctgacacaacagcttattcgccgcccttccctgagtcctgatgacgcaggatgtcaggctttgttgattgaacgtttgcaggcgatcggttttaccgttgaacgcatggattttgccgatacgcagaatttttgggcatggcgtgggcaaggtgaaacgttggcctttgccgggcataccgacgtggtgccgcctggcgacgccgatcgttggatcaatccgccgtttgaacccaccattcgtgatggcatgttattcgggcgcggtgcggcagatatgaaaggctcgctggcagcgatggtggtagcggcagaacgctttgtcgcacaacatcccaaccatgcaggtcgactggcatttctgatcacttctgatgaggaagccagtgcccataacggtacggtaaaagtcgtcgaagcgttgatggcacgtaatgagcgtctcgattactgcctggttggcgaaccgtcgagtatcgaagtggtaggtgatgtggtgaaaaatggtcgtcgcggatcgttaacctgcaacctcaccattcatggcgtgcaggggcatgttgcctacccacatctggctgacaatccggtacatcgcgcagcacctttccttaatgaattagtggctattgagtgggatcagggcaatgaattcttcccggcgaccagtatgcagattgccaatattcaggcgggaacgggcagtaacaacgttattccgggtgaactgtttgtgcagtttaacttccgcttcagcaccgaactgactgatgagatgatcaaagcgcaggtgcttgccctgcttgaaaaacatcaactgcgttatacggtggaatggtggctttccgggcagccatttttgaccgcgcgcggtaaactggtggatgcggtcgttaacgcggttgagcactataatgaaattaaaccgcagctactgaccacaggcggaacgtccgacgggcgctttattgctcgcatgggggcgcaggtggtggaactcgggccggtcaatgcaactattcataaaattaatgaatgtgtgaacgctgccgacctgcagctacttgcccgtatgtatcaacgtatcatggaacagctcgtcgcctga

SEQ ID NO: 28639 - DNA, 201 bp, Escherichia coli
atggactggctggctaaatattggtggattctggtgattgtctttttggtaggcgtcctgctgaacgtgattaaagatctcaagcgcgtcgaccataagaaatttctcgccaacaagccggagcttcccccgcatcgtgatttcaacgataagtgggacgatgacgacgactggccgaaaaaggatcaaccgaagaagtga

SEQ ID NO: 28640 - DNA, 699 bp, Escherichia coli
atgaaacatgaccattttgttgttcaaagcccggataaacctgcacaacagttgttactgcttttccacggtgtcggggataacccggtggcaatgggggaaataggtagctggtttgcgccgctgtttcctgatgcgctggtggtgagtgtcggtggcgcggagccgagcggtaatccggcggggcgtcagtggttttcggtgcagggtattacggaagataatcgccaggcacgtgtggatgccatcatgccgacgtttattgaaacggtgcgctactggcagaaacagagcggagtaggggctaacgccacggcactcatcggtttctctcaaggcgcgattatggcgctggagagcattaaagtcgaaccgggccttgcttcgcgcgtcattgcctttaacggacgctatgccagcctgccggaaaccgcgtctacagccacgacaattcacttgattcatggtggtgaagatccggttatcgatctggcgcatgcggttgcggcgcaggaagcgttaatcagtgccggtggtgacgtgacgctggatatcgtggaggatttaggccatgcgatcgacaatcgcagtatgcaatttgccctggatcacttgcgttataccattccgaaacattatttcgacgaagcgctaagtggcggtaagcctggcgatgatgatgtgattgaaatgatgtaa

SEQ ID NO: 28641 - DNA, 2016 bp, Escherichia coli
atggctgaactgactgcgcttcacacattaacagcgcaaatgaaacgtgaagggatccgccgcttgctggtgttgagcggggaagagggttggtgttttgatcatgcgcttaagttgcgtgatgccttacctggcgactggctgtggatttcgccgcagccagtcgctgaaaaccactgttttccctcggcgctacaaactttacttgggcgcgaattccggcatgcggtattcgacgcccgccacggctttgatgccgctgcctttgcagcacttagcggaacgttgaaagcgggaagctggctggtgttgttactccctgtatgggaagagtgggaaaaccaacctgatgccgactcgctgcgctggagtgattgccctgaccctattgcgacgccgcattttgtccagcatctcaaacgtgtacttacggcgaataacgacgccatcctctggcggcaaaaccagccgttcacgttggtgcattttgctccccgtactgactggcaccccgcgaccggcacaccacaaccagaacaacagcaactcttacagcagttactgaccatgccgccgggcgtggcagcggtaacggctgcgcgtgggcgcggtaaatcggcgttggcagggcaactcatttctcgtattgcgggcagtgcgattgtcaccgcgcccgcaaaagcggcaacggatgtactggcacaatttgcgggcgagaagtttcgctttattgcgccggatgccttgttagccagcgatgagcaagccgactggctggtggtcgatgaagccgcagccatacctgcgccgttgttgcatcaactggtatcgcgttttcctcgaacgttgttaaccactacggtgcagggctacgaaggtaccggacgtggttttttgctgaaattttgcgctcgctttccacatttacaccgttttgaactgcaacaaccgatccgctgggcgcagggatgcccgctggaaaaaatggtcagcgaggcactggtttttgacgacgaaaacttcactcacgaaccacaaggtgacatcgtcatttctgcttttgaacagacgttatggcgaagcgaaccagaaacgccgttaaaggtatatcagctattgtctggcgcgcactaccggacttcgccgctggatttacgccgcatgatggatgcaccaggtcaacattttttacaggcggctggcgaaaacgagattgccggagcgctgtggctggtggatgagggcggattatctcaagaactcagtcaggcggtatgggcgggttttcgtcgcccgcggggtaatctggtggcccagtcgctggcggcgcacggcagcaatccactggcggcgacattgcgcggacggcgggttagccggatagcagttcatcctgctcgtcagcgggaaggcacagggcgacagcttattgttggtgctttgcaatatacgcatgacctcgactatctttcggtgagttttggttacaccgaggagttatggcgtttctggcaacgctgcggttttgtgctggtgcgaatgggtaatcatcgtgaagccagcagcggttgctatacggcgatggcgctgttaccgatgagtgatgcgggtaaacagctggctgaacgtgagcattaccgtttacgtcgcgatgcgcaagctctcgcgcagtggaatggcgaaatgcttcctgttgatccactaaacgatgccgtcctttctgacgacgactggcttgaactggccggttttgctttcactcatcgtccgctattaacgtcgttaggttgcttattgcgtctgctacaaaccagcgaactggcattaccggcgctgcgtgggcgtttacagaaaaacgccagtgacgcgcagttatgtaccacacttaaactttcaggccgtaagctgttactggttcgccagcgggaagaggccgcgcaggcgctattcgcacttgatgatgttcgcactgagcgtctgcgcgatcgcataacgcaatggcaattttttcactga

SEQ ID NO: 28642 - DNA, 864 bp, Escherichia coli
atgcgttggcaagggcgacgtgaaagtgacaatgttgaagacaggcgcaacagctctggtggtccgtcaatgggcggtccaggttttcgcctgccaagcggtaaaggcgggctgattttactgatagtcgtgctggttgcaggctactatggcgttgatttaaccgggttgatgaccggacagccggtttcccaacagcaatcaacacggtcaattagtcctaatgaagacgaagccgcaaaattcacttcggtgattctggcaaccacggaagacacctggggacagcaattcgagaagatgggtaaaacctatcagcaaccgaagctggtcatgtaccgtggaatgacgcgcaccggctgcggggcgggccagtccattatggggccgttctattgcccggcggatggcacggtttatatcgatctctccttctatgatgaaatgaaagacaaacttggcgcggatggcgattttgcccaggggtacgttatcgcccatgaagtcggtcatcatgtgcagaaactgttaggcatcgagccgaaagttcgtcaactgcaacaaaacgcgacgcaggcggaagtgaaccgcttatctgtgcgtatggaactccaggccgactgttttgctggtgtctgggggcatagtatgcagcagcaaggcgttctggaaaccggcgatctggaagaggcgctgaacgcggcgcaggccatcggcgatgaccgtttacaacagcaaagtcaggggcgagtagtaccagacagtttcactcatggcacttctcagcaacgctacagctggtttaaacgtggtttcgacagcggtgatccggcacaatgcaatacttttggtaaaagcatttaa

SEQ ID NO: 28643 - DNA, 714 bp, Escherichia coli
atgcaaaagcaagctgagttgtatcgtggtaaagcgaaaaccgtatacagcacggaaaacccggacctgttggtgctcgaattccgcaatgatacgtcagcaggggatggcgcgcgcattgagcagtttgatcgcaaaggtatggtgaacaacaagttcaactacttcattatgagcaaactggctgaagcgggtatcccgactcaaatggagcgtctgctctccgataccgaatgtctggtgaaaaagctggatatggtgccggttgagtgtgtcgtgcgtaaccgtgctgctggctctctggtgaaacgacttggaatcgaagaaggtattgagctgaacccgccgctgttcgatctgttcctgaaaaacgacgccatgcacgatccgatggtcaacgaatcttactgcgaaacctttggctgggtaagtaaagagaacctggcgcgtatgaaagagctgacctacaaagcgaacgacgtgctgaaaaaactgttcgatgatgctggtctgattttggtcgactttaaactggagtttggcctgtacaaaggtgaagttgtactgggcgatgagttctccccggacggcagccgcctgtgggacaaagaaacgctggagaaaatggacaaagaccgtttccgccagagcctcggtggcctgatcgaagcctatgaagccgtcgcccgccgcctgggtgtacagctggactga

SEQ ID NO: 28644 - DNA, 1035 bp, Escherichia coli
atggcttactctgttcaaaagtcgcgcctggcaaaggttgcgggtgtttcgcttgttttattactcgctgcctgtagttctgactcacgctataagcgtcaggtcagtggtgatgaagcctacctggaagcggcaccgcttgcggagcttcatgccccggctggaatgattttgccggtgacctccggtgattatgcaatcccggtgaccaacggtagtggtgctgtcggtaaggcgctggacattcgtccaccagcccagccgctggcactggtttctggcgcgcgtacccagttcacgggcgataccgcttcattgctggtggaaaatggtcgtggcaatactctgtggccgcaggtggttagcgtgctgcaggcgaaaaactacaccatcacccaacgtgatgatgctggtcagacactgaccaccgattgggtacaatggaaccgtctggacgaagacgagcagtatcgtggtcgttatcaaatctctgttaagccgcagggttatcagcaggcggttacggttaaactgctgaacctggaacaggcgggcaaaccggttgcagacgcggcttccatgcagcgttacagcacggagatgatgaacgttatttccgccggtctggataaatctgccactgacgccgcgaacgctgcgcaaaatcgtgcctccaccactatggacgtacaaagtgcagctgatgacaccggtttaccaatgctggtcgtacgcgggccgttcaatgtggtttggcaacgtctgccagcggcgctggaaaaagtgggcatgaaagtgaccgacagcacccgttcgcagggcaacatggccgtaacttacaagccgctgtctgacagcgactggcaggaactgggcgcgagcgatccaggcctggcatccggtgactataaactgcaggttggcgatttagataaccgcagcagcctacagtttatcgatccgaaaggtcatactctgactcagagtcagaacgacgcgctggtagctgtcttccaggctgcgtttagcaagtaa

SEQ ID NO: 28645 - DNA, 879 bp, Escherichia coli
atgttcacgggaagtattgtcgcgattgttactccgatggatgaaaaaggtaatgtctgtcgggctagcttgaaaaaactgattgattatcatgtcgccagcggtacttcggcgatcgtttctgttggcaccactggcgagtccgctaccttaaatcatgacgaacatgctgatgtggtgatgatgacgctggagctggctgacgggcgcattccggtgattgccgggaccggcgctaacgctactgcggaagccattagcctgacgcagcgcttcaatgacagtggtatcgtcggctgcctgacggtaaccccttactacaatcgtccgtcgcaagaaggtttgtatcagcatttcaaagccatcgctgagcatactgacctgccgcaaattctgtataatgtgccgtcccgtactggctgcgatctgctcccggaaacggtgggccgtctggcgaaagtaaaaaatattatcggaatcaaagaggcaacagggaacttaacgcgtgtaaaccagatcaaagagctggtttcagatgattttgttctgctgagcggcgatgatgcgagcgcgctggacttcatgcaattaggcggtcatggggttatttccgttacggctaacgtcgcagcgcgtgatatggcccagatgtgcaaactggcagcagaagggcattttgccgaggcacgcgttattaatcagcgtctgatgccattacacaacaaactatttgtcgaacccaatccaatcccggtgaaatgggcatgtaaggaactgggtcttgtggcgaccgatacgctgcgcctgccaatgacaccaatcaccgacagtggtcgtgagacggtcagagcggcgcttaagcatgccggtttgctgtaa

SEQ ID NO: 28646 - DNA, 573 bp, Escherichia coli
ttgacactgtcatcgcaacattatctggtgatcactgcgttgggtgccgatcgccctggaattgtgaacaccatcacccgtcatgtcagtagttgcggctgtaatattgaagacagtcgcctggcgatgctgggagaagagttcacgtttatcatgctgctttccggttcatggaatgccattactctgattgaatcaacgttaccgttgaaaggtgccgagctggatcttttaatcgtgatgaagcgcacgacggcgcgtccgcgtccgccaatgccagcatctgtctgggttcaggtcgatgtggcagactccccgcatttaattgaacgcttcacagcacttttcgacgcgcatcatatgaacattgcggagctggtgtcgcgcacgcaacctgctgaaaatgaacgggctgcgcagttgcatattcagataaccgcccacagccccgcatctgcggacgcagcaaatattgagcaagcgttcaaagccctatgtacagaactcaatgcacaaggcagtattaacgtcgtcaattattcccaacatgatgaacaggatggagttaagtaa

SEQ ID NO: 28647 - DNA, 471 bp, Escherichia coli; identical to SEQ ID NO: 2665

SEQ ID NO: 28648 - DNA, 618 bp, Escherichia coli
atgaaccgctttgtggtggccgaaccactgtggtgtacaggatgtaatacctgtctcgctgcctgttcggacgtgcataaaacgcaaggtttacagcaacacccgcgcctggccctggcgaagacgtcaacactcactgcccctgtcgtgtgtcatcactgtgaggaagccccttgcctgcaggtctgcccggtcaatgccatctcccagagggatgatgcgatccaactcaacgaaagcctctgtattggctgcaagctttgtgccgtggtctgcccatttggcgcaatcagcgcttcaggaagccgtccggtgaatgcccctgcgcaatatgtttttcaggctgagggctcactcaaagacggcgaagaaaacgcgccgacccaacatgctttgctgcgctgggaaccgggtgtccagaccgtcgcggtgaaatgcgacctgtgtgatttcttgccagaaggtccggcctgcgttcgcgcttgcccgaatcaggcgttacggctgatcaccgacgatagcctgcaacgtcagatgaaagaaaaacagcgcattgccgcaagctggtttgccaatggcggggaggatcccctttccctcactcaggagcaacgctaa

SEQ ID NO: 28649 - DNA, 2019 bp, Escherichia coli
atggatgccctgcaattattaacctggtcgctgatcctctatctgtttgccagtctggcttcgctgtttttactcggtctggacagactggctattaagctttccggcatcacatcgctggtgggtggcgtgattggcatcatcagcggaattacgcaattacatgcaggcgtaattttagtcgcccgttttgccacgccttttgactttgccgatttaaccctgcgaatggatagcctctcggcatttatggtgctggttatctccttgctggtggtggtttgttcgctctattcattgacttatatgcgcgaatacgagggcaaaggcgcggcggcgatgggcttctttatgaatcttttcatcgcatcgatggttgccctgctggtgatggacaacgctttttggttcatcgtgctgtttgaaatgatgtcgctgtcttcctggtttctggtcattgccaggcaggataaaacgtcaatcaacgctggcatgctctacttttttatcgcccacgccggatcggtactgattatgatcgccttcttgctgatggggcgcgaaagcggcagcctcgattttgccagtttccgcacgctttcactttctccggggctggcgtcggcggtgttcctgctggccttctttggttttggcgcgaaagccgggatgatgccgttgcacagctggttgccacgcgctcaccctgccgcaccatcgcacgcttcggcgttgatgtctggcgtaatggtcaaaatcggtattttcggcatcctgaaagtagcgatggacctgctggcgcaaacgggtttgccgctgtggtggggcattctggtgatggcgatcggcgcaatctccgcgctcctgggcgtgctgtatgcgctggcggaacaggatatcaaacggctgctggcctggagtaccgtcgaaaacgtcggcattattttgctggcggtcggtgtggcgatggtcggtctgtcactgcacgacccgctgctcaccgttgttggactgctcggcgcgctgtttcatctgctcaaccatgcgctgttcaaagggctgctgtttctcggcgcgggtgcgattatttcgcgtttgcatacccacgacatggaaaaaatgggggcactggcgaaacgtatgccgtggacagccgcagcatgcctgattggttgcctcgcgatatctgctattcctccgctgaatggttttatcagcgaatggtacacctggcagtcgctgttctcactaagtcgtgtggaagccgtagcgctacaacttgcgggtcctattgctatggtgatgctggcagtcactggtgggctggcagtaatgtgcttcgtcaaaatgtacggtattactttctgtggagcgccgcgcagtacacacgctgaagaggcacaggaagtgccgaatacgatgatcgtcgccatgctactgctcgcggcactctgcgtattcattgcgcttagtgccagttggctggcaccgaagataatgcacattgcccatgcgtttaccaatacccctcccgtcactgtcgccagcggaatagcacttgtaccaggcacgtttcatacacgggtcactccctcattactgttgctgttactactggcgatgcctttgctgcctggcctttactggctgtggtgtcgttcgcgccgcgcagcgtttcgtcgcacaggagatgcctgggcatgcggctacggctgggaaaatgcgatggccccgtcaggcaatggcgtgatgcagccgctgcgtgtggtcttttgtgcgctatttcgtctacgacaacagctcgaccctacgctgaggctaaataaaggtcttgcgcacgtcaccgccagggctcagagcacagaacccttctgggatgagcgggtgatccgccccatcgtgagcgccacccaacggctggccaaagaagtacagcatctgcaaagcggcgactttcgtctctattgcctgtatgtggtcgccgcactggttgtgctgctaatcgctattgccgtctaa

SEQ ID NO: 28650 - DNA, 948 bp, Escherichia coli
atgagacaaactctttgcgacggatatctggtcatttttgcgttagcacaggccgtgattctgctggtgctaaccccgctttttacggggatttcccggcagatacgcgcgcgtatgcactcccgtcgcggaccggggatctggcaggattatcgcgatatccacaaactgtttaaacgccaggaagttgcgccgacatcttcaggtctgatgttccgcctgatgccgtgggtattaatcagcagcatgctggtgctggcgatggccctaccactatttattactgtttccccttttgcgggcggcggcgatctgatcacccttatctatcttcttgccctgtttcgttttttctttgctctttccgggctggataccggaagcccctttgcgggagtcggtgccagtcgcgagttgacgctcggcattctggtcgaacccatgctcattctctcactgctggtattggcgctgatagcggattccacgcatatcgagatgatcagcaatacgctggcgacgggctggaactcgccgctaaccaccgtactggcgttactggcctgtggttttgcctgcttcattgagatgggaaaaattccctttgatgttgctgaagcagaacaggaattacaggaaggcccgctgaccgaatattccggtgccgggctggcgctggcgaaatgggggctggggctgaaacaggtcgtgatggcatcactgtttgtggccctgtttctgccctttgggcgcgcgcaagagctttctctcacctgcctgctgacttcacttgtcgttacgctgctcaaggttttgctgatttttgtactggcctcaatcgcagaaaacacgctggcacgcgggcgttttttactcattcaccatgtgacctggcttggcttcagccttgctgcgcttgcctgggtcttctggttaaccggtctgtaa

SEQ ID NO: 28651 - DNA, 1440 bp, Escherichia coli
atggaaaatcttgctctgacgacgttattgctgccttttatcggcgcactggtcgtttcgttttcgccacaacgtcgggccgccgaatggggagttttgttcgccgcgctgaccacgctgtgcatgttgtcactgatctccgcgttttatcaggccgataaagttgccgtcacgttgacgttggtcaacgtgggggatgtggcgttgtttggcctggtcattgatcgcgtgagtacgctgattctgtttgtggtggtgtttctcggtttgctggtcacgatctactccacgggttatctgacggataaaaatcgcgaacacccgcataacggcacgaatcgttattacgcatttttgctggtgtttatcggcgcgatggcgggactggtactctcctcgacgctgctcggtcagttgttgttttttgaaattacgggcggctgctcctgggcgttgatcagttattaccagagcgataaagcgcagcgttcagcactaaaagcgttgcttatcactcatatcggttcgctggggttgtatcttgccgccgccacgctgtttttgcagaccggaacgtttgcgctcagcgcgatgagcgagttacacggcgacgcacgctatctggtttatggtggcatcctgtttgccgcgtgggggaaatcggcccagctaccgatgcaagcgtggctaccggatgcaatggaagcgccaacaccgatcagcgcctatctccacgccgcatcgatggtgaaagtgggcgtttacatttttgcccgtgccattatcgacggcggcaatatcccgcatgtgattggcggcgttggcatggttatggcactggtcaccattctttatggcttcctgatgtatttgccacagcaggatatgaagcggttgctggcctggtcgaccatcactcaacttggctggatgtttttcggcttgtcgctctccatcttcggttcgcggctggcgctggagggcagcatcgcctacatcgtcaaccacgcgttcgctaaaagcctgtttttccttgtagcaggtgcgctgagttacagctgcggcacgcgcttgttgccgcgtctgcgtggcgtattgcacaccctgccgttgcctggcgtgggtttctgcgtggcagcgctggcaattaccggcgtgccgccgttcaacggcttcttcagtaaattcccgctgtttgccgccggttttgcgttgtcagtggagtactggatcctgctgcccgccatgattctgctgatgattgaatcggtcgccagtttcgcctggtttattcgctggtttggtcgcgtcgtgcctggcaaaccgagcgaggccgtcgccgatgccgcaccgctgccaggatcaatgcgcctggtgttgattgtactgattgtgatgtcgctgatttccagcgtaatcgccgcgacctggttgcagtaa

SEQ ID NO: 28652 - DNA, 651 bp, Escherichia coli
atgaccggttctatgatcgtaaataatctggcgggactgatgatgctgacatcgctgtttgtgattagcgtcaaaagctatcgcctgtcatgcggattttacgcctgccagtcgctggtgctggtgtctattttcgccactctctcgtgcctgttcgccgcagagcaactgctgatctggtccgccagcgcctttatcaccaaagtgctgctggtaccgttaatcatgacttacgctgcacgaaatattccccagaacatcccggaaaaagcgttattcggtccggcaatgatgacactgctcgcggcgttaattgtcctgctttgcgcatttgtcgttcagcccgtgaagctaccgatggctaccgggctgaaaccggcgctggcggtggcgttaggtcattttctgcttggcctgctgtgcattgtcagccagcgcaatatcctgcggcaaatttttggttactgcctgatggaaaacggctcccatctggtactggcgcttcttgcctggcgtgcaccggaactggtggaaattggtatcgctaccgacgccatcttcgccgtcattgtgatggtgttactggcaagaaaaatatggcgtacccacggcacgctggacgtgaacaacttgaccgcgctgaagggataa

SEQ ID NO: 28653 - DNA, 1581 bp, Escherichia coli
atgagttattctgtgatgttcgctttactcctgctcacgccgctgcttttttcgctgctctgttttgcctgccggaaacgggggcactctgcgactcgcacggtgacagtactacatggcttagggatcacactgctgctgattctggcactgtgggtggtccaaactgccgctgatgcgggagaaatattcgctgcgggactgtggcttcacattgatggtctgggcggtttgttcctcgccattcttggtgtgattggctttctcaccggtgtttactcgattggctacatgcgtcatgaagtggcacacggcgagctttcacccgttacgctgtgcgattactacggtttcttccatctgtttttgttcaccatgctgctggttgttaccagcaataacctgattgtgatgtgggcggcaatcgaagccaccaccttaagctcggcgtttctggtaggcatttacggtcagcgttcatcgctggaagctgcatggaagtacatcattatttgtactgttggtgtcgcttttggtctgttcggtaccgtgctggtatacgccaacgccgccagcgttatgccgcaggcagaaatggcgatattctggagcgaggttcttaagcaatcgtccttgcttgacccaacattaatgctgttggcctttgtgtttgtgctaattggctttggcaccaaaaccgggctttttcccatgcacgcctggctgccggatgctcacagtgaagcgccgagtccggtcagcgccctgctctccgccgtattgctgaactgcgcgctgttggtgcttattcgctattacatcattatttgccaggccatcggcagcgatttccccaaccggttgttgctcatcttcggcatgttgtcggttgccgtggcggcatttttcattctggtacagcgggacattaagcgtctgctggcgtactccagcgtggagaacatgggactggtcgcggtggcgttaggcattggcgggccgctgggaatttttgccgcgctgctgcacaccttaaaccacagtctggcaaaaacgctgttgttctgcggttccggcaatgtactgctcaagtacggcacgcgcgatctcaacgtcgtctgtgggatgctcaaaatcatgccatttaccgccgtgttgtttggcggcggtgcgctggcgctggccgggatgccgcccttcaacatttttcttagcgaatttatgaccgttaccgccggactggcacgtaatcacctgctgattatcgtcctgctgttattgctgttaacgctggtgctggcgggcctggtacggatggctgcgcgggtgttaatggcgaaaccgccgcaggccgttaaccggggtgaacttggctggttgaccacctcgccaatggtgattctgctggtcatgatgctggcgatgggaacgcatattccacaacctgtcatcaggatcctggcaggcgcttccactatagtcctctcagggacgcacgacctgcctgcacaacgtagcacctggcatgattttttgccttcaggcaccgcatctgtttcggagaaacacagtgaacgttaa

SEQ ID NO: 28654 - DNA, 1716 bp, Escherichia coli
gtgaacgttaattcatcgtcaaatcgtggcgaagcgattctcgccgccctgaaaacgcagttccccggcgcggtgctggatgaagagcgacaaacgcctgaacaggtcaccattacggtgaaaatcaatctgctgcctgacgttgtgcattatctttattatcaacatgatggctggcttccagtcctgtttggcaacgacgagcggacacttaacggtcattacgcggtttattatgccctttctatggaaggggccgaaaaatgctggatcgtggtgaaggcactggtcgatgccgacagtcgggagtttccgtcagtcacaccgcgcgtccctgccgcggtctggggcgagcgagaaattcgcgatatgtacgggctgattccggttggcctgccggatcagcgtcggctggtgttgcccgatgactggccggaagatatgcatccgctgcgcaaagacgcgatggattatcgactgcgcccagaaccgacgactgataccgaaacgtatccgtttatcaacgagggcaacagcgatgcgcgggtgatccctgtcggcccgctgcatatcacctccgatgaaccaggtcacttccgcttgtttgtggatggcgagcaaattgtcgatgctgattaccgcctgttttatgtccatcgcggcatggagaaactggcagaaacgcggatgggctacaacgaagtgaccttcttatccgaccgcgtgtgtgggatttgcggttttgcccacagtgtggcctataccaactcggttgaaaatgcacttgggattgaggtgccgcaacgagcgcatactattcgctcgattctgctggaagtcgaacggctacacagtcatttgctcaaccttggtctctcctgccattttgttggttttgataccggctttatgcaatttttccgcgtgcgggaaaagtcgatgacaatggcggaattgctgaccgggtcgcgtaaaacctacggtctgaatctgattggtggtgttcgccgcgatattctcaaagagcaacgtctgcaaacgctgaaactggtgcgcgagatgcgagccgacgtgtcggagctggtagagatgctgcttgccacgccgaatatggaacaacgcactcagggcattggcattctcgaccgacaaatcgcccgtgattatagccccgtagggccgctgatccgcggcagtggttttgcccgtgatttgcgctttgatcacccctacgccgactacggcaatattcccaaaacgctgtttacctttaccggcggcgatgtcttctcccgcgtgatggtccgtgtaaaagagacgtttgattcgctggcaatgctggaatttgccctcgacaacatgccagataccccactgctgaccgaaggctttagctataaacctcacgcattcgcgctgggctttgttgaagcgccacgtggtgaagacgtgcactggagcatgctcggtgataaccaaaaattgttccgctggcgctgtcgtgccgccacctacgccaactggccagtgctacgttacatgctgcgcggcaataccgtttctgacgcaccgctgattatcggtagccttgatccctgctactcctgtaccgaccgtgtgacgctggttgatgtgcgcaagcgccagtcaaaaaccgtgccgtataaagagatcgaacgctacggcattgatcgtaaccgttcgccgctgaagtaa

SEQ ID NO: 28655 - DNA, 546 bp, Escherichia coli
atgctgaagttactgaaaactattatgcgcgccggaaccgcgacggtgaaatatcccttcgcgccactggaggtcagcccaggctttcgcgggaaaccggacctgatgcccagccaatgtattgcctgcggtgcctgcgcctgtgcttgtccggcaaatgcgctgactatccagaccgacgaccagcaaaatacgcgcacctggcagctctatctggggcgttgtatttactgcggacgttgtgaagaagtgtgcccgaccagagccattcagcttaccaataactttgaactgaccgtcaccaataaagccgatctctatacccgcgcgacgttccatctacaacgttgcagccgttgcgaacgcccgtttgccccgcaaaaaaccgtcgcactggctgcagaactgttggcacagcaacaaaatgcaccacaaaaccgcgaaatgttacgggcgcaagcgagcgtctgcccggaatgcaaacagcgcgcgacgctgatcaacgacgacacagatgaaccgctggtggctaaggagcagctatga

SEQ ID NO: 28656 - DNA, 759 bp, Escherichia coli
atgagtccagtgcttacgcaacatgtcagccagcccatcacgctggacgagcaaacgcaaaagatgaagcagcatttgctacaggatatccgtcgctcggcttacgtttatcgcgtcgattgcggcggctgcaacgcctgtgaaatcgaaatttttgctgccatcacacccgtattcgacgcagaacgttttggcattaaggttgtttcatcaccgcgtcacgccgatattttgttatttactggcgcagtcacccgggcgatgcgtatgcctgcacttcgggcgtatgagtctgcccccgatcataaaatttgtgtttcctacggcgcgtgcggtgtcggcggcggtattttccacgatctttacagcgtctggggcggcagcgacaccattgtccccattgatgtttggatccccggctgcccgccaacaccggccgccaccattcacggtttcgccgtggcgctcggtttgctgcaacagaagattcacgcggtggattatcgcgatcccaccggggagaccatgcaaccgctgtggccgcagatcccgccatcacagcgtatcgccattgagcgagaagcgaggcggctggcgggctatcgtcaggggcgagaaatttgcgatcggctcctgcgccatttaagcgacgatcctacaggaaatcgggttaacacctggttgcgcgatgccgacgatccgcgtctcaatagtatcgttcagcaactctttcgcgtactccgggggttacatgactga

SEQ ID NO: 28657 - DNA, 414 bp, Escherichia coli
atgactgaagagtgcagggaaattgttttctggacgctgcgaaaaaagtttgtcgccagtagcgacgagatgccggaacacagctcccaggtaatgtattactcgctagctatcggccatcacgttggcgtgattgattgtctgaatgtcgccttccgctgcccactgacggaatacgaagattggcttgcactggtcgaagaggagcaagcccgacgtaagatgctgggggtgatgacctttggtgagattgttattgacgccagccacaccaccctgttgacccgggcattcgcgccactggcagatgacgcgacgtctgtgtggcaggcgcgtagcattcaattcattcatctgttggatgaaattgtgcaggaaccggccatctatctgatggccagaaaaattgcgtga

SEQ ID NO: 28658 - DNA, 2013 bp, Escherichia coli
atggctatgtcagacgaggcgatgtttgccccgccgcaaggaataacaattgaagcggtaaacggaatgctcgcggagcggttagcgcagaaacacggcaaggcgtctttattacgcgccttcatcccgctgccgccgccgttcagcccggtacaacttattgaactgcacgttctcaaaagcaacttctattaccgctaccatgatgatggcagcgatgtgacggcaacagcagagtatcagggcgagatggtcgattattcgcgtcacgccgtccttctcggcagtagtggaatggcggagctacgctttattcgcacccacggcagtcgttttactccccaggattgcacactgtttaactggctggcacacataatcactccggttctgcaatcatggctcaatgatgaagaacagcaggtggcgctgcgtttgctggagaaagatcgcgatcatcatcgggtactggtggatatcactaatgcagtgttgtcacatcttgatctcgacgatctgatcgctgacgtcgctcgtgagatccatcattttttcggtctggcttcagtcagtatggtactgggcgatcatcgaaagaacgagaagttcagcctgtggtgcagcgatctttctgcctcacattgtgcgtgtctgccacgctgtatgcctggcgaaagtgtattgctgacacaaacgctacaaacccgacaaccgaccttgacgcaccgtgcagacgatctgtttctctggcaacgcgacccgttattacacttacttgcatctaacggctgcgaatctgcgctccttataccgctcacctttggcaaccatacaccgggcacattgttgctggcgcatacctcttccactctctttagtgaggaaaactgccagctactacaacatattgccgatcgcatcgctattgccgttggcaatgccgatgcctggcgcagcatgaccgatttgcaggaaagcttgcagcaagaaaaccaccagcttagcgagcagctcctttcgaatctgggcgtcggtgacattatctatcaaagccaggcaatggaagatttgctccagcaggtagatattgtggcgaagagcgacagtacggtgttgatttgtggtgaaaccggaaccggcaaagaggtgatcgccagagcgatccatcaacttagcccacgacgcgacaagccactggtcaaaatcaactgcgctgccatccccgccagtcttctggaaagtgagttattcggtcatgacaaaggggcatttactggtgcgattaatacccatcgtggtcgttttgaaattgccgatggcggcacgttgtttctcgatgaaattggcgatctgccgttagaacttcagcctaaactgctgcgcgtattgcaggaacgggagattgagcgtctcggcgggagtagaacgatcccggtaaatgtcagagtcattgccgccaccaaccgtgatttgtggcaaatggttgaagatcgccagtttcgcagcgatctcttttatcgcctgaatgtcttcccactggaattgcccccgctacgcgaccgtccggaagatatccctcttttagcaaaacatttcacgcaaaaaatggcgcgccatatgaatcgcgcaattgacgccatcccgaccgaggcgctacgccagttgatgtcgtgggactggccgggcaacgtgcgcgagctggaaaacgtgattgagcgggcggtactactgactcgcggtaacagtctgaatttacatcttaatgtccgacaaagccgtttactgccgacgctaaatgaagattcagcgcttcgcagttcaatggcacagttgctgcacccgacgacgccagagaatgacgaagaagaacgtcagcgcattgttcaggtattgcgagaaaccaatggcattgttgccgggccccgtggcgcggcgacacgattagggatgaagcgcaccacgctgctgtcacgaatgcagcgtctggggatctcggttcgcgaggtgttgtaa

SEQ ID NO: 28659 - DNA, 849 bp, Escherichia coli
atgagaaacaaactctctttcgacttgcagttgagcgccagaaaagcggcaatcgctgaacggattgccgcccataaaattgcccgcagcaaagtgtcggtctttttaatggcgatgtccgctggcgtgtttatggcgatcggatttactttttacctttccgttatcgccgatgccccgtcttcacaggcattaacccatctggtgggtggcctttgctttacactcggctttattttgctggcggtttgcggcaccagcctgttcacctcgtcggtaatgacggtgatggcaaaaagtcggggcgttattagctggcgaacatggctgattaatgcacttctggtggcctgcggtaatctggcaggtattgcctgtttcagtttgttaatctggttttccgggctggtgatgagtgaaaacgcgatgtggggagtcgcggttttacactgcgccgagggcaaaatgcatcatacatttactgaatctgtcagcctcggcattatgtgcaatctgatggtttgcctggcgctgtggatgagttattgcgggcgttcattatgcgacaaaatcgtcgccatgattttgcccatcaccctgtttgtcgccagtggctttgagcactgtatcgccaatttgtttgtgattccgttcgccattgccattcgccatttcgcccctccccccttctggcaactggcgcacagtagcgcagacaattttccggcactgacggtcagccattttattaccgccaatctgctcccggtgatgctgggtaatattatcggcggtgcagtgctggtgagtatttgttatcgggctatttatttacgtcaggaaccctaa

SEQ ID NO: 28660 - DNA, 1062 bp, Escherichia coli
atgctcgaaatgttgatgcaatggtatcgccgccgttttagcgacccggaagcgattgccttgctggttattttagttgccggatttggcattatctttttctttagtggcctgcttgctccgttgctggtggctattgtgctggcctatttgctggaatggccaaccgtgcgcctgcaatctattggctgctcccgccgctgggcgacgtcgattgtattggtggttttcgtcggtatattgctactgatggcgttcgtggtactgcctatcgcctggcaacagggcatctacttaatccgcgatatgccggggatgctcaataagctttctgactttgccgccacgttgccgcgccgctatccggcgttaatggacgcgggcattattgatgcaatggccgaaaatatgcgcagtcggatgctgaccatgggcgattcggtggtgaaaatttccctcgcctcgctggtcggtttgctgaccattgccgtctatctggtgctggtaccattgatggtcttcttcctgctgaaagacaaagagcagatgctgaacgccgttcgccgggtgctgccacgtaaccgtggactggcaggacaggtgtggaaggagatgaatcaacaaatcaccaactatatccgcggcaaagtgctggagatgatcgtggtggggattgccacctggctgggattcttactcttcgggctgaactattcgctgctgctggcggtgctggtcggcttctcggtacttattccgtacattggtgcatttgtggtgaccattccggtggttggcgtggcgctattccagtttggtgctggcacggaattctggagctgcttcgcggtgtatctgattattcaggcgctggacggcaacctgttagtacctgtgttgttctccgaagcggttaacctgcatccgctggtcattattttatcagtagtgatcttcggtggtttgtggggattctggggcgtattcttcgccattccattggcgacgctgatcaaagccgtgattcacgcctggcccgatgggcaaatcgcgcaagaataa

SEQ ID NO: 28661 - DNA, 1464 bp, Escherichia coli
atgttcaggcagttgaaaaaaaacctggttgcaaccctcattgctgccatgaccattggtcaggtagccccggcgtttgccgacagcgcagacaccttgccggatatgggaacctccgcaggaagcacgctttccattggtcaggaaatgcagatgggcgactattatgtccgccagctacgcggcagcgcgccgttaattaatgacccgctgttaacgcaatatattaattcgctggggatgcgtctggtttcgcatgccaattcggttaagacaccgtttcatttttttctgatcaacaacgacgaaattaacgcctttgctttctttggcggcaacgtggtgctgcactctgccctgttccgttattccgataacgaaagtcaactggcttcagttatggcgcacgaaatctcccacgtcacccaacgtcacctggcgcgagcgatggaagatcaacaacgcagcgcgccgctgacctgggtcggcgcgttaggttctattttactggcgatggccagtccgcaggcggggatggcggcgctgaccggtacactggcgggaacgcgccaggggatgatcagtttcacccagcaaaatgaacaggaagcggaccgcattggtattcaggtgctgcaacgctcgggattcgatccgcaggcgatgccgaccttcctcgaaaaattgctcgatcaggcgcgttactcctcgcgtccgccggaaattttattgactcacccgttgccggaaagtcgtctggcagatgcccgcaaccgtgctaatcagatgcgtccgatggtggtgcagtcgtcggaggatttctatctggcgaaagcgcgcacactggggatgtataattccggacgtaatcagctcaccagtgatttgctggatgaatgggcgaaaggaaacgttcgtcagcaacgagcagcacaatatggtcgtgctttacaggcgatggaagccaataaatacgacgaggcgcgtaaaacgctgcaaccgttactggcggcagaacctggcaacgcatggtatctcgatctggctaccgatatcgatcttgggcaaaacaaagccaatgaggcaatcaatcgcctgaaaaatgcccgtgatttgcgcaccaatccggtgttgcagctcaacctggcgaacgcttatctgcaaggcggtcaaccacaagaagcggccaatattctgaatcgctacacttttaacaataaagatgacagcaatggctgggatttactggcacaggcggaggcggcgctaaataaccgcgatcaggaactggctgcgcgagcagaaggttatgcgctcgccgggcgactcgatcaggccatttccttgttgagtagcgccagttcgcaggtgaaattaggcagcctgcaacaagcgcgttacgatgcgcgcatcgaccaattgcgccagctgcaggaacgctttaagccttataccaagatgtaa

SEQ ID NO: 28662 - DNA, 360 bp, Escherichia coli
atgaccaaacaggtaaaaatctaccataacccacgctgttcaaagagccgggaaacgctgaacctgctgaaagaaaacggcgtggagccagaagtggtgctctaccttgagacacccgccgatgcggcaacgctgcgcgatttgctgaaaatgctggggatgaatagcgcccgtgaattgatgcgccagaaagaggatctttataaagaactgaacctggctgacagttcacttagcgaagaggcgctgattcaggcaatggtggataatccgaagctaatggagcgcccgattgtggtcgcgaatggcaaagcgcgaattggtcgtccaccggagcaggtgctggaaatcgtgggttaa

SEQ ID NO: 28663 - DNA, 747 bp, Escherichia coli
gtggtaaacttctcgcgattttgtgaaatcctggttgaggtatctctgaacacaccggcacagctctctttgccactttatcttcctgacgacgaaacctttgcaagtttctggccgggggataactcctctttactggccgcgctgcaaaacgtgctgcgtcaggaacatagcggttacatctatctctgggcacgcgaaggcgcggggcgcagccatctgctgcacgcggcttgcgcggaattgtcgcagcgtggcgatgcggtgggctatgtcccgctggataaacgcacctggtttgttccggaagtgctcgacggtatggagcatttgtcgctggtctgtatcgacaacattgagtgtattgcaggcgatgagttgtgggagatggcgattttcgatctctacaatcgaattctggaatcgggcaaaacacggttgttaatcaccggcgatcgtccaccgcggcagttgaatcttggattaccggatctcgcgtcgcgtctcgactgggggcagatctacaaattgcagccactttctgatgaagataagttgcaggcgctacagttacgcgcgcgtttgcgtggttttgaactgccggaagatgtggggcgtttcttgctgaagcggctcgacagagaaatgcgcacgttatttatgacgttggatcagttggatcgtgcgtcgattaccgcgcaacgtaagctgaccattccgtttgtgaaagaaattctgaaactgtag

SEQ ID NO: 28664 - DNA, 1290 bp, Escherichia coli
atgacgcgccgtgctatcggggtgagtgaaagaccgccacttttacagacaatcccgcttagtttgcaacatttgttcgccatgtttggtgcaaccgtcctggtgcccgtcttatttcatattaacccggcgactgtactgttatttaacggtataggaacgctgctgtatctcttcatctgtaaagggaaaatcccggcttatcttggttccagctttgcctttatttcaccggtattgttactgttgccgttagggtatgaagtcgcgctgggcggctttattatgtgcggcgtgctgttctgcctggtttcttttatcgtgaagaaagcggggaccggctggctggacgtgctgtttccacctgcggcaatgggcgcaatcgttgccgtcatcggtctggagctggcgggcgtagctgccggtatggcaggtttactcccggctgaagggcaaacgccagactccaaaaccatcatcatctccattaccaccctggcagtcacggttttaggttccgtgctgtttcgtggtttcctggcaattatcccgattttaattggcgtgctggtgggttacgcgctctctttcgcaatgggaattgtcgataccacgccgattattaatgctcactggtttgcgctgccaaccctctatacgccgcgcttcgagtggtttgccattctgactattctgccagcggcgttagtggttattgccgaacacgtagggcacctggtggtaacggctaatatcgtcaaaaaagatctgctgcgcgatccaggtctgcaccgttcgatgtttgctaacggcttgtcgaccgtgatctccggcttctttggctccacgccaaacaccacctacggggaaaacattggcgtgatggcgatcacccgtgtttacagtacctgggttatcggcggggcggcgattttcgctatcctgctttcctgcgtcggtaaactggctgctgctatccagatgatcccattgccggtgatgggcggcgtttcgctgctgctttatggtgtcatcggtgcttccggtattcgtgttttgatcgaatcgaaagtggattacaacaaagcacagaacctgatcctgacttccgtgattttgatcatcggtgtcagtggcgcgaaggtaaacatcggcgcggcggagctgaaaggtatggcgctggcgaccatcgtcggtatcggcttaagtttgatcttcaaaatgattagtgtgctgcgccctgaagaagtggtgctggacgcagaagacgcggatataacagacaaataa

SEQ ID NO: 28665 - DNA, 627 bp, Escherichia coli
atgaagatcgtggaagtcaaacacccactcgtcaaacacaagctgggactgatgcgtgagcaagatatcagcaccaagcgctttcgcgaactcgcttccgaagtgggtagcctgctgacttacgaagcgaccgccgacctcgaaacggaaaaagtaactatcgaaggctggaacggcccggtagaaatcgaccagatcaaaggtaagaaaattaccgttgtgccaattctgcgtgcgggtctggggatgatggacggtgtgctggaaaacgttccgagcgcgcgcatcagcgtcgtcggtatgtaccgtaatgaagaaacgctggagccggtaccgtacttccagaaactggtttctaacatcgatgagcgtatggcgctgatcgttgacccaatgctggcaaccggtggttccgttatcgcgaccatcgacctgctgaaaaaagcgggctgcagcagcatcaaagttctggtgctggtagctgcaccagaaggtatcgcagcgctggaaaaagcgcacccggacgtcgaactgtatactgcatcaattgaccagggactgaacgagcacggatacattattccgggcctcggcgatgccggtgacaaaatctttggtacgaaataa

SEQ ID NO: 28666 - DNA, 1038 bp, Escherichia coli
gtgaccgataaaacctctcttagctacaaagatgccggtgttgatattgacgcgggtaatgctctggttggaagaatcaaaggcgtagtgaagaaaacgcgtcgtccggaagtgatgggcggtctgggcggcttcggtgcgctgtgtgcattgccgcaaaaatatcgtgaacccgtgctggtttccggcactgacggcgtaggtaccaagctgcgtctggcgatggacttaaaacgtcacgacaccattggtattgatctggtcgccatgtgcgttaatgacctggtggtgcaaggtgcggaaccgctgtttttcctcgactattacgcaaccggaaaactggatgttgataccgcgtcagcggtgatcagcggcattgcggaaggttgtctgcaatcgggctgttcactggtgggtggcgaaacggcagaaatgccggggatgtatcacggtgaagattacgatgtcgctggtttctgcgttggcgtggtagaaaaatcagaaatcatcgacggctctaaagtcagcgatggcgatgtgctgattgcactcggctccagcggtccgcactcgaacggctattcgctggtgcgcaaaattcttgaagtcagcggttgtgatccgcaaaccaccgaacttgatggtaagccattagccgatcatctgctggcaccaacccgcatttacgtgaagtccgtgctggagttgattgaaaaggtcgatgtgcatgctattgcgcacctgaccggcggcggcttctgggaaaacattccgcgcgtattgccagataatactcaggcagtgattgatgaatcatcctggcagtggccggaagtgttcaactggctgcaaacggcaggtaacgttgagcgccatgaaatgtatcgcaccttcaactgcggcgtcgggatgattattgccctgcctgctccggaagtggacaaagccctcgccctgctcaatgccaacggtgaaaacgcgtggaaaatcggtatcatcaaagcctctgattccgaacaacgcgtggttatcgaataa

SEQ ID NO: 28667 - DNA, 639 bp, Escherichia coli
atgaatattgtggtgcttatttccggcaacggaagtaatttgcaggcaattattgacgcctgcaaaaccaataaaattaaaggcaccgtacgggcagttttcagcaataaggccgacgcgttcggccttgaacgcgcccgccaggcgggtattgcaacgcatacgctcatcgccagcgcgtttgacagtcgtgaagcctatgaccgggagttgattcatgaaatcgacatgtacgcacccgatgtggtcgtgctggctggttttatgcgcattctcagcccggcgtttgtctcccactatgccgggcgtttgctgaacattcacccttctctgctgccgaaatatcccggattacacacccatcgtcaggcgctggaaaatggcgatgaagagcacggtacatcggtgcatttcgtcaccgatgaactggacggtggcccggttattttacaggcgaaagtcccggtatttgctggtgatacggaagatgatatcaccgcccgcgtgcaaacccaggaacacgctatttatccactggtgattagctggtttgccgatggtcgtctgaaaatgcacgaaaacgccgcgtggctggatggtcaacgtctgccgccgcagggctacgctgccgacgagtaa

SEQ ID NO: 28668 - DNA, 2067 bp, Escherichia coli
atgggtcaggaaaagctatacatcgaaaaagagctcagttggttatcgttcaatgaacgcgtgcttcaggaagcggcggacaaatctaacccgctgattgaaaggatgcgtttcctggggatctattccaataaccttgatgagttctataaagtccgcttcgctgaactgaagcgacgcatcattattagcgaagaacaaggttccaactctcattcccgccatttactgggcaaaattcagtcccgggtgctgaaagccgatcaggaattcgacggcctctacaacgagctgttgctggagatggcgcgcaaccagatcttcctgattaatgaacgccaactctccgtcaatcaacaaaactggctgcgtcattattttaagcagtatctgcgtcagcacattacgccgattttaatcaatcctgacacagacttagtgcagttcctgaaagatgattacacctatcttgcggtggaaattatccgtggcgataccatccgttacgcgctgctggagatcccatcagataaagtgccacgctttgtgaatttaccgccagaagcgccgcgtcgacgcaagccgatgattcttctggataacattctgcgttattgccttgatgatattttcaaaggcttctttgattatgacgcgctgaatgcctattcaatgaagatgacccgcgatgccgaatacgatttagtgcatgagatggaagccagcctgatggagttgatgtcttccagtctcaagcagcgtttaactgctgagccggtgcgttttgtttatcagcgcgatatgcccaatgcgctggttgaagtgttacgcgaaaaactgactatttcccgctacgactccatcgtccctggtggtcgttatcataattttaaagactttattaatttccccaatgtcggcaaagccaatctggtgaacaaaccactgccgcgtttacgccatatttggtttgataaagcccagttccgcaatggttttgatgccattcgcgaacgcgatgtgttgctctattatccttatcacacctttgagcatgtgctggaactgctgcgtcaggcttcgttcgacccgagcgtactggcgattaaaattaacatttaccgcgtggcgaaagattcacgcatcatcgactcgatgatccacgccgcacacaacggtaagaaagtcaccgtggtggttgagttacaggcgcgttttgacgaagaagccaacattcactgggcgaagcgcctgaccgaagcaggcgtgcacgttatcttctctgcgccggggctgaaaattcacgccaaactgttcctgatttcacgtaaagaaaacggtgaagtggtgcgttacgcacacatcgggaccggaaattttaacgaaaaaaccgcgcgtctttatactgattattcgttgctgaccgctgatgcgcgcatcaccaacgaagtacggcgggtgttcaactttattgaaaacccataccgtccggtgacatttgattatttaatggtgtcgccgcaaaactcccgccgcctgttgtatgaaatggtggaccgcgaaatcgccaacgcgcagcaagggctgcccagcggtatcaccctgaagctaaataaccttgtcgataaaggcctggttgatcgtctgtatgcggcctccagctccggcgtaccggttaatctgctggttcgcggcatgtgttcgctgatccccaatctggaaggcattagcgacaacattcgtgccatcagtattgttgaccgttaccttgaacatgaccgggtttatatttttgaaaatggcggcgataaaaaggtctacctttcttccgccgactggatgacgcgcaatattgattatcgtattgaagtggcgacaccgctgctcgatccgcgcctgaagcagcgggtgctggacatcatcgacatattgttcagcgatacggtcaaagcacgttatatcgataaagaactcagtaatcgctacgttccccgcggcaatcgccgcaaagtacgggcgcagttggcgatttacgactacatcaaatcactcgaacaacctgaataa

SEQ ID NO: 28669 - DNA, 1542 bp, Escherichia coli
atgccaatacacgataaatcccctcgtccgcaggagtttgctgcggtcgatcttggttcaaacagttttcacatggtcatagcccgtgtggtagatggtgccatgcagattattggccgcctgaaacagcgggtgcatctggcggacggcctggggccagataatatgttgagtgaagaggcaatgacgcgcggtttgaactgtctgtcgctgtttgccgaacggctacaaggtttttctcctgccagcgtctgtatagtcggcacccatacgctgcgtcaggcgctgaacgccactgactttctgaaacgcgcggaaaaggtcattccctacccgattgaaattatttccggtaatgaagaagcccgtctgatttttatgggcgtggaacatacccaaccggagaaaggtcgcaaactggttattgatattggcggcggttctacagaactggtgattggggaaaatttcgaaccgattctcgttgaaagccgccggatgggttgtgtcagctttgcccagctttacttccctggcggggtcatcaataaagagaattttcagcgcgctcgtatggcggcagcacaaaaactggaaactttaacctggcaattccgtattcagggctggaacgtggcaatgggcgcttccggtaccataaaagccgcccatgaagtgttaatggaaatgggcgagaaagacgggataattaccccggaacgtctggaaaaactggtaaaagaagttttacgtcaccgtaatttcgcatcgctgagtttaccgggtctttctgaagagcggaaaacagtcttcgttcctggactggcgattttatgcggtgtgtttgatgctttagccatccgtgaactgcgcctttctgacggggcgttacgcgaaggcgtactgtatgaaatggaaggacgtttccgtcatcaggatgtgcgtagtcgcaccgccagcagcctcgccaaccagtatcacatcgacagcgaacaggcccgacgggtgctggataccactatgcaaatgtacgaacagtggcgggaacagcaaccgaagctggcgcatccgcaactggaggcgctactgcgatgggccgccatgctgcatgaggtcgggttgaatatcaaccacagcggtttgcatcgccactccgcttatattctgcaaaacagcgacttgccgggttttaatcaggaacagcagttgatgatggcgacgctggtgcgctatcaccgtaaagcgattaagctcgacgatctgccgcgctttaccttgtttaagaagaaacagttcctgccactgattcagctattgcgccttggcgtattactcaataatcaacgtcaggcaaccaccacaccgccaacattgacgctgattaccgatgacagtcactggacactgcgttttccgcatgactggtttagtcagaatgcgctggtactgcttgatctggaaaaggagcaagaatactgggaaggcgtggctggctggcggttgaaaattgaagaagaaagtacaccagaaatcgccgcttaa

SEQ ID NO: 28670 - DNA, 2244 bp, Escherichia coli
atgaaactgaatgcaacttatataaaaatacgtgataaatggtgggggcttccgctgttcctgccttctttaatcttgcccattttcgcccacattaatactttcgcgcatatttcttccggtgaggtttttctcttttatctgcctctggctctgatgatcagcatgatgatgtttttcagctgggcggcattgccagggatcgccttagggatttttgtccgcaaatatgcagagctgggtttttacgaaacgctctcattaacggctaattttattatcattatcattctctgttggggcggttacagggtctttactccccggcgtaacaacgtttcacatggtgatacacgtttaatttcccagcgtatattctggcagattgtgtttcctgcaacgctgtttctgatacttttccagtttgctgcgtttgtaggattactggcgagcagagaaaatctggtcggcgtcatgccttttaacctcgggaccttaatcaattatcaggccttactggtgggcaatctgattggtgtcccgctgtgctacttcatcattcgtgtagtgcgaaatccgttttatttacgtagttattattcgcaattaaaacagcaggttgatgtcaaagtcaccaaaaaagagttcgcactctggctactggcattaggtgctttactgctgctgttatgcatgccgttaaatgaaaaaagcacaatttttagcaccaactataccttgtcattattgctgcccctgatgatgtggggagcgatgcgctatggttataagctgatttcgctgctctgggcggtcgtgttgatgatcagcatccacagctatcaaaattacattcccatttatcctggctataccacgcagctgaccataacctcctccagttatctggtattctcttttattgtcaattatatggctgtactggcaacccgtcagagagcggtagtcagacgcattcagcggcttgcgtatgtggacccggtggttcatctgccaaatgttcgcgccctgaatcgcgcgttgcgtgatgccccctggtctgcgctttgttatttacgcatccctggcatggaaatgctggttaagaactatggcatcatgctgcggattcaatacaagcaaaaactttctcactggctgtcacccttgctggaaccgggtgaggatgtttatcagctttcgggtaacgatctcgcgctgcgactgaatacagaatcgcaccaggagcgcattaccgaactggatagccatctcaagcaatttcgtttcttttgggatggaatgccgatgcaaccgcagattggcgtcagttactgctatgtgcgctcgccagtgaatcatatctacctgctgctgggagagctaaatacggtcgccgagctttccatcgtgaccaacgccccggaaaatatgcagcgtcgcggggcaatgtatttgcaacgcgaattgaaagataaagtcgcgatgatgaatcggctacagcaggcgctggaacacaaccattttttcctgatggcccagctgattaccggtatgcgtggcgatgtctaccatgaaattcttctgcgcatgaaaggtgagaatgatgaactgatcagccccgacagcttcttgccggtcgcgcacgaatttggtttatcgtcgagtatcgacatgtgggtcattgagcatacgctgcaatttatggctgaaaacagagcgaagatgcccgctcaccgttttgcgattaatctgtcgccaacctcggtatgtcaggctcgttttcccgttgaagtcagtcagctgctggctaaatatcaaattgaagcgtggcaacttatttttgaagtcaccgaaagtaatgctctgaccaatgttaagcaggcgcaaatcaccttgcagcatcttcaggaattaggctgccagattgcgattgatgatttcggcaccggctacgccagctatgcgcggcttaaaaatgtgaatgccgatttgcttaaaattgacggcagttttatccgcaatattgtgtcaaatagtctggattatcagatagtggcgtcgatttgccacctggcgcgaatgaagaaaatgcgggtagtggcagagtacgttgaaaacgaagagatccgcgaggcggtgctctctttggggatcgattatatgcagggttatcttattggtaagccgcaaccgttaattgatacgctgaatgaaatcgaacccattcgcgaaagtgcctga

SEQ ID NO: 28671 - DNA, 153 bp, Escherichia coli
atgtcccacgctgtggacggtacttacattaaggcacaacaggacaaaatggtcaattcttcgttatgtaaaaaagcgtcagtggatacatattttaatgttatggaagttaatttaattatttacaatgatgatgtaataatgatgaattaa

SEQ ID NO: 28672 - DNA, 174 bp, Escherichia coli
atgcgaaaacgacaccgatttaacagtcgcatgacccgtatcgtactgctcatcagctttatcttcttctttggccgttttatctactcgtccgtcggtgcatggcagcaccatcagagcaaaaaagaagctcagcaatccacactctccgtcgaatcaccggtacaacgttag

SEQ ID NO: 28673 - DNA, 516 bp, Escherichia coli
atgaaatttaaaaaatgtcttctgcctgtggcaacgttagcgtcattcactctggcaggatgccagtcaaatgctgatgatcatgccgccgatgtttatcaaaccgatcaactgaataccaaacaagaaactaaaaccgttaatattatttccattcttcccgcaaaagttgccgtagacaactcccaaaataaacgaaacgcacaagccttcggcgcgcttattggtgcagtcgctggcggtgttattggccacaacgtcgggtctggcagcaattccggaacgacggcaggtgcagttggcggcggagctgttggcgcggcagcgggttctatggtgaatgataaaaccttagtggaaggtgtttctttaacgtataaggaaggcaccaaagtgtatacctccacccaggtgggtaaagagtgccagtttacgacaggtttagccgttgttattaccacgacgtataacgaaacgcgtattcagccaaatacgaaatgtcctgaaaagagctaa

SEQ ID NO: 28674 - DNA, 540 bp, Escherichia coli
atgaagaaagtttttctttgcgccatcttagcctccttaagctatccggctatcgcctcatcattgcaggatcaactctctgctgtcgcagaagcggaacagcaaggtaaaaatgaagagcaaaggcagcatgacgaatggatcgcggagcgcaacagggaaatccagcaagagaagcaacgtcgcgcaaacgcccaggccgccgctaacaaaagagcggcaacggcagcggcaaataagaaagctcgtcaggataaactggatgccgaagccactgcggacaaaaaacgcgatcaaagttatgaagatgagctacgcagcttagagattcagaaacaaaaactggcgctggcgaaagaagaagcccgcgttaagcgcgaaaacgaatttatcgatcaggaactgaagcacaaagctgcgcaaaccgatgtggtgcaatctgaagctgacgcaaacaggaatatgactgagggcggtcgcgatctgatgaaaagcgtgggcaaagcagaagagaacaaatcggacagctggtttaactaa

SEQ ID NO: 28675 - DNA, 195 bp, Escherichia coli
gtgaaatatgccgatctcatcatgctggcaactgaacgccgcgatctcgggcttgatgatggctctttctggccagtactggaaggtatcccggcaacagagatgttcaaagttattccactggcaccgggccatgcctacgggatgtttatggaacgcttcaacgagttatcggaattacgcaaatgtgcataa

SEQ ID NO: 28676 - DNA, 1140 bp, Escherichia coli
atgaagatgaccaaggcagattttggtgtaactattgatgatactttaataactgattttcgagatgtggttaatgaaggggagtttgcttacagctacttcataaacagaaatggtaaaaaccagttcagccctatctgttcgtgcatggattggataagcgtttctgttcgcaatctgatgaacttccctgagctgtcggaagatattgatgtcaaggccatgcaggtttactcccttatatcatctattgatattgctgtggaggcgttgcagcagcttcaccgcatcattgagagtgatgataagttagcgaggtggcctttcaagaaatcaacgaatgtctttaagaataaaacgccctatctttcacatgaggatgatgacgcatactttaagagtattcgagctatctttggtgctcaccctacaaatcttaaaaatagtgatggtgagcgactgtttgcaagctggcctcattttcatgctttcaatgaaaatgatttcactataagcctttacaacaacacgccagggaaagatgatgttattttcggcattaaattcgatgagctaattacatatattgaagataggtataaatatctaacaagcctaaagggttccgtaatagcaatccgtataaaacattacagcaccctatccaaacagattataccgtctactgataacattcatgctgagttaaagttgcttctttcagaagttgcggtgcgaggtgataacgattattaccgaatggaagtggaagagttaataaagttgttcgaggggaatgttaaagaggcacatctcaaggatgaagctgacgtatttttaagtaaactacatccaattgcagtagagattagatataatcttcaggaaatgaatattgaggatttagcaactaagcatggcgtgttgatttcaacacttccgaaaaatgccctgcattacgttcttcagaaaatgtttacttggctccactctgatagatatgacccaatgggtggcttttacttggacaagttaaatgaatattcaggcgggcgatacaatttttgttctgaggatgatgacagtacaactctattgaagctccggatgatgttgcattggtatcatcaacaaaaatag

SEQ ID NO: 28677 - DNA, 417 bp, Escherichia coli; identical to SEQ ID NO: 7661

SEQ ID NO: 28678 - DNA, 1317 bp, Escherichia coli
atgatttttatttcttcgagcagcctcgaactttcccacaacaccgtaaaagttgcaaaaacgttaaatgcgtcacacatttcaatgttaaagtggtcggcttttcccctgaaacatgccacgggtaacaccatgagtgaatttattgccgaaaaccgcggcgcggatgccatcacccgaccgaactggtcagccgttttctcggtggcgttttgcgtcgcctgtctgattatcgttgagtttttgcctgtcagtttgttgacgccaatggcccaggatttaggcatttcggaaggggttgccgggcaatcggtgaccgtgaccgcctttgtggcaatgtttgccagtttgtttattacccagacaattcaggccactgaccgccgctacgttgttattttgtttgccgttttgctgacgctctcctgcttgctggtttcctttgctaactcattcagtttgcttttaatcggtcgtgcctgtctggggctggcgctgggcgggttctgggcgatgtcggcgtcgctgaccatgcgtctggtaccgccgcgtacggtgccgaaggcgctgtcggtgatcttcggcgcggtttctattgcgctggtgattgctgcgccgttgggcagttttttaggcgagcttatcggttggcgcaatgtctttaatgcggcggcggcgatgggcgtgttgtgtattttctggattatcaaatcattgccttcgctgccaggcgaaccctcgcatcagaaacaaaatactttccgcttattacaacgtccgggtgtgatggcagggatgctcgccatcttcatgtctttcgccgggcagtttgctttcttcacgtatattcgcccggtgtatatgaacctggcgggattcggcgtggatggcttaacgctggtgctgttgagttttggtatcgccagctttattggtacgtcgctttcgtcgttcattcttaaacgttcggtaaaactggccttagcaggcgcgccgttaatactggctgtgagtgcgttggtgctgacgttgtggggaagcgataaaatcgttgctaccggcgtggcgattatctgggggctaacttttgcattggttcctgtcggctggtcaacgtggatcacccgctcactggccgatcaggcagaaaaagccgggtctattcaggtggcggttattcagcttgctaatacctgtggcgcggcaatcggcggttatgcgctggataatattggtctgacttcgccgttgatgttgtccggcacattgatgttgctgacggcgttattggtcaccgcaaaggtgaaaatgaagtaa

SEQ ID NO: 28679 - DNA, 579 bp, Escherichia coli
atggttgcagtgactgcactgactcccgccgtctggctggtgatactgatctccaccgtgccgtccggctctgtagtgaccgtcggagtgaccgttgcaccgttatccgccaacacgctgaccgtctgcccattcagcgcattcccgaacgcatcggtcaccctcacccgcagcgtgttcgccattgcaccgtcagccaccgagttatcccgggtgaccaccagatccgcgatctgcgccgtgctgacatccgcaataaacgtcacgttccggctctggctgctgttgttgatgctggcggtgaccgcactggttccggcggtctggctggtgactgagatctccaccgtgccgtccggctctgtaatcaccgtcggagcgaccgttgcgccgttgtccgccaacacgctgaccgtctggccggcaagtacattcccgaacacatcggtcaccctcacccgcagcatgttcgccgtcgaaccatcagccactgagccgtcctgcgtcaccaccagctcagcgacctgcgccgtgctaacatcagcaataaagttcaccgttttactatcgctgctttga

SEQ ID NO: 28680 - DNA, 216 bp, Escherichia coli
atgatgttttcctcatgtgaaatggctttggtggtgatgcgccagatgctgatcttctggttgctgtcgttactgctgcaattcacatcaccccaaacccatctcgtttggtatctgttcgcgctttgtcagcgcatcatcgaagttaaagagcctgccaatctgttccgtttggctgccagcgtcctgctgatggcgattataatgaaccaatag

SEQ ID NO: 28681 - DNA, 300 bp, Escherichia coli; identical to SEQ ID NO: 15770

SEQ ID NO: 28682 - DNA, 864 bp, Escherichia coli
atgaagaaaacagcagtcttgattgacggcggctacttcatccgtcggattgattactttctacgaaaacatttccctgggcatgagttagacagccaacaacttgttaaaataatctggcgaattgttaaatttcatgtagaggttccacatggtgctcacgctgaccgtgaaccacttgagctttaccgtatttactattacgactgcccgccgcttgataaacagattaagtatcctttgcctgatggagacaacaaaaccccatcaactaaaaacttcaagacacatgctccgaatgttttacgaaacaagcttcatgaggagctaaggaagaatcgtaaaacggcacttcgtatgggtattctttcaaacgtcggtaactggcaaataaaagaacatactcttaagaaactattacgtaatgaaattcaatggtctgagttaactaacgacgatttctactacgaatataaacaaaaagccgtcgatattaagcttggtatggatataactatccttgctcatgagaaactagttgatgtgatcgtcctgattgctggcgatgctgatttcgttcctgccgctaaacatgcccgtataaagggtgtggattttatcctcgatccaatgaaccaacaagttcctccctcactggcagagcacgtcgatggagtgcaatcgagcaacattgttgttgcaattgctgatatttgcagaatcgtcccaacagtaaaacctgattggtgggacgattatattgacagacgcaaagagaaaaaactcaatcgtcaaaagaaaacaaaatcatctaagaacgagcccaagaaaaaaacacttcaatctgaaacatccccggcttaa

SEQ ID NO: 28683 - DNA, 987 bp, Escherichia coli
atggttaaaattcacattttagatgccggacatggtgattgcttgttagtagactgcgatggtgtcaaattgttaattgacgctggcccaagtacatttaggtatagaaaaaaaatttcagccaagttagctgaacttctgaatggcgagtctgttgatatcgcttttgtaactcacaatgatgatgaccatatcggtggtttcaaatacctaattgaaaataaaataaacatcaagagatttgtattcaatagtttatctaacattaaacatgtaataaagaattcaagcaataaaatatcgaccaaacaagatataaatcttgatagaatagtgaaagatggaagttttgtcttttcgacactaacttcagatgactctcctattttaatcagaaatataaaaataacacctattactccttcaaaaaatatccttttaaaatatttagaacaacaagagcgtaaaaacacagaaattaaaatatcatcttcatctgaaaaatatagtattaaagaagcactgcagttgctaagcaatggaaatgatatgtttgtaaaggatccatcggcaactaataaaaccagtttatcatttatgattgagtatgggaatttttgtggattattccttggtgatgcacacgaagaagacatctactcatatatggctaatcattgtgccaatagaaaaatatcatttaacgttgttaagttagcacatcatggtagtgaaaaaaacacgagttcacggttattgaagttaattggtacaacagaatatatcatatgtgcgaataaaaccaagcataatcatccaaataatttaactcttgcaagaattttaatacatgaacaagaacctaaaattcatatgagtagcagcaatcaggagataataaatttactcaatcaaataaatttattaggcttcggcattactgcaacccattctgaaaatggagttaatactttaatctatgagtag

SEQ ID NO: 28684 - DNA, 303 bp, Escherichia coli
atgacgggcaaagaggcaattattcattacctggggacgcataagagcttctgtgcgcaggacgttgctgcggtaacaggcgcaacagtaaccagtataaatcaggctgcggctaaaatggcacgggcaggaatcttggtcgttgatggtaaggtctggcgaacggtgtattaccggttcgctaccagggaagaacgggaaggaaaggtgagcacgaatctgattttcaaggagtgtcgccagagtgccgcgatgaaacgagtgttggcagtgtatggagatatgaacttaaacttgctgtga

SEQ ID NO: 28685 - DNA, 1224 bp, Escherichia coli
atggatggtatcaataaacaaatccaagagctaagaagaacttataaagagaagaaagaaatatatgataaactagtaaggcaaatttctatttattcagaagatgttgagctagccgaactaggattttacgaacctcattttaattttgaagattcagagcaatttaaaaacaaaataaaatccatcagggatgaacagaaattaatgctgcgggataaaacccactctggcgcagtatattgtacaacccaatggactgttgaaggctctcgagcagagggtaaaaaaatgacagacagaaatatcaggctaactactagagcatttaataatgaatgtgatgctgcaattagcaattgcacgtggaaaaacatcactaaaatggaagaacgcatcacaaaggcatttgaggccataaataaactaaacgagcaaaatcacatatatataaacactaaatacctcaataaaaaacttgaggaattgtggcttacccatgaatatcgtgagcaaaaacagaaagaaaaagaagaacaggcagaaataagggcacaaatgagagaggaggagcgtgcacaacgagaaatagaaaaggccatgcaagacgcagaggcagaagagcgccgttataaaaaagcaattgaagctgcaagaaaggaaatggaaaaagttactggtgacatgaagcagcgcctcgaaaatcgcattgccgaactagaacagagtttgtcgcaggctgaatcaaagcatcaaagagcattatccatggcacaacaaaccaaacaaggtcatgtttatattatttcgaacataggttcttttggggagaatgtttataaaataggcatgacacgacgtcttgatccgcaagaccgtgtaaatgagctcggtgatgcatctgttccttttatttttgatgtacatgccatgatttattcggaggacgctccatcattagaaaaaaaactacatgatgtcttcgataaaaagagagtcaatcttgtaaatcgtagaaaagagtttttctatgttactctggatgagatcaaagaagctgttaaaaaacactctgattcagaaattgaatttattgagacagcagtcgcaaaagactttaatgagtcattggctattcgtaatcatgaaaataaaaaaagtgacaacagcaactcatcaattatacctgagcgaaaaaccccagagtttgcagatgcaatttaa

SEQ ID NO: 28686 - DNA, 339 bp, Escherichia coli
atgaacagtttaacaacacactaccgtcgctcgcaactgattgcgcttcctgtaccgggtggaaaagcgaaggtggaatattgctatgcagtgaatgtaccaggtgacagggaaattgtaacccacagctttgctgagtgggctgtgggtgatttcaaccggcagaaggagacagtcctttgcgacaagttaaccgctggttcaaagatcactacggagtgcccgtcagagtcattcgttgggaaccggaaacacaacgggttatctacctccgcgaaggctatgagcatgaatgcttcagtccgctcgaacagtttcgtcgtaaattcagggaaatag

SEQ ID NO: 28687 - DNA, 342 bp, Escherichia coli; identical to SEQ ID NO: 15523

SEQ ID NO: 28688 - DNA, 714 bp, Escherichia coli
gtgaaaggggccgggaccacactgtgggtttataaggggaacggtgacccttatgcgaacccgctttcagacgttgactggtcgcgtctggctaaagttaaagacctgacgcccggcgaactgaccgctgagtcctatgacgacagttatctcgatgatgaagatgcggactggaccgcgaccggacaggggcagaaatctgccggagataccagcttcacgctggcgtggatgcccggagagcaggggcagcaggcgctgctggcgtggtttaatgaaggggatacccgagcctataaaatccgcttcccgaacggcacggtcgatgtgttccgcggctgggtcagcagtatcggtaaggcggtgacggcgaaggaagtgatcacccgcacggtgaaggtcaccaatgtgggccgtccgtcgatggcagaagatcgcagcacggtgacggcgacaaccggcatgacggtgacacccgccagtgcttccgtagtgaaagggcagagcaccacgctgaccgtggcattccagccggagggcgcaaccgacaagagcttccgtgcggtgtctgcggataaaacaaaagccaccgtgtcggtcagtggtatgaccatcaccgtgaaaggtgttgctgcaggcaaggtcaacattccggtcgtatccggtaatggtgagtttgctgcggttgcagaaatcaacgtcaccgccagttaa

SEQ ID NO: 28689 - DNA, 288 bp, Escherichia coli
gtgttttttacctttgcactccccaaactcccgggcccagacgtaatgcagggttgtgggatgcacgcgtttaccttcccgatgcttacgtttctggtaagcgtcgattcgggctttcagggcattaatgaagcgggatatcacagctgcgtccgttgctgccggtacatccgggaaacgcaggtcaacccgcaatgccgtcaggcggggatgaacattcagtgcgtgccgcaccgtctcacgaatacgttgctgccagaaggggttgtatttgtaggtcatggttaa

SEQ ID NO: 28690 - DNA, 1353 bp, Escherichia coli
atggactttacggaatatcaagaagaaataattgaagatataaaatcttgccttgaaagcttacaagtccagcctattttattcatgggggctggtatttcgcaacgctatataaaagcgcctgactgggaaggtcttctcaagaagctcgctgaaacttgccctttaatcaaacgtccttatggatattacagtcaaacaaaggatgacaataagccattgattgctagtgatttttgtgatttttatgctgaatgggcttgggatgatggtaaggatcgttatccagaatcatattttgaaggtaccacgtcaaaagatatttatattaagcatgaaatcgcatctatcctgaacgaactatctgattctgttgatttttcaaatatggaatatacagaggaaattcagaaactcaaaaaagttaagcctcatgcaataattacgacaaactatgatgatacattagaaaaaatatttgaaaactatcaagcaatagtaggccacaatgttgttaaggtgaactatacatcttatggcgaaatcatgaaaattcatgggagtagccatgaggttgaaagtattgttatcaccaatgaagattatattgatttttataagcgcaaaaaatatatcagcgctaaacttctaacatactttgctgagcaccctttattcttctttggctatagcatcaatgacgagaatataaaggcaatcctatctgatattgacgagatcatagcgccgaataatgcattgattcccaacatttatcttgtttccttcagtaaggaatgcgaggctactggttctcatcagaaggaattacttattggtgttggggaaaataaaagtattcgaatcaaggtaatatatgccaacgattttggttggattttcgatgccctatcatctaatactcctgaaatcagcgtgaatccaaaacttgtacgtgcatttttagccagaacgtacacatttgcatctgaatcccttgtaaaacaagagcttccatacgattttgaaatgttccgtgatattgctgaacatgatgatgcattagcaaaaatgtatggcattgccgagcttaataatgggcaggctctaaatgctagtttcccatatacgatgtccgatttagcgaaaatgttagatatggggtcatggcattatgtcaatcaagaatttgaaaagttgaagaaagttactgggttcaacattaaagcatcagacaataattatcatgttttcataaaatcaggcaaaagtggagttggcaaatattcagcggaagcgctcgagttattaagaaaactgataaatgatgaagcttttgagttgaagccataa

SEQ ID NO: 28691 - DNA, 564 bp, Escherichia coli; identical to SEQ ID NO: 22794

SEQ ID NO: 28692 - DNA, 1083 bp, Escherichia coli
atgaaaatattagttactggtggtgccgggttcatcggttcggcattaacgcgatacattattaactcaacaaatgactctgttgtgaatgttgataagttaacctacgcaggtaatcttcattctttaaaagacattgataattgcgatcgttatgtttttgttcatgctgatatttgcgatgcgaaagcattagacgcaatcttatcaacacataaacctgatgcagtaatgcatttggcagcagaaagtcatgttgaccgttcaatcaccggtcctgctgcgtttattgaaacgaatattgttggaacatacgttttgcttgaagcagccagaaaatactggcaaaccctagagggggaaaagaaacagggattccgtttccatcacatttctactgatgaagtatatggtgatctccctcatccggatgactgggataataaaaatagtccaccactgtttactgagaataccgcatatgctcctagcagcccatactctgcctctaaagcatcaagcgatcatttggttcgcgcgtggcatcgtacttataatctcccaactattgtgactaactgttcaaacaattatggtccttaccatttcccagaaaagttaattccgctggtgatccttaatgcgttgcaagacaaatcgttgccaatttatggcaaaggcgatcaaatccgtgattggttatacgttgaggatcatgctcgcgcactctataccgttatcacgaaaggtatcgtaggtgaaacttacaatatcggcggttataatgagaaaaagaatattgaagtggtagagactatttgcgatatccttgacgaaataaagccgaaaaatacctcgtatcgcgaacaaatcatttatgttgccgatcgcccaggtcacgatcgccgctatgccattgatgccagtaaaatcactctggacctcggttggaaacctcaagagacctttgaatctggtattaagaaaactattcattggtatcttgataaccaggagtgggtccagaatgttatgagcggtgcctatcaggactggattaacaaaaattacgggcaactttaa

SEQ ID NO: 28693 - DNA, 585 bp, Escherichia coli
atgtacgagttaatgttgaaggtcaaacgtaaaatagctactcttctttcttcatttatatttcgcgtttcatttaaaagtttcggaacaaaaagtagtatttttaaacctgatatattacaaggggtgaaatatatagaagttggcgatagagtagtaattcaaccgggattatgggctttagcattgaaaattgataacaatgaaccgatcctgaatataggaaataacgtttatattggtcgcttcttacatattgtaagtgtgcgccgtgtagttatcgaaaaggatgttctcatcgccgataaggtatatatatcagacaaccttcatgagtataaagatattcatattccagtaagccagcagcctgttgtattcaaaggtgatgtggttattaaggaaggcgtctggataggggaaaatgtttccatcattggtgcttgcattggcagaaatagtgtggtagcggcaaactctgtagtgacgaaggatatacctgattattctgtttgtgcaggtgtacctgcaaaagttatcaaaaaatactgtttcgaacgaaatgaatggataagtgtttcttaa

SEQ ID NO: 28694 - DNA, 594 bp, Escherichia coli
atgaagcaagctttatcgagaatgaaaataaaattgttatcatatttttataaaagaaaaaatcggtctacacaattcggtcgctacactgttttattctgtcgtgcaaatataactaattctatagtaggtgattatacgtatttcgcaggcaccgcctccgttaataattgtgaaattggtaaattttgttctattgcagaaggcgttaaaataggccttggaaaacacccagttgattttctttcaacacatccggtattttactcggaaaatacctgcttcccttatagattgaaaaattatagagctaatgaaaaagtgattgaatcaatcaccgaatcagagagagtcatcataggcaatgatgtttggattggcgtaaatgccatcgtaatggatggtgtgacaattggtgatggagcagttattggagctggggcggttgttaccaaagatgttcaaccttatactatcgtaggtggtgttcctgcgagagtcattaagaccagacaaaatataaattgttcttggtgggaatttgatgtagatacccttgtagatttttcctcaaattttaaaaagaggttgtaa

SEQ ID NO: 28695 - DNA, 246 bp, Escherichia coli
atgatcattctggactacatcgctgccaatccgggttgtagcggtggagaaatcgccgcagcactgaatacaccaaccacaaccattaatgcggagctacgccgtctctggcgcagcggttcagtcataagaaaagagcgcaaaacaggcggtcgcttttcttatcaggtaaacccgatgccgtttgggtgtagcaacccactaacccagatgttcaaccagctactgagggaaatcagagcatga

SEQ ID NO: 28696 - DNA, 408 bp, Escherichia coli
atggacatagtgtttttgtcaaaagaacaagtagaacgtatccatgctgaaactttaccccagagcggaaatgccaatgacgggctacttgaaggtgctttaaatcgcgtcaggacactacactactatgaaggggttgatgatattcatgctctggctgctatgtatttgattggtatagccaaggctcatgcctttcatgatgggaataaacgcacagcttttcaggctgcatcaatatttttaatgatgaactcttccgaactttcaaactccctgctgctggttaaattaacggtgttttcagcaatggggatagctacccttgaggaagttacctttgctttgaaattgctgtctgattatggcaatgaattaatcagcgactacgaagaagattatatttaa

SEQ ID NO: 28697 - DNA, 345 bp, Escherichia coli
atgaaaactgtaactgatgatgaatttcgtgagaacctgagtgaaattctggattacctttcttccggtggcagtgtcgttatcactgcgcagggagggaaggatgttgttcttgctggttctgatcttagtcctgaaatacgggctgtccttggcaaaaccaaaaaactgcgggatcaaataaacaaaatgaagcaaccactcttaataaatgcagtgagagatctggaaaaacgtcatccagctcttgtcgcacagagaaaaaaaggattgtcttttgaagatgcaatgaagcgtacaagagaaaaacatgcggatatcattaaaaagcttgaggataactga

SEQ ID NO: 28698 - DNA, 1662 bp, Escherichia coli
atggatgatatcgttaattctgtgccctcctggatgtttaccgcgattatcgccgtatgcattctgtttattattggaattattttcgccaggctctatcgtcgcgcttcggcagagcaagcatttgttcgtactggtttaagtgggcaaaaagtggtgatgagcggtggcgcaatcgtgatgccgatctttcatgaaataattcccatcaatatgaataccctgaagctggaagtcagccgctcaaccattgatagcctgattacgaaagatcgtatgcgcgtcgatgtcgtggttgctttctttgtgcgggtaaaaccttcagtagaagggattgccaccgccgcccagacgctggggcaacgcaccctgtcgcctgaagacttacgtatgctggtggaagataaatttgtcgatgccctccgtgcaacagcggcacaaatgaccatgcatgagttacaggatacccgcgagaacttcgtgcagggagtacaaaataccgtagctgaagatctgtcgaaaaatggcctggaactggaaagcgtttcacttaccaactttaaccagacctcgaaagaacatttcaatccgaacaatgcctttgacgccgaaggtttaaccaaactgactcaggagacggagcgccgtcgtcgcgaacgtaacgaagttgaacaggatgtggaagtcgcagtgcgtgagaaaaaccgtgatgcactttcgcgcaagttggagattgaacaacaagaagcgtttatgacgcttgagcaggagcagcaggttaaaacccgtaccgctgagcagaatgcgaaaattgcggcttttgaagctgaacgtcgtcgtgaagcagagcagacgcgaattctggctgaacgacagattcaggaaacggaaatcgaccgcgaacaggccgtccgctcaagaaaggttgaggccgaacgtgaagttcgcattaaagagatcgaacagcagcaggtcaccgaaatcgctaaccagacgaaatcgatcgctattgccgccaaatcggaacaacagtcccaggcagaagcgcgtgctaaccttgcactcgcagaagcagtaagcgcccaacaaaacgtagaaaccactcgccagactgccgaagccgatcgtgctaaacaagtggcgttgatcgccgcagcgcaggatgcagaaaccaaagcggttgaactgaccgtgcgggcgaaagcagaaaaagaagccgcagaaatgcaggcggcggctatcgttgagttagccgaagctacacgtaaaaagggtctggcggaagcagaagcacaacgtgcgctgaacgatgctatcaacgtactttctgatgaacaaaccagccttaaattcaaactggcattattgcaggcgctgcctgcggtaattgagaaatccgttgagcctatgaagtctatcgacggcatcaaaattattcaggtcgatggtctgaatcgtggcggcgctacgggtgatgcaaacacgggtaatgtggggggcggaaacctggcagaacaagcgttatcagccgcactctcttaccgcacacaggcaccgctgattgactccttgctcaatgaaattggcgtttcaggcggctcactggcggcattgacttcatccttaagctcaacaactcccgtcgaagaaaaagcagagtaa

SEQ ID NO: 28699 - DNA, 1233 bp, Escherichia coli
atgattacgcacaacttcaataccctggacttactcaccagtcctgtctggatcgtttcgccctttgaggaacagttaatttatgccaacagcgaggcgcgactgttgatgcaagacctcacgtttagtcagctacgaaccggtccctattccgtctcctcacaaaaagaactgccgaaatacctctccgatctgcaaaatcaacacgatattatcgaaatcctcaccgttcagcgcaatgaagaggaaacagcattgagctgtcgacttgttttgcgaaagctgacagaagcagaaccggtgattattttcgaaggtatcgaagcaccggcaacgctgggtttaaaagccagtcgctcggcaaattatcagcgcaaaaaacaaggtttttatgcgcgcttttttctgactaactctgcaccaatgttgttgattgacccctcacgagatggccaaatcgtcgatgctaacctcgccgcgctcaatttctatggttataaccatgaaacgatgtgccagaaacatacctgggaaattaatatgctcgggcgtcgcgtcatgcctatcatgcatgaaatctcgcatttacccggtggtcataagcctttgaattttattcataaactggcggatggttcgactcgtcatgtgcagacctatgccgggccgattgaaatttatggcgacaagctcatgttatgtattgtgcatgatattactgagcaaaaacggctggaggagcagctggaacatgcagcccaccatgatgcgatgaccggattactgaatcggcgacagttttatcacattaccgagccaggccaaatgcagcacctcgctatcgctcaggattacagcttgttgctcatcgacaccgatcgttttaaacacattaacgatctctatgggcattctaaaggtgatgaggtgttatgcgcccttgcccgcactctcgaaagttgcactcgcaaaggcgatttggtgtttcgttggggaggcgaagagtttgtcttattgctaccaagaaccccactggataccgcgctttcgctggctgaaactatccgcgtaagcgtggcaaaagtgagtatttcgggcttaccacgctttactgtcagcattggtgtggcgcatcacgaaggaaatgaaagcatcgatgaactgtttaaacgcgttgatgatgctttgtatcgagcgaaaaatgatggacgcaaccgcgtgctggcggcataa

SEQ ID NO: 28700 - DNA, 252 bp, Escherichia coli
atgatgccccaggacgatatttctatcaaccctggggctgccactccaaaccagacaatttggatggtagtcccttcttcgcatggaggcaatataaacatgctgacgaaatatgcccttgtggcagtcatagtgctgtgtttaacggtgctgggatttacgcttctgctcggagactcgctgtgtgagtttaccgtaaaggaacgtaatattgagtttaaggcagttctcgcttacgaaccgaagaagtag

SEQ ID NO: 28701 - DNA, 426 bp, Escherichia coli
atgaaatacagatattctggcgagacaaattctttttatccctgggcattatttgatgattacacgcgagttaatgcatggcctgaaaatggggtggatgttgacgaagatatttttacggaatatagcggcacaccgccagaaggcaaaactcgcggcccggatgttaatgggaaaccatcatggatagatgtacagccaccatctaaaaaagaacaaattatcgctgcggactttcagaaatcagcattactggcggaggcaacggcgattatcgccccactggcagatgctcaggcaggaggctacatcgacgatgttgacgtgccacgtctggctgaatggcagcggtaccgctacaaactgactaaagtcgataccagtaccgcgcctgacattacctttccaccgaagccggaggtgtag

SEQ ID NO: 28702 - DNA, 1080 bp, Escherichia coli
atgactagctttgcttatgatggtgatattttgacacctaataatttagaaattacatccttcgccacattgaaatcaaaaataagagagcgaagagtatgtgtttttctcggagcaggattttctaaagcctgggatgacaaatacccattgagtaatgaagtcttttccatctctgaagacgaagcattagaaaatattgatgagtatggttttttttctttgttcgacagtcttaaatttaaatgggcggatgctaatgcaggtttagatgacaaagctaatgttttcaagagttttaaatatgcattggatgtttataagcgatatccaagtttattgccgtcgtatcttgataggcatacgcttgagttgtttgaggcacaagtaaaactatatgtaaaaaataagtttgcaaaaaaaataccggcaaatgatttaaagctaagtcaaactgcaaaatttgggcagaataaaaggaatattatttctttctttaagagtttacaggaagcttcagcactggatgtagtcacaacaaactacgatatagttattgataaagtgctacatcatgcattccctgaacgttcagttaatcggggttttcctgtgcatcataataatatattagtgtgtcctcagcctaaaggtataggtttgtataagcttaatggaggatttgaggttgttgctgcaagggatggttttaaaatagattatgattcattattgaacgcaaaagttgttccaaatattatcttgccttcaaatgaacaagactatggggataaatactttaagacagcttttgtgaaatcctctacccagttgagacaagcagatctgttgatctttataggttattctttcccaaaggaagactttattattaattttcttttgaagacttttctggatggcgatagtactgaaaaagagactgttattattggacgaaataaatctagtgctattgagatacaccagcgtgcgtgtgaagtttttaaagaactaaatgataaatctgcactgtattatttcggtggtagtttttctgatttatgtaaacaatgttag

SEQ ID NO: 28703 - DNA, 1230 bp, Escherichia coli
atgctagttgcattcagtttagaaaattacaagagctttcgcgaaagacaggttcttagttttgcttcctcaattggggatgagcatcctgaacatatcgtgacattagcgaatggtttaagagtaaacagatttgccgcattaataggcggaaatggtgttggtaaaacacaattaataaatgctattactgaatttgcaaattcaattcatagtgacacattacacaaattgcatatgcctttccttctaaataaggaatgtcgtaacaaacctacttcctatgaagcgatactgattgatgaagagcaaaaaaacttcgtccgttatggtgtgtcagttttaaatgaagttattgtagatgagtatttatacattagaccgataagaaaaagtgcaagggaacaatgtatttttattcgcaatgaaaatgggttggttttcaaaaagcccgacttaaaaaaatacgagtcgttgattaatcctgtcttaagagaaagtggagctgttgtaacttttgcaaaatctttagaaattgatgctcttgttgaaacccaacgctgggcattaaaacaattgccttattactctgaaaaattcaaaaatccaagtcttaaatttgttgaaggacaacttaagcgccagttatcaggtgaggaaggaaatgaaaaattaaatgagagtggtcaaagaattttaaatacctataatgaaatggttattcagtcgccgctgcatatagataaagttgaatttgtaagatttggcgaagataatgagtataaatttgtttatctcataaaaaatgatgatggtgattttactagaataggccctgaccgtagggatgaatttttttcccaaggcacactaaatgttttaacatttttagcaatattgatttgggctagtgaatatgattttacactttatgtggatgaaatagattcatctattcactattctttggcaagtgcactaatcaaaaaaatatttgataaaacctgccgtaaaaatggtgtgcagtttattatgtctacacataatattcctttattagatgatgtgtttagaagagatgagcttaatattatagtcaaggattcatctaaagcgtcgataataactaatgctacggtattttctgtaaggaaagatgctaaagtgtctgccaaatatttacgtggcgaatttggattagttccagcttttcttgatataaaaaactaa

SEQ ID NO: 28704 - DNA, 951 bp, Escherichia coli
atgtcaactcaaaaattcacatttcgccatatcaaagaggatgcgaaagccattgttatgcagaatcgtgggggacagaaagtcattgagcgaatactcaaagcttatggcttcaagtcacgccaagcgttctgtaaccatcttggtatttcacaaagtacgatggccaatagatatgctcgcgatacatttcctgctgattgggttgttatatgctcaatggaaacaggagcatctttggaatggctggcgtttggttctgatgcggcagaagaaatactctcaactgctccaaatggatacaacgaagacgaccagcgagatgacgttgaaagtgacaatcatataccttcctttaattttcataatgatcatcaagtcgatttcaatcagggaggaaaagcggcaatagaacggatagttaaggcttatggctttaaaactcgtcaagcactggcagatcatcttggtatatcaaaaagtacattagctacacgctatatgcgtgactcattccctgctgattggataatacagtgtgcccttgaaactggattctcattgaaatggcttgttgatgggcaaggacttaataaaagttcacaaaatgaaaacattgtgtgcataaacaagtacgtgcttgccgatggtgcactcgaaatgaagggtaactacatttttgataagtcctttgtacctaagtcgattaaagatccaatgttaatatttgatggcagcaggatatacttagctgaggggaactttgacgaaattagcgatggattgtggtttgttgaaattgaaggaaaaatcagtgttcgcgaggtaataagaataccggtaggtaaagtaagagtaacgagctcaaactcaaatattacttttgactgtgcaattaatgaactcaaaccggttgcaaaatgccagttcaacctaatgactataatataa

SEQ ID NO: 28705 - DNA, 933 bp, Escherichia coli
atgtctagaagttttgctatttggggatgccgaaactacgctaaaggcccaggagaggattataatgagactcaagcagattttataaacgaactacacatcaacttttggaatatcacatcccaaaaatgctatcatctagattttggcatatcattttctcgcccccaagataatgaaatttcagaacagggtgcaatctgtttatttttaccgtttgtaaaagaaaaagatgacttcattgatttaagtacgaacctagatagcagcaaagaactgatcaccgcggtttttaatgaatacgtcataaataaagactcaataaacgagaaacacttattattaaatttaacacgaaaaggtaaactaatagttaatacaaaacttgattttcaagggggggcattcgacaaaagaatcacattgagaaagaggaatgatgggacatatgtatttttccatctgcaggattgtttgtctaattgcaataattgcaataattgcaataattgcaataattgcaattactacatcagattcagaattaacctaaatgaatctgatgttgaagcaattgttaaaacattctatccaaaagatttattcttaaaaagcaatattgaacgttctgatattatagatttcagaattaacgaacaaagaaatttgccaaacgaagtcgcaaccacactggccagcgcctcttgcactccaagcaaatatcattttttcgttatacgagatatggttgacgaagcatcggcatcaggttcaagctatcaaggttgtcgtattcttgaatcagagacatggaaaaaatacttttcaaataatgtcaattttggtaagaacgatcctatgatttaccactggaaagctaaaaaggctgtctcttatacacatctgacgctgccgacgatatgcagtgtgtag

SEQ ID NO: 28706 - DNA, 162 bp, Escherichia coli
atgagtttgattctgctattaattgcaaattgtaaatcagaaggtttcgaactggttttatcattactaatctcttttggtggaattgcaagcacattaattcggaaaacagattctctatctgttggtaacaagtcatctgttttttcgatttttaattga

SEQ ID NO: 28707 - DNA, 1209 bp, Escherichia coli
atggacgaaaaacagttacaggctctggctaacgaactggccaaaaacctcaaaacccctgaagacctcagtcagtttgatcggctgctgaaaaagctcagcgttgaagccgctctcaatgcagagatgacacaccatcttgggtatgagaaaaatcagtccagaccaggagctaactcccgcaacggttattccacaaagaccgttatcacaggcgacggtccactggaactgcgtactccgcgcgatcgtgacggtaccttcgaaccacaactggtaaagaaaaatcagacccgtattaccgggatggataaccagatcctctcgttgtatgccaaagggatgaccacccgtgagatagctactgcgttcaaagaactgtatgacgcagatgtttcaccggcactgatatcaaaggtcaccgatgccgtgatggagcaggttgtagaatggcaaaacagaccactggatgctgtttaccccattgtttatcttgactgtatcgtcctgaaagttcggcaggacagtcgcgtcatcaacaaatcggtgttcctggcactgggcatcaatatcgaaggtcagaaagaactgccaggtatgtggctggccgaaaatgaaggggcgaagttctggctcaatgtgctgactgaactgaaaaaccgcggtctgaacgatatcctcatcgcctgtgtggatggcctgaaaggcttcccggatgccatcaacacagtatatccgaaggcccacatccagttatgcatcgtgcatatggtgcgcaacagcctgcgcttcgtgtcatggaaggactacaaagccgtcactcgcgacctgaaagcgatttatcaggctcccacggaagaggcaggtcagcaggcactggaagcgttcgctgcggcctgggacagtcgctatcctcagataagccgaagctggcaggctaactggccgaatcttgccacgttcttcgcttatccaacggacatccgcaaagtgatctatacgacgaatgccatcgagtcgctaaacagcgtgatccgccatgcgatcaaaaagcgtaaagtgttcccgacagacgactcggtgaaaaaagtggtgtggctggcaatccagtctgcgtcccagaaatggacgatgccgttgaaggactggcgaatggcaatgagccgctttattatcgagttcggtgaccgcctggacggtcacttctga

SEQ ID NO: 28708 - DNA, 900 bp, Escherichia coli
ttgaaaattgagcgtggtattattgacgacgtaataccacctttgactcgtgctaaacatctaaaaataggcacatttaaattcaacccgaaggggactctacgaggacaaagattcctcaaaaagatttttgatcatgcactaaaagaaaaagtagatgatatctatgtgactgtttttgaaaaacatgattatttaattagactattcaaaatttatggttttattcatgttgctacaaaacaaactgctaatggtagtgaacaagtcttagtaagagagatgaataaaaatcatcttacaggggatattttgtctgattatccgtatataaataatagcaacgatgaaaacaaatatctgttatccatatatcctgaattccatacaaaactgtttcctgattcgatactcaccacagagtcccctgatataatcacggatgtatctcatgcgaatagcattagaaaaatatatatatgcagaatgcatgacgtaaaaaaaataaaaagacatgacattttagttatttacagaacaagtgacaaagaaaacagagcgtattatcgctctgtcgcaacgtcattatgtgtagttgaagatattagacatattgattctttttatagtgaaaaagaattcatacagtattgtacacgatacagtgtattctctgaaaatgaattaaaaaaatcctatcaaacaaaaagatacccttacattattagttttacatataatctagctttacctaaaagaataaaccgtgctaaactaatcaaagaaattggtttaaatcctaaaaaccgttggggtgttgttaaattaaccgatgagcaatttgacgatataattaaacttggtgctgtagatgaaagtattattgtcaataaaacctga

SEQ ID NO: 28709 - DNA, 372 bp, Escherichia coli
atgaaagtattattgtcaataaaacctgaatttgttgaaaaaatccttaatgggacgaagaagtttgaattcaggaaaggtatttttaaaaaaccggatgtaaaatctgtggttatttattcaacaatgcctgtcggtaaagttgttgctgaatttgacattgcagatgttatagaagataagccgagtattgtatgggaaaaaacaagccaatacgcaggtatcagtaaacaattttttgactcttattttcatagcaaagaaaaagcctttgctatagaaattggtaatctaaaaatctatgaccaaccacttcatctaagttcattaggtgataacataacggccccgcaatcatatcggtacttatga

SEQ ID NO: 28710 - DNA, 2334 bp, Escherichia coli
atgtcaggaatgaaagtcagtcaggccgtgaaggctgcccgcggtcactgggctcagattctgccagcgctgggtgtgaacatactgaaaaatcgccatcagccttgcccggtttgtggcggtaaagatcgttttcgcttcgacgatcaggaaggacgcggaacatggttctgcaatcagtgcggagccggagatggtttagcgcttgtcaccagggcactgaatgtggatatcagtgaagcagctgacaggatacatgggctgacacatggcctgtctatagctaattccgaagtcaggacgttaaccgccgataccgatagcgggaaagatgcagcggcagcacttgccgcgcgactgctgcaagcctcgtgtgaatctgccggaaacacttatcttacacataaaggtttcccggagcatatttgccatgagctgacttcagctcataaaatcggtggggtgatgttccgccccggtgatttgatcgtcccgctctataacgctgacggggagctggtgaatattcagcttatcagtggcaatggtagcaagtgttttcttaaaggaggtcaggttaaggaggcctatcatctgatagaagggggcgggagttctgtaagaaggatttggattgcggaaggttacgccacggcgcttaccattcatcatctgacaggagaagccgtcatggtggcattttcgtcggtcaactttctttctttgaccagcgttgcccataataagtatcctggatatcagttaattattgcagcggaccgcgatctgaatggttcaggccaggaaagggctgaaactgctgcaaaagcgtgtcagtgtgacattgtgctgccaccggtttttggtgactggaatgatgcgcttacccaatacggagaggaatccacccggaaggcaattcttgaggctttgaagccacataacgccagtcctttcgacacaatgagtgaagcagaattcacagcgatgagtgtcagcgaaaaagctcagagggttcgggagcattacagggatgcgctggcggttgatccgaacgggcatcttttatcccgctacgagtctggagcgtggaaagtgatttctcagtcagattttgcccgagatgtcgcagcccttttccagcgcctcggtgcaccgttttcctcaggaaaaattgcttcactggtggaaacattaaagttaattgttccgcagcagcaaaatccggcacgtcatctgattggttttcgtaatggcgtcctcgatacgcgaacagggctttttagtccgcactgtaaagagaattggctgcgtaccctgtgtgaagtcgatttcacgccaccggtaaagggggaaacgcttgaaactcatgccccggcattctggcgttggctggaccgggccgccggacacaagccagcaaaacgcgacattattcttgcagcgttatttatggtgctggcgaaccgctatgactggcagctctttctggaagtgactggccctagtggaagtggcaaaagtattctggctgaaattgcgaccatgcttgctggagaggataacgccacctctgcgaccattgaaacgctggagtccccgcgagaacgtgcggctctgataggtttttctcttattcgcttgcctgatcaggagaagtggagcggcgatggcgccgggcttaaggctataaccggtggcgatgcagtatctgtggaccccaaatatcagaatgcttattcaacacatattccggcggttatcctggccgtaaataataatcctatgcgcttcactgatcgcagtggtggtgtgtcccgcaggagagttattctgcattttcctgagcagatagcaccggaagaacgcgatccgcagctgaaagataaaattgcacgagaactggctgtgattgttcgccagctcatgcagcgtttcagcgatccgatgagcgccagaacattgcttcagtcgcagcagaattctgatgaggctctcaccatcaagcgtgatgctgatccagcatttgatttttgtggctaccttgaggcattacctgacaccaacggcatgtttatggggaacgccaatattgtcccgcgccagccacgtacgtacctttaccatgcctatctcgtatacatggaggctaatggctataaaaataccctcagcctgacaatgtttggcaaagggctacctgttatgctgaaggaatacgggctacattatgagaagcggcgaactaatcagggaatgcagactaatctcactttaaaagaagagagtaatgcagactggctaccaaagtgtgatgagccaacaatcaaataa

SEQ ID NO: 28711 - DNA, 324 bp, Escherichia coli
atgaaatcacgcactctttccctttcacttcgggtggcgttgtatcgccgcgcggtagcctgcgcctggttgagtgcctgctatcagcaaaaccgccacctgcagctcactctggatgaaattgaaaccgctattgcccgtgagcttgaaggattttatctgcgacagcacgggcaaacaaaaggcatggaaatcgcctgcgccctgctttcagacctgatggaatccggccctctaatgtcctgtcccgcactctcccagctcggaatagccgtaatggatgagttatgcgtccgtcacatcaaaaagccggttttacactga

SEQ ID NO: 28712 - DNA, 225 bp, Escherichia coli
atgaatcacgccgcaatctcttatgacgatattgtccgcctgaagcatcttcgtaacgtgggggagtttgtcaccggaatggctgttcttcaggattgctacgaaaaacctgccagtgctcaatgtgagcaactggtttccctgatttatctgatgacagagcagcttgatggcgtggtacagcgttgtcaggaggacctgatgaacatggaggtggtgcaatga

SEQ ID NO: 28713 - DNA, 594 bp, Escherichia coli
atggatggcggcgcgaattgcagcccgcgagcaaggagaccatgcgtgaatctggctttgcagtctcatctctttttttgtggcttgcgtcctggcaacctttccagttatagtttttccgctgccgcaaaatcggcagccgggatttgcagcccgtgtaacttattggcgacacagcacgcgtcgagcgtgttttttcatgtcgttgctcaggcacacctatttttcgggctgtggtgcttacaccgtggctcctgtcagataatggtggtccgggcggggcagccttcgggctggccggtttccaataaggccggtactgcaaaccccgtccgggccatcacccatgagatttgcagctctggtggtggcaataaccgctacttattggagattgcccttatggctacgatcctcgcttcatcacatcctcaatttatatttgtttttgccgccgttcgtcgtgcagaacgtaaaccacgtatcagtatgctgcgtattgtcgccagcgatgagcatcatgcacgtctttcactggtccatgaatatgtgctttgccttgctgctcgcctgcctgtccgggaggtgatctaa

SEQ ID NO: 28714 - DNA, 261 bp, Escherichia coli
atgcatactatttccgtttccaccccggcaccagctgctccggtgctcccggttccgactcagcaggagcgcttcatacgattacctgaagtgatgcacctttgcgggctatcccgctcaaccatctacgaccttatcagccgtgatgccttcccgcagcagatctccctgggtggaaaaaatgttgcctgggtacagtcggaggtcagtgcatggatggcggcgcgaattgcagcccgcgagcaaggagaccatgcgtga

SEQ ID NO: 28715 - DNA, 753 bp, Escherichia coli
atgacaactgttaaccagatccctgatgcaaacattaccccctccctcccaccgaaaattcgcgaagcggtggaaaaagttaaagcagcaaaagctgtctggcaggaagaacggcgaaaacaaactgaagccgctgcaatgactgaaactatccgtaaacgtcaggaagatacaaaaacggagacgcaggcgcttaatgatgaatggcgaaacctgtttcgtgagaatcaggggaacatgacaccacgaatgaaaaaactgcgggcagaaatcgccctcggacgcgaaacattggatgagttcgaagatttgctggcagctcaggccgcagaaaatgaattcctgccatggaaaactgcggatgcagcaaaccaatacatcagcgaacataatcgcctgattgaaactcatgcagtgtggctctggaatgagtttatgaaggaacacggccagaaacttattcagatccttggactgctgaaaatgactctgggccgaagtgcatcttctgttatcggtgtagttcataccgtaaacgaccccgaaagtgtgctgaagcaatttatcagcgagcaactcaccactccggcactgtcctgtaacgtatcttcaacggatgatattgccctgccggggatcagcatttatgcggacgataaagccatacaggatgccagacaatcacccagccctgcggcgcgttcccggatgcttaaacagcgtgacatggttaaagggggtgagaaggaatga

SEQ ID NO: 28716 - DNA, 555 bp, Escherichia coli
atgaataccggaaccattactcaggaagcactcaacgattaccgcgcggcgataaaaagctggctgacactacgtaatgtgcaaagtaccagccagcttcgtctggcggccttgctggatactgaagaaaaacccgcggcatatgccagccagcttgaggatcttcgtgagcgtcttgcactcctcgaatggcagattaactgcgccgcccgggatggtctttatgctcaccagattgtgctggaaagctgtgttacaagcgcaacggaaaacttcatgagcgagcatggcgatgcactcactgacgctctggctccttttctttgcgcaccatacgggcttgaggcggcaatgaaaatattacgaaccgctgtagcccgacaaacggaagtccgtactccggtaattccagcagcatataagagcattatcgacgaaaccggattaacggtggatgcatcaatgcgcgctgatgcttcagccagtttcaccccggcacaacataaagttttcctggcccgccttaaccgacttaatgaaaaaggagtgtgctga

SEQ ID NO: 28717 - DNA, 1677 bp, Escherichia coli
atggatgatcaaaagagacaattaattaatattaaagacaatctattggtcagcgcctgccctggggctggtaaaacaaaactattgattggtatgttagaggataatttatatcgaaatgaaagttttcgttggcatattgtgttaactcacactaacgcagcagctgatgagatctctagcaggatagataatctaagtatagaggtagatagagtttggtgcgggactattcattcttttcttttagagtgggttgttaaaaagtatgctggagctatatcaagattaaaagatggattttctttactttcagaatataaacaaaagaaaataatcaagagcatagaaagtgataaaaagctaggagtaagaatacgttataattgtgatgagcgaggtaacgcatttgtggaaccttattgccattcgttagatgataaacacaaagagttacttgtaattcaggagtataatgccttcaaggaaaataatagactgattgattttgatgatattattaagcttggggtggaatttcttgaaaacaatcaaaacatatgtgagcatctttccaagttaattggtaatatttatttagatgaatcacaagatacaagtctgatccagcttaaagcattgtcatatataactaggtataatcgcgtctcagtatttattgttggtgataatgaccaagccatttatcaagatcttggcgtttctataaaggataaagatataattaaatctgagctgcaattgtctgaattaaagcatgaaactttgtctggatgttatcgatcttctgaattactggttaaatattataagaaatattctgcttcgcgaaatgatgttacttctctgcgtgaatttgaggggaagtctccaataatcaaagatatttctcaagatgaattgccacaaagggtgtttaatttaataaatcaataccaagcaaaatataatagcgtttccggtattgctattatagggcctgataagtactatcttatggcgctaataaatgctttatatgacctttcagaaaacttcgtttatgattttcaatcaacaaatcccctatattgtgctaggaatactgtattttacgagttgataagtttggttgttttggatgtaaatgttattaactaccaaagaagaagttctcttgcaaggaaaattgttgattctgttcctgaattgagtcatttgacgccattacaacttaagcgtgatttaaaagagtttcagtcagtaaaaaataattttatattgtggttgagggagttatatgattttttagaaatgaagtatcagaaatccattaaacttgagacagattacaaaatatgtaatgcagcagcttctgtggcaaaaatcagggctggtatgggcgcaattagtaagatgattaacaaagacaaaaatgttgtctctgtatctactatacatggttcgaagggggaggaatatgattatgtaatctctattgggtatcatgatcaggtggtgcctcataaatcatcttttgaaaaaggaaatgaatatgctcgcgatattgctaatagattaatgtacgtggctttttctagagctaagaattatatgaatatattcatagatgatcgaagaaaagttagtcctttctttattagagaacctgactaa

SEQ ID NO: 28718 - DNA, 2133 bp, Escherichia coli
atgtttattaagaccctctcggtaagaaattttagaaattttaaggcaacgtctctttccttcaaaaaagaatgcgtcaatacaattgtaggtgaaaattcatcggggaaaacaaatatctttgaggcgatgagacttatacttgacgataccttgccatattataagcgatatcttgtagaaaatgactttcatcgagggctagggacagcgtttggtcattgggttataattagtttggagtttgatgaaataggtggggatgaagagtcagagttactatgtcaattaaatacaaccgttaatggtggtggaacagggcgaataacttatatttacagaccgcagttttacatcagagaacaacttttcaatttaaatgatattgaagatattgatcagcgtagaagcgcatataacatactgaaagaacaatattcgattgataagaccacgtatgaatccttagtgttatgtcaaggcacagcagattttaccgatgatggattatactctcatgtggttggtgattttaatgattgtttattccctgacccaaagttagagcggattgatttaattggtaatagacaacgtgggtataatattcaggataatatcagttgtacttatgctcgtgctttgagagatgtggtaagtgaacttaagaataatcgattcaatccatttcaaaagcttttagaatatgtttctaaaggaattgataatgatgacgcattgagcgaaaacatcaagagcgtgaatgacagaatatcatcgattgaagaggttaagaggctttctgagggcatattattatcaataactaatgctgttggtactacttactcgccagttttgaatgttacatctgaattgccctgtgagctaaaagagttggtaaaggttcttcaactcaaggctggtgactctctttgtgaaggatatgtatcagagctatcagagatgagtcttggtggcgctaatttaatttatttagctttgaaattgtatgagtacgaagaaggtatcagtaaaaatctcttagctaattttttaataatcgaagagcctgaggctcatattcatacgcacatacaaaaatctttatttagcaatctgaaaaataataaaacgcaagtttttatatctactcactcaactcatatatcatcagtatcaaatatatccactacaaatgtgcttgtaaaaaatggtcttgaaacaatttcttgctctccatctaacggattggaaaaagagaaaattaatcgcattgaaagattccttgatgccataagaacagatattctctttgccaagaatgttattctaattgaaggtgatgctgaagaaatattaatacctcatctcgttaaaaatagtttcggtattacacttgacgaacttggaatatccttgatatctgtgcggggtactgggtttgaattactatcatctttatttcactcagaccgaattaaaaagaaatgtgcaattttgaccgatgacgacataaatttgtatggagataataagcctgattatttatctcaagatgattataataaagctgtgaactcagcagagtctggtgtcgctcgtaaagtaattctggatgaaatagttagaaataacgcttttattcgcgcctatttttctaagtatactttcgaaattgatttagtgctatcaggcgcggtaagatactttgatgcgatagccgctgaatcatttgagaaaaaagcatattacacaccataccaagaagcattccaatcctctgatagacaaaaaataggttgctacgctttaaagttagctaataagcataaaaaaggttggtttgcaatgatgcttgttgacaagcttgatgcagattttcctatccctaaggcactctgtcagtcgttagggttcactggtgattttaataaattcactctagcaaagatggttcgatatcgtagtgagattattaagaataaagatgggtctgatttattaaataatatattgggacaggatgatttagcatttattatagataacatagatgcagctttggacatatttaaagcacattaccctaacgatcctttaactactttgcttgaggttcatcatggatga

SEQ ID NO: 28719 - DNA, 720 bp, Escherichia coli; identical to SEQ ID NO: 14122

SEQ ID NO: 28720 - DNA, 1275 bp, Escherichia coli
gtgaacgagatttccagtagcacacttgtcaataactataatttatcgacaacttttattgtcaagtcacttgttggattgttattaattaattctctttttagtggtgttgacttttatcagattggtttgatgaaaggcctttccagtattgctgattttggcctgaagattatccttgtgttcgtattgctcgtgcttttcaagattcgcagttttaacttggtaaagatattcttttttgcttttatgcttctcatcggtgctgcgcttggagcattctatcatggtgctgaatatgataaaacttttgcgcttttactaaatatgatattatggtttgttatattcagttatgctaaagaacttgaacataacttccatatatatcgttttagcgtaaaaatatcaagtttatttcttggtatcacgttgatactttacatcatggcaaagtttggttttcatgttaaagtattaggtggagcttggttatatgatgagaattttcgctttgcaggtactttctctgagccaagtttaaatggctattattatggtttaatgttcttgatggtcatgctgtctaatcaaaagtacagactaattttggcgtttgtgtttgctattactacctatatttcaggtgcgaaattttcattcctaataataccagtgctccttgggctggtttatttcttcaaggtgaaaggcttttataattatacataccagctcattccgttatcttttattgttctttttgttagtcttgcgttcatttactatgacctttttgcactgattgcagctcatttgtcaaatcctgaaacaatgacttatgttactcgtcttgggttcccaattgtcagcatctggcatcttagtgattatccattaggaagtggagtatatggctttaagagcacgctatcaccttttatacagaactactgtcaggctctttctggtctggacgtaaattgtaacgagatgaggtcctatatatcctcggatgatcccagtgcatatgaaagttttgcgcctaaagatgttttaagtttcattatattaagttttgggcttccgggcttgcttgtgtttgtcctaagtatatccttattatcagctagacttaaggaaaataagaattactttatcattctaatgtatattgtcgcatcaatgctctttacattaccttttagatttattcttttttattctttcttcatgtttcagtgttatatttacagaatgccgagtaataaatga

SEQ ID NO: 28721 - DNA, 1056 bp, Escherichia coli
atgatctatattaatgcaagattcttgactcagcgtaaaaccggtgtgcagcaatatgcattagttttatgccgggaactcgttaaacacattcctgatgtctgttttttgacaccgaaaactgatctcattgatgagaattggcgggacgagtttaatatccttcaaataggaaatcgtaacggacatttttgggaacaaatcgaactccctcgttatctaagaagcgttggtaatccgttgctgctctgttttactggcttatcacctgctttttataaaaattgttactttactatccatgatatgtcattgtacgcacatcccaagtggttccgtttgttatatcgtgcagtatacaaggttaactatgctattcaggcaagattcgctagaggtatcttcacagttagtgatttttcgaaatcagagatagagaaatatctggcggtagactctgacaagatcactgtattacgaaattcagtagacacatctattaatatcaagaataatattgaaaataaagcggttaggcgtaaagagattttattggttggtaccttagaacctagaaaaaatatagagtttattattaattcttttttaaattcgcaaatcaaaggttataagctcatcgttgttggagggttaggagctgctttctcaaaggtgactttttctcagcatgagaacattatattctgtggctatctatcagacgatgacttagagttaaagtatagacaagcttcagtttttgtctatccttcactgtatgaaggtttcggccttcctccacttgaagcgatgcaacgtggctgtcccgtaatggcttctgaccgcgcaagcatccctgaagtttgtggtgatgctgcttactatttcaatccagaggactcatcagattttagtagtaagttacgtgaactgatcgaaaattatgatgagctcagccctgtattgatttgcaatggatatcgtagactggaacaatttgacgtacgggatgttgcatcgaaacttatggatgtcatctctcaaaggaatatttga

SEQ ID NO: 28722 - DNA, 1110 bp, Escherichia coli
atgaaggttttacaatttagtaaattttatcctccagtacacgggggaattgagcaggttgcatttgatattagcgaaggaattacaaaaagtaatggtcagcctgttgacgttctctgtgttgatcctattggggaaagaaaagacgacggaaagtttcgttataaggtttaccgccagaaattgtttgcacagcttttctcgacaccgctatctttctccttgattttacgctggagagcgatcagaaataactatgatgttattcacgttcatcttccaaatccaatggctgtgatggcgctttttttatttccaccaaaaggaaaaatagttctccactggcacagcgatattgttaagcaaaaaaaactattattgctttttgcgccgttgcaaaaatggattttagataaatgtacctgtattatagttacaagtcctgtttatgggcagtcttctccaactttgcaaccttatcaggataaaattgtttgtattcctattggagttgatactcatgttatgccgctaaatgatgagcttgaaaaaagtataaaaaaacgctatcaaaataaaaagatagttttttctcttgggcgtcttgtttattacaaaggtatggaatatctgattgatgctgcgaaggagcttcctccggattacattgttcttattggtggaacaggcccactaattgacacattaaagcaaaaggttgctaatgatggattgtcagataaagtagttcttcttggtagcatcaattattcggatttagcatcctattacaaatcatgcgacgttttttgtttgccatctattcatgaatctgaagcatttggtgtagtccagttagaggctatgagtttctccagaccgcttgtgtcgacaaatattccccgaagtggcgtggcctgggttaatcagcataacgagactggtattgttgttgagcctaatgatgccaaagcacttgctaaaggtatagtttctgttattcaaagcagtgcaacgtttagtaaaggcgctaaggacagatttgataccatgtttactaaagaattgatggttaaaaatataattaatttatattcatctttaaagtga

SEQ ID NO: 28723 - DNA, 1428 bp, Escherichia coli
atgccattatttcctgttgttatggccggaggctctggtagtcgtttatggccgctttctcgtgttctctatccaaaacaatttctttgtctggaaggtgaactgactatgttacaagcgacaatacaccgactgcagggcatcgtgtgtgaaagtcctgtcgttatttgtaatgaacagcaccgctttattgttgctgagcaacttcgccagatgaataaactcaccgagaatattatcctcgaaccgattggccgtaatactgctccggcgatagcgttggctgcactagccgcaactcgtgcccagcccgaaggtaaggcgctcatgctggttcttgccgccgaccacgtcataaaaaatgaagaagcattccgtgattccgttcgtaaggcgcttccttatgctgaaaatggaaagcttgtgacatttggtatagtcccgcataaagcagagactggctatggttacattcgccgcggtgtgccgtgcgatggtgttgaacatgcagatgcattcgacgtcgcgcaattcgttgagaaacctaatcttgaaacggctgaagcctacgtttcctgcggtgaatactactggaatagtgggatgttcctgttccgcgccgatcgctatcttgaggaactaaaaaaataccgcccggatattcttgaagcatgcgaaaaggcaatgagtgctgttgagcctgaccttaattttattcgcgttgatgaagatgctttcagggcttgtcctgatgagtcagttgactatgctgtgatggagcagacttccgatgctgttgttgtgccaatggatgcgggctggagtgatgtcggttcctggtcttcgctatgggatattagccataagacgccagagggtaatgtcgtcgcaggtgatgtattatcctgcaataccaaaaacagcttcctgtattctgaatcagggcttttgactacagttggcgtgaaagatttggttgttgtgcagactaaggatgctgtattgattgccgatcgtaacgccgttcaggatgtgaagaaaatagtcgaatcgataaaagctaacgggcgccacgaacatcatactcatcgcgaagtttatcgtccctggggtaaatatgactcgattgataccgggagccgttatcaggttaagcgattgacggtaaaaccgggtgaaagtatctcacttcagatgcatcaccatcgtgctgagcattggattgtcgtcgcaggagctgcacaagtaacaattaacgaacaaactaaactcctcggtgaaaacgagtctatctatattcctgttgggtcaacacactgtctggagaatcctggaaagatccctttagaactgattgagattcgctcaggttcttatctgggagaggatgacattgtacgttttgctgacaaatatggtcgtgtctga

SEQ ID NO: 28724 - DNA, 417 bp, Escherichia coli
atgcagctctgtattcgcacaaataaaagaatgcaggataatatatctgaatttctgggggcgtatggaataaatcactcagcatatatggtcctcaccacattattcgcagcggagaaccattgtctgtcaccttcagagataagccagaaacttcagtttaccagaactaatattacccgcattacagattttttagaaaaaaccggatatgtaaaaaggacggatagcagggaggatcgccgtgctaaaaaaattagtctgacatctgaaggtatgttttttattcagaggctcactcttgcacaaagcatgtatctgaaagaaatctggggttatctgacccatgatgaacaggaactgtttgaagtcattaataaaaaattactggcgcatcttgatgatgtcagctcataa

SEQ ID NO: 28725 - DNA, 1071 bp, Escherichia coli; identical to SEQ ID NO: 15927

SEQ ID NO: 28726 - DNA, 2232 bp, Escherichia coli
atgatccctaatttgaatgaactgacggatactccgattgcccgaaccaatttgatcaagcttgaagaagatcagctgacgaccatccagcgtctattggtccctgtatctaatatctatacgatagactttatggttcagcgctttactaaagagcgaaaagaaaaatccgctgattactatgtgcgaattcatcaggaggtaaaatcttgcgtgcggcagaagcttgggctggaggccgggcaggaggtaaaatatgaactgcattgcttaccaaattaccatcacgtcttttttttcctggcgcctgcaactgcgccgaacagcccggttcacaggacgttggcagaacgtattgaaacgctttgtcagcaactcactgctgaaaattatgacctatctcgcttgattcagggattatttagtctgcatttgaaaatggtaatgctggaaaaagccagtgagcgcttttcggtatcgccgacttacttcaactcaacgctttaccttaacgctcgcctgagtcagcccgtcacgcaaaaaaaaggcaccggggtgatggaagcctttgagctcgacatttatgcatcagaatataacgagctcgcctttaccctgcacaaacgaaaattcctggtcgaactggcggatgagatgcatctatctctggacgatatcagcatgtggtttaacatcgataatcgtcggcttaaagcccggcgcaaactcgatgcccgggatagcaaactggaattctttcgtgagcgcagcggctatggcgaatgccaggcctatacctataacgtggtcatgaatgctgcctgcgagcggctcagtgaactagagatcccccatcaacctatcccatttcaggctacacacgaggtcgatcagtttgctaccgacctcgatcaacagctggctaatacgctgttggtggttaataacggcgtcgaattcagcgccacgcaagaagcttatttctttgacgcattagccaaccagttccccgggtacaaactctggccgctggcatcgcttaaacattctcagcaaaccagatttgccgggctgcctgtcaatacatctattcttgtactcaatgcggtagatgaagaacgaagcaacagcatccggcagcaagagaatgaatctgttgagtacaatgatttctatgcagcctttgccgacgtccgaaaacaacctgaactcaactgggatatttataccaagcttaagctagatcgtttgcaagggtggctaaatcagcaaccgctgcctgtggttttacaaggaatgaacattgatcgtaagttgctggatgcgattgattttattaatgaacaattggtaagcaaccctgcgcaatacgaaatcgaacttacgaaaccacacagtcgtctcaagtcagcagttaccttattgaaaagtaaggtacgtcgaacaaaaaccgagctatggttcaaagagagcttactcaatcaacataacataccactgccagaattggcgaacgggcactataccgcttatgcggtacgcaaaacgaaaagtaatatccatctgcttgggtatgttgaactaaaaatagatcacggccaacttaggggggttgataccggggtcgtcgaaggtgaattcgagtatctattagttgatcatccagctctgggacgactaaagaaattattcgataaaagcttctatctctacgaccatacagcagatgtgctgcttaccacctataacagctcccgcgtaccgcgcctgattggcccggcgcaatttaatatcgtcgattcatacgattatcaggaacaaaaaaaagcgctagcggagcgtcaaggtgacaaatttaacgggtataccattacccgctcagcaaaattggagcaaaacgtactgccctatctgatatcaccgggccgctcgaaatacgactcgttgaccaaaactcaaaagatgaagcatcaccatatttacctgcaaccgcatgagaatggagtgtttgttctggtaagcgatgctcagcctacaaatcctactattgcacggcctaagctggtagaaaatctgctgatatgggatgctcaaggtaaggccgtcgatgtatttaaccacccgttaactggtgcttacctcaatagcttcaccctggatatgctcaggagcggcgaaagtagtaagagttcgatttttgctaagctttcccgattgatggttgagaattaa

SEQ ID NO: 28727 - DNA, 267 bp, Escherichia coli
atgatggaactgcaacatcaacgactgatggcgctcgccgggcagttgcaactggaaagccttataagcgcagcgcctgcgctgtcacaacaggcagtagaccaggaatggagttatatggacttcctggagcatctgcttcatgaagaaaaactggcacgtcatcaacgtaaacaggcgatgtatacccgaatggcagccttcccggcggtgaaaacgttcgaagagtatgacttcacattcgccaccggagcaccgcagaagtaa

SEQ ID NO: 28728 - DNA, 564 bp, Escherichia coli
atgaacagggcagcagcgggattttacctggccatcgtgctggggagttgcggtatgaatggtatctcactggcggatgagttattgatgcgggataatttttttgtggcggatgaaagccgccatcagtgggtaaatgagcacaacggaaggactggagcgctgaatgtcaaaggggcattagtgtcatctccgtgcatactggatacaccagaagtaaaagttcccctgcagaaagataaagggcaatatgtactcaaccttaaggtatcgcgttgcggcgacggaagaactgatataccggagcaccagtcaacagagtatggggatattgttgtaaagcaaagcgctgtgttaaaaacaggcaaagatgaaatgctgctatctgtatggagaaagcgtggggtaagcagaaagaatttacaacatggtgataatcagattacttattatttaaatgaagctcaatatcaaaagatagtgaaaacacaaatacctattactgaacatgaaatatctgacagtaacagggggatactgcatttgaatataatgtatgaatag

SEQ ID NO: 28729 - DNA, 513 bp, Escherichia coli
atgttaaaatcaactttggggattgctattgctttttcattgtgtgctgttgcacatgcagccaatcaagggcaaggtgttgttaattttaaagggacggtaattgatgccccatgtggtattgctccggaatctgcagatcagacaattgattttggacagatttcgaaatctcttttaactgctgggggtatttctaaggcccaggatttggatataaaattggttaactgcgacacgtctaaggtaactaaaggtgtgacccttactttctctggaaatacagtaaatggggttgcaactgagctggaaactgcagggccaaccaatactgcaattgtaattaatggatatggtagtgatattacttttggtcagcctacagataatatcaagttgactaacggtgataatactctacgtttccagtcatgggttaaacaggcaagcactaaaactgctgccgagggtgacttcactgccgttgctaacttcaatctggcctacgagtaa

SEQ ID NO: 28730 - DNA, 171 bp, Escherichia coli; identical to SEQ ID NO: 12692

SEQ ID NO: 28731 - DNA, 201 bp, Escherichia coli; identical to SEQ ID NO: 8703

SEQ ID NO: 28732 - DNA, 192 bp, Escherichia coli
atgttaaaaagagaagctttagagtctgccattatcagcgcagcgaaattgcaggggaatgagctcaacgggcaagacaaactggcgatccgtaccagcgttgcggcttgtctggccgcgaagaaacggcaccgccagcggatgaatacaggcgcatttgagtggaaaaagccacaaagcccgcgccgctag

SEQ ID NO: 28733 - DNA, 210 bp, Escherichia coli
atgacagaacttgaaagtttattttacgagatgatgccgggtcatattgcccacgcgatgaaaattgaaggggcaaaaattctggcagaaagtacgcagaaagaggccgaacgtcagtcaacgttaaccggcctgtctcccgaacttatcattcaaactgcgattcaggcgatctctatgcagatgaaaaactggaaagtagtccactga

SEQ ID NO: 28734 - DNA, 2298 bp, Escherichia coli
atggcaggtaaatcattaggcactctcaccattgacctgatcgccagaaccggcggttttgtccagggtatggataaagccgaacgttcatcacaaaaatggcgggataacgttaaaaaagatgccgcagccgtgggttcagcccttgctgctgttggcacagccgcagcagcggcggctatcggtgttagtgccgctggtattgcactggtaaaaaatacctcagagcagatcactgaaactgatcgctgggctaaatcgctaaaaatgtctactcaggatttgctttcatggcagtttgctgctgagaaagcagggttgaccggggataatattgctgacatcttcaaggatattaacgataaagtcggcgatgctgtcctgaacaagtcaggtgaggctgctcaggctctggatactctcgggctttcagctgagaaactggcccagcaatcccctgataagcagttactggctatcagctcggcattgcaaaaaatcccctctcaggccgggaaaactaatatcctcgaaagcctggggaatgacctgtcaaaaatgctgccgttgttcgacaacaataacgagaagctgaagcagtttatccagctgtcaaaagattttggtgtcgctccgccccaggaggatattgataacctggttaaggttaatcagtttttccaggatattgagagcagtgcacaggggttaaagatcgagattgccagtggcctggctaaagtagacctctcaccgattcaggatggacttgatgatatccgggatgtgtttaccgatcctgctgttctgtcaggtctggcaaagctggtcggagggatggcggaacttgttggctggatgggtaagctaagttctgaatctgctaattttctcagccatatatttgaagtgcctgacaggtttaaggcgggtggctggtacgagtttgaaaaaaatcagagattaggagcaatagcagatacgcttcaatcagatttaggggtaataactaaaccatcttcaaactctgagttgccaataaataataacctgctccccgggcagagcaatcagaaacaaactcaaaagcctgatgctgaggcaaaaaaacttgaaagtgcctataaagccgtagaacagtcatatttaaagcaaattgcgctggtggatcagctaaccgggaaaaccaaagacgccactgaagtagaaaaactacatttcgatttagtatctggtcgtctggttgggataaataaagaacagcaaatcaggcttgagggcttggcctcagaagttgataaatataacgcgttgtcaaaatttcgagatttgcaggatgagttattaactccagaagaaaaattacttaaaacgacgaaagagcgttttgaagtattaaaaaatattcaaggtattacgggtatcagccctgaagaatataaaaaagccgccaaggccatatcgaaagcgtcattttccgacgcgccaaaatttagtggtcttgatccgatgtttggcggtgagtctggagagttgaaaaaagttgatgacgcacagaaagagcaggaaaaatggtatcagaaccagctcgatttgctggaacagaaccgccaggcacgttctgatcttaatgaggagtgggacgccagagagcttgaactgaagaaaaaacaccaggatgaaatgaataagctcgatgaagcccgtaatcagctgatgttgagcagtgttgtcgatgggcttggttctatggtggatttgacccgtacagcttttggtgagcaatcaggagtatacaaagccgcgtttgcagttcagaaagccgcggctattgctcagtctgttatcgctatccagcaggggatcgcgatggcggctgcaaaccctttcccgtacaaccttgcagcgatggccagcgtagccgcttctacagccggtattgtgtcgaacattgcggccgtgggtatggctcacgatggtattgatgctgttccagaaaccggaacatggcttctccagaagggcgaacgcgtagtcacggcgaataccagcgcgaaactggatgcgacccttaaccgtgtcgcccagcaatccacttctggtaatcagatttcccaggaatttaattttaacgttaatggcgatccttctgatgctcagatagccatgatgaagaaagcggccgctgacggtgccaagatggggtatcaaaaggcggtcaattcagtaattactggtcagggtgatttgcacaaggctctgatgacgaaaactaattcaggcagaaaaatagggtga

SEQ ID NO: 28735 - DNA, 153 bp, Escherichia coli
atgaatgagaaagacgtggtgaatctgtatcagtcgctggcccgatgccgtgatggcttcatgcagacccgcaccagacgcgatgagcgccagcctgtgcagcgcatgagtgagcgtgaccgggagttgcgggaatgcttccgcaaccgctga

SEQ ID NO: 28736 - DNA, 444 bp, Escherichia coli
atgccgtggcaacccttacgccgttgcactgagccgggatgcaacaagcgcgtgaagtctggtaaatgcgatgagcataaacgggaggtgtggcgggcacaggatgccagacgcggccaccgtcgcgcccgtggttactcagcagcatgggagaagtatcgcgcccagtatctaaaacgctatcccctgtgcgctgagtgccagaagcagggcctcttcgttcctgcaaagattgtcgatcacatcatccctatcgacggcggtgatgatgttctgttctggcctgagtggaatcaccagccgttatgccagacgcatcataaccagaagaccacacagcaagaccctatcaccaaagccaaccgcaaagcggggatgtaccacgagcaggaagagcgggcagcacagcgcaataactggatgtatgaggttgatcatgaatga

SEQ ID NO: 28737 - DNA, 294 bp, Escherichia coli
gtggctgaaaccatagaacttgctgaagcaaaacttcactgccgtattgatggcgatgatgaagatttgctcattcaggcttacatcgatgcggctctggaggtttgccagaaacatatcggcaagcggtttgatagtgggctggagcttaccccggctatcaaaatcggttgtctgatgtacgtctctcagttgtacgagtaccgcacgatgattagcgatgtggaggcgaaagaggttcctcttgctgtctccgcgctgtggtctgtctatcgtgacgtgggggtgtactga

SEQ ID NO: 28738 - DNA, 342 bp, Escherichia coli
atgagagcaggaaagatgaaacgccgcgtcactattcagcagttcgtcagtcaccaggacccgaacacgggttctgtcactaaagaatggcgcgatgttgtcaccgtttggggagagatagacagcgtaagcgggcgggagcttgtagccgcccaggctgaacaatcagaaatgaccgtgagaatctgggttcgctaccgcaaaggcatcaccaccaaaaacaggctgatctgcacagaaaaaggaatgcctttaaccatctacgacatcaaagccgttctgcctgatgcagatcgtacccgtcttgaaattatgtgtaccggagggctgaccagtggctga

SEQ ID NO: 28739 - DNA, 774 bp, Escherichia coli
atgcagggatataaagagtttttagaatccttacaaaaaatgactgacgttcggttgaatatcgctatattgctgacttgcttagccgctatcatcttatcttcaccagaccatttcattttagatccagttcccaaattgattccacaaagtttaatcctaataacttcaattcgcttggtgttttctgtcattaatactatacacactatgatatccaagaaaatagagaaacaaaaattagaagcacaagctctaattgaaaaacaaaacaaagagcgtgaaaaagaattgctaaaagataaaattagctcttccattgatgaactggatgtctttcaactttacataataaaaaaactaattggcaaaaataatgcttcacatgctaaaggtgctacgttgttttctttatgcaatttaaatatcacctatgttgttgcaacaggagaacgctcacagagtgtggcgttaacaagtatcgcaaaagatatacttgagaaaaaattcaataatgacatttctcaattggaaaaaaacgctgcaaccagagcgtttaatgccatggctgaaaaggaaatatcttcatttaaattacttttagaaaaagatgtcacaaaaacaacatggacagatcgcagtggaagattacattactcacctagcgaatatatttttagaaatttcagtgattccatcatctttgaacagccgcaaaaaggctatgaatatacattaaactctaatttaagaagcatacttgaaaagtattga

SEQ ID NO: 28740 - DNA, 237 bp, Escherichia coli
atgccaatcacaatacaggatattaaaactcacaaggaccaatacgggctgcatgacctggacacgatgagcacagaggaataccgaaaggccttgtctgatggggcattcttctggatcgatcaccatgactttctgcgaagcactttatcagaggagatcttgactacaaaccgggaacaattggaaacgttgattgaatacttacaaagcattagtgacaaaatgtcatcctaa

SEQ ID NO: 28741 - DNA, 186 bp, Escherichia coli
atgcgtgagttagcaaataaaagcgcttcaatggcttgtgaactggctgttttgctgatggttgttgaagagtgcgaaattgattccgttgggcgtgaaaaccttatcagtctggccagacgagtatcagatcaactggcggcaagcatggtcgagcagaattcaacgggggggctcaatggataa

SEQ ID NO: 28742 - DNA, 186 bp, Escherichia coli
atggcaacaggtgcgaagaatgcaaagtcacaaatgaccacagttcgaatcccccatgatgtgatggaagatatcgagctttttaaacatgaaggtgaaagtaccgcagggtttcttgtcactgctgcgaaaggcgaaatcaaacgccgccagcgccaaaaggcaaaagaagagccaaaatcctga

SEQ ID NO: 28743 - DNA, 210 bp, Escherichia coli
atgcgtttaattaataatccaaccattcttgaacgattaacccgcgcggaggctgctgcctatctcggtgtgaatgctcagactttggctaactgggctcatacaggaaaggtggggattccacatcataaggttggtcgcaaagtcatttatatgaagtcagacctcgacaattaccttgcggcgaaccgccgtactcagactgcttaa

SEQ ID NO: 28744 - DNA, 834 bp, Escherichia coli
atgaatagacaaattgaactttctgaattaatcagtaaatcatttatcgaatcgaccaataagatgagtcaagacgataaacttgcgttttatcaggccatcttagatggaaataaaaatatagaacgtgaaattttaaaaaaatataaccatacaatggtgacaccagttgaaaacatcatgagcgatgaagatgctgaggcgctagcaaattcgcttttgaaggatgaaaaaggggtgttcaatgaaatcaataatctatttgtatctgccagtaaaaaatattggtcaaatgcagaaaggttgagcgacttacctttagaacatcatgacaaaatacttaaccatgcaagagagcttcaaacttcgttcaattctaaagagcatgttaactctgtattgcatgggatttatggagaaaatgcggggacaattgttaaggccgcaattattgctgaccttattggttgccttgatttaagaaatgatttgatggttgtatttggttccatggttgagagtgctcacaatagcaaagctatggatatttttaagaagaaaaaagttataagcgaagacagaagtttagccaagaaagggaaaacaaacagacaccatgcaacagcaataaaaatcgctgccgatacgtggggtaagtatccaaatgcaagccttgcgggactttcagaggacatatcagcgcatttgagaaaggcgtggaaagacgtgccagtagctggaacggtagagaagtggttaaaagattctgggttaaaccctgccgttaagccgaaaaacagaaattatgagctaatcatattagaaggggaataa

SEQ ID NO: 28745 - DNA, 1449 bp, Escherichia coli
ttgatcgcttggtatggggtgtttgtggaaacattcaaattcacgaaagcaaaactcgaaagcctgccgcccgcggaacgtggccaggtggagtatggtgataccgttgttaacgggctacggctccgagtggggatcagtggcgcgaagagcttttgtatctccagaaaacgtaatggcaaatttatacgggccaccttaggcagatttcccgatcttactattgataatgccagggcaaaggctctcgaacttctgggagacgtagccactacaggcagaaaccctaacgtcgaaaagcgcatcaatgaaaaggctttggttacgcttaatgatgcgctggacacctatatcaaaagccgtgatgaacggttaagcgccgatacagcaaaacagtatcgttccatcctgcaaaatttctctggtgactggatgaaacaaccaatcgcctctatcagccgtgaacgggtggaaaccagacacaaagccgttactgatggttctgtctggtttggtgctgataaatcaacgctacgcgcaggggttggaaccggcagtaaagcacaggccgatctctgggctagggtgcttcgtgctatataccgcttcgcgcacgatcattaccgtgacgaggaagggaaaacgcttcttccggatccgcctacaatggtactgagcacaaagcgcaaatggcatggtaccgtgaggaagactgagcgtatccgcaccaatgagcttggcaggtggtttagcgccttatcgtccgtgcgagagtttgccgaacaggggcgcgatgatatagcagcggcggtttgtgatgctgtggaaatggctatttttaccggactgcgtaagtctgaaattttagagcttagctgggatagagttaatcttggaggccgatatttttggattgataccacaaaaaacggcgatccgcttgaactccccattactgaaactctactgaaattatttcgccgccgagccaagatgaaagcggcagatggattattggtttttcctggtgataaaggtgtcattaaagagtacaggcacattatcgatcgcataagtgctgccaccgtgccagacccaaacccagacctgctaaagcctattcctttcaaatggcatgacggccgccgaacctttggtaccgttgctgagctggtgggggtgggtaattatatcctgaaacgcctgctcaaccaccgaactatgagaagcgcggatgttacccagggctatctgcatttcagtgctgatgaacttatggaaccagcttcaagaatagaacgggcaatactcgaacacgccgggattattgagagtaaaaaatctctggatgcgaagttattacttgctcttgaaggtctgagcgaagaagaaaagcgccgtctcatttttgatttatccaaaaatattaaggtttctgaaaatgaatag

SEQ ID NO: 28746 - DNA, 648 bp, Escherichia coli
  misc_feature (589)..(598): n is a, c, g, or t
atgacaaataaacacccatcattgttttctccttttatgctgacagaaaaaataaagctacgtaatcgtatcgttatggctcctatgacaacctggtcagctaatcctgatggaaccatctctgagcaagaactcgaattttataaacgtcgctcacaaaatgttggtttagtaataacaggatgtacctatgtcacgccaagcggcattgggtttactcatgaatttgccgcgtatgacgaccgtttcattaacagccttgaaaagttagcagctgcagccaaaagtggcggtgctccggctattttgcagattttccacgccggtaataaagccatcccagagcttgtgccaaataacgatgttattagtgccagcgcatcaagcgtaaaatctggtgactttatgaagagagtggtacaaagcagggaaatgactgaaaacgaaattcaggaaaccattagagcattcggagatgtcacaaaaagggcgattaaagcaggttttgatggcgttgaacttcatggtgcgcacggattccttctgcagaatttcttctcccctctatttaaccagcgtaatgaccgannnnnnnnnnagatcttgaaggacgtatgcgcttcccgctggccgtattacaggaagtaa

SEQ ID NO: 28747 - DNA, 906 bp, Escherichia coli; identical to SEQ ID NO: 5092

SEQ ID NO: 28748 - DNA, 162 bp, Escherichia coli
atgtgcgtggggcctgagagtatacatggtttcagtcaactgcatggtgccgggtgcctcccggtgaattcagtaccagcacctgaatccgcgattatcccatatacctactcgctgattgcccatccgcacagggggattcaccatgccagtttcttttaa

SEQ ID NO: 28749 - DNA, 330 bp, Escherichia coli; identical to SEQ ID NO: 20981

SEQ ID NO: 28750 - DNA, 843 bp, Escherichia coli; identical to SEQ ID NO: 5866

SEQ ID NO: 28751 - DNA, 303 bp, Escherichia coli; identical to SEQ ID NO: 5332

SEQ ID NO: 28752 - DNA, 216 bp, Escherichia coli; identical to SEQ ID NO: 4566

SEQ ID NO: 28753 - DNA, 483 bp, Escherichia coli
atgagcgataaaaagaagcgcagtatggcgggtttgccgtggatcgcggcgatggccttcttcatgcaggcacttgatgccactattctgaataccgccttacccgcaatcgctcatagccttaatcgttctcctctcgcgatgcaatcagccatcatcagttatacgctgacggtggcgatgcttattccggtaagcggatggctagccgatcgcttcggtacacgtcgcatttttacccttgccgtgagtctgttcacgttgggttctctggcctgcgcactttccaactcgctaccacagctggttgtcttccgggttattcaggggataggcggcgcaatgatgatgcctgttgctcggctggccttactgcgcgcttatcctcgtaatgaacttcttcctgtattgaattttgtcgccatgccgggtctggtggggccaattttaggccccgttcttggcggcgtgctggtcacctag

SEQ ID NO: 28754 - DNA, 1500 bp, Escherichia coli; identical to SEQ ID NO: 4892

SEQ ID NO: 28755 - DNA, 2562 bp, Escherichia coli
atggctgaaccggtaggcgatctggtcgttgatttaagtctggatgcggccagatttgacgagcagatggccagagtcaggcgtcatttttccggtacggaaagtgatgcgaaaaaaacagcggcagtcgttgaacagtcgctgagccgacaggcgctggctgcacagaaagcggggatttccgtcgggcagtataaagccgccatgcgtatgctgcctgcacagttcaccgacgtggccacgcagcttgcaggcgggcaaagcccgtggctgatcctgctgcaacagggtggtcaggttaaggactccttcggcgggatgatccccatgttccgggggcttgccggtgcgatcaccctgccgatggtcggggccacctcgctggcggtggcgaccggtgcgctggcgtatgcctggtatcagggtaactcaaccctgtccgatttcaacaaaacgctggtcctttccggcaatcagtcgggtctgacggcagatcgtatgctggtcctgtccagagccgggcaggcggcagggctgacgtttaaccagaccagcgagtcactcagcgcactggttaaggcgggagtaagcggtgaggctcagattgcatccatcagccagagtgtggcgcgtttctcctctgcatccggcgtggaggtggacaaggtcgctgaagccttcgggaagctgaccactgacccgacgtcggggctgacggcgatggcgcgccagttccataacgtaacggcggagcagattgcgtatgttgctcagttgcagcgttccggcgatgaatccggggcattgcaggcggcgaacgaggccgcaacgaaagggtttgatgaccagacccgacgcctgaaagagaacatgggcacgctggaaacctgggcagacaggacagcacgggcattcaaatccatgtgggatgcggtgctggatattggtcgtcctgataccgctcaggagatgctgattaaggcagaggctgcgtttaagaaagcggacgacatctggaatctgcgcaaggatgattattttgttaacgatgaagcgcgggcgcgttactgggatgatcgtgaaaaggcccgtcttgcgcttgaagccgcccgaaagaaggctgaacagcagagtcaacaggacaaaaatgcgcagcagcagagcgataccgaagcatcacggctgaaatataccgaagaggcgcagaaggcttacgaacggctgcagacaccgctggagaaatataccgcccgtcaggaagaactgaacaaggcactgaaagacgggaaaatcctgcaggcagattacaacacgctgatggcggcggcgaaaaaggattatgaagcgacgctgaaaaagccgaaacagtccggcgtgaaggtgtctgcgggcgatcgtcaggaagacagtgctcatgctgccctgctgacgcttcaggctgaactccggacgctggagaagcatgccggagcaaatgagaaaatcagccagcagcgccgggatttgtggaaggcggagagtcagttcgcggtactggaggaggcggcgcaacgtcgccagctgtctgcacaggagaaatccctgctggcgcataaagatgagacgctggagtacaaacgccagctggctgcacttggcgacaaggttacgtatcaggagcgcctgaacgcgctggcgcagcaggcggataaattcgcacagcagcaacgggcaaaacgggccgctattgatgcgaaaagccgggggctgactgaccggcaggcagaacgggaagccacggaacagcgcctgaaggaacagtatggcgataatcctctggcgctgaataacgtcatgtcagagcagaaaaagaccagggcggctgaagacctgcttcgcgggaactggatggcaggcctgaagtccggctggagtgagtgggaagagagtgccacggacagtatgtcgcaggttaaaagtgctgccacgcagacctttgatggtattgcgcagaatatggcggcgatgctgaccggcagtgaacagaactggcgcagcttcacccgttccgtgctgtccatgatgacagaaattctgcttaagcaggcaatggtggggattgtcgggagtatcggcagcgctattggcggggctgttggtggcggcgcatccgcgtcaggcggtacagccattcaggccgctgcggcgaaactccattttgcaaccggaggatttacgggaaccggcggcaaatatgagccagcggggattgttcaccgtggtgaatttgtcttcacgaaggaggcaaccagccggattggcgtgggaaatctctaccggctgatgcgcggctatgccaccggcggttatgtcggtggcaccggaagtccggcgcaaatgcggcgttcagagggtatcaggtttgagcagaacaacaacgtggtgattcagaacgacggtacgaatggtctgccaggtccacagatgatgaaggcggtgtatgacatggcccgcaagggtgcccgtgatgaaatccaggcacagatgcgcgatggtggtctgttctccggaggtggacgatga

SEQ ID NO: 28756 - DNA, 234 bp, Escherichia coli; identical to SEQ ID NO: 10186

SEQ ID NO: 28757 - DNA, 963 bp, Escherichia coli
atggaaggtaaattaattttttgttccgatgcaatactgcggtttcagtccgattacgatgaaacctcggcggttccattgctatccatccagaacacgatagccaataccgatcccttctttcttcttcgcttcttccaccatactgttctgattgaagaaggaacatcgctggcaagtatctttctggcaatagaactgtggaaggcactgttagcagcttatctggacagagatgttggtgcttatatagatgaggtaagaaaaccgtccgggccaacgacatgggatattgaatggattgggattgaccgtcgtagctcggtttatcgcgcttacaagcgtcaggatatggaagaaggggaagatttttcgacctattttaatcgtgagcggttcccgactgatgagtttgacatagaaagtagctgcgatgcttcaggtttcattaaaggtgataaagaacgctggagtatcagcggtgatgttcacgaaattaaaaatcttcctgtaatcctctatagcaaacaggcgttgatgacgtcggcaaaggacggcctgttgaagaagaatgtatcaggggtgaagagttccaagcatggctgctttgtttatggcgatacctcgttttctttcagtgaggtaatggaagctatcttcatcagtgggctgttcttctatgcgccaatagacgccgccagtagtcttgatgaactgaaagtgagtttggctgggctggaagaagaactggccgaagtaccaaaagtggattcgaatggcaatgaaacagataaagaacctactatagtcgtagccgaaggtgcttttgattcggtcgctgctcacatggaaacagaagctgaggagtggcaatctattaagaacctgtgccaacgagaaggtgagctgcccatacgtattggtggtattaaaatggctgagccaccagagtttcatttttag

SEQ ID NO: 28758 - DNA, 495 bp, Escherichia coli
  misc_feature (479)..(488): n is a, c, g, or t
atgcttttagtttccaaaaagaaagatagccctcttgtagcttgcctgctcgattggcgtatatttgaaaacccatatttgatgcttaatgatataaagatacccattatggaatgcagtgataacaatgaattaatcactgttataccggaaatgtttgatgctttgatgggaaatctatggggtgatggtgatgatatattacgagataaccgtattgaacaagcttgggaaaattattctgaattagaaagaaatgaaaataattatattacaaaagaagctatcgagaatactgtaattaatgctttttttgaggaaaggcattttcaatcttggcctgtgtggaataataaaaccactcacggcacagccatgtttatagctggaattcatgacgatttaatagctcagctatcaacagatgctggttcagaagctcaaggtgcagaggttcgggctaaagaacgctttcttcnnnnnnnnnnacattaa

SEQ ID NO: 28759 - DNA, 219 bp, Escherichia coli
atgaacgaaacgctgaatgcactgatttgtcgccacgcccgtaacctgctgctggcgcagggctggccggaagagacggatgttgtactgtccggcagtcagtggcagtcgctgccggtacttccggcagacggaacgcaggtgtctttcccgtatgccggtgaatggctgacggaggaagaaatcagggcggtttttgaggcactgttgcaaagttag

SEQ ID NO: 28760 - DNA, 351 bp, Escherichia coli
gtggatgcatgctgccggctgctgtctccgctggaagaggcgcttcatggctatgtgctgactgacggtaagctccatgctgatgacacgcctgtcccggtgctgttgccaggcaataagaaaacgaagaccgggcggttatggacctacgttcgtgacgaccgtaacgccgggtcaacgctggcgccggcggtgtggttcgcttacagcccggacagaaaaggcatccatccgcagacccatcttgcggggttcagtggtgtactgcaggcggatgctgtcacgaacggtgcaatagtgctccacacccaacgcctgaaatcagatccagggggtaatctgctctcctga

SEQ ID NO: 28761 - DNA, 501 bp, Escherichia coli
atggccgacagtttccagaatgaagttcccgccgctcgtgtaaatatcaagcttgacctgcatacaggcaatgctaaaaagaaagttgaactccccctcaagcttcttgccgtaggcgattacagtaacggaaaagagcagcgtccgctgtccgaacgggacaagattgatatcaataaaaacaacttcaacagcgtcatggctgagttttcgcctgcggttaatttaacagtagaagatacgctaaacggaaacggtaatgaacaaaatatcgcgcttgaatttaaaagcctgaaggattttgagcccgaacaggtagcaaaaaatattccacaacttcgtgtattactcgctatgcgcaatttactacgtgacctgaaatccaatctgctggataacgcaacgtttcgccgtgaactggaaaatatcctgaaagacccgacgctcagttcagaactgcgtgatgaactggcgaaaattgcgccgcaggagaacgtttaa

SEQ ID NO: 28762 - DNA, 618 bp, Escherichia coli
atgcccgtattccctgccagctttaacacgtccttcctgtgctgcatcatcgcctctttcaccccttcccggtgttttttcagtgattcctctgtcgaagctgtgaacagggctatagcgtctttgattttcgtctcgtttgatgtcacagccttgcttacagatttttcgagcttcctgaactcgtcgttcagcattgtctctgtagattcggctctctctttcagctttttctcgaactccgcgcccgtctgtaaaagattgctcatagaatgctcctttcagtctgatattcttcccgccgttcgggtctgcaatgctgagactgcttcgcgtcaccctgaccacttcaagccctgcctctgtgagcgcctgaatcacatcctgacggccttttatctccccgacatgataaagagcgtctatcccgcgtgtgacgctctctgcaagcgcctgtttcgtttccggcaggttatcagggagagtcagtatccggcggttctccggggcgttggggtcatgcagcccgtaatggtgattaaccagcgtctgccaggcatcaattctcggcctgtctgcccggtcgtagtacggctggaggcgttttccgctctgtag

SEQ ID NO: 28763 - DNA, 384 bp, Escherichia coli; identical to SEQ ID NO: 5770

SEQ ID NO: 28764 - DNA, 288 bp, Escherichia coli
atgagaattaaatatgaatcacgttggagattagaagaactaaaattagaaatatgcagttcaatagatgagttaattaataaatatggtattgaatatgcaacaggaataaatctttatatgaattgtgaagataaagaatttaatcttgttgatgttatcaatgaagatggaaataaaataatgtttgtcgttagcaacgatgaaaaaatacaaaagccaaaaaaaatagcaaagaaaaaaactccagcacctgtaattgagctagataaatatcgaaaaaaatga

SEQ ID NO: 28765 - DNA, 435 bp, Escherichia coli
atgtacggaacatgcgaaacgctatgccgggagctggcagcaaagtatccgggagacacgccgctgatgctggttatctggtccccggaagaaattcaggccctcgctgacggaatggatatttccctgtccgatcatgaaatcagaaccgtcctggcgcgcctggaggacatcccggaagaccagcggactgaatccggtatttcttccggcgtggcgatggagatcatcaataacgtgagcgaaaaccgccaggtgaccgtccctgctgaactgctggcgtccctgattcagaccgctgaacaggcattgtggaaacgtgaatgggccgcccgggatcatggcctcgccgtcccggaatgcgtcacccgccgtcaggcggtggttaatcaggtccgcatcctgctgaaaaacaacacacacgaaaacgactga

SEQ ID NO: 28766 - DNA, 435 bp, Escherichia coli
atgtacggaacatgcgaaacgctatgccgggagctggcagcaaagtatccgggagacacgccgctgatgctggttatctggtccccggaagaaattcaggccctcgctgacggaatggatatttccctgtccgatcatgaaatcaggactgtcctggcgcgcctggaggacatcccggaagaccagcggactgaatccggtatttcttccggcgtggcgatggagatcatcaataacgtgagcgaaaaccgccaggtgaccgtccctgctgaactgctggcgtccctgattcagaccgctgaacaggcattgtggaaacgtgaatgggccgcccgggatcatggcctcgccgtcccggaatgcgtcacccgccgtcaggcggtggttaatcaggtccgcatcctgctgaaaaacaacacacacgaaaacgactga

SEQ ID NO: 28767 - DNA, 222 bp, Escherichia coli; identical to SEQ ID NO: 5758

SEQ ID NO: 28768 - DNA, 288 bp, Escherichia coli
gtgctgggctggaaatattcaggcaatcgtcatcacccgacggaaaagcccgttaccagcctgcaaccgctcattgagagcttcacacacccgaacgcgattgtgctggacccgtttgcaggcagcggctcaacctgtgtggccgccctccagtccggacgccggtatatcggtgtcgagctgcttgaacagtatcaccgtgccggacagcaacgactggccgccgtgcaacgggccatgcagcagggggccgcgaatgataactggtttgaaccggaggctgcgtaa

SEQ ID NO: 28769 - DNA, 177 bp, Escherichia coli
atgagccatcatatttctacccgcttcgttggagcgtttgctaaaatccacataacccaaggtaaatatctttgccaaaaactccaaaaatgctctaggagaaagaatattgcttctgctattctgccccccggcaattcgggcaaaatcattcattcccacataccaggtatctaa

SEQ ID NO: 28770 - DNA, 756 bp, Escherichia coli
atggtgaacgcctaccgcccttcattaggggcaaatcaaccaacagcggcacagaccccaaaaacgccctctgcacccgaaaaaaagtgggcattttcttttcgttattggcgtcaaattgataattttgggttagaccgtaccaattcaggctggtttgtttcactaattggaaaattatctgagctttctcaaaaagatgtcaaaggctttattaccagtggggccgatagagaggcatggcgctatcattcaataaactgggaacaaagaaatatacccgtacaacgtagccagttgacatggattgacactgattaccttgaaaatgacgaagaataccccttactacaatttcagatatctactgcccttggtagagttgttggcttttgggatgagaaccaaatttttaatattgtgcttttagatccccttcataacatccagccaacacgatctcataactatcgggttgactactgtgcaccacttgagaccccctactcccttttactctgtagggtagatgatataagacgcacatgccgttgttcagatcctgaatgtagtttcaaacgtcgaatcgagcaatttgaagaaatcccaatccagacaaatacgctagtacactatgtcagtgatatggaatgggctgagacacagcaatttatagaggatggtttaataagcgatgccaaagaagttttctcatggggacttctagctatcaaagaccagtcatcaccttcttaa

SEQ ID NO: 28771 - DNA, 468 bp, Escherichia coli
atgataaatattaaccaattatgtgattacatcatcacaaaaatcttagcttcaggtgaaactatgtctaatttgaagctgcaaaaattagcttattacgcagatgcttggtatctagcttttttcgataaaaagttagtggatgaggagtttcaagcttggattcatggcccagtaagccgtgcgatttataaccggttctcttctacaaaatcactgtattcggacataacgattgcagatcgcactcctgggtttgatctttcatccattccagccgcaaccgcagctcatattgatggcgttcttgaagtctacggtgctttttctggcgcacaacttgaagatatgactcataaagaagaaccatggattaaggctcgtgagggttacagaccttcagcacgttgtgaagtagtcatcgatcgcaacataacaagagacttttatcgtagccgattaaattaa

SEQ ID NO: 28772 - DNA, 1056 bp, Escherichia coli
atgcttaaaacaaataaggtatttattgacacacaaacgtacgtaaaggctggtcttcattttgagggggtagcatttaaagctttccatgaattatgtgcgaaaggtgatttagtcttaattacaactacagttgtagagagagaagtaaaaggtaaaatagaggaatcaataaaggatgctctgcaggctataaacacagtacaaagaaaagctaggcttttgaatagtattgataatggaccgctccatggtttttttcagcaatttaacgaacatgaaattcacgaagcagcacaaaaagtttttgatgattttttgaaaggatgtcacgccaaattagctacaatagaagtgatagatcttaatgaggttttagataaatactttggcaaagaaccaccatttgggcaaaataagaaaaaaagtgagtttcctgatgcaatcactttagctgcggtagagcgatttgttaatgatgaagatgtgtatatcatttctgaggatagtgacttaaaaaattattgtgatggtaaaaacaatcttcatcaaattgattcacttgataagtttctaggtgaatacaatacgcatacaaacgaattaagtaataaattgatgcagtttatcgaaagcaaacgtgaagacataagagcggacgtaattgcccaactcaatgatgccgatggatataacgtttcaacttgggaagacgctgaattggattcatttgaagtcgtcaatattgatgactttgaaccatcaataattaagattgacaataattattgtctagcgaccttctctgtttctgtagattttgaagttactgtttctggtccagactttaataatgggtattgggatagcgaagataaagtaatgattccaatggagacaaccacacgaactgaagttcaagagattagtttcgatattgaaattgaagttatgtatgaaatcgaggatggtgaattaacagatatcgcatttgatgtgaatattgataagttatcccgagggattgagttctctattgaagaaaataatttttaa

SEQ ID NO: 28773 - DNA, 210 bp, Escherichia coli
atgatcaagattggcgttatcgctgatgattttaccggcgcgacggatatcgccagttttctggtggaaaacggtctaccaacggtacaaattaacggtgttccaacaggtaaaatgccggaagcaatcgacgcactggtgatcagcctgaaaacgcgctcctgtccggtggttgaagccacacagcaatcgctggcggctctgagctga

SEQ ID NO: 28774 - DNA, 780 bp, Escherichia coli
  misc_feature (745)..(754): n is a, c, g, or t
atgctgctaccattgcatcgcacatttgtcttaactgggataacatttgcattatcggcagtgtattcattgagctatgcacgagatgaatttaaccttcgtatcctggagctggatagcccacttgaaaatacacaagtgctggaggattttgttaataataataacttaactccgggagtatatcttacctctgttatgtgggggcaagagtatcttgataagagaaatattaccttcattctgtcttcggataaaaaaaggctcatccctcgttttacaaaggcggatctccgtgagttcggtcttaaagttgacgacattcccgcgttacaagtaatggatgatgacactgagtttggtgatattgctcagattattgatggcgcacgttatgatttccagttagacagccaaacgctgtgtctgcggatcccgcaaatctatcagaatgcgcgggccgcagggagtatttcaccgaaatactggagtgatggtgagagtgcggtttggttaagttattacgccagtggttcccggcaaaacagtgatggcgataacctgaattcaaattggttgaatttaaattcagggattaatttaggcgtatggcggctacgaaataataccgtttacagtgactccagttgggagtcgatcagcaccagtttgcaacgcgatatcaaagcattaagaagccagatggaagtcgggcagacgttcacaaatggcgatctttttgacnnnnnnnnnngtgcagatgacaggtataaagcttga

SEQ ID NO: 28775 - DNA, 654 bp, Escherichia coli
atgggacgctggcttgctggcaggctcatgaaagagctggggctggtcagctgtcagcagccgactcaccggtataaacgtggtggtcatgaacatgttgctatccctaactaccttgaacggcagttcgccgtgaccgagccaaatcaggtgtggtgcggtgatgtgacctatatctggacgggtaagcgctgggcgtacctcgccgttgttctcgacctgttcgcaagaaaaccagtgggctgggccatgtcgttctcgccggacagcaggctcaccatgaaagcgctggaaatggcatgggaaacccgtggtaaacccggcggggtgatgttccacagcgatcagggtagtcattatacgagcaggcagttccggcagttattgtggcgataccagatcacgcagagtatgagccggcgcggaaactgctgggataacagcccaatggaacgcttcttcaggagtctgaagaacgaatggatgccggtggtgggttacgtaagcttcagcgatgcagctcacgcaataacggactatatcgttggatattacagcgcactaagaccgcacgaatataatggtgggttaccaccaaacgaatcagaaaaccgatactggaaaaactctaacgcggtggccagtttttgttga

SEQ ID NO: 28776 - DNA, 267 bp, Escherichia coli; identical to SEQ ID NO: 6604

SEQ ID NO: 28777 - DNA, 588 bp, Escherichia coli
atgaaacgaaaaagcacattcaacaagatgggactatacatactgtctttaatgttgctgtttgtttttattatcattttgagcgcaaaaatcccattttgttatggctcttcctgccattttataggtttttatcaattagcttccagcaacataatctcaataatttgtttaatttttataggaatagcattttatttctatagaaggtttaaaggattgacgaaggtcaacaatgctgactgtgtaacaatcactgcttgccaaagtgagagctatgaaagtttgactttcttagcaacttacatagtaccttttatgggattcagttttgatgaccctcagaaaaacattgcgtactttctcttaatagtagttattggtttaattttcattaaaacggataagtattatgcgaatcctactttggcgcttttcggttataagttgtatagagttaacatttctcatgcaggaagtggtgaagtaaaaaacgtcattgcaatctcgatggatgtgctgactgttgacgatcaagtattctatagtttttttgatgactacgttttcatagcaaggaaaaaataa

SEQ ID NO: 28778 - DNA, 231 bp, Escherichia coli; identical to SEQ ID NO: 7660

SEQ ID NO: 28779 - DNA, 276 bp, Escherichia coli; identical to SEQ ID NO: 8395

SEQ ID NO: 28780 - DNA, 381 bp, Escherichia coli
atggcagtaacgtccccggtgactgatttcagcctgcaactgccagaagttacgtttctgcaccgcctgcagggcatccgcgatacgatgaagctcacggtcctgtggggcatattccctgattttccggggtgccgctggctgccagtgccagcgcccttcaaaacaggctccgtccccctggctgcagaatccgctgaaccagatgcacggctcttccataaacctgccgttgctgagccggaaaacgcgctggcggaggtcaatcccgaaaatgtcacagacctccctgaagtcttcatacacgttttcataccagttgctgtcagcatgatgctgacggtaccagtcgcgggctttttcctgtgcggtggcggatag

SEQ ID NO: 28781 - DNA, 246 bp, Escherichia coli; identical to SEQ ID NO: 13490

SEQ ID NO: 28782 - DNA, 129 bp, Escherichia coli
atgttgcggccagaagctgatgcgctgttcatcagggatgagggtggcaacaagtcgggactggtcactccctgggtaaccggctcatttaaaccgtctggtctgtttcctccggctctacaaaaataa

SEQ ID NO: 28783 - DNA, 144 bp, Escherichia coli
atgcttccgcaaccgctgacaggccgcaccgatggggtgggggaggttttcaggacaaaacccagactgccaggcaccacccgccccctcaaatttttacgcacggtgatttttttgaaaataaaacagacaggaaaacagtaa

SEQ ID NO: 28784 - DNA, 153 bp, Escherichia coli
atgaatgagaaagacgtggtgaatctgtatcagtcgctggcccgatgccgtgatggcttcatgcagacccgcaccagacgcgatgagcgccagctagtgaggcgcaagagtgagcgtgaacgggaggtgatggaatgcttccgcaaccgctga

SEQ ID NO: 28785 - DNA, 339 bp, Escherichia coli
atgagagccggaggactgagaaaccgcgtcacgatccgcaccttcacttcatcgagaacaccttccgggcaggttattcagaaatgggaagacggggaaaccatctgggctgaagtgaaggggatcagcggtcgtgaactggtgtccgctggcgctgagattgccgaagccactgttcgtgtatgggttcgctttcgccgggatattaccgccgcaaaccgcctgaaagtgctgaccggcccgctggctggcgcaacgctcaacatcatcgggccacctatccccgattctggcatgacccgccttgaaattctctgcaaacaggggactgagaaatga

SEQ ID NO: 28786 - DNA, 183 bp, Escherichia coli
atgagtgtgaataaaatcgaactggaaaacctgaaacgtgacctgaaggcaattattgatgcaggggtaagcccatctcacgcacttgaagcattaaggcttattgagcagcgcaggatcacttccagcctggaatacctgggatcaatcatggaacacgcgccgtggaatattaaaagctaa

SEQ ID NO: 28787 - DNA, 192 bp, Escherichia coli
gtgcgcaatcctcaaattaacgaccgctggaaggacaagcgcggcgaaatggtcacagtgaaagatatcgcctttaaccgggtgaaatttgtccgcgatggttacgaatttccctgcgtcttcccgctggaaaggttcgttaaagagttcactttcgttaactgggggttggaagatgaaaaacgcgcctaa

SEQ ID NO: 28788 - DNA, 225 bp, Escherichia coli
atggctagatccgtaccttttgaagtcctggtgcacgccgagaatgcgctttcagagagtgaaggcgcttatgagattttgagtatgtggcttgacagcatacccaatggcgtagagttccacggcgaagcgtgccgggtgagcgcaattatgtcgcttctgcatagcgcggtcagtgagctggttaaagctcgggaggcctacagtgcgcaatcctcaaattaa

SEQ ID NO: 28789 - DNA, 201 bp, Escherichia coli
atggctgatcaacagcatacccaaactcaccccaaatttacatggcgttttcttgccctgaaccgtctagacaaaaaggctaaaccttgccgcctgtccgtcgaggcagctaccgaacgcgaagcccgtcgcattctcgctccccacttcatcctttcgctggccgcacgtctgccggctgcggaggtgaaccatggctag

SEQ ID NO: 28790 - DNA, 186 bp, Escherichia coli
atggcagtagataacgtcaacaataaatcacaaaagatgagcgctcgcgttccacacgaaatagccagtagtgtagaaagcttaaaggagccaggagaaagcactgcgcaatttatcgtcacttcattgcagggcgagatcaaacgccggcagcgcaagaaagccaaggctgagccagaggaatga

SEQ ID NO: 28791 - DNA, 684 bp, Escherichia coli
atgaaaaagattaatgccctcaccgggcagggattcgctcaccctactgtcagtaaaagcgatattagcgtgcagcttaaacagcttcctgccgtcgaatttcatgggcaacgcgtggtgacgttctcaatgatcgataccgcgcaccagcgacctaaagacacggccaaaaagacttttcagcgtaaccgcactcgcttcattgatggtgaggacttttttattgtcggcgcgtcagaggtcgaatggggagatgctggatatttagacaggggcattaaacgccctggcaaaaaaatgaacagtccgatacgcggtcgcgtaacactgattacggaatcgggctatctgctgctgaccaaaccgtttaacgatgatttggcctggcaggtacagcgccagctcgtgaaagcttatttccgttgcccggaggttgtcaccttccaacacatcgagctgccgtcgctcaaggaactggcagctatgtcggttactgatgcgcaaaacgttgtcacccgtgccgggaagcattctaagcagcttcatggctcacagggcagtaatggaatgaacctccggaagaaggaactcaaagccctacgtcctgcagaacggctggtggatgcgatggggcagattggcttcgacgaatacgagtgggaggtacagcatgatcgcgcataa

SEQ ID NO: 28792 - DNA, 222 bp, Escherichia coli
atggtgatatttatgcgtatccatccatcagctcttatccttgaaaagtttactcgtgcagaagccgccgtgtatcttggggttaatacccagactctcgctaattgggccagcactggcagggtaaaaattccacatcataaagttggcaggaaagttatctatatgaagtctgatttggatagctatctcgattcaacgcgccgtgtacaaaccgtttaa

SEQ ID NO: 28793 - DNA, 630 bp, Escherichia coli
atgaaaaaaagaacattagaacagctggaagatgatttaaatttttatgagtcattcattaaagaatacatgtcagtaatagaaggacatggaaatccagagtttacaatgtcattcggtagacgtggtgagagaaaactaatttcctatgaagaaatgcagtcttattctcttgatgaaagatatgagttatccaaaaaaatacatactgatactttttggtgtgatgaggatgatactacaaaagctataagggttttgtatgttcttggttttagagatttggcatttgcggttcataaagtaagtgctgaacatgcaattaataaagattttagtgataaaattaacgaaatcaagcgacaggttagcttaaaaaaagtaaacagcaaaggtgggaaaaatagaaccagtcgccataaagttaccgctttacaaattgcctcatctacatggaaagaagttcccggagccagcatggaaagcctttcaagaaaaatttatgaacatttgaacaaaaaacacagggatactcctgagccagggacgatcaagacctggctcagaacgtcaggattgaatcctgaacaattaccgaaaattaaagactacgaactagttataaagtag

SEQ ID NO: 28794 - DNA, 369 bp, Escherichia coli
atggttacagttgtcagcaattattgtcaattatctcaaacccaactctgtcagacatttgcagaaaaatttactgtgaccgaggaattactgcagtctttaaaaaaaacagcgttatccggggatgaagaaagtattgagttactgcataacattgcgttaggttatgatgaatttgggaaaaaagctgaagatattctttaccatattgttagaaacccaacaaatgagaccctatcgattatccgacttattaaaaatgcctgtttaaaattatataatttggcacataccgcaaccacccccccctcaaatcacatgattcagatgatctcctgttcaaaaaactattctccccttcgaaattaa

SEQ ID NO: 28795 - DNA, 840 bp, Escherichia coli
atgacaattatcggtgaggacattcctcttatatcagaaaaacagtcgctttcaaaggtacttttaaatgataagaataatgaactgagcgatgggacaaacttctgggataaaaatcgtcaattaaccacagataaaatagcttgctatcttaaaaagatagccgcaaatgcaaaaaatactcaagtcaattatcctactgatttctacctccccaattccaacagcacttacctggaagtcgctctcaatgataatattaggagcgatccattatggccgaaagcagtccagttattccccataaatactggcggacactggatattagtttcgctacaaaaaatagttaatgaaaaaaataacacacaacaaataaaatgcatcatattcaattcattacgtgcactaggccatgaaaaagaaaattcacttaagcgtatcattaatagttttaattctgaactcatgggagaaatgtcgaataataatataacagatcatttaactgaacccgagataatatttttacatgccgatcttcagcaatacttaagccaaagttgcggtgcatttgtgtgcatggcagcccaggaagtgattgaacaaagggaaagcaattccgacagcgccctctatacgttattaaaaaactatgctgacagatttaaaaaatattcagcagaagagcagtacgaaattgattttcaacatcgacaggtaaacagaaattgttatttagataaatatggcgatgcaaatatcaatgattattatagagacttagaaataaaacactcacaaccccaaaatagagcatcaggcaaaagagtaagttaa

SEQ ID NO: 28796 - DNA, 810 bp, Escherichia coli
atgtttagtgctgaatcgccaattggtgtaatagactcaggtgtaggtggattgacatcggtaaaggaaataattaatttgcttcctggtgaagatattatctattgtggagataatatgaatgcaccttatggcaaccgttctgccgatgatatcatcagtttgactaaaaaaatgctgacttttttacagtcaaggaatgtcaaactagttgctgtcgcatgtaatactatatcctcaactttggaatccgaagaatacagcggatatgctaagagctttccgtttcctatcttatccatcattgaacctgcagtagaagatgtgattcgccagcaatataaaaatgttggtattatcgctaccgagtttactattaaaacggggtgtcacaaagagctaataaaaaaattgaactcaacaataaatgtatttggagaaccaagcaaaaatcttgcaatgttaattgaggaaggtaatcttaatgctcctgcaatcttgaatgacatcaaaaaacatgttaaccatttaatttccctccatccagtaaatgaaattattctcggctgtactcactatccaattgttcagaatttttttgaagcagttgcaccggatataaaatttattaatcctgcacatgatcaggctatctctattaaaaatcacttgggacagctaaatttattaaactcctcaaatataggaactttgcaaataaatactagtggaagtatggagatctacaaaacggtactaggggaattgagcattacgaaacctcatacattcagtatcaggcagttttaa

SEQ ID NO: 28797 - DNA, 1461 bp, Escherichia coli
atgtctaatgctaatatcgcacccaaaagtaagaaaatgacagtggggacactcgctatcatgaatataactgctgtagtaagtctacgatttataccttctgaagcagaatacggcttaggtgccattttttactatacctttgctgcaattatgtttttagtacctgttgcctttgttgcggctgagctagctacaacatatccacaaaaagggggggcatttcgatggataggagaagcatttggggctcgctggggttttgtaggaatgcttatgacctggctacaagtcatcccctactttccaacagtactgacatttggtgcagtctcggttgcatttattgatgttgatatgggggtggcagaatcaattgccagtaataaatggtatattttatttttcgtactatttgtttactggggagctatttgtgttgcattacgtggcgttggtattttctcgcaggtatctaagtggtgcggtattatagggacaattattccagctattatccttgttattcttggtttctcctatctgtggttcagcggtaaaccagcggtgatcccattaggttggggtgatcttttccctaatatagctaacttccagaatattgttcttgccgccagcatatttcttgcttatgcagggatggaaatgaatgcggtccatgttaacgatttagataatccaactaaaaaatacccaattgcaattaccatcgcttctataggtactattgcaatattcctgctcagtactttaggggtcgcctttattattcctacagataaaattagtctaactcaaagtttgttggttgcctacgatatgctgttcgaatgggctggagtgccatggcttggctctgtgatggcatttatgctagcaattggcgtactgggtggggtggttacttggattgcagggcctaatacaggtgtattagcgatcgcgaaagctggttatttacctaagtttttccaaaaaaccaatcgtcatggaatggggcaccatctaatgtttgtacaaggtataattgtctcagttctttctgttacttttgtgataatgccttcagttcaagcagcttttcagattttatcacagttaacagttatgctctatttagttatgtatatgctcatgttcgctagtgctatctatctacgacattctcaacctgatacaaaacgcccatatcgagcccctgctttatttttctgggcaacacttggattcttagggtcttttctggcttttgtattaagttttattccgcccgagcaaatcccaactggtagtccaaccagctatgttctttatttgttagtattagttgccctatttttattaattccaatattaatttacgccttccgaaaatctgactggaaagatccaaactctgatttcgaaccattttcttgggaaaaaagaactagtaattaa

SEQ ID NO: 28798 - DNA, 486 bp, Escherichia coli
atgaaaaataaatcaggtaattcttgttatagagaagcagtcaatattcatagctcacttgagctttcatttatattgcataaatatcatttgcgtgtagatgagaagaaatctcgaaatgtattcagcgccatacgtgatgagctcatccttgatggggattcacgacaaaacttagctactttctgtcaaacatggcttgatgatgaaatccgtgagttgcttaatttagctattgataaaaacatgatttataaagatgaatatccacaaatggcggaacctgaaggtcgctgtgtgcgtatgctttccgattcgtggagtttccccgattcgcgacacaccttaggttgctcaaccattggttcatctgaagctgctatgctcggccgcttggcgttaaaatggcagtggtgtaaaaaacgcgaagtacaaggtaaatcaaccgaacctgatttgcgatcctgtgcaaatatgctggcataa

SEQ ID NO: 28799 - DNA, 207 bp, Escherichia coli
atgaagcaagatattgcagacaggctggagatactcgaaggccagcgggcagaagcgaaacaactacgtaagcaggccagaagagcgcacaggaacaacgaagcagagttactaaccaaatacatcagtttcaccaattactgcatctacgagtgttacaaggaagatgcagaggactggctggattcattgccagaacagtactga

SEQ ID NO: 28800 - DNA, 135 bp, Escherichia coli
atgaacacaaacaagcaacaagcccagcggaccttcggaagacttcgagcaatcgccagctcaaaagacggtctggcagtgatggttatcatcgacagctttctgagctaccgcacagacacacagcagcagtaa

SEQ ID NO: 28801 - DNA, 774 bp, Escherichia coli
atgaatattttaccaaccgcctacgccccacggcaaggcgaatcactcggtaaacacagccttcagaaaatcgacgcgatcccggaagaagtacggagcgccattgatgatggcctgaatgatatccgctttaatggttatcgctgggaatgcaacgccaaaacaggctgggcgcgtgtatcaccgatttcatcacctgccgatgcagaacctgaatcaccagaacaaagccaggcaaacgcccgcgctgacttcctggcgttacaaggtgagtatttatcagtcacgcaggaaactaaaagcgagaagaaatcagctactgatatcgtgaacgagctacgcagtaaggccgctaaaacttcgcagacagcaccacagcaggaagcgccggaagaaccggaacaagcggaagccatgcaggataaagagacacaataccaaacggaagaaaaaggaatttattgcagctatgtctgtttgggtgcggcacgtaaggcatttgtcagaagtggttgcgagaataaagctaaagctacagcctggagcgtattatccagcattgcatcagcagcaagaaagcagaatgatggatcttatgtatctgaagtttgccaggcaaaaatagctgatgaatggggcatgaatcgccgcaccgtaattcgccagatgaaaatcctggttgagttaggactcattgagccatacggggaatatgttattggtcagcacgcaagaaaatacagaatgctttttcaggtcgagaacgcaagataa

SEQ ID NO: 28802 - DNA, 543 bp, Escherichia coli
atggaatgtcaaaaccgttctgataaatacatctggtctccccatgacgcctacttctataaaggactatctgaactgattgtggatatcgacagattaatttatctatcgctggagaaaatcagaaaagatttcgtgtttatcaatctcaatacggattctttaactgagtttataaaccgtgataatgagtggttatccgcggtaaaggggaaacaggtcgtattgattgcggccagaaagtcagaagccttagcaaattattggtattacaacagcaatattaggggcgtggtatacgctggactgagtcgtgatattagaaaagaactggcctatgtgattaatggcaggttcctgagaaaagatattaagaaagataaaatcactgaccgggaaatggaaattatccgcatgacggctcagggaatgctgcctaaatcgattgccagaattgaaaattgtagtgtgaagacagtgtatacccatcggcgtaatgctgaggccaagctgtactcaaaaatatataagttggttccgtaa

SEQ ID NO: 28803 - DNA, 276 bp, Escherichia coli
atgattaccaattatgaagccactgttgtaactaccgatgacattgttcacgaggtgaatctggaaggaaagcgcattggctacgtaattaaaacagaaaataaagaaaccccattcactgtggttgatatcgatggtccatcaggcaacgtaaaaacacttgatgaaggtgtcaaaaaaatgtgcctggtgcatatcggaaagaatctgcccgcagaaaaaaaagccgaatttctggcaactctaattgcaatgaaattaaaaggtgaaatctga

SEQ ID NO: 28804 - DNA, 339 bp, Escherichia coli
atgattgtcgtttctgtgttggcgatgtcgtctgctgcggtaagcgcagccgagggtgatgaatcagtaacgaccactgttaatggcggtgttattcattttaaaggtgaagtggtaaatgccgcttgtgcgattgattcagaatcaatgaaccaaacggttgagctgggtcaggtccgttcttctcgtctggctaaagcgggtgacctcagctccgccgttggcttcaatatcaagctgaatgattgtgataccaatgtttccagtaatgcagctgttgcattcctgggtactactgtcaccagtaatgacgacacattcccttacgctcacgcttaa

SEQ ID NO: 28805 - DNA, 333 bp, Escherichia coli
gtggagcgttttactctcgacgcgccgtttatcacccttgaacagcgtactgaaaacgggctgcgctgttgccgggttcgcttgcctgcggtgattgccgtgcgtcagtgcggtgaagtggccttgccagtaccgggaatgcgtcagcgaatggcggtggggaaagcagcaattatccgtaaaactgttgctgccgaatcgccagcgatgcagtgtctgcaactggcaagagcagagcaacaacgcggagcgacgctgattgatgggcaaacggtagcagaaaaagcgcaaaagctatggcaggactatttacgccaaaggatgcagccatga

SEQ ID NO: 28806 - DNA, 450 bp, Escherichia coli
atggaagaacaagcaaacaagattctcgtagaactactgcaaaaagccagtaatggaatagacgcggctgtttcatttagccaggcacagattcctgatgttgttcatcagttgctgctatggaatatggttgacagtctgattaaaacattaatggccattctaacaatcccactggttttctggtttatgaagaagcagtgccaaagagttgagacaggtaaaatcggtgatgaaggatattcatgggagaaaggaaatcccaaatacaggccgacaatggtttgggatagcaaaggtgatattaatcttcttatcatgccattggttggagttttgactctgtgggggatttttattattggtgtagtaaccaatatgacttggttaaaaatttggctggccccaaagctttaccttatcgaatatgcagcatcattggttaagtaa

SEQ ID NO: 28807 - DNA, 699 bp, Escherichia coli
atgcaggatatacagcaggaaacactcaatgagtgcactaaaacggagcaatccgcgctggtcgtgctctgggaaattgatctgacagaggtcggcggagatcgttatttcttctgtaatgagcagaacgaaaaaggtgaaccagtcacctggcaggggcggcagtatcaggcctatcccattcagggaagtggatttgagatgaacggcaaaggagccagtgcaaggccaacgctgaaagtctctaatctgcacggcatggtcaccgggatggcggaagacctgcagagtctggtcggcggaacggtggtcaggcgtaaggtttacgcccgttttctggatgtggtgaacttcgtcaacggaaacagcgaagccgatccagagcaggaggtgatcagccgctggcgcatcgagcagtgcagcgaactgagcgcggtgagtgcctcttttgtactgtccacgccgacggaaacggatggtgctgtttttccgggacgtaccatgctggccaacacctgcacctggacctatcgcggtgatgagtgcggttatcacggtccggcggttgcggatgaatatgaccagccgacgtccgatatcacgaaggataaatgcagcaaatgcctgagtggttgtaagttccgcaataacgtcggcaactttggcggcttcctttccattaacaaactttcgcagtaa

SEQ ID NO: 28808 - DNA, 660 bp, Escherichia coli; identical to SEQ ID NO: 28199

SEQ ID NO: 28809 - DNA, 717 bp, Escherichia coli
atgtcaaatacataccagaaaagaaaggcaagtaaagagtatggtttatataatcaatgtaagaaactaaatgatgatgaattatttcgcttacttgatgatcacaattccttgaaaaggatttcatctgccagagtattacagttaagaggtggtcaagacgctgttagattggcaattgagttctgctctgataaaaattatatccgtagagatatcggagcatttatactcgggcaaataaaaatttgcaaaaaatgcaaagataatgtgtttaatattttgaacaatatggcattgaatgataagagcgcttgcgttcgagctacggcaatcgagtcaacggctcagcgatgcaagaaaaacccaatttattcacctaaaatagtagaacaatctcaaattactgcttttgataaatcgactaatgtcagacgtgctacagcatttgctatttctgttatcaatgataaagcaacaattccactattgattaatctgttaaaagatccaaatggagatgtcagaaactgggccgcatttgcaataaatatcaataaatatgataatagtgatattagggattgttttgtggagatgcttcaggataaaaatgaggaagtccgtattgaagcaataatcggactttcctacagaaaagataaaagggttttatctgttttatgcgatgagttaaaaaaaaaatactgtttatga

SEQ ID NO: 28810 - DNA, 306 bp, Escherichia coli
atgaatatactatttacggaatcatcaccgaatataggtggtcaggaattacaggctgttgctcaaatgaaggccctgaagaaaatggggcattcagttctgcttgtctgcagggagaacagcaaaattgcttttgaagccagtaagtttggaattgatatcacattcgcgttatttcgaaacagtcttcacattcctactgtatggagattactcggaatagttcatagttttcagcccgatgcaatcgtttgtcacagtggacatgatagtaatattgttggtttggtacggttttttacctag

SEQ ID NO: 28811 - DNA, 678 bp, Escherichia coli
atgaagacacatctggagcaggaaggatgtcgaactcgggttactgttgtgcctcctggctttgatttccaggaattatacgttgattcccgaaacagtttgcctccgagtgttctttcctggctggcgtcccgaagaggatgccccgtaattgctcaggtaggaatgttgcgcccggaaaaagggcacgaatttatgttgaatttactgttccatttaaaaatgaatggacgacagttctgttggttgattgtggggtctggttcacctgaactgcgggaacatttacagtatcagattgacagtatgggcatgcatgatgatgtttttattgctgacaatgtttttcctgccgcccccgtatatcgggttgccagtctggtggttctgccttcagaaaacgaatcttttggtatggtgctggcagaagcatcggcattttctgtgcctgtagtggccactcagattggtggaatccctgaggttattcagaacaaccagaccgggacattgttaccagcaggtaataagcacgcatggatgtgcgccctgaatgatttttttaatgaccctgggcgtttttatcagatggctcgcctggcaaaacaggatatagaagagcggtttgatattaataaaactgcgttaaaaatactcacattagcgaagcaaaagtaa

SEQ ID NO: 28812 - DNA, 972 bp, Escherichia coli
atgtctaaatataacccaaatcagttttataaatttgatgtgcgaatctctcaactttcagaagaaattaacgcagcagcaagattgatttatatggtcatggtccatagctgtgacttctatgaagagaaatacaaatcatattcaccaagtattgaccatctcgcttatatggctggcgtatcaaagagaacagcaatcagagccattgagacacttgagaaacacggtttaattcaggtgcaaaagaatcaggggcgtcaaagcacttatcgtgtattcacactggatgataagccggaattacttgtaagacctacatcacaggaagttgcagcctcagtaagacaaaatgacaccactaccagtgacaaaatgtcatcagtaccagtgacaaaatgtcataggggtagtgacaaaatgtcacccgtgttagataagttattagataaaacattagataataatattatagataagagtaaagagactggacttaatgatgatattaaagaagatgactttctttctttggatgagttaaatgattttctttctgtgaatgaatctgaccttgatagtgaagttactaaagaggcttctaaaacatctgacttagatgaccttgaagtaagttctaaaaagacttctaaacaagacaaagaaatctctgatgtgattgctagtagtgaccataaaaacacacagtgccccgccactgatgatgagatggaccccttcgatgatgatgaagaggatgaagagtcagaacgtgaaaaagccattaagagggtagagaagaaaaagagattcgagcttgcaagacaaaagaacaaagtatcaggtttagacccattcgatgacagtgacgatgatgacttttctttcacaccaagaaagaaacaaactcaggatgacacgaagcaaaaaattaaaccgaagatgtattttgctggtggaggtatgtgctaa

SEQ ID NO: 28813 - DNA, 222 bp, Escherichia coli
atgaagaatgaaatactggaatttctgaacaggcatgatggagggaaaacggcagaaattgcggaggcgctggcagtaacggattatcaggcccgctattacctgttattactggaaaaagcaggtatggttcagcgctcaccattaagacggggcatggcaacatactggcttctgaaaggagagaagcaggcggggcagagttgttcttccacaacttaa

SEQ ID NO: 28814 - DNA, 561 bp, Escherichia coli
gtggccagatgtacagtggcgcgcctcatggcggttatgggacttgccggtgttctccggggtaaaaaggtccgcactaccgtcagccggaaagccgttgccgcaggcgaccgcgtaaaccgtcagtttgtggcagaacgtcctgaccagttgtgggtggctgattttacttacgtcagcacatggcagggcttcgtctatgtggcgttcatcattgatgtgtttgccggatacatcgtggggtggcgggtctcatcgtccatggaaacgacattcgtgctggatgcactggagcaggcgttatgggcccgccgtccgtccggcaccatccatcacagcgataaaggctctcagtatgtgtcactggcctatatggagcgattaaaagaagcaaaactgctggcatcaacaggaagtacaggcgactcgtatgacaacgcgatggcggagagcatcaatggtctttacaaagcggaggtaatacaccgtaagagctggaaaaaccgtgcagaagtggaactggccacactcacgtgggtggactggtataacaatcgatga

SEQ ID NO: 28815 - DNA, 468 bp, Escherichia coli
atgggactggcatctaaatatggacacttaaataatggcggatatggagcgagacccaacaaaccgcctacgcccgatccaagtaagttgccagacatagcgaaacaattaagactgccatatcctattgaccaggccagtagtgcgcctaatgttttcaaaacattcttcagagcattaagtccttacgattacacactgtattgcaggaagtgggtaaaacccaatctgacttgtacgccgcaggatgatccccagtatccagggatggagacaaagacagcaagtgattacctgccacagacaacttggccaacaactcaattaccaccaggatatacttgtgcagaaccctatttattcccagacattaataaacccgatgggccagcaacagcagggatagatgatttgggtgaaattttagctaaaatgaaacagagaacatcgagaggaataagaaaatga

SEQ ID NO: 28816 - DNA, 882 bp, Escherichia coli
atgatgcgaatcgcgctcttcctgctaacgaacctggccgtaatggtcgttttcgggctggtactgagcctgacagggatacagtcgagcagcgttcaggggctgatgatcatggccttgctgttcggttttggtggttccttcgtttcgcttctgatgtccaaatggatggcattacgatctgttggcggggaagtgatcgagcaaccgcgtaacgaaagggaacgttggctggtcaatattgtagcaacccaggctcgtcaggcggggatcgctatgccgcaagtggctatctaccatgcgccggacatcaacgcttttgcaaccggtgcgcgccgtgatgcctctctggttgctgtcagcaccggtttgctgcagaacatgagcccggatgaagccgaggcggtaattgctcatgaaatcagccacatcgccaatggtgatatggtcaccatgacgctgattcagggcgtggtgaacaccttcgttatctttatttcccgtattctggcgcagcttgccgcgggttttatgggcggaaatcgtgatgaaggtgaagagagcaacggcaacccgctgatctactttgcggttgcaacggttctggaactggtgtttggtattctggcgagcattatcaccatgtggttctcgcgtcatcgtgaattccatgctgatgccggttcggcaaaactggttggtcgcgagaaaatgattgccgcgctgcagcgcctgaaaaccagctatgaaccgcaagaagcaaccagcatgatggctttctgtattaacggtaagtcgaaatcgctcagtgagttgttcatgactcacccgccgctggataaacgtattgaagctctgcgtacgggtgaatacctgaagtaa

SEQ ID NO: 28817 - DNA, 444 bp, Escherichia coli
atggaagagccgtgcatctggttcagcggattctgcagccagggggacggagcctgttttgaagggcgctggcactggcagccagcgacaccccggaaaatcagggaatatgcccctcaggaccgtgagcttcatcgtatcgcggataccctgcatgcggtgcagaaacgtaacttctggcagcttcaggctgaaatcagtcaccggggacgttactgccatccgtacagcatggatatcaccgtcacccggaacagtccgactggtcaggcaatgacaaccgatgcggaagccgctgtcagcgaagccctgcgcgacctggccttctggctgtaccgccagctggaaaacaagtacgactggctgacctcagacaccgctgtggatgaggcccttctcatcaacgaatataccttcaccgaagccgatctgcgcgccggctga

SEQ ID NO: 28818 - DNA, 144 bp, Escherichia coli; identical to SEQ ID NO: 9158

SEQ ID NO: 28819 - DNA, 459 bp, Escherichia coli
atggggaacgaaaagagcttagcgcacacccgatggaactgtaaatatcacatagtttttgcgccaaaataccgaagacaggtgttctacagagagaagcgtagagcaataggcagtattttgagaaagctgtgtgagtggaaaagcgtacggattctggaagctgaatgctgtgcagatcatatccatatgcttgtggagatcccgcccaaaatgagcgtatccgggtttatgggatatctgaaagggaaaagcagtctgatgctttacgagcagtttggtgatttgaaattcaaatacaggaacagggagttctggtgcagagggtactacgtcgatacagtgggtaagaacacggcgaagatacaggattacataaagcaccagcttgaagaggataaaatgggagagcagttatcgattccctatccgggcagcccgtttacgggccgtaagtaa

SEQ ID NO: 28820 - DNA, 513 bp, Escherichia coli
atgggaataacccataaaagcgcccagcgtggcaattccttctggaatatcattacggctgtcgatccccactgtcattccaatcagcgtctgctcaaacccggccccgcatcggtggtgacattattacgggtgttatacgtcgccccccagacattattgttgtgtggactcgctttcattatgttcaaccgctcgcgaatactgtttagctcagcatcaaataccaacggtaatgttgctgccatattgagtacagctgccgtagaaggcgtgatgcgtttctccggaacgggtgtcggcgttggatcgggagtcgggtctggatttggatttggatttgggttcgggtttgggttcgggtttgggttcgggttcgggttcgggttcgggttcgggtttggatttggattcggatttgggtttggatttgggtttgggttcggatttgggttgacatcattagtcaggttccagttgctgttgccgtcgcttttcaggacatactcatag

SEQ ID NO: 28821 - DNA, 327 bp, Escherichia coli; identical to SEQ ID NO: 13453

SEQ ID NO: 28822 - DNA, 528 bp, Escherichia coli
gtgagcgagattgactatcagggactgcgtgaaaaagcagagaaagcaacgtgtggtgtgtggtcgctcgaatatggagagggccgatttgatggtgatgatgcactaattcatcgcgaggctgctggatatattcccatttgcagaattgaaggagcgcatcctgaaagcggtttcgatgaagatttccaaatggaacagcaggccaatgctgaattcatcgccgcagccagtccggctactgtgctgacgctgctggatgaacgggaaagaaaccagcaatacatcaaacgccgcgaccaggagaacgaggatattgcgctaacggtagggaagctgcgtgttgagctggaagccgcagagaagcgcattgcagaactggaagcacgggaaatatcgctcccagaacgtagcagcatgcttcatcgaacagattttcacgaggattaccaaacggtaatggcatacaaagtttctgaagtcatcgctgcaatccgcgccgctggcattcgcatcaaaggagagtga

SEQ ID NO: 28823 - DNA, 333 bp, Escherichia coli
atgaaattactcgtcttgaaactgctttacgcaatgctggggttaatgatgtgcgtgtgcctgatgacgttatcaggatgcagcgggaacgggcaaaagaaatcaatcagcgtgccagtgaaaattaccgtagaagccaccagcaaaccgcaggcaaatctgattgattataccccttgcatagtgccagaggacacgcctgtgctgttaaacaagtatccggcatacactgaacagttattcagcactatcgatgaatgcaaccaaagaaacgcactgaataacgaaagaaacagggagatttgggaagggaagggggatcaaggctcctga

SEQ ID NO: 28824 - DNA, 723 bp, Escherichia coli
atgaaagaacgcgggatgatttttaacgatgaaatggtccgggccatcctcgaaggaagaaaaacgcagactcgccgacctgtaaaaaatgtcagggccgataactgcctagttatccgtaaaccgacaaagaaacgcaatggtgtctatacccacgttatggatgcacctgaacatggtttatgcccgttcggtaacgttggtgatcgcatatgggtccgtgaagcgtgggcgatattaggcaatgaggatggttgcagtgtggactggaacgacaacctttgtcgtggcgatgagaagaacgcagcaaggatttatcgggccagttgcgagcaaaagcctggtgattacggcttatggtcgatacccgatgatgccgactggaaacctcacactgtgaatgaaaagtttgatggcgggtggtgtccatcaattcacatgccgcgatgggcatcacgcattctgttggagattaccaacgtgcgcgttgagcggttgaacgatatcagcgaatgcgatgcaggggctgagggcgttccgcctgctggaagtttgcttcctgattacccggaaacattccttactcccaagggggatttcgcaatggccaaggttgcgttccagcgtctgtgggaatccatctatggtgaagaaagctggaacactaatccctgggtatgggtaatcgagtttaagcgtattcagggggcaacctgtgagtga

SEQ ID NO: 28825 - DNA, 753 bp, Escherichia coli
gtgagcaaaattaactatcaagaactgcgtgaggcagcagaacgtgcaattccagaaatggagctgctgacgcttccatttgatgcttggttaagcaaacaggagcttaaagactacggtgtggatattgatgtcatcaacaccttcaggcttctggctggaccggaaaccatgctggaactgctggatgaaattaagcgccaggaagacacaaatattgatgccacgtgccgaatttcagagcttgagactattctagcgacgctggtggcagagaacgccgggctgagacacgtaatgaccacctccattgagcatgagaatgtggagattgagcaaacggcaggttgcccacgttttaagctgaaaggcaaagacagactgattgcagatcttagaaagcaacgtgccgaatggatacggaaagcattgcgttactctgaagaacgcgcagcattggctaaacgaatcgaagagatggagcaggccaacacaagacaggacgccaatataaaccaccagcaggagggcgtgacccaatcagtcacccgatacatatatcactacaacgcagtgaatggttctgactctatgtctggaattgcgcggttaagtttcatgatcaaatcacaatctgaccttgaagaacttaaaagcgcgcttaggaatattggtggtttccgtgcgaaagcaattacatctctttcatatcttgggcgtgaggaagaagggcaaaacgatgaaaaaccgtaa

SEQ ID NO: 28826 - DNA, 294 bp, Escherichia coli
atgtggcgcggtaataatcatggcagaagccatatgatacttaccgaatataagctagaccacaaaaccaataaatcgcgctcagtatatttgctccggcacaatagctgcgtaaggaataccgtgctggagcaaaatctgaccgttgaaatggataatttcgggaatttcaagccaacaatatcgcttgatgatttcccacgtggtttaagcgaaagagaagcaatgctgaaattagcagaatggctacaaagattgagtattgttattgaagataactggagtcaaccataa

SEQ ID NO: 28827 - DNA, 210 bp, Escherichia coli
atgaagcattttttaagactggcatttgttctggcgctatttgctcctccggctgcaatggctggagaacagcagcactgtgtaactgaatcagagaatcttgtaatagtcactcaatgcgatgacggaacggtgacagtggttaatgtaagaaatgaccgtgtagctgtatgccgtaaaggcgaaccatgcaaggaaataaaactatga

SEQ ID NO: 28828 - DNA, 798 bp, Escherichia coli
atgactaaaatcactaaatttcgcatatcagagattattgcacgcatcgaaatgtatggacacggcgctggatacacggcagatgaggtattggagcttgcccaaatagcgttagcaacctgcaaagacggtgagagtataaagctgattgacttgttggtgctggagctgccaaagcgtggagggtggcctgatgatgtgctcgattgtcgcatggttagagaggactgctgtgaaccatcatatggtttctttgcttttggctctgatccagcgaaaagcccgcgtgggcgcaatttttgccttgaggtcaggcttccgataagtaaccttgatcgcgaggaatacacggaaataatttcgcgcaaacaatacgaagaggctcttgaagcatccaataagttaaattttgagcaatggctggggcaacaacgcgaaaaaatcgacctggactgcggttgtgtgtctactgaaacattcatgcactggctgcgggtagcctatgaatctggcaaccgtctggatactcatccacaagaggtgccgaagccaagagtaagcacaactctggaaaggagctatcttgaaactgcattaaagattaaggcaggccatacgctaggcgtcattgatgccatgttggttcatgaaatggcgaaggctttactaccagaaattcccgcgaatacgcctacgcaagttctggcgctaatgaacaaacacaatctgcccagggaagcattctggtgctttgaccatgaacagtggagatactcatgctatgaatgccggtattaa

SEQ ID NO: 28829 - DNA, 390 bp, Escherichia coli
atgggcttcccttctcctgcggcggattatgcagagagccgtatttctcttgatcagcaactaatcagacatccttcagcaacctacttcatgcgggcggcagacagccatcaccgtgagggaatattgcaaggtgctttgctggtggttgattcctcacttactccggttgatggttcactgcttatatgcgctatggagggggaatatcgcgtaaaaagataccggaagtatccgcgccagcacctggaggatttaagaaccgggaagaaagaggcgttaccagtagatgacgatggatacacgggcagtaatgctgtttttggtgtgatcactcatgtcatcaatgatgcccgaagtggggaatttgatgattgtccggtgatttaa

SEQ ID NO: 28830 - DNA, 1101 bp, Escherichia coli
atgctgacgcctaaaaacatcaccgaattaccagagtggagagagctggtaagcaaatatagccatgactgggcattagcagcagaagagttgatgggtgttaagttaacccaccagcaaaagctaattgttgaggcgattcaacaaaaaggttcagcagtcagcgtcaccactcctgaagggataggccaaaagacggttatcgctataattagtattctttatacaatcctgatgcctgagtctaaaacggttattgtttccccaaagttctataattgtcgcaggcaagttatccaatacataagtacgtattgggatagagtcagtaacagaatcccattgctgagagaatattttaaagtcgatggaaacggcatcaatcatcgttaccgggaatattggggctgcgaaattaagccatatcaccgaaattatgaggaaggtttcggtggatattatgctgaacatcttttaatcattgttacggaggcggctcttgctggcgatcggctattcagcatgttaagagcatcgttagtaagtgacgattcacgtatacttttaatgtccgctccttcagaggaggagcatggacacttttacgattcccatcatggtcgtgctaaatcagaagaaaatccatgtggtatttatacagccatcaagctgaacgccgaagatacccccattatttctcaaggttatcttgataacattgcagaaatatatggtggtaaaaacagcgattactaccgtcgtatggttcttggtgagtttcctggtattagggaggctgttcttgaatcagatatgccgaagacaatgcgcttttcgatgcctgatggtagtgaatggataatgccattacgagtgatagcccggcatcatgcacagcaccacgccaaaaaacatggcgttacaacattggagtggttgaaatcgcacaccattccactcttcactgcagatcacaatgctatcgttgagtgggcaaaaacaattccgtgggagaatgttgctgaatacgcccacatgctaaaaccgccgaaagacaggcaagaaattagctggctgacagcagaaaaaatcattgagtga

SEQ ID NO: 28831 - DNA, 474 bp, Escherichia coli
atgaaaaaaacaatattagcggctattgtttgtgcatttgcattatcaggatgtgcgcctattcaaaagcaagtcgtaaaacgccctgcatttcccgtagaagagtaccaggcattgccgaaagaaggcactggcaaggttaagggggagttatttggtatgacgcgtggcggcgatgtgaagattggggctggttctaaaattactctccgcccatatacgacgtatatcaaaaacaccccacaaattaattacaatacgcagatcttggaaacaatcgatggccgggctgtggaatatgacaaaactgtcctgacagatgctcaaggcaaatttgaatttgaaaacgtaccaccaggccaatatgaggtgtttggttcgttcagttggtatgcagggaattatccgcaagttattattctggatgaaatcatcaccgttaagaacggggatgttatccaggtacaaccatga

SEQ ID NO: 28832 - DNA, 384 bp, Escherichia coli
gtgccagttaatagttccgattttatcgctttcgcaaaagattgtgaaaagcgtaacgacgaaattggttacagaaacgctgtcgcacgtgcgtattatggtgcttatcaccacgtacttccgtgtttgaccatggggccgaaagaaagtcaccaaggcctcattgactatcttgttaacgatgcttggaagggtaacgaaccttttgaaaaaagagacttaattggtttggggtatgctcttcaatcgcttaaggatcagagaatagtttgtgattacagacttaacgacactattacgccaacccaatcaagcaccgcgattaagactgcagagaaattaatccagcgttgcgctaatatgaccaagtctaaagcgtcctaa

SEQ ID NO: 28833 - DNA, 768 bp, Escherichia coli
atgccacagccggcgctaaaagcgaacgaaatcagcagtgaattaatcgatattcttgcggctcggaatacgatatccgaaatgcaatattttcgttatatcagagatatagaaaagttgcgcgacagcgcatctgaggactatctcaaagcgttggctaatggtgcttttgggcgtaaagatactgcagttgcattctttgaagaagcattgaagcataacaacctgatcattgctcaaaattatgtagtttatctcaacgattacggcagcttccgtgaagttgaacaagtggtaaatcgattagttgaacgttataactcccctacgatgctgtcccatgcatgggaagctaacttgttcttggggcgtattgacaaagcgctctactatgctgagagattgataagtatggtagatgaaaaggaggctgaattggttaagcacctcgcagccacagcactggcccaatccacgaccttcaaaagtgcaactggaattactgatgaagaactacaggatattgcaaaccgcatagtggatatcatggctgaccataaagttagtcctgttgctatgtctttctgctctatccctgaagagcgtacgtcatcatatgtcatggcagttaatactgaagattctgatgttctctctgatatgaacttggatatagcattttctcttgcagaaaatgaaagtttgattggaaaacccttcagcgtatggtttgaagggcgtttggaggaacctgcgcgtgccagttaa

SEQ ID NO: 28834 - DNA, 234 bp, Escherichia coli
atgtgtcgcggtctgtttatcgaattaaatgcagatataaaaaaaccaaccgtaaaggttggttttttttgggatttttggtcggcacgagaggatttgaacctccgacccccgacaccccatgtcaccgcgcctgaaacgctggagaccgcgccattgctgggctggcagggtgtttcactgtgtgcgcaaacagtgcataattcgcaaaattcacgctatatacatcaatga

SEQ ID NO: 28835 - DNA, 390 bp, Escherichia coli
atgcacactgagtatatatggcgatatcttgacatagagaagttctctatgttactcgaacaaaatgctttatttttttgctcagcaaaaaattttgaagatccgttcgaaggtgaatttgcttggggacatactggctataaaaaattcattgagacacaggaaaaactatgcgctactcatggtgccggcatggacttagagcctttcatggcattcaatttaaagacacttaaggaaataagcgagaggacatatataagttgctggcattgtaacgaacatgaatctgaagctatgtggaagctgtattgtaaaaaccccgctaaaggcgttgtcataaaatcaaagaaaaaaacctccaaagccaacttgaaaataataatctaa

SEQ ID NO: 28836 - DNA, 1203 bp, Escherichia coli
atgtctcttcgtttcagacaaacctttactttatttcctggcgttcgactcaacattggcaagcgtggaataagtgcaagcattggtatgcctggcgcaactgtcaatgttggtaaaaaaggggttagagcaactgtcggattaccgggcacaggcttatcttatactacacctaccttgccctatgatgatggatactcagttaccaatccattaaatccagcccctacagaacctcatttggggtctgggtcatctccagaaaacacaccatcgaacgctaaaatatatatgcctgtagctggcatgaatgaaatatccagcgcttcggtagaagtccttacaagtacctcccttttacctttacgagatttgattgctaaagcacgagaacaaagagcagagataaaagcagatcttcaagaggctcttgccgaagaatcaaaacaaaaaagcgagctggctcgacgcaaatcaagtctattccgttggttttacaaacgacgcatcgcagaacttgagacactactccccctaacccaagctgagatatctcgcctagtttcatgggaagacagcacaaaaatagccataacattcgagagcagtgatgcttcacagcgcgcatatgcagcgatggtccatgcatttgatatgttaaaatcgagtgtcaaaaaatgggatattactgcagataaagctacagaccagtttgctgaaagaacattagcaacccggtctgttaatcgtcacccagttacctttgattttagttcaacggatctcattcaatttacagggcgtgcgatgaggtttgaaaatgcaaatggagacgatattttgctttatcctggagttgcagtcataccacgagccgatggagcattcgctctgattgatttacgcgaattacaaattagttcagaatatctaagattccatgaggaagaaggtgttcccagtgactcacgcatagatggttatacatgggcgaaaacgaataagaatggctcaccagaccgtcgttttaaagacaactaccaaatccctatttgcatttatggaaatattactttccattctcaaacaggggtaactgaagaatatatggtatcaaatgcagatgccgcgcacgcctttgctgaggcagtaaaacgctatcagatttcactcacagaaacagaagcgttggtacaagcctaa

SEQ ID NO: 28837 - DNA, 207 bp, Escherichia coli
atgccaaacggcgctgtggacgcgttaaaggaagaattaactcgacgcatcagtaagcgttatgacgatgtagaggtgatcgtaaaagccaccagcaacgatggcctttctgttacacgcactgccgataaagattcagctaaaacttttgttcaggagactctgaaagatacctgggaatctgctgacgagtggtttgttcactaa

SEQ ID NO: 28838 - DNA, 2070 bp, Escherichia coli
atgtctgagaaaacttttctggtggaaatcggcactgaagagctgccaccaaaagcactgcgcagcctggctgagtcctttgctgcgaactttactgcggagctggataacgctggcctcgcacacggcgccgttcaatggtttgctgctccgcgtcgtctggcgctgaaagtagctaacctggcggaagcgcaaccggatcgtgaaatcgaaaaacgcggcccggcgattgctcaggcgttcgacgctgaaggcaaaccgagcaaagcggcagaaggctgggcgcgtggttgcggtattaccgttgaccaggctgagcgtctgactaccgataaaggcgaatggctgctgtatcgcgcccacgtgaagggcgaaagcaccgaagcactgctgccgaatatggttgcgacttcgctggcgaaactgccgatcccgaaactgatgcgttggggcgcaagcgacgtgcacttcgtgcgtccggtgcacaccgtgaccctgctgctgggcgacaaagttattccggctaccattctgggcattcagtccgatcgcgtgattcgcggccaccgctttatgggcgagccggaattcactatcgacaatgccgatcagtatccggaaattctgcgtgagcgcgggaaagtcatcgccgattacgaagaacgtaaggcgaagattaaagccgatgccgaagaagcggcgcgtaagattggcggtaacgctgacttaagcgaaagcctgttggaagaagtggcttcgctggtggaatggccggttgtgctgaccgcaaaattcgaagagaaattccttgcggtgccgtctgaagcgctggtttacaccatgaaaggtgaccagaaatacttcccggtgtatgcgaacgacggcaaactgctgccgaactttatcttcgttgccaatatcgaatcgaaagatccgcagcaaattatctctggtaacgagaaagtcgttcgtccacgtttggcggatgccgagttcttcttcaacaccgaccgtaaaaaacgtctggaagataacctgccgcgcctgcaaaccgtgttgtttcagcaacagctgggtacactgcgcgacaaaactgaccgcatccaggcgctggctggctggattgctgaacagattggcgctgacgttaaccacgcaacccgtgcgggcctgctgtccaagtgcgacctgatgaccaacatggtcttcgagttcaccgacacccagggcgttatggggatgcactacgcgcgttacgatggcgaagcggaagatgttgcagtggcgctgaacgagcagtatcagccgcgctttgccggtgatgacctgccgtctaacccggtagcctgtgcgctggcgattgctgacaagatggatactctggcgggtatcttcggtatcggccagcatccgaaaggcgacaaagacccgtttgcgttgcgtcgtgccgcacttggcgtactgcgtattatcgttgagaagaacctcaaccttgatctgcaaacgctgaccgaagaagcagtgcgtctgtatggcgataagctgactaatgccaacgtggttgatgatgttatcgactttatgctcggtcgcttccgcgcctggtatcaggacgaaggttacaccgttgacaccatccaggcggtactggcgcgtcgtccgactcgtccggcagatttcgatgcccgtatgaaggcggtatcgcacttccgtaccctggatgcagctgctgcactggcggcggcgaacaaacgtgtatctaacattctggcgaagtctgacgaagtgctgagcgatcgcgtgaatgcttctactctgaaagagccggaagaaattaaactggcgatgcaggtggttgtgctgcgcgataaactggagccgtactttgctgaaggtcgttaccaggatgcgctggtcgaactggctgagctgcgtgaaccggttgatgccttcttcgataaagtgatggtcatggttgatgacaaagaattgcgtatcaaccgtttgaccatgctggagaaactgcgcgaactgttcctgcgcgttgcggatatttcgctgttacagtaa

SEQ ID NO: 28839 - DNA, 912 bp, Escherichia coli
atgcaaaagtttgataccaggaccttccagggcttgatcctgaccttacaggattactgggctcgccagggctgcaccattgttcaaccattggacatggaagtcggcgcgggaacctctcacccaatgacctgtctgcgcgcgctggggccagaaccgatggcggctgcttatgttcagccttctcgtcgcccaaccgatggtcgctacggcgaaaaccccaaccgtttacagcactactatcagttccaggtggtcattaagccatcgccggacaatattcaggagctgtaccttggttctctgaaagagctgggcatggacccgaccatccacgacatccgtttcgtggaagataactgggaaaacccgacgctgggtgcctgggggctgggctgggaagtgtggctgaacggcatggaagtgacgcagttcacttacttccagcaggttggtggtctggagtgtaaaccggttaccggcgagatcacctacggtctggaacgtctggcaatgtacattcagggcgtagacagcgtttacgacctggtctggagcgacggcccgctgggtaaaaccacctatggcgacgtgttccatcagaacgaagtggagcagtccacttacaacttcgaatacgcggatgtggacttcctgttcacctgcttcgagcagtacgagaaagaagcgcagcagctgctggcgctggaaaatccgctgccgttgccagcctacgagcgtattctgaaagccgcccacagcttcaacctgctggatgcgcgtaaagccatctccgtcactgagcgtcagcgctatattctgcgcattcgcaccctgaccaaagcagtggcagaagcatactacgcttcccgtgaagccctcggcttcccgatgtgcaacaaagataagtaa

SEQ ID NO: 28840 - DNA, 309 bp, Escherichia coli
atgatgatgaactctttctttccggcaatggcacttatggtgcttatggcgctagtgggttgttctacaccgccacccgtgcagaaagcacaacgggtaaaggttgatcctctgcgttcgttgaatatggaagggctatgcaaagatcaggcggcaaaacgctataatacaggtgcgcaaaaaatcgacgtcaccgcatttgaacagttccaggggagctacgaaatgcgcggttataccttccgtaaagagcagtttgtctgttcttttgacgcagatggccattttttgcatctttccatgcgttaa

SEQ ID NO: 28841 - DNA, 996 bp, Escherichia coli
atgcagcccaaaatttactggattgataacctgcgagggatagcgtgtttaatggtggtgatgattcacaccactacctggtatgtgaccaatgctcatagtgttagccccgtcacatgggatatcgccaatgttctgaattctgcctctcgtgtcagcgtgccgctatttttcatgatttccggctatctcttttttggcgaacgcagcgcccagccgcgccatttcttgcgtatcggcttatgtctgcttttttatagcgcaatcgcactgctctacattgcgctgtttacctccatcaatatggagttagcgctgaaaaacctgctgcaaaagccagtgttttaccacttgtggtttttcttcgcgattgcggtgatttatctggtttcaccgctgattcaggtgaagaacgtcggcggaaaaatgttgctggtgctaatggtggtgattggcattatcgctaacccaaacacagtgccgcagaaaattgacggttttgaatggctgccaattaacttatatatcaatggcgatactttttactacatcctgtatggcatgttgggccgcgctatagggatgatggacacacagcataaagcactgtcgtgggtgtgcgccgcactgtttgcgacgggggtttttattatctctcgcgggacattatatgaattgcagtggcgcggaaattttgccgatacctggtatctttactgtgggccgatggtttttatctgcgcaaccacgctattgactctggttaaaaacacgcttgatacgcgtactgttcgcggacttggcttaatctcccgccattcgttgggtatatacggattccacgccttgattatccatgcactgcgcacccgggggattgagcttaaaaactggccaatactcgatattatttggatcttttgcgcgacgttggcagcgagtttgttactttctatgctggtacaacgaatcgacagaaacagactagtgagttaa

SEQ ID NO: 28842 - DNA, 438 bp, Escherichia coli
atggacaacaaaatatcaacctattctccggcattcagtattgtgtcatggatagctctcgttggtggtatcgttacctatctgttagggctatggaatgcagagatgcagttaaatgaaaaaggatattattttgccgtactggtattaggactgttttctgcggcgtcttatcaaaagaccgttcgggacaagtatgaaggcataccgaccacctccatttattatatgacctgcctgactgtctttattatctctgttgcgttactgatggtaggtctgtggaatgcgacgttattactcagcgagaaaggtttttatggactggctttcttcttaagcttgtttggtgcagtagcggtgcagaagaatattcgtgatgccggaataaacccaccaaaagaaacacagattacccaggaagaatacagcgaataa

SEQ ID NO: 28843 - DNA, 342 bp, Escherichia coli
atgaaaacctcaaagactgtggcaaaaatattatttgttgtcggggcgctggtttatctgcttgggctatggatctcatgcccattgttaagtggaaaaggctattttcttggcgtgttaatgacggcaacttttggcaactatgcatatcttcgcgcagaaaaactcgggcaactggatgatttttttacccacatctgccagttagttgcgttaatcactatcggtctcttgtttatcggtgttttaaacgcacctatcaatgcttatgaaatggtgatctaccctatcgccttttttgtctgcttgtttggtcaaatgcgtttgtttcgcccggcatga

SEQ ID NO: 28844 - DNA, 1455 bp, Escherichia coli
atgtatatcgggatagatcttggcacctcgggcgtaaaagttattttgctcaacgagcagggcgaggtggttgcttcgcaaacggaaaagctgaccgtttcgcgcccgcatccactctggtcggaacaagacccggaacagtggtggcaggcaactgatcgcgcaatgaaagccctgggcgatcagcattctctgcaggacgttaaagcattgggtattgccggccagatgcacggtgcaaccttactggatgcccagcaacggttattacgccctgccattttgtggaacgacgggcgctgtgcgcaagagtgcgctttgctggaagcgcgagttccgcaatcgcgggtgattaccggtaacctgatgatgcccggatttactgcgcctaaattgctatgggttcagcggcatgagccggagatattccgtcaaatcgacaaagtattgttaccgaaagattacttgcgtctgcgtatgacgggggagtttgccagcgatatgtctgacgcagctggcaccatgtggctggatgtcgcaaagcgtgactggagtgacgtcatgctgcaggcttgccacttatctcgtgaccagatgcccgcattatacgaaggcagcgaaattactggtgctttgttacctgaagttgcgaaagcgtggggtatggcggcggtgccagttgtcgcaggcggtggtgataatgcagctggtgcggttggtgtaggaatggttgatgctaatcaggcaatgttatcgctggggacgtcgggggtctattttgctgtcagcgaagggttcttaagcaagccagaaagcgccgtacacagcttttgccatgcgctaccgcagcgttggcatttaatgtctgtgatgctgagtgcagcgtcgtgtctggattgggctgcgaaattaacgggcctgaacaatgtcccagctttaatcgcggctgctcaacaggctgatgaaagtgccgagccagtttggtttctgccttatctttccggcgagcgtacaccacacaataatccccaggcgaagggggttttctttggtttgactcatcaacatggccccaatgaactggcgcgagcagtgctggaaggcgtgggttatgcgctggcagatggcatggatgtcgtgcatgcctgcggcattaaaccgcaaagtgttacgttgattggtggcggggcgcgtagtgagtactggcgtcagatgctggcggatatcagcggtcagcggctcgattaccgtacggggggggatgtggggccagcactgggcgcagcaaggctggcgcagattgcggcgaatccagagaaatcgctcattgagttgttgccgcaactgccgttagaacagtcgcatctaccagatgcgcagcgttatgccgcttatcagccacgacgtgaaacgttccgtcgcctctatcagcaacttctgccattaatggcgtaa

SEQ ID NO: 28845 - DNA, 1323 bp, Escherichia coli
atgcaagcctattttgaccagctcgatcgcgttcgttatgaaggctcaaaatcctctaacccgttagcattccatcactataatcccgacgaactggtgttgggcaagcgtatggaagagcacttgcgatttgccgcctgctactggcacaccttctgctggaacggggcggacatgtttggtgtgggggcgtttaatcgtccgtggcagcagcctggtgaggcactggcgttggcgaagcgtaaagcagatgtcgcatttgagtttttccacaagttacatgtgccattttattgcttccacgacgtggatgtttcccctgagggcgcgtcgttaaaagagtacatcaataattttgcgcaaatggttgatgtcctggcaggcaagcaagaagagagcggcgtgaagctgctgtggggaaccgctaactgctttacaaaccctcgctacggcgcgggtgcggcgacgaacccagatcctgaagtcttcagctgggcggcaacgcaagttgttacagcgatggaagcaacccataaattgggtggtgaaaactatgtcctgtggggcggtcgtgaaggttacgaaacgctgttaaataccgacctgcgtcaggagcgtgaacaactgggccgctttatgcagatggtggttgagcataaacataaaatcggcttccagggtacgttgcttatcgaaccgaaaccgcaagaaccgaccaaacatcaatatgattacgatgctgcgacagtctatggcttcctgaaacagtttggtctggaaaaagagattaaactgaacattgaagctaaccacgcgacgctggcaggtcactctttccatcatgaaatagccaccgccattgcgcttggcctgttcggttctgtcgacgctaaccgtggcgatgcacaactgggctgggataccgaccagttcccgaacagtgtggaagagaatgcgctggtgatgtatgaaattctcaaagcaggcggtttcaccaccggcggtctgaacttcgatgccaaagtacgtcgtcaaagtactgataaatatgatctgttttacggtcatatcggcgcgatggatacgatggcgttggcgctgaaaattgcagcacgcatgattgaagatggtgagctggataaacgcatcgcgcagcgttattccggctggaatagcgaattaggccagcaaatcctgaaaggccaaatgtcactggcagatttagccaaatatgctcaggaacacaatttgtctccggtgcatcagagtggtcgccaggagcaactggaaaatctggtaaaccattatctgttcgacaaataa

SEQ ID NO: 28846 - DNA, 993 bp, Escherichia coli
atgaaaataaagaacattctactcaccctttgcacctcacttctgcttaccaacgttgcggcacacgccaaagaagtcaaaataggtatggcgattgatgatctccgtcttgaacgctggcaaaaagatcgagatatttttgtgaaaaaggcagaatctctcggcgcgaaagtatttgtacagtctgcaaatggcaatgaagaaacacaaatgtcgcagattgaaaacatgattaaccggggcgtcgatgttcttgtcattattccgtataacggtcaggtattaagtaacgttgtaaaagaagccaaacaagaaggtattaaagtattagcttacgaccgtatgattaacgatgcggatatcgatttttatatttctttcgataacgaaaaagtcggtgaactgcaggcaaaagccctggtcgatattgttccgcaaggtaattacttcctgatgggcggctcgccggtagataacaacgccaagctgttccgcgccgggcaaatgaaagtgttaaaaccttacgttgattccggaaaaattaaagtcgttggtgaccaatgggttgatggctggttaccggaaaacgcattgaaaattatggaaaacgcgctaaccgccaataataacaaaattgatgctgtagttgcctcaaacgatgccaccgcaggtggggcaattcaggcattaagtgcgcaaggtttatcagggaaagtagcaattttcggccaggatgcggatctcgcaggtattaaacgtattgctgccggtacgcaaactatgacggtgtataaacctattacattgttggcaaatactgccgcagaaattgccgttgagttgggcaatggtcaggaaccaaaagcagataccactctgaataatggtctgaaagatgttccctcccgcctgctgacaccgatcgatgtgaataaaaacaacatcaaagaaacggtagttaaagacggattccacaaagagagcgagctgtaa

SEQ ID NO: 28847 - DNA, 1182 bp, Escherichia coli
atgtcgaaaagcaatccgtctgaagtgaaattagccgtaccgacatccggtggcttttccgggctgaaatcactgaatttgcaggtcttcgtgatgattgcagctatcatcgcaatcatgctgttctttacctggaccaccgatggtgcctacttaagcgcccgtaacgtctccaacctgttacgccaaaccgcgattaccggcatcctcgcggtaggaatggtgttcgtcataatttctgctgaaatcgacctttccgtcggctcaatgatggggctgttaggtggcgtcgcggcgatttgtgacgtctggctaggctggcctttgccacttaccatcattgtgactttggttctgggactgcttctcggtgcctggaacggatggtgggtcgcgtaccgcaaagtcccttcatttattgtcaccctcgcgggcatgttggcatttcgcggcatactcattggcatcaccaacggcacgactgtttcccccaccagcgccgcgatgtcacaaatcgggcaaagctatctacccgccagcaccggcttcatcattggcgcgcttggcttaatggcttttgttggctggcaatggcgcggaagaatgcgccgtcaggctttgggtttgcagtctccggcttctaccgcagtagtcggtcgccaggctttaaccgctatcatcgtattaggcgcaatctggctgttgaatgattaccgtggcgttcccactcctgttctgctgctgacgttgctgttactcggcggaatgtttatggcaacgcggacggcatttggacgacgcatttatgccatcggcggcaatctggaagcagcacggctctccgggattaacgttgaacgcaccaaacttgccgtgttcgctattaacggattaatggtagccatcgccggattaatcctcagttctcgacttggcgctggttcaccttctgcgggaaatatcgccgagctggacgcaattgcagcatgcgtgattggcggcaccagtctggcaggcggcgtcgggagcgtggccggagcggtaatgggggcattcatcatggcttcactggataacggcatgagtatgatggatgtaccgaccttctggcagtatatcgttaaaggtgcgattctgttgctggcagtatggatggactccgcaaccaaacgccgttcttga

SEQ ID NO: 28848 - DNA, 1179 bp, Escherichia coli
atgtttactaaacgtcaccgcatcacattactgttcaatgccaataaagcctatgaccggcaggtagtagaaggcgtaggggaatatttacaggcgtcacaatcggaatgggatattttcattgaagaagatttccgcgcccgcattgataaaatcaaggactggttaggagatggcgtcattgccgacttcgacgacaaacaaatcgagcaagcgctggctgatgtcgacgtccccattgttggggttggtggctcgtatcaccttgccgaaagttacccacccgttcattacattgccaccgataactatgcgctggttgaaagcgcatttttgcatttaaaagagaaaggcgttaaccgctttgctttttatggtcttccggaatcaagcggtaaacgttgggccactgaacgcgaatatgcatttcgtcagcttgtcgccgaagaaaagtatcgcggagtggtttatcaggggttagaaaccgcgccagagaactggcaacacgcgcaaaatcggctggcagactggctacaaacgctgccaccgcaaaccgggattattgccgttactgacgcccgggcgcggcatattctgcaagtatgtgaacatctacatattcccgtaccggaaaaattatgcgtgattggcatcgataacgaagaactgacccgctatctgtcgcgtgtcgccctttcttcggtcgctcagggcgcgcggcaaatgggctatcaggcggcaaaactgttgcatcgattattagataaagaagaaatgccgctacagcggattttggtcccgccagttcgcgtcattgaacggcgctcaacagattaccgctcgctgaccgatcccgccgttattcaggccatgcattacattcgtaatcacgcctgtaaagggattaaagtggatcaggtactggatgcggtgggcatatcacgctccaatcttgagaagcgttttaaagaagaggtgggtgaaaccatccatgccatgattcatgccgagaagctggagaaagcgcgcagtctgctgatttcaaccaccttgtcgatcaatgagatatcgcaaatgtgcggttatccatcgctgcaatatttctactctgtttttaaaaaagcatatgacacgacgccaaaagagtatcgcgatgtaaatagcgaggtcatgttgtag

SEQ ID NO: 28849 - DNA, 825 bp, Escherichia coli
atgattttgactcccatacgacgatatggggcgatgattcttatgttactcactctggtgttttcgagtgaggtgttagcgaagacgcacacaacaacagcgagtcaaaagtcccacttaactaaagctagtaataaacaggtaagcagtaaacaagagtattctcgcaatagtgcaaagagtagttcacttcctgatttgcgaaaatacccttccggaacaccaaggaaaaaggcgtttctccggactgtgatgccttacattaccagccaaaatgcggccattactgcggaacgtaactggctgatttcaaaacagtatcagggccaatggtcacctgctgagcgtgcgcgtctgaaagacatcgccaaacgctacaaggtgaagtggtctggtaatacgcgaaaaatcccgtggaataccttgcttgaacgcgtagacattatccccaccagtatggtagcgacgatggctgcagcagaaagcggttggggaacgtcgaagctggcgcgcaacaacaacaatctgttcggcatgaaatgcatgaaaggacgttgtactaatgcgccgggtaaagtgaaggggtactcacagtttagttctgtcaaagaatcggtgagcgcctatgttactaacctgaatacgcatccggcttactcttcgttccgtaaatcgcgtgcacagctgcgtaaagcagatcaggaagtgactgccacagcgatgattcacaagctgaagggctactcgaccaaagggaagagttataacaactacctgttcgcaatgtaccaggataaccaacggttaatcgcggcacatatgtaa

SEQ ID NO: 28850 - DNA, 2031 bp, Escherichia coli
atgaaactcgccgcctgttttctgacgctccttcctggcttcgccgttgccgccagctggacttctccggggtttcccgcctttagcgaacaggggacgggaacatttgtcagccacgcacagttgcccaaaggtacgcgtccactaacgctaaattttgaccaacagtgctggcagcctgcggatgcgataaaactcaatcagatgctttccctgcaaccttgtagcaacacgccgcctcaatggcgattgttcagggacggcgaatatacgctgcaactagacacccgctccggtacaccaacattgatgatttccatccagaacgccgtcgaaccggtagcaagcctggtccgtgaatgcccgaaatgggatggattaccgctcacactggatgtcagcgccactttcccggaaggagccgccgtacgggattattacagccagcaaattgcgatagtgaagaacggtcaaataacgttacaacccgctgccaccagcaacggtttactcctgctggaacgggcagaaactgacgcccctgccccttttgactggcataacgccacagtttactttgtgctgacagatcgtttcgaaaacggcgatcccagtaatgaccagagttacggacgtcataaagacggtatggcagaaattggcacttttcacggcggcgatttacgcggcctgaccaacaaactggattacctccagcagttgggcgttaatgctttatggataagcgccccatttgagcaaattcacggctgggtcggcggcggtacaaaaggtgatttcccgcattatgcctaccacggttattacacacaggactggacgaatcttgatgccaatatgggcagtgaagccgatctacggacgctggttgatagcgcgcatcagcgcggtattcgtattctctttgatgtcgtgatgaaccacaccggctatgccacgctggcggatatgcaggagtatcagtttggcgcgttatatctttctggtgacgagctgaaaaaaacgctgggtgaacgctggagtgactggaaacctgccgccgggcaaacctggcatagctttaacgattacattaatttcagcgacaaaacaggctgggataaatggtggggaaaaaactggatcagaaccgatatcggcgattacgacaatcctggatttgacgatctcactatgtcgctggcctttttgccggatatcaaaaccgaatcaacgaccgcttctggtctgccggtgttctataaaaacaaaacggatacccacgctaaagtcatcgacggctttacccctcgcgattacttaacccactggttaagtcagtgggtccgcgactatgggattgatggttttcgggtcgacaccgccaaacatgttgagttgcccgcctggcagcaactgaaaaccgaagccagcgccgcgcttcgcgaatggaaaaaagcgaaccccgataaagcgttagatgacaaacctttctggatgaccggtgaagcctggggccacggcgtgatgcaaagtgactactatcgccacggcttcgatgcgatgatcaatttcgattatcaggagcaggcggctaaagcagtcgattgtctggcgcagatggatacgacctggcagcaaatggcggagaaattgcaggatttcaacgtgttgagctacctctcgtcgcatgatacccgcctgttccgtgaagggggcgacaaagcagcagagttattattattagcgccaggcgcggtacaaatcttttatggtgatgaatcctcgcgtccgttcggccccaccggttcggatccgctgcaaggtacgcgttcggatatgaactggcaggatgttagcggtaaatctgccgccagcgtcgcgcactggcagaaaatcagccagttccgcgcccgccatcccgcaattggcgagggcaaacaaacgacactttcgatgaagcagggctacggctttgttcgtgagcatggcgacgataaagtgctggtcatctgggctgggcaacagtga

SEQ ID NO: 28851 - DNA, 1254 bp, Escherichia coli
atgacattctccctttttggtgacaaatttacccgccactccggcattacgctgctgatggaagatctgaacgacggtttacgcacgcctggcgcgattatgctcggcggcggtaatccagcgcagatcccggaaatgcaggactacttccagacgctactgaccgacatgctggaaagtggcaaagcgactgatgcactgtgcaattacgacggtccacaggggaaaacggagctactcacactgcttgccggaatgctgcgcgagaagttgggctgggatatcgaaccacagaatattgcactaacaaacggcagccagagcgcgtttttctacttatttaatctgttcgccggacgccgtgccgatggtcgggtcaaaaaagtgctgtttccgctggcaccggaatacattggctacgctgacgccggactggaagaagatctgtttgtctctgcgcgtccgaatattgaactactgccggaaggccagtttaaataccacgtcgattttgagcatctgcatattggcgaagaaaccgggatgatttgcgtctcccggccgacgaatccaacaggcaatgtgattactgacgaagagttgctgaagcttgacgcgctggcgaatcaacacggcattccgctggtgattgataacgcttatggcgtcccgttcccgggtatcatcttcagcgaagcgcgcccgctgtggaatccgaatatcgtactgtgcatgagtctttccaagctggggctaccaggctcccgctgcggcattatcatcgccaatgaaaaaatcatcaccgccatcaccaatatgaacggcattatcagcctggcacctggcggtattggtccggcgatgatgtgtgaaatgattaagcgtaacgatctgctgcgcctgtctgaaacagtcatcaaaccgttttactaccagcgtgttcaggaaactatcgctatcattcgccgctatttaccggaagatcgctgcctgattcataaaccggaaggagccattttcctctggttatggtttaaggatttgccaattacgaccgagcagctctaccagcgcctgaaagcacggggcgtgctgatggtgccggggcacaacttcttcccagggctggataaaccgtggccacatacacatcaatgtatgcgcatgaactacgtgccggagccggagaaaattgaggcgggagtgaagattctggcagaagagatagaaagagcctgggctgaaagtcactaa

SEQ ID NO: 28852 - DNA, 474 bp, Escherichia coli
atgaaccggtttattattgcggatgcgacgaaatgtatcggttgccgtacctgtgaagtggcttgcgcagtgtcgcatcaggagaatcaggattgcgctgcgttgtcaccagacgagtttatttcccgtattcgtgtcattaaagaccacacatggaccacggctgtagcctgccatcagtgtgaagatgcaccgtgcgcgaatgtctgccctgttgacgcgataagccgcgaacatgggcatattttcgttgaacaatcacgttgcattggctgtaaaagctgtatgctggcttgcccgtttggtgcgatggaggtcgtttcttcgcgcaaaaaggcgagggcgattaagtgcgatctgtgctggcatcgggcgacgggaccggcctgtgttgaagcctgcccgacaaaggcgttgcagtgcatggatgtcgagaaagtgcagcggaatcggctacggcagcagcctgtttga

SEQ ID NO: 28853 - DNA, 849 bp, Escherichia coli
atggggaaagaagtgatgggaaaaaaagagaacgagatggcgcaggaaaaagagcgtccagccggaagccagagtctgtttcgcgggttgatgctgattgagattttgagcaactatccaaacggttgtccgttggcgcatctttcggaactggctggtttaaataagagtaccgtccatcgcttattgcagggattacagtcctgcggctatgtgaccaccgcgcccgccgcagggagttaccgcctgactaccaaatttattgccgtcgggcagaaggcgctgtcttcgctgaatatcattcatatcgccgctccgcatcttgaggcactgaacatcgccactggtgaaaccattaacttctccagccgcgaagacgatcacgctattttgatttataagctggaacccacaaccgggatgctgcgaacccgtgcctatataggccagcatatgccgctctactgttccgcaatgggcaagatctacatggcgtttggtcacccggactacgtgaagtcatactgggaaagccatcagcatgagatccagccgttaacccgcaataccattaccgagctgcccgcgatgttcgacgaactggcgcacattcgtgaaagcggagcggcgatggacagagaagaaaacgaactcggcgtctcttgtattgctgttccggtgtttgatattcatgggcgggtgccgtacgccgtgtcgatttctctttcgacatcacgtctgaaacaggtgggggagaaaaatctcctgaaaccactgcgtgaaaccgcgcaggctatttctaatgaactgggatttactgtcagggacgaccagggcgcgatcacataa

SEQ ID NO: 28854 - DNA, 999 bp, Escherichia coli
atgaaagtgacatttgagcagttaaaagcagcctttaatcgagtcttaatttcacgcggcgttgacagcgaaacggctgatgcctgtgccgagatgttcgcccgcaccaccgaatccggcgtttattctcacggcgtcaaccgtttccctcgtttcattcaacaactggaaaacggcgatatcattcctgatgcccaacccaaacgtataaccagcctcggcgcaattgaacagtgggacgcccagcgttcgatcggtaacctgacagcgaaaaagatgatggatcgcgccatcgaactggctgccgatcacggtattggtctggtggctctacgtaatgccaaccactggatgcgcggcggcagctacggctggcaggcggcggaaaaaggctatattggcatttgctggaccaactccatcgccgtaatgccgccgtggggcgcaaaagagtgtcgcatcggcaccaacccgctgatcgtcgccattccttctaccccaatcaccatggtcgatatgtcgatgtcgatgttctcttacggcatgttagaagttaaccgtctggcaggccgtcagctcccggtcgatggtggctttgatgatgagggcaatttgaccaaagaacctggcgttatcgagaagaatcgccgcattttgccgatgggctactggaaaggttctggcatgtcgattgtgctggatatgatcgccactctcctttccgacggcgcatcggttgccgaagtcacccaggacaacagcgacgaatacggcgtttcgcaaatctttatcgccatcgaagtggataaattgatcgacggccccacccgcgatgccaagctgcaacgcatcatggattacgttactaccgctgaacgcgctgacgaaaaccaggccatccgcttacccggccacgaatttactaccctgctggccgaaaaccgccgtaacggcatcaccgttgatgacagcgtgtgggccaaaatccaggcgttatga

SEQ ID NO: 28855 - DNA, 468 bp, Escherichia coli
atgatttttggacatatcgcgcagcctgacccgtgccgtttgcctgccgccattgaaaaggggctcgattttctgcgcgctaccgatttcaacgccctggaaccgggcgttgtcgaaatcgacggcaagaatatttatgcgcaaattatcgatttaaccacacgcgaagcggtggaaaaccgtccggaagtgcattgtgggtatatcgatattcagtttctggcgtggggtgaagagaaaattggcattgccattgatacgggaaacaataaagtcagcgaatcactattagagcagcgcgatattattttttatcacgatagtgaacatgaatcatttatagaaatgataccgggcagctacgttattttcttcccgcaggatgttcatcgaccaggttgtattctgcaaacagcctctgagatacgaaaaattgtggttaaagtcgcattaacagcgctgaattaa

SEQ ID NO: 28856 - DNA, 474 bp, Escherichia coli
atgaaaaaaatacttgaagcaatactggcgattaatctcgccgtactttcctgtattgtgtttataaacattattttaagatatggttttcagacaagcattttatctgtagatgaattgtcacgttatttatttgtctggttaacatttattggcgcgattgtggcttttatggataacgcccacgttcaggtcacctttctggtggagaaactctcccccgcatggcagcgacgagtcgctctggttacccattccttaatcttatttatttgtggcgcactggcctggggcgcaacgctaaaaacaattcaggactggagcgattattcaccgatcctcggtttgcccatcggcctgatgtatgccgcttgtctgcccaccagcctcgttatcgcattctttgaactgcgtcatttatatcaactcatcacgcgtagcaattctctaacgtcgccaccgcaaggagcttaa

SEQ ID NO: 28857 - DNA, 1278 bp, Escherichia coli
atggctgtgctgatttttctgggctgtctgttgggtggtattgctatcggtttgcctattgcctgggcactgttgttgtgcggggcggcgttaatgttctggctggagatgtttgatgtccagatcatggcacaaacgctggtgaacggagccgacagcttctccctgctggcgattccgttctttgtgctggcgggtgaaatcatgaatgcgggcggcttgtcaaaacgcattgttgacctgccgatgaaactggtggggcataaaccaggcgggctgggctacgtcggcgtgctggcggctatgattatggcaagcctttctggttctgccgttgcggataccgccgccgttgccgctctactggtgccgatgatgcgcagcgccaactacccggtcaaccgggcggcggggctgattgcctctggcggcattatcgcgccaattattcccccttccattccgtttattattttcggcgtttccagcggattatccatcagtaagctgtttatggcgggcattgcccctggcatgatgatgggcgcaacgctgatgcttacctggtggtggcaggccagtcgccttaatttaccccgccagcaaaaagcaacgatgcaggaaatctggcactcttttgtctccggtatctgggcgctgtttcttccagtcatcattattggcgggtttcgctccggtctgtttacccctaccgaagccggggccgttgctgctttctatgcgctgtttgtcgccacagttatttaccgtgaaatgaccttcgccacactttggcatgtgctcattggcgcagcgaaaacgacctcagtggtgatgtttctggtggcctcggcacaagtttccgcctggctgatcaccattgctgaactgccgatgatggtttctgatttactgcaaccgctggtcgattcaccgcgtctgctgtttatcgtcattatggtggctatcctgattgtcggcatggtcatggatttaacgccgacggtattaattcttaccccggtattaatgcctttagttaaagaggcaggaatcgatccgatttatttcggtgtcatgtttatcattaactgctcaatcggcttaattacaccgcctatcggtaatgtgcttaacgttatttcaggggtggcaaaactcaaattcgatgatgcagtcagaggcgttttcccttacgtcctggttttatattcattattagtcgtatttgtttttattcccgatctcatcatcctccctttgaaatggattaattaa

SEQ ID NO: 28858 - DNA, 987 bp, Escherichia coli
atgaaattacgctctgtaacctacgcattattcattgctggcctggctgcattcagtacatcttcactggcggcacaatctttacgtttcggttatgaaacctcacaaaccgactcgcaacatattgcggcgaaaaaattcaatgatttattgcaggagagaaccaaaggcgagctgaaattaaaactgttcccggacagcactctcggtaacgcgcaggcgatgatcagcggcgtacgtggcggcaccatcgatatggaaatgtccggctcgaataactttgccgggttatcaccagtgatgaacttgcttgatgtccctttcctgttccgcgataccgctcacgcgcataaaacgctcgacggcaaagtcggtgatgatctgaaagcctcccttgaaggtaaaggactaaaagtactggcctactgggaaaacggctggcgcgatgtcaccaactcgcgcgcaccggttaaaacccccgccgacctgaaagggctgaaaattcgcactaacaatagcccgatgaatatcgccgcattcaaagtctttggcgctaacccgatcccgatgccgtttgccgaagtctataccgggctggaaacgcgcactatcgacgctcaggaacacccgatcaacgtcgtctggtcagcaaaatttttcgaagtacagaagtacctttctctgacgcaccacgcctattcgccacttctggtggtgatcaacaaagcgaagtttgatggcttaagcccggagttccagcaggcgctagtttcatctgcacaagaagcgggtaactatcagcgcaaactggttgctgaagatcagcaaaaaatcatcgatggcatgaaagaagcgggcgtggaagtcatcaccgttctcgaccgcaaagcctttagcgacgcactgggtaatcaggtccgcgacatgtttgttaaagatgttccgcagggtgctgatctgctgaaagctgtggatgaggtgcaataa

SEQ ID NO: 28859 - DNA, 1497 bp, Escherichia coli
atgacgcaatactggctggggttagattgtggcggtagctggctgaaagccgggctgtatgaccgcgaaggccgggaggcaggcgtgcagcgcctgcctctgtgcgcattaagcccgcagccaggctgggcagagcgcgatatggcagaacagtggcaatgctgcatggctgtcattcgcgccctgcttacccattccggcgttagcggggaacaaatagtgggtatcggtatctccgcacagggaaagggcttgtttttgctggataaaaacaacaagccgctcggtaacgccattttgtcctcagaccgccgggcgatggaaatcgttcgtcgctggcaggaagatggcatcccggaaaaactctacccgctgacccgacaaaccttgtggaccgggcatccggtgtcgctgttacgctggctgaaagagcacgaaccagaacgctacgcgcaaattggctgcgtgatgatgacgcacgactacctgcgctggtgtttaaccggcgtcaaaggctgcgaagagagcaatatttccgagtccaatctctacaacatgagtcttggggaatatgacccgtgcctcaccgactggcttgggatcgctgaaatcaaccacgccctgccgcctgttgtcggatctgccgaaatctgcggtgagatcaccgctcagacagccgtactgaccggtctgaaagcgggtacgcccgttgtcggcggcctgtttgatgtggtttccaccgcactctgcgccgggatcgaagacgaatttaccctcaatgcggtaatgggcacctgggcggtgaccagcggcataacctgcggtttgcgtgacggtgaagcgcatccgtatgtctatggtcgctacgttaacgacggtgaatttatcgttcatgaagccagccccacctcttccggcaacctcgaatggtttaccgcacagtggggagaaatctcgtttgatgagatcaaccaggccgttgccagcttgccgaaagccggtggcgatctctttttcctgccgttcctgtacggcagcaacgccggactcgagatgaccagcggtttctacgggatgcaggccattcacacccgcgcacacctgttgcaggccatttatgaaggcgtagtgttcagccatatgacccatctcaaccggatgcgcgaacgttttactgatgtgcacaccctgcgcgtcactggcggcccggcgcattccgatgtctggatgcaaatgctggcggacgtcagcgggctgcgtatcgaactgccgcaggtggaagaaaccggctgctttggtgcggcacttgccgcccgcgtcggcaccggagtttatcgcgatttcagcgaagcccaaggtgatttacagcacccggtacgcaccctgctgccggatatgaccgcccatcagctttaccaacaaaaataccaacgctatcagcatctcattgccgcacttcagggctttcacgcccgcatcaaggagcacacattatga

SEQ ID NO: 28860 - DNA, 663 bp, Escherichia coli
atgagccgaccacttctgcaactggccctcgaccactcatcacttgaagacgcacagcgcgacgtgatgcagttaaaagacagcgtcgatatcgtcgaagcgggcaccattctctgtttaaacgaagggcttggcgcggtaaaagccttgcgcgaacagtgcccgaacaaactcatcgtcgctgactggaaggtcgccgatgccggtgaaacgctcgctcaacaagcatttaccgcaggtgctaactggatgaccatcatctgcgccgcaccgctcgcgacggtggaaaaaggccacgcgatggcgcaacgctgcggcggtgaaattcagatagagctgttcggtaactggacgctggacgacgcccgcgactggcatcgtattggcgtgcggcaggcgatttatcatcgcggtcgcgacgcgcaagccagcgggcaacagtggggcgaagccgatcttgcacgcatgaaggcgctttccgatatcggccttgagctttccattaccggcggtattactcctgctgatctgccactgtttaaagatatccgcgtaaaggcgtttattgccggacgggcgctggcaggcgcagcaaatccggtgcaggtggctggcgatttccatgcgcaaatcgacgctatctggggaggcaagcgtgcgtaa

SEQ ID NO: 28861 - DNA, 861 bp, Escherichia coli
gtgcgtaatcatccgttagggatttatgaaaaagcgctggcgaaagatctctcctggccggagcggctggtgctggcaaaaagctgtggctttgattttgtcgaaatgtcggtggatgaaaccgacgaacggctctcacgtcttgactggagcgccgcacaacgtgcttcgctggtcactgcgatgatcgaaacgggtgttgccattccgtcaatgtgcctgtctgcccatcgtcgttttccctttggcagccgggacgaggcagtgcgcgaacgggcgcgggaaatcatgagtaaagcgattcgcctggcgcgcgatctcggcattcgcaccattcagctggcaggttatgacgtctattacgaagaccacgacgaaggcacccaacaacgttttgctgaagggctggcgtgggcagtcgaacaggcggcggcatcacaagtcatgctggcggtggagattatggataccgcgtttatgaactccatcagcaaatggaaaaaatgggacgagatgctcgcctcgccgtggttcaccgtctacccggacgtcggcaacctcagcgcctggggcaatgatgttcccgccgaactgaaactgggcattgaccgtatcgccgcgatccacctgaaagacacccagccagtgaccgagcaaagccccggacagttccgtgatgtgccgtttggcgaaggctgcgtcgatttcgttggcatcttcaaaacgctgcatgaactgaactatcgcggatcatttctgattgagatgtggaccgaaaaagccaaagagccggtgctggagattattcaggcgcggcgctggattgaagcgcgtatgcaggaggccggatttatatgttag

SEQ ID NO: 28862 - DNA, 696 bp, Escherichia coli
atgttagagcaactaaaagccgacgtgctggcggcgaatctggcgcttcccgctcaccatctggtgacgttcacctggggcaatgtcagcgcggtagacgacacgcggcaatggatggtaatcaaaccttccggcgtcgagtacaacgtgatgaccgccgacgatatggtagtggttgagatagccaccggtaaggtggtggaaggcagaaaaaaaccctcgtccgacacgccaacgcatctggcgctttaccgtcgctatgccgaaattggcggtattgtgcatacccactcgcgccacgccaccatctggtcgcaggccgggctggatctccccgcctggggcaccacgcacgctgattacttctatggtgccatcccctgcacgcgacagatgaccgcagaggagatcaacggcgagtatgaataccagaccggcgaagtgatcattaaaaccttcgaagaacgtgggttgaacccggcacaaatcccggctgtactggtgcattctcacggcccgttcgcctggggaaaaaacgccgccgatgcagtgcataacgccgtggtgctggaagagtgcgcctatatgggcctgttctcgcgccagcttgcaccgcagctccctgcgatgcaaaacgaactgctggataagcactacctgcgtaaacatggggccaatgcctattacgggcagtaa

SEQ ID NO: 28863 - DNA, 816 bp, Escherichia coli
atgctcgaattatccatgacgttaccgattaaagtgcaaaatggtggattatttatttcccgtggcgtagggaggcatccggcaaggcggctggagtcatgggaaattatctttgtcgaaaaaggtcgattagcgattcaggaagaagagcggatatttctggtcgatgcgggagagagtttattactctggccgaaccgacagcatgttggggtagaggattttcccgccgatctcaaattttactggctgcattttgaggttaaagcgccggacaacgatccgcgctggctcactcatcttagcgtgccgcaacaaactaaggttgccgatccgcaggtgctggtggccctgtttcgccagttcttaagcgaacaggaaaagcatcaacgcactccggcgctggagtttattgtgctgctgattttgcagcagctcacccgtgacgcgcgtcttgatgaacaggccgatggtgcaggcaccacccttgcctggaaagcgcagaaactgattcgcacgcaatatcaccgcccgctttccacggcgcttttagcccgcgagctgtactgcaatgccgattatcttgggcgcgtctatcggcgggtgtttcatctgacgttaacagaagcaatccaccgccagcgggtgcgcgaagccgaaaagctgttaattagcgaagcgcgatcactcacggaagtggcggcgttgtgcgggtttaatgacgtcggctatttccggcagatttttcgcaaacacaccggcttaacgccagctgcgtggaagcgacgttacagcaaggaacatatcaattcgtag

SEQ ID NO: 28864 - DNA, 1401 bp, Escherichia coli
atgacctctacaccgattactaccgctgatatcgctaaaggtaaaattgacgatgcgttatctgtacgggaaaaaataggctacggcctgggtgacgcaggcggcaccgtaataacttgcctgatcatgaactttctcacctttttctacaccgacgtttttggcttaactccggcgctggtcggcacgctgtttattgcactgcgcgtgtttgatgccatctccgacccggtgatgggcatcattgccgaccggacgcaaagtcgctgggggcgctttcgtccgtggcagttgtggattgccattcccatcggcattatcggcatcctgacgttcaccgtgccagatgccagcatgggagtaaaaatcgcctgggcgttcggcacttacctgctcctttcagtcggttataccgccatcaacgtgccgtactgcgcgctgatcaacaccatgaccacccgccacaatgaagtgatctcctgccagtcctggcgattcgttctctgcggcgtagcgggatttctggtttcggtaggcttaccgtggatggtggatctcttcggtcagggtaatgccgcgcgcggctatcaactgggcgtcggcgtgctgtgcgccatcgctgtggtgatgttcctgtgctgtttcttctgggttcgtgaacgggtaccactctccacaatggggaaatttaccctgcgcgaacatcttgccgggctgcgaaacaacgaccaactgctgctgatgctggtcatgtctttcctgctgattaacgtctttaacattcgcggcggtgggtatatgtacttcattacctacgtcttacaaggcagtacgggctacacgtcgctgttcttcaccatggtcaccttcgcctccattatcggctcggtgattgtcagcccgttaacgcgacgtttcgataccgtcaaaatttactactacaccaacctgctcctcgccgcgctggcggtgttgatgtggttcctgccttctggcccggcttatcaaacgctgtggctggcggtgatcctcggtaatggcgtgattcttggcttcacattgccattgcacttctcattgatggcctttgccgatgactacggcgagtggaaaacccgcgtacgttcttccggcatgaacttcgccttcaatctgtttttcatcaaactggcctgggcctccagcgccgggatcatcagcctgctgtttatttttgtcgcctaccagccaggcgtggaaaaccagaccaccagttcgcttggcgggatcacggcgatggaaacattactgcctgcgctattccacctgctgctggcaggggcgatccgcttttgcaaactcaataaccctatgatgtcacgcattgctaccgacctgcgtcagcgtcatgtacagccttaa

SEQ ID NO: 28865 - DNA, 1971 bp, Escherichia coli
atgaacatttcggaagtcgatctgcataaactgacggtcagcgatccgttcctcggtcagtaccaacaactggtccgcgatgtggtgattccttatcagtgggacgccttgaacgatcgtatcccagaagcggaacccagccatgcgattgaaaactttcgcattgccgcaggactgcaagacggtgaattttacgggatggtgtttcaggacagcgacgtcgccaaatggctggaagcggtagcctggtcgctgtgccagaagccggatgccgaactggaaaaaaccgctgacgaggtaatcgaactggtcgcttccgcccagtgcgaagatggctatctcaatacttactttacggtaaaagcgcccgaagaacgctggagcaatctggcggagtgtcatgaactttactgcgccggtcatctgattgaagccggagtcgccttcttccaggccacgggcaagcggcgcttgctggaagtggtttgccgtctggccgatcatatcgacagcgtatttggtccaggtgaaagtaagttacacggttatcctggtcacccggaaattgaactggcgctaatgcgcctgtatgaagtgaccgaagagccgcgctacctggcgctgacgaactattttgtcgaacagcgtggtgcgcaaccgcactattacgaccaggaatatgaaaagcgcgggcagacctcgcactggcacacctacggcccggcgtggatggtgaaagataaagcctacagccaggcgcatttgcccatcgcacagcaacaaaccgccatcggacatgcagtacgctttgtatatctgatgactggcgtcgcacatctggcgcgtttaagtcacgatgaaagcaagcgtcaggattgcctgcggctgtggaacaatatggcccagcgtcagttatatattaccggcggcattggctcacagagcagcggtgaagcgttcagcagcgattacgatctgccgaatgacacggtatacgctgaaagttgcgcctccatcggcctgatgatgtttgcccgacgaatgctggaaatggaaggcgacagtcaatatgccgatgtgatggagcgcgcactgtacaacaccgtgctcggcggcatggcactggatggcaaacatttcttctatgtgaatccgctggaagtacatccaaaatcgctgaaattcaaccatatctacgatcacgttaaaccgatccgccagcgttggtttggctgcgcttgttgtccgccaaatatcgcccgcgtactgacctcgattggtcattatctctacacgccgcgtgaagatgcgttgtatatcaacatatatgcaggaaacagcatggaagtgccggtagaaaatggcacgttgcgcctgcggattagcgggaactatccgtggcaggaacaggtgacaattgcggttgaatcgccccagccggtgcgtcatacgctggctttacgtctgccggactggcgcacacagccgcagatcatattgaatggggaagaggtcgggcaggatattcgtaaagggtatttgcacattacccgcgaatggcaggagggcgatacgctgaatctgactttgccgatgccggtacgccgcgtttacggtaacccgctggtgcgtcacgtcgccggaaaagtggcgattcagcgcggcccgctggtgtattgcctggaacaggccgacaacggcgagtcactacataacctgtggctgcccgccgatgcgccatttacgacctttgaaggcaagggattgttcagccataagatcttaatccaggcaccgggttaccggtatgaacagagcaatccagagcagcaaccgctgtggcattacgacagcgcgccagccaaacgccagccgcaaactctgacgtttatcccgtggtttagctgggctaaccggggtgaaggcgaaatgcggatctgggtgaatgaggaaaagcattgccatccgtag

SEQ ID NO: 28866 - DNA, 741 bp, Escherichia coli
atgttaattaaccgcaatattgtggcgttatttgcgttgccttttatggcaagcgcaactgcttctgaattatccattggtgctggtgcggcttataatgaatcgccttatcgcggttataatgaaaatacaaaggcaattccgctgattagttatgaaggtgatactttttatgttcgtcagaccacgttaggttttattctgtcgcaaagtgaaaaaaatgaacttagcctgaccgcatcctggatgccgctggaatttgaccctgccgataatgacgattatgccatgcaacagcttgataagcgtgatagtacggctatggcgggggttgcctggtatcaccacgagcgttggggaaccgtgaaagcctctgcggctgcggacgttctggataacagcaacggctgggtgggggagctatcggtattccacaaaatgcagataggtcgcctgtcgctgacacctgcactgggcgttctctattatgacgagaatttcagtgactattactatggcatttcagagagtgagtcccgtcgtagcggtctggcaagttattccgcgcaggatgcctgggtgccctatgtcagcctgacggcaaaatacccgataggagagcacgtcgtattgatggcgagcgcaggatacagcgagctgccggaagagattaccgacagcccgatggttgatcgtaatgagagttttacctttgtcaccggcgtgagctggcgtttttaa

SEQ ID NO: 28867 - DNA, 975 bp, Escherichia coli
atgacaaaattacaacttaagtaccgggagttaaaaattatctcggtaatcgctgccagtgaaaatatcagccatgccgcgactgtacttggcatcgcacaggccaacgtcagcaaatatcttgctgattttgaatcaaaagtgggtttaaaagtctttgaccgaaccacccgacagctgatgctcacaccttttggcaccgtgctgttaccgtacatcaacgacatgctggacagaaacgagcagcttaataattttattgcagattataagcatgagaaacgtggtcgggtcactatctatgcaccaaccggcataattacctatttatccaaacatgtaatcgataaaattaaagatatcggtgatatcaccttatcgctaaaaacctgcaatcttgagcgtaatgccttttatgaaggcgtcgaatttcccgatgattgtgatgttttaatcagctacgcccaaccaaaagatgaatcgctggttgccagttttattacccaatatgccgtaaccgcttatgccagccagcgctatcttgagaaacatcccattagccgtcctgacgaactcgaacatcactcctgtattttgatcgactcgatgatgatcgacgacgcgaatatctggcgcttcaacgtcgccgggagtaaagaggtgcgggattatcgcgtgaagggaaattacgtttgcgacaacacgcaatctgcgctggagctggcacgaaatcacctggggattgtgtttgcgccagacaaaagtgtgcagagcgacctgcaagacggcacgctggtgccctgctttcagcacccgtatgaatggtggctggatctggtggctatcttccgtaaacgggaataccagccctggcgggtccagtatgtgctggatgaaatgctgcgtgaaattcgccaccagcttgctcagtcgcagcaactgcggcctgaacaaacggcggaaagcgaagattaa

SEQ ID NO: 28868 - DNA, 1137 bp, Escherichia coli
atggatttactgattattttgacctatgtggctttcgcatgggcaatgtttaagatctttaaaattcctgtaaataaatggaccattcccacagcggccctgggaggcatatttattgtcagcggtctaattctgttaatgaactataaccatccgtatacctttaaagcgcaaaaagcggttatttctattcctgttgtcccacaggtgacaggcgtggtgatcgaagtgacggacaagaaaaatacgctgattaaaaaaggtgaggtgctatttcgactggacccgacgcgttatcaggctcgggtggatcggctgatggcggatatcgttaccgcagaacataaacagcgggcgttgggcgcagagttagatgagatggcggcgaatactcagcaggcaaaggccacgcgggataagttcgctaaagagtatcagcgttacgcacgtggcagccaggcgaaagtaaacccgttttcagaacgcgatatcgatgtggcgcggcaaaattatctggcgcaggaagcctccgtgaagtcatcggcggcggaacaaaaacagatccagagccagctggatagcctggtgttgggtgaacattctcaaatcgccagcctgaaagcacagctcgcggaagcaaaatataaccttgagcagacgatagtgcgtgcgccgagcgatggttatgtgacccaggtactgattcgtccgggtacctatgccgcgtcgctgccgctacgtccggtgatggtgtttatacccgatcagaaacgacaaatcgtggcgcagttccgtcagaactccttgctgcgactggctcctggcgacgatgcggaagtggtgtttaatgctctgccaggtaaggtattcagcggtaaggtggcagccattagtccagccgttcccggcggagcttatcagtcgaccggcaccttacagacgttaaacacagcgccgggttcagatggcgttatcgcgaccattgaactggatgagcatactgatttgagcgcattaccagacggtatttacgcccaggtggcggtctactctgatcatttcagccatgtctcggtgatgcgcaaagtactgttacgcatgaccagctgggtgcattacctttatctcgatcattaa

SEQ ID NO: 28869 - DNA, 324 bp, Escherichia coli
atgttcctggattattttgcactgggagtgcttatttttgtatttctggtgatcttctatgggattattattttacatgatattccctacctgattgctaaaaaacgtaatcatccacatgccgacgccattcatgttgctggttgggtaagtctttttacgttacatgttatctggccatttttgtggatttgggccacgctttaccgcccggagcggggatggggaatgcaaaaccatgactcctccgttgtgcaactacaacagcgtattgccgggctggagaaacagctcgccgacatcaaatcctcttctgccgagtaa

SEQ ID NO: 28870 - DNA, 1539 bp, Escherichia coli
atgaccaataatcccccttcagcacagattaagcccggcgagtatggtttccccctcaagttaaaagcccgctacgacaactttattggcggcgaatgggtagcccctgccgatggtgagtattaccagaacctgacgccggtgaccgggcagctgctgtgcgaagtggcgtcttcgggcaaacgagacatcgatctggcgctggatgctgcgcacaaagtgaaagataaatgggcgcatacttcggtgcaggatcgcgcggcgattctgtttaagattgccgatcggatggagcagaacctcgaactgttagcgaccgctgaaacctgggataacggcaaacccattcgcgaaaccagtgctgctgatgtgccgctggcgattgaccattttcgctattttgcctcgtgtattcgggcgcaggaaggcggtattagtgaagtggatagcgaaactgtggcttatcacttccacgaaccgttaggcgtggtggggcagattattccgtggaacttcccgctgctgatggcgagctggaaaatggctcccgcgctggcggcgggcaactgtgtggtgctgaaacccgcacgtcttaccccgctttctgtactgctgctaatggaactcgtcggtgatttactgccgccgggcgtggtgaacgtggttaacggcgctggtggggaaattggcgaatatctggcgacctcgaaacgcatcgccaaagtggcgtttaccggctcaacggaagtgggccaacaaattatgcagtacgccacgcaaaacattattccggtgacgctggagctgggcggcaaatccccaaatatcttctttgctgatgtgatggatgaagaagatgcctttttcgataaagcgctggaaggctttgcactgtttgcctttaaccagggcgaagtttgcacctgtccaagccgtgctttagtgcaggagtctatctacgaacgctttatggaacgcgccatccgccgtgtcgaaagcattcgcagcggtaacccgctcgacagcgtgacgcaaatgggggcgcaggtttctcacgggcaactggaaaccatcctcaactacattgatatcggtaaaaaagagggcgcagacgtgctcaccggcgggcggcgcaagctgctggaaggcgaactgaaagacggctactacctcgaaccgacgattctgtttggtcagaataatatgcgcgtgttccaggaagaaatttttggtccggtgctggcggtgaccaccttcaaaacgatggaagaagcgctggagctggcgaacgacacgcaatatggcctgggcgcgggtgtctggagccgcaacggtaatctggcctataagatggggcgcggcattcaggctgggcgcgtgtggaccaactgttatcacgcttacccggcacatgcggcgtttggcggctacaaacagtcgggcatcggacgcgaaacccataagatgatgcttgagcattaccagcaaaccaagtgcctgctggtgagctattcggataaaccgttggggctgttctga

SEQ ID NO: 28871 - DNA, 1152 bp, Escherichia coli
atggcagcttcaaccttttttattccttccgtgaatgttattggtgctgattcattgaatgatgcaatgaatatgatggcagattatggatttacccgtaccttaattgtcactgacaatatgttaacgaaattaggtatggcgggtgatgtgcaaaaagcactggaagaacgcaatatttttagcgttatttatgatggcacccaacctaacccaaccacggaaaacgtcgccgcaggtttgaaattacttaaagaaaataattgcgatagcgtgatctccttaggcggtggttctccgcacgactgcgcaaaaggtattgcgctagtggcagccaatggcggcgatattcgcgattacgaaggcgttgaccgctctgcaaaaccgcagctgccgatgatcgccatcaataccacggcgggtacggcctctgaaatgacccgtttctgcatcatcactgacgaagcgcgtcatatcaaaatggcgattgttgataaacatgtaactccgttgctttctgtcaatgactcatctctgatggtcggtatgccgaagtcactgaccgccgcaacgggtatggatgccttaacgcacgctatcgaagcgtatgtttctattgccgccacgccgatcactgacgcttgcgcactgaaagccgtgaccatgattgccgaaaacctgccgttagccgttgaagatggcagcaatgctaaagcgcgtgaagcaatggcttatgcccagttcctcgccggtatggcgttcaataatgcttctctgggttatgttcatgcgatggcgcaccagctgggcggtttctacaacctgccacacggtgtatgtaatgctgttctgctgccacacgttcaggtattcaatagcaaagtcgctgcagcacgtctgcgtgactgtgccgctgcaatgggcgtgaacgtgactggtaaaaacgacgcggaaggcgcagaagcgtgcatcaatgccatccgtgaactggcgaagaaagtgaatatcccggcaggcctgcgtgacctgaacgtgaaagaagaggatttcgcggtactggccaccaatgccctgaaagatgcgtgtggctttactaacccgattcaggcaactcacgaagagattgtggcaatttatcgcgctgcgatgtaa

SEQ ID NO: 28872 - DNA, 1845 bp, Escherichia coli
atgattattgcgactgccggacacgttgaccacggcaaaacaaccttattgcaggcgattacgggcgtaaatgccgaccgtctgccggaagaaaaaaagcgcggcatgaccatcgatctcggctatgcctactggccgcagccggatggccgtgtgcctggttttatcgacgtacccggtcatgaaaagtttctttccaacatgctggcgggcgttggtggtattgatcacgcgctgttggtggtggcgtgcgatgacggcgtgatggcacagactcgtgagcatctggcgattttgcagctgaccggtaacccgatgctgacagtggcgctgaccaaagccgatcgtgtggacgaagcgcgtgttaatgaggttgaacgccaggtaaaggaggtgctgcgggaatacggttttgctgaggcaaaactgtttatcaccgcagcaaccgaaggtcggggaattgatgccctgcgcgagcatttgcttcagttaccagaacgtgaacacgccagccaacatagtttccgcctcgcgatcgaccgtgcatttaccgtaaaaggtgccgggctggtcgtcaccggtacggcgttaagcggggaagtgaaggtaggcgattcactctggctgactggtgtaaataaaccgatgcgcgtgcgtgcgctacatgcgcaaaatcagccaacagaaactgcccatgccgggcagcgtatcgcgcttaacatcgcgggtgatgcggaaaaagagcagattaaccgtggcgactggctgcttgccgatgcgccgccggagcctttcacacgggtgattgtcgagcttcaaacccatacaccgctgacccagtggcagccgctgcatattcaccacgccgccagccacgtcacgggacgcgtttcgctgctggaagataaccttgccgagctggtgttcgacacgccgctatggctggcggataacgatcgcttggtgctgcgcgatatctcggcccgcaacacgctggcgggggcgcgtgtggtgatgcttaacccgccgcgtcgcggtaagcgtaagccggaatatctgcaatggctggcgtctcttgcacgggcgcagagcgatgccgatgcgttatctgttcatctggaacgcggagcggttaaccttgcggatttcgcctgggcacggcagctcaacggcgaagggatgcgcgaactgctgcaacagcctggctatattcaggctggttatagcttgttgaatgcgccggttgccgcccgctggcagcggaaaattctcgacacattagcgacttatcatgagcaacatcgcgatgaacctggtcctgggcgcgaacgtctgcgacgtatggcgttgccaatggaagatgaagcgctggtactgttgctgattgaaaagatgcgcgaaagcggcgacatcctcagtcatcacggttggctgcatctgccggatcataaagcgggcttcagcgaagagcagcaggtcatctggcaaaaagcagagccgctgtttggtgacgaaccgtggtgggtgcgtgacctggcaaaagagacgggaaccgacgagcaggcaatgcgcctgacgctacgccaggcggcccagcaggggataattacggcgatcgttaaagatcgttattaccgtaacgatcggattgtcgaatttgccaatatgatccgcgatctcgatcaggaatgtggttcaacctgcgcggcggatttccgcgatcgtttaggtgttggtcgaaaactggcaattcaaattctggaatattttgaccgcattggttttacgcgtcgtcggggaaatgatcatttattgcgcgacgcattattatttccggaaaaataa

SEQ ID NO: 28873 - DNA, 1392 bp, Escherichia coli
atgacaaccgaaacgcgttccctctatagtcaacttccggctattgatcgcttattgcgcgatagctccttcctttctttgcgtgatacttatggtcacacccgcgtggtggaattgctgcgtcagatgcttgacgaagcgcgagaagtgattcgtgatagccagacgctgcccgcatggtgtgaaaactgggcgcaagaagtcgatgcccggttgacgaaagaggcgcagagcgcgctgcgtccggtgatcaacctgacgggaaccgtgctgcataccaatcttgggcgagctttacaggcagaagccgcggtggaagccgttgcgcaggctatgcgttcgccagtgaccctcgagtacgatctggacgacgccggacgcggacatcgcgatcgggcgctggcgcagctgctgtgccgcattacgggagcggaagatgcctgtatcgtcaataacaatgcggcggcggtattgttgatgttggcggccactgccagtgggaaagaggtggtggtatctcgcggcgaactggtggagattggcggcgcgtttcgtattcccgatgttatgcgtcaggcaggctgcacactacacgaagtagggaccaccaaccgcacgcacgcgaatgattatcgtcaggcggtgaatgaaaataccgcactgttgatgaaagtacataccagtaactacagcattcaggggttcaccaaagcgatagacgaagctgaactggtggcgcttggcaaagaactggatattcccgtggtgactgatttaggcagtggctcgctggttgatcttagccagtacggtttgccgaaagagccaatgccgcaggagttgattgcggcgggcgtcagtctggtgagcttctccggcgacaagttgttaggcgggccgcaggcagggattatcgttggtaaaaaagagatgatcgcccgcctgcaaagccacccgctgaagcgtgcattacgcgcggataaaatgaccctcgcggcgctggaagccacgttgcgtctttatttacaccctgaagctctgagtgaaaaattaccgaccctgcgcctgcttacccgcagcgcagaggtcattcaaatccaggcacaacgtttacaggctccccttgccgcacattacggcgcggagtttgcggtacaggttatgccatgtctttcgcagattggcagtggttcgctgccggttgatcgcctgccgagcgcggcattaacgtttacaccccatgatggacgcggtagccaccttgagtcattagccgcccgctggcgtgaattgccagtgccggtgattggtcgtatttatgacggacgattgtggctggatttacgctgcctagaagatgagcaacggtttttggagatgttgttgaaatga

SEQ ID NO: 28874 - DNA, 609 bp, Escherichia coli
atgaaactcgtcggtagctacaccagcccgtttgtacgcaaactttctattctgttgttagaaaagggcataactttcgaatttattaatgaactgccctataacgcggacaacggcgtggcgcaatttaacccgttagggaaagtgccggtgctggtgaccgaagagggcgaatgctggtttgattcgccgatcatcgctgaatatattgaattaatgaatgtcgctccggcgatgttgccgcgcgatccgctggagtcgttgcgggtgcgcaaaattgaggcactggcggatggcattatggatgccgggctggtatcggtgcgtgaacaggcgcgtccagcggcgcagcagtctgaagatgaattgttacgccagcgggagaaaatcaaccgcagtctggatgtgctggaaggatatctggtcgatggcacactcaaaaccgatacggtcaatctggcgactatcgccattgcctgtgccgtcggatatctcaatttccgccgcgttgcgccaggttggtgtgtcgaccgcccacacttagtcaaactggtcgaaaacctgtttagccgcgaaagttttgctcgcaccgaaccgccaaaggcttga

SEQ ID NO: 28875 - DNA, 1137 bp, Escherichia coli
atggatctattgattgttttaacttacgtggcgctggcgtgggcggtctttaaaatcttccgcattccggtgaatcagtggacgctggcgacggcggcgctgggaggcgtgtttctggtgagtggtttgattttgttgatgaactacaaccacccttacacttttaccgcgcaaaaggcagtgatagcgatccccatcacgccacaggtgacgggaattgttactgaagtcaccgacaaaaataatcagcttattcagaagggcgaggtgctttttaagctcgacccggttcgttaccaggcgcgagttgacagacttcaggctgacctgatgacggcgacgcataatataaagacgctgcgcgcgcagctcactgaagcgcaggccaacaccacccaggtttcagcggagcgcgaccgtctgtttaaaaattatcaacgttacctgaaaggcagccaggcggcggtgaatccgttctcggaacgtgacatcgacgatgcgcggcaaaacttcctcgcgcaggacgcgctggtgaaaggctcggtggcggagcaggcgcagatccagagccagctcgacagtatggttaacggcgagcaatcgcagattgtgagcttaagagcgcaacttactgaagcaaaatataaccttgagcagactgtcattcgcgcaccaagcaatggctacgttactcaggtactgatccgcccaggtacatacgcagctgccttgccgctacgtccggtgatggttttcatccccgagcaaaaacggcaaattgtcgcccaatttcggcagaactcgctgttacgtctgaaacccggcgatgatgcggaagtggtgtttaacgcgctacctgggcaggtgttccacggcaaactgaccagtattttacctgtcgtgccaggcggttcgtatcaggcgcaaggggtattgcaatcattaacggtcgtgcccggcacggacggtgtgctgggaaccattgaactggaccccaacgatgatatcgatgccttacccgacggcatctacgcccaggtggcggtttactccgaccatttcagccatgtttcggtgatgcgaaaagtgctgctaagaatgaccagctggatgcattatctttatttggatcattga

SEQ ID NO: 28876 - DNA, 363 bp, Escherichia coli
atgtttctaaactatttcgcgttgggagtgctgatcttcgtctttctggtgattttttatggaatcatcgcgatacatgacatcccttatctgattgccaaaaagcgcaaccacccccatgccgacgctattcatacagcgggctgggtgagcctgtttactctgcatgttatctggccgtttctgtggatctgggcgacgctctatcaaccggagcgcggctggggcatgcagtcacatgttgcgtcgcaagagaaagcgactgacccggaaatcgccgcactttctgaccgaatttcccggctggagcaccaactcgccgccgagaaaaagactgactattccacgttcccggagatctaa

SEQ ID NO: 28877 - DNA, 1914 bp, Escherichia coli
atgtcatccgatattaagatcaaagtgcaaagctttggtcgtttcctcagcaacatggtgatgccaaatatcggcgcgtttatcgcgtggggtatcatcaccgcgttatttattccaacagggtggttaccgaacgaaacgctggcgaagctggtcgggccgatgatcacttatctcctgccgctgctgatcggttataccggtggtaagctggtaggcggcgaacgtggcggcgtagtcggtgccattaccaccatgggcgttatcgtcggcgcagacatgccgatgttcctcggctctatgattgcaggtccgctgggcggctggtgcattaagcacttcgaccgctgggtagacggtaagatcaaatccggttttgagatgctggtgaataacttctccgcaggcatcatcgggatgatcctcgctattctggcattcctcggcattggcccgattgttgaagccctgtccaaaatgctggctgcgggcgttaacttcatggttgtccatgacatgctgccgctggcgtctatctttgttgaaccggcgaaaatcctgttcctcaacaacgccattaaccacggtatcttctcgccgctgggcattcagcagtcccatgaactgggtaaatccatcttcttcctgattgaagctaacccaggtccgggtatgggcgtgctgctggcgtacatgttctttggtcgtggtagcgctaaacagtctgcgggcggtgcggcaatcatccacttcctgggcggtatccacgaaatctacttcccgtatgtgctgatgaatccgcgtctgattctggccgttatcctcggtggtatgactggcgtgttcacgctgactatcctgggcggtggtctggtttctccggcatctccgggttctatccttgctgtactggcgatgacaccaaaaggtgcatacttcgctaacatcgcgggtgtgtgtgcggcgatggctgtctccttcgttgtctctgccattctgctgaaaaccagcaaagtgaaagaagaagatgatattgaagcagcaactcgtcgtatgcaggacatgaaagctgagtctaaaggcgcgtctccgctgtctgcgggcgatgtgactaacgacctgagccacgtacgtaaaatcatcgttgcctgtgatgccggtatgggttccagtgcgatgggcgcaggtgtgctgcgtaagaaaattcaggatgcaggtctgtcgcagatttcggtcactaacagcgcgatcaacaacctgccgccagatgtggacctggtcatcactcaccgtgacctgaccgaacgcgctatgcgccaggttccgcaggcacagcatatttcgctgaccaacttcctcgacagcggcctgtacaccagcctgaccgaacgtctggttgctgcccagcgccatactgaaaacgaagtgaaagtgaaagacagtctgaaagacagctttgacgattccagtgctaacctgttcaaactgggcgcggagaacatcttcctcggtcgcaaagcggcaaccaaagaagaagcgattcgttttgctggcgagcagctggtgaaaggcggttacgttgagccggaatacgttcaggcgatgctggatcgtgaaaaactgaccccgacttatctgggtgagtctatcgcggtgccacacggtacggttgaagcaaaagatcgcgtactgaaaacgggcgtggtgttctgccagtacccggaaggcgtgcgcttcggtgaagaagaagatgacattgcccgtctggtgattggtattgctgcccgtaacaacgagcacattcaggttatcaccagcctgaccaatgcactggatgatgaatccgtcatcgagcgtctggcacacaccaccagcgtggatgaagtgctggaactgctggcaggtcgtaagtaa

SEQ ID NO: 28878 - DNA, 1149 bp, Escherichia coli
atgaaagcattacattttggcgcaggtaatatcggtcgtggctttatcggtaaactgctggcagacgcgggtatccaactgacgtttgctgatgtcaatcaggtggtacttgatgccctgaatgcccgtcatagctatcaggttcatgtggtcggtgaaaccgagcaggtagataccgtttctggtgtcgatgccgtcagcagcattggtgatgatgtcgttgatctgattgctcaggtcgatttagtcactaccgccgttggtccggttgtgctggaacgtattgccccggcaatcgccaaagggctggtgaaacgtaaagaacaaggtaatgaatccccgctgaacatcatcgcttgtgaaaacatggtccgcggcaccacacagctgaaaggccatgtgatgagcgccctgccggaagatgccaaagcgtgggtagaagaacacgttggctttgttgattccgccgttgaccgcatcgtgccgccttcggcttctgcaaccaacgatccgctggaagtgacggtagaaacattcagcgaatggattgttgataaaacccagttcaaaggcgcgctgccgaacatcccaggcatggagttaaccgacaacctgatggcatttgtcgaacgtaaactcttcaccctgaatacgggtcatgctataaccgcgtacctcggaaaactggcgggtcatcagaccattcgtgatgcgattctcgacgagaaaatccgcgcggtggtaaaaggtgcgatggaagaaagtggtgcagtattgatcaagcgctacggctttgacgcagacaaacatgcggcgtacatccggaaaatcctcggtcgtttcgagaacccgtacctgaaagatgatgtagagcgcgtaggccgtcagccgctgcgtaaactgagtgctggcgaccgtctgatcaagccactgctcggaacgctggaatatggtctgccacataaaaacctgattgaaggtattgccgctgcaatgcacttccgcagtgaagatgatccgcaggctcaggaactggcagcactgatcgctgacaaaggtccgctggcggcgctggcacagatttccggtcttgatgccaacagcgaggttgtatccgaggcggtaaccgcttataaagcaatgcaataa

SEQ ID NO: 28879 - DNA, 588 bp, Escherichia coli
atggtggaccaggcgcaggataccctgcgcccgaataacagattgtcagatatgcaggcaacaatggaacaaacccaggcctttgaaaaccgtgtgcttgagcgtctgaatgctggcaaaaccgtgcgaagctttctgatcaccgccgtcgagcttttgaccgaggcggtaaatcttctggtgcttcaggtattccgcaaagacgattacgcggtgaagtatgctgtagaaccgttactcgacggcgacggtccgctgggcgatctttctgtgcgtttaaaactcatttacgggttgggcgtcattaaccgccaggaatacgaagatgcggaactgctgatggcattgcgtgaagagctaaatcacgacggcaacgagtacgcgtttaccgacgacgaaatccttggaccctttggtgaactgcattgcgtggcggcgttaccaccgccgccacagtttgaacctgcagactccagtttgtatgcaatgcaaattcagcgttaccaacaggctgtgcgatcaacaatggtcctttcactgacagagctgatttccaaaatcagcttaaaaaaagccttccaaaagtaa

SEQ ID NO: 28880 - DNA, 210 bp, Escherichia coli
atgggcaaattaggtgaaaacgttccgcttcttatcgataaagccgtagatttcatggcatcgagccaggcgttccgggagtatctgaaaaaactacctccccgtaacgcgattccgtccggaatacctgatgaaagcgtgccgttatatctacaacgtctggagtattatcgtcggctttatcggccgaagcaggtagaggggcagtaa

SEQ ID NO: 28881 - DNA, 363 bp, Escherichia coli
atgaaagaagtcgaaaaaaacgaaatcaaacgtctcagcgatcgtctggacgccatccgtcaccagcaggccgatctgtcgctggttgaagccgcagacaaatatgccgaactggaaaaagagaaagccactctggaagcagaaattgctcgcctgcgcgaagttcacagccagaaactcagtaaggaagcacagaagctgatgaagatgccgttccagcgcgcgattactaaaaaagagcaagctgatatgggcaaactgaagaagagcgttcgcggactggtcgttgtgcacccaatgaccgcgctgggccgcgaaatgggcctacaagagatgacagggttctctaagactgcgttttaa

SEQ ID NO: 28882 - DNA, 1206 bp, Escherichia coli
gtgcgcggcgctgaatgcacccgccgtagcgttccacagcagagagtcatcaccgagactgtcaacagcgtcagtcaggttggtgatgttggtggtattcgtggcgatattggtggtgttggctgccacggcatcgttagtggttttcagctgagagccgtttaccgcgtcagtgctgccagccgtcaggtcaccgtctttgacgttggtgattttgctggtggcttcggtaccgtgcgcggcgctgaatgcacccgccgtagcgttccacagcagagagtcatcaccgagactgtcaacagcgtcagtcaggttggtgatgttggtggtattcgtggcgatattggtggtgttggctgccacggcatcgttagtggttttgagctgagagccgttaaccgcgtcagtgctgccagccgtcaggtcaccgtctttgacgttagtgattttgctggtggcatcagtaccgtgtgcggcgctgaatgcccccgctgtagcgttccacagcagggaatcgtcaccgaggctgtcaactgcgtcagtcaggttggtgatgttggtggtattcgtggcgatattggtggtgttggctgccacggcatcgttagtggttttgagctgagagccgttaaccgcgtcagtgctgccagccgtcaggtcaccgtctttgacgttagtgattttgctggtggcatcagtaccgtgtgcggcgctgaatgcccccgctgtagcgttccacagcagggaatcgtcaccgaggctgtcaactgcgtcagtcaggttggtgatgttggtggtattcgtggcgatattggtggtgttggctgccacggcatcgttagtggttttcagctgagagccgttaaccgcgtcggtgctgccagccgtcaggtcaccgtctttgacgttggtgattttgctggtggcatcggtgccgtgcgcggcgctgaacgcggtgccattccacagcagggcatcgtctttaaggtcgccaacggaatccgtcagggtattgatactgttagtgttggtggtgatattggcagtattggtcgctacgttatcgttggtggttttcagctgagaaccgttaaccgcatccttactggtatcagaaatagcgccgtctttaacgttggtgatggtactggtagtatctgtaccatgtgccgcactatatgcctttttaagggagtcccattgtaa

SEQ ID NO: 28883 - DNA, 147 bp, Escherichia coli; identical to SEQ ID NO: 9454

SEQ ID NO: 28884 - DNA, 471 bp, Escherichia coli
atgaggcactttatctttcaggacgaaaaatcacataaattctgggcggtggagcaacagggaaacgagttgcatatctgttggggaaaagttggcaccaaagggcaaaaccaggtaaaaagttttgcggatgctgcggcagcggcaaaagcggagcttaagctgatcgcagagaaaacgaaaaaaggctatgtggaaaatgctttagcaaacgtgcatatcccccccatcaccaaagccactcctgaagttgaaacctcccctgagagtaaaaacaaacgcccatgggtggctgatgatgcagtcattccggtaactggcgatattaatcgatttgcttttcctcatcgctctcgccccagagagatcaattatctgtacaaagatggccaaatatggaagcgcatcgcgaataacaccagggcatatgaccccgacaataattaccgctcttatcctgaaaactggtag

SEQ ID NO: 28885 - DNA, 444 bp, Escherichia coli
atgactagtgcgaatcttggccctagaacggtaattgctgttgttagagcgtcactggctgacatagatatttggcaaaaaaatggcgttagtcgtgatgagattgcgagcgtattgactgagcgctacggtgtttctatcacattaacggccttcgataaggctctgtatagggcaaggaaagaactgaaaagtagattgcacaattcaacaaaacaggaagataaaagccagatagaaagtggattgcacaatccagaaaggagagaggaagtacagcaagcggattatggattgcacaacccaaaacaagataagctggttgaagatatgggcggcaataaagaatttttgtctgacaccgattttaaaaaaatcggtgatgaggcaaaaaaagtcgcatcctcattcaagggtagtgtaggtaataaaaaaggtttctaa

SEQ ID NO: 28886 - DNA, 315 bp, Escherichia coli
atgagtgataaacaagaaatcaatgatgtggcaattgtaaaatgggtgttcggcattatttttgctgttgttattattggaatgccgaccctgggtttttttaaatttgtgatgttgcttatttctttaacaattacgataggtacggttttttactttggttcaattactaaaaataaagacaacaaaattccaatgatgattttgggcgggtttgttggaataattatcagtgcaggtcttgttttatacaacgtgcacgagcgtaacgaaatgtgtagcagtgattttgttccggttttttgttcgctgtaa

SEQ ID NO: 28887 - DNA, 423 bp, Escherichia coli
atgaaatctttacaggtagttttagttactggtgtggcggtactggcattgggagccgcagtggtaacaacaaagtatcttgctacagatagcgcggaaatagaatctgcccgttctgttatcgtcgatccaaaaaatgatgttattaaatatattacggccagagaagaaattcctgatatggtcactattcgaataaaaaatgtatcattgaatagcgccgataatagtgcagactttagctataaccgtttttataagcgaaatgttgatggtcaaagtcgtgtgagtatggataaggtaaaaggccatctaacgtttacctatgtaatcccgtctgtaataagccaagaagataatccggcaaagcggaaatttctggttaagacatatgaaataaaagttctggagtctcaagaataa

SEQ ID NO: 28888 - DNA, 207 bp, Escherichia coli
atgtacgtgtttttagggggtcggatgtacgagctagggggtcggatgtacgatcattgggggggtcggatgtacgtggataactttatgtttcaacaggttttttacagggttgttcaccttatccctaactttactcaaagagggggagcggcattaacccgaaataaaaaaggcccgtatgggcctatttttttgcttccttga

SEQ ID NO: 28889 - DNA, 801 bp, Escherichia coli
gtggcgacagattgccagcgtgagcaactgagctatgtcattggcaccgaagttccggttccgggcggtgaggccagcgccattcagtcagtacacattacccgggttgaagatgccgccaatactttacgtacgcatcaaaaggcctttattgcccgtgggctggcagaggcgttaacacgcgtgattgccattgtggtgcagccaggcgtggaatttgatcacagcaatattatccattatcagccgcaggaagcacagccgctggcgcaatggatagaaaacacccgaatggtttatgaagcacattctaccgattaccagacccggacggcttattgggaattagtccgcgatcactttgcaatattgaaagtcggtcccgcattaacctttgctttacgtgaggcgatatttgcgctggcgcaaattgagcaggaacttatcgccccagaaaatcgcagcggttgcctggcggtaattgaagaagtgatgtttgacgaaccgcaatactggaaaaaatattatcgtacgggttttaacgattcattactggatattcgttacagcctgtcggatcgtattcgttattactggccgcatagtcggattaaaaatagcgtcgaaacgatgatggtgaatctggaaggcatggaaatccctctgggcatgattagtcagtatcttcctaaacaatttgaacgcattcagtccggggaattatcagcaataccgcatcagttgattatggataaaatttatgatgttttgcgcgcctatcgctacggctgtgcggaataa

SEQ ID NO: 28890 - DNA, 957 bp, Escherichia coli
atgaccaatttgtataagtttatgggagcggatataattgataaattgatgatggatgaaacacatataggaataaaattctctcatttacatgaatataatgatccctatgagtttttccttactattgattttaatcgcggttctgatgagttagcattttacaatgaaatgattggcatggttacaaaacaaccagcaacttgttttacgaaaagccctgtgataccacctatgtgggcacattatgcaggtaattcttctggttttgtaatagagattaatgaggagaagtttaaaaagtatttggatgaaatcggcttccaggatcatagttcaatagcagatgttgaatataaagattctccagatacaggtattgaagacattctggcgagagcatttcatatctgtaaacctcgttatatctactggctacaatcctgtataatgacagccgcatatttgacaaaacaaacttgctggagttatgagcaggaacgtcgcgtaataattaatgagaaagcacttactaaactgaatgacaatcttatgctccttccggtaccgattaattgtataactggagttatagttgggcacaaatcaaatgatttattaaagcagaaaattcaatctttagctaaaaaggctaaatgtagatatttcgaaatggtaataggaaaaacaacaactacaccatttcttttatctcaaaatctcaaatcacaccaatttattaatggcaatataatacctgcatcaaggcaatgtaaaaaatgttatgagcctttaaacatggaaaataaagtttgtggctggtgtggaattactaatcatgatgtgaaaatggcagagtaccgtaattcatttcgaatgatagccaactatggtgggctggataaatatatatcatccatgaataagattactgaagagtataataagggtaaataa

SEQ ID NO: 28891 - DNA, 1179 bp, Escherichia coli
atggcggcaaggccacgtaaaaaagaatacagacatcttcctgattatctggtttttgataaagatcgaggtgtttataaattcacacttattaccggaaaaaagaaaaatataggtaaggatcgggcaatagccgttgcaatcgccagagagtacaacctgaggatgcgatcagaattatacccatcagtggataatcttattagagaatctggcggggtcaccggagaagcaaaaccatttgctgaacatgtcgatcacataatggccagaattatcgaagacgaacgaccttcccagagtaccttagatgactggaaaaatgacgctctacgcgtaaaagcatttttcgtaaatgttccggcatgcgatatcgaacttgaacacgttaatgcctacatcaacaaatatcatgccagcgcatccgcaaatgtgcagaacagaaaggtcagctttcttaaaaagttgttctcttatgcggtcgatgaatcactaatgcaggataacccggccatcagaaaaaaaatgcgtaggactgatgagaagaaaagacggcgcctgtcactcgagcattttatagctatcaggcaggccgctgcaccatggttaagaacagcaatggacctagcattgcagactacacatgcacgactcgaagtatcgcgaatccgttactcaattcgcgaacctaaagacggtttatgtggatgtgtttggttcgaacaaccacaaaatggcatatatggtacactatacatccataggcaaaaagtacaaaaaaaggaggcatcacatgttgcaataccaattggtgaagaattgaaacggataattgacaatagccgtgacaatgtggccagtccctttgtcgttcatagaatcccagaacggcatgttaaacgcagtaaagaggtttcgcacccaactcaagttgcaccagattatttgagtcggtcattctcttccgtgcgagacaaactcggactatgcaatcatctagcaatggaacaaagacctacattccatgaaataagagctttggcagctcacctatttgataaacaagggattgatccgcagggacgaatggcacatagcgatgcgaaatctactaaaatttatactaaaaatcatatagattggattgttgtccctcatggagaaattaaaaccggttag

SEQ ID NO: 28892 - DNA, 225 bp, Escherichia coli
atggaactgataaatggacggccaggcagagattttatagtgggaacatatacctactcagaaattaaagatcttaacttcatggctaaggaagagaaaagagctcgtgaagagctaaagcatcggggttacgaattggcgtatatcaaggcggactctgaatgtaacgggatgtttgtcagggcgtaccgggtctatactgacaaagcgccatctaatgtctaa

SEQ ID NO: 28893 - DNA, 1527 bp, Escherichia coli; identical to SEQ ID NO: 16547

SEQ ID NO: 28894 - DNA, 519 bp, Escherichia coli; identical to SEQ ID NO: 15755

SEQ ID NO: 28895 - DNA, 186 bp, Escherichia coli
atgattgatgtcttagggccggagaaacgcagacggcgtaccacacaggaaaagatcgcaattgttcagcagagctttgaaccggggatgacggtctccctcgttgcccggcaacatggtgtagcagccagccagttatacgggcggacgttccatgctgcgttactacatccagcccaaacgtaa

SEQ ID NO: 28896 - DNA, 1218 bp, Escherichia coli
atgaaaaataaatattctctaaatcaattatctaaaaaattaagtgattggcaatgggagagtaaacagcaaaataatgcagggattcaagttcttgatcttttctgtggcgcggggggaatgtcgagcggttttgcaacgattgcaaatgagactggtttctatcgcatgattggaggtgttgatatcaatccagtatcaattaaaagctacgagaaaaatattaacgcgccaggtatcgaagctgatgtttttaaaatttccgagaacaaacttgccactatggaatttttaaaaagcattcctaattataatccatcgcaacctttggttttaataggctgtgcgccatgccaaggattcagtgctcatcgtaaaaaaaactgggatacaccagatcatcgcaatggtttagtcgaatgttttgccgatatagccagttttattgaacctgaatgtatcatcatggaaaatgttcctgaattattgtcaggtagatattggcatcattttgaatatttcagagataaacttcaagaaaaaggttatattgttaagcaatctatacataatgcggcaactttcggcgtcccgcaagaaagatttagagctattgttattgctatgaagtctgactttaatcttcctgaaggaaaattaaatagggaaaacttcaaaacagttaaagatgctattggtcagctacctccagtatcagctggtgagaataatgtatttgataaaatgcataaaagtgcgagccacaggaaatcaacgattgaagtaattaaacagatcccacttgatggtggtagcaggccagctggcgtcggtcctaaatgcttacaaaacttcaaaggttttgcagacgtttatggacgtttatattggaataaaccatcgattactattactcactatgcaagaaatcctgcaagtggaagatttgttcatcctgagcaacatagaggattaacagcaagagaagctgcacgcttacaaagtttccctgataactatgaattttgtggtggatttgacgatattttcagacaaattggcgaggctgttccaccgttgatgtccttaaatattgcctttgaaacaatgaaaaatcttaatggggatgtaagtgttttacaacaggatctagttcattcacctgtaaatgattcatacgcaggaattattgcgggcattaaaggtggacgcatttga

SEQ ID NO: 28897 - DNA, 1059 bp, Escherichia coli
atgagtaaatataaagtaattgatgctttttgtggtgcaggtggactgtctttaggtcttaaaaatgcaggctttgaaatagttctaagttttgatcttgacaataaagccatcgaaacaatcaagcaaaacgctcctgaacacaaaagtattgtttgtgatgtaaaatctataagagatcatactgagtttaaagcactttcattaaaaaaaggggagcttgatcttctggctggcggccctccatgccaaggttttagtattcaacgcactgttggtagcgatcacgatgaccgtaatttattgattgatgattatggtgatttaatccgagcactattgccaaaattctttttattggagaatgtaccaagcataggaggaaaaagaggtaaagctatacttgagaaatttaaagctgatatggctaaattaggctatttatgtcatgagcaaattattgatgctcaagattatggcgttccacaaagaaggaaaaggtacattttggttggcgaatttaccactaacgctaaaccaagttttgcttggcctcaaaaagtttcatctcctaaaatgacagtaagagaaactatagcacatcttccagaactgccattatctagccaagacatggtcaaatatcctttgcatagagctgataaactttctgaaataaataagctaagaataagtttcttaaaggaagggcagtcaagaaaagatttgccagatgaactattagctgagtgtcataaaattagtgctgatatcattgggcatcggaatgtttatgggagaatgagttgggatgatgtagcaccaacaataactgcaaaatttgattcatttactagagggaagtttggccacccctcccagaatagaagtatttctctacttgagggggctttgttgcaaacattcccaaaagattatcttttcattgggaataaagtagaaattgctcggcaaataggaaatgcagttccccctctactttcctatcaccttggactatcaattattcatgcgctggatattaaatatgcaatatga

SEQ ID NO: 28898 - DNA, 321 bp, Escherichia coli
  misc_feature (308)..(317): n is a, c, g, or t
atgcaatatgaaaaaattgtaagaaaatacttaactgaatttaaaaaggttgctaagacagtagatcttgataagtccaatgaattagctacaaggccatgtgtccatattttcatacaagaactggttacaggactcaataaaaacgtaattgtccatcatgacaggaattttactaaaactgaaaaacccgattggagattagaggataataaaaactttggtatctattgttttggcgaccataaaaaaactaactttagcgaaagcccaagactcaatgataatgaaatattacaaattaaacnnnnnnnnnnttaa

SEQ ID NO: 28899 - DNA, 1395 bp, Escherichia coli
  misc_feature (8)..(41): n is a, c, g, or t
atgctgannnnnnnnnnnnnnnnnnnnnnnnnnnnnnnnnnacgaatggcattaatatgcgtgaaatcaggaacacaagagcgtaagctttatcataaaaatataaataacaatgacttacagtcaaaacaaagttttttacaatcttgttattatcccgaaaattttgatgttttatccattgatataaaggactattctttttctaggaaggaaaaatatcctgttaatgaatgggaatcatttacaccagtatattccaatgatagtaacagcagtatatttaaaagtaagtgctcagccctaaaactggctccatccagtctgcttttccataccgataaaccaattttgttaagaagaacacatgaagttggcagtgctaagggtgagctgaaaactcaagaagttatagaaaaatggtttaaaggacaaagcaagcctccaaaattagataaagtcacggaagatgttaaaaaagctttgaagtgtacaaacacatccgaattatcaccttatactttccgtccattcctagatgggtgggtaattaataacaacgtattatttgaatcgcttgaaagtatacctaatagcgggacaagatccagacctgaactaagactagcactcaaaaacaatataataggcattgctctgtcaccatctacaaaagatttagattcagagataaatagatttgcaagttttgtttggaatttacctgataatgatattgtcgctcgtggtaatgcaatgatattgacaactaaatatcctaaagattacagaaaaggagatgtagaattagacagcaatattaatgatttcgttagcggttatctcaatgaagataatttgatttattatatttatgctattatatcttctaattactatcttaatagatattctggcattctttatggttcatttaatgacacaaatcctctcagaattccaataacagataacgaagagaaaaagcaaaaattagtaaactatgggaaagtgttagcaaattgcgaaaatttctcggatccaataagttcttcttatacccatggaataaccacagaaatcattaacaatccttttaatttaaagaaaataaaaataaattcgaatgagataattttaatatcagaaacaagtgatatattagaaatcaaagaaatcgacacctcagtattgtcactcaaaatatctggccataaggttgttgataaatggcttagagagaggttatattcttatctgagacgatcaataaataataatgacgtcagtctattactaaatttacttggccgaataaaaacccaattggagacaattaaaaacatcgatcttgttatttctgaacttattgacaaaaaagaaatagcccggtag

SEQ ID NO: 28900 - DNA, 1227 bp, Escherichia coli; identical to SEQ ID NO: 24498

SEQ ID NO: 28901 - DNA, 159 bp, Escherichia coli; identical to SEQ ID NO: 5044

SEQ ID NO: 28902 - DNA, 309 bp, Escherichia coli; identical to SEQ ID NO: 20883

SEQ ID NO: 28903 - DNA, 603 bp, Escherichia coli; identical to SEQ ID NO: 25268

SEQ ID NO: 28904 - DNA, 621 bp, Escherichia coli
  misc_feature (107)..(116): n is a, c, g, or t
ttgtacggcagtgagggagcagatctgcttgatggcggagaagggaatgatcttctgaaaggtggatatggtaatgatatttatcgttatctttcaggatatggccnnnnnnnnnntggccatcatattattgacgatgatggggggaaagacgataaactcagtttggctgatattgatttccgggatgtggccttcaggcgagaaggtaatgacctcatcatgtataaagctgaaggtaatgttctttccattggtcataaaaatggtattacattcaggaactggtttgaaaaagagtcaggtgatatctctaatcaccagatagagcagatttttgataaagacggcagggtaatcacaccagattcccttaaaaaggcacttgagtatcaacagagtaataataaggcaagttatgtgtatgggaatgatgcattagcctatggaagtcaggataatcttaatccattaattaatgaaatcagcaaaatcatttcagctgcaggtaattttgatgttaaagaggaaagagctgcagcttctttattgcagttgtccggtaatgccagtgatttttcatatggacggaactcaataactttgacagcatcagcataa

SEQ ID NO: 28905 - DNA, 285 bp, Escherichia coli
atgtttcattatctacttcttattgagcaaggttatatcagtaataaagatctaataacggatgacataactaaactgggctacatgcgccattgtggccatatgctagatatgggtaccgacgtgcgactatctgcgcagggacaagaattcgcccaggcattaaatgaacctacggtttttgagaaattaaagtcaatgagcgatgcccctttgagtacaatcaaagatgttgggctggagttaacgaaggcctatttaaagaagaaatttggcctcgagtaa

SEQ ID NO: 28906 - DNA, 213 bp, Escherichia coli; identical to SEQ ID NO: 12472

SEQ ID NO: 28907 - DNA, 393 bp, Escherichia coli
atgatatataatgaaacatgcactgcaaattgggtaatttttaatgacaaggggcgagcaaatcttaccatcgactttatgtataaccaaaaaaataaaacaggaactgttgcgttgagcggaacctggcaacaaggtaacagagaaagtaagtcaatacggcgaaatattgaatacacatggattgaaaactatgacacagcccatttaacatcaaagaaagttaataaatttgagatcatggatcaagtcgatgatgatagacttgcagaacttattcctgatttttatgtctttccagaaaaaagtgtaagctataatatactaaagcaaggtaagcatgcttttattttgagtattggtaacagagcaataatgcattgtgcaaggtaa

SEQ ID NO: 28908 - DNA, 141 bp, Escherichia coli
atgctgaaaggcgggatttccggtcgcagcgctaaaggaaaacgtatccacacccgtgccattcacagcatcgacacggacattaagctcaatcgcgcattgtgggtgatggcagaaacgctgctggagagcatgcgctga

SEQ ID NO: 28909 - DNA, 261 bp, Escherichia coli
atgaacgtcggcagctgctccgaaaaagtctcccgtcgtatcgcacagatggaagctgacctgaaggcacttcagaaagaaagtgatacccttaccggtcgggttgacgacccggccgtgcagcgcccgctgcgtcaaacccgcacccgcaaaccgttccccgaatcactcccccgcgatgaaaaacggctgctgccggcagcgtcatgctgcccggaatgtggaggctcgctgagctatctgggtgaggatgccgcctaa

SEQ ID NO: 28910 - DNA, 312 bp, Escherichia coli
atgccgcaaaccacgttgcaatggggcattctggtgtttcttggcgtggtggcttccgggattggctactttatgtggaactacggcgcgacgcaggtggacgccggaacgctgggcattatgaataatatgcacgttccggcagggctgctggtaaacctggctatctggcaccaacagccgcactggccaacgtttattacaggcgcgctggtgatcctggcctcactgtgggtgcatcgtaagtgggtcgctccgcgctcttcacaaacggcagatgatcgcaggcgtgattgcgcgctgaacgaataa

SEQ ID NO: 28911 - DNA, 921 bp, Escherichia coli
atgaaagagattatctacaacatattttgctttagtcctgatggagttcatatcacacatgccggaatagtacctcacgaacatgatggcgatgatgcgcaaaaattagattttttaaagcggaatttggagattgacttagcttcttgtcgtttattttatgggatacacccttctgttttagaaaatgacaaattgacacttgaaagatataatgcaaatttgcggattggtaatccttttgctccgtttgaattagcattagaagctcaaaatgcacctgaaaaccctttagctatagtcacccccgttgttaaaggcaaattacaatatgatattcagttatcaatgtcagagcaattaaggaataagcacacacctaactatcacattgaaggtgtaaaagacttgccagactatcttgataagtatatgaaagatgatggttttcacattaaggaacttcttaatgatgaccatatggaaccaataaagcttctgtttaacaaaaaacattacttgtcaagcttcaagctattaatgtcatttattgatactatagcttatattgagtttggaaacaaaagaagagtctttcaaaattggttagatacatactcagatatacaaaaacttggagtaacttccgacgaattatatgaattaaggaactcattgcttcacatgactaatcttaattcacacaaagttactcagggtaaagaaagacgtcttagtattgctgtatgtaaaagaggtcacccaacccaatattatgataatgtagtgtatataaattatacggattttttatttctattcgatgaagctgtagacaaatgggttgatagttataatggaagtaataaacaactaaccttcattgaaagatatgatgaagttgtcagggataattactaa

SEQ ID NO: 28912 - DNA, 615 bp, Escherichia coli; identical to SEQ ID NO: 10388

SEQ ID NO: 28913 - DNA, 231 bp, Escherichia coli
atgttgggtggagcggacaatccaaatggtgaattaccgtcttatatcactggcgctgacattcttcaccagttggggttcaaaataaccattacgatcacgtggagttgccagctcaaagctgccagtcggggctttaatggtcttttttccggaaccatttttacgattgacttcaacatcctgagccagatgggagtcgagttcagcggccagagcggtttctgttaa

SEQ ID NO: 28914 - DNA, 219 bp, Escherichia coli
atgtatgaagaccgtttggaaactatcaaggcagtttgtgaaaaacttaaaaaccaaccacgtaaaccaaaaacggtaaagagtaagcatcagcctgtcacctcaaacagcaaaataaagattcgcaaaattccttcgtggtgcattgaccgtattccggttggttcaagaattattcgtgaagatggtgattatcattgggtatcagttgttggttag

SEQ ID NO: 28915 - DNA, 1575 bp, Escherichia coli
atgagcaaattcacagttgatagttttatcgttgaattaagcttcaatgaaaacattattaagggcttgcaaagagttgaaaaggcagctttgcagtcagcacaaagaattgaaaagaacctaaataaaggtttcaggattaatacaaagcagcttgatagtaatttaacggcttctttagggcagcttgaaaggaagtttaataaggcctttgacaagattgaacagagagcaagaaatactaaagctttccagtttaccaccagatttaatgacactgttaatcctccaaaacaaccgagacagccacgaattagcggcaacagagcaatcacagcagcttactcagcgaatatgagcaagctaaaaggctttgaccctattttgcagaaatacatcaaatctcagttttacgggctatctgctaaagccggttcaatggattcttcaaaattcaatgagaagttagctcagttaaacgcttcagtcagagaagcaattgctaaagccagaggtcatacatccaccagcattaatggtgacagagcagctaatagtcttgataacctgtcttcagcagcagttaaaacagcaggtgcatttatctcaatgcaggctgtattagccagttatcagaagattatggaaattggtttacagcgtgcaagtgctgaacgttcaattgatttcgtatttgataaagatgcaggtcaagtaaaagagttcacaaagtcattagctcaaacaacgggtttagatatcgctgaactgcaatcacagtttgctggttttggtgcttcagctaaagagtctatgggcattcaaggttctgaagaactttttaaaaatatgattggctatgctcgtctgatggggagaagtgaagaagagattaagcgagcactgacagcattatcacagatggctggtaagggtcaggttatggctgaagagcttaaggggcaattagctgaagctgttcctggtatggttcaggtattcgctaaagcaaccggaaggaatgaacaagagctatttgatgccatgaagaagggggctttaaaatctgccgatactcttcagaaggtcactcaggaactgaataaacaaatcaccgctaaaggtggctggaaagctatttcagaaagtacacaggcacaactagggaacctgaaaaactcttggaataccacgcttgatagtatcttcagaggttctgaagatggtctgcaagattttacaagaagcttaacaacgcttttaaacgctcttggtggaagtggtaaaagtcttggtgaatctcttggtagtctcatgacttctatgtcacatggtgtcgattcattgactgatatcagctacagggtaagagcattcttcgatgaggtgacattagcttaccgttcactaaatgacactcagaaaaaaattgttgatggtttatctgatgggttaattgatggtttgaagatgcttgccgtagctgttactgctcaaaaggctgcaaatgtagctggaggcttgttaaaccttgtggatttgcccctatatttccagacatctgttatcacttaa

SEQ ID NO: 28916 - DNA, 609 bp, Escherichia coli; identical to SEQ ID NO: 10386

SEQ ID NO: 28917 - DNA, 528 bp, Escherichia coli
atggtgaaggatattattaaaacagtgacattctcctgcatgctggccggcagtatgttcgttacctgtcatgtctgtgcagcgggttctgtggtgaatattacaggcaatgttcaggataacacctgcgatgttgacattaactcccgaaactttgatgtcagtctgggaagttatgacagccgacagtttaccgcagctggtgataccacacctgcgtcggtatttcatgtcgggttaacctcctgcggcagtgctgtccgtgcagtgaagctgacatttacgggcacaccagataatcaggaggcggggcttattcagattaacagcataaatggagcgcggggtgtggggattcagcttcttgataaggataaacatgagctgaaaattaatgtgccgacaacaattgcgttaatgccgggaacacagaccatagcgttttatgcccgtctgaaagccacttatcttccggtaaaggccggtaatgttgatgcggtggttaattttgtacttgactatcagtaa

SEQ ID NO: 28918 - DNA, 2631 bp, Escherichia coli
atgttttccggagatggcgcacaactcctgtctgataaatcactgaccggctctgctggcgggggtaataacagaatgaaatttaatatactgccgctggcattttttatcgggataattgtttctccggcccgggctgagctctattttaatccgcgttttctgtctgatgacccggatgcggttgcggacctgtctgcatttacacaggggcaggagcttccgcccggtgtgtaccgggtggatatttatctgaatgatacgtatatctcaacccgtgacgtgcagtttcagatgagtcaggacgggaagcaacttgccccctgcctgagtccggagcatatgagtgcgatgggggtaaaccgttatgccgtgccgggtatggagagactgccggctgacacctgcacatcactgaattccatgattcagggtgccacattccggtttgatgtcgggcagcagcgattgtacctgaccgttcctcagttatatatgagtaatcaggcccgtggttatattgcgccggaatactgggataacggaattacagcggcattgctgaattatgacttcagtggtaatcgggtgcgcgacagctatggtggcaccagcgattatgcctatctgaatctgaaaacaggactgaatatcgggagctggcgtcttcgggacaacaccagctggagttacagtgccggaaaggggtacagccagaataactggcagcacattaacacctggctggagcgggatatagtttccctgcgctcccgtctgacgatgggggacagttatacccggggggatatttttgacggtgtaaatttcagggggattcaactggcctctgatgacaatatggttccggacagccagagagggtatgcaccgacaattcacggtatttcccggggaacatcccggattagtatccgccagaacgggtatgaaatttaccagagtacgctacctccaggcccgttcgagataaacgatatttatccggccgggagtggaggtgacttacaggtaaccctgcaggaagctgatggcagtgtacagcgatttaatgtgccatggtcttcggtgcctgtactgcaacgtgaagggcatctgaaatatgctctcagtgccggagagtttcgcagtggcggacatcagcaggataatccccgttttgctgaaggaacgctgaagtatggtctgccggcaggctggacggtgtatggaggagcctggatagctgaacgctaccgtgccttcaatctgggggtgggtaaaaacatgggctggctgggcgctgtttcactggatgccacccgtgcgaatgcccggttaccggatgaaagccggcatgacggtcagtcatatcgttttctgtataacaagtcactgacggaaacagggacaaatatccagttaatcggataccgctactccacacggggctatttcagctttgctgataccgcctggaagaaaatgagtggttacagtgttcttacccaggacggagtgatacagatacagccgaagtatacggattactacaatctggcttacaacaagcggggaagggtgcaggtgagtatcagccagcagacgggggaatcgtcaacgttgtatctgagtggcagccaccagagttactggggaacggacaggacggaccgtcagcttaatgctggctttaactcatctgtgaatgacatcagctggtccctgaactacagcctgtcccggaatgcatggcaacatgaaactgaccggatactgtcatttgatgtcagcattccgttcagccactggatgcgttcggacagcacatctgcatggagaaacgccagtgcccgttacagtcagaccctggaggctcacggacaggctgccagtacagcagggctgtatggcacattgctgggggacaataatctgggatacagcatccagagtggttatacccggggagggtatgaggggagcagtaaaacaggatatgcctctctgaattacagagggggatacggtaatgccagtgcaggatacagtcacagtgggggttaccggcaactgtattatgggctgagtggcggtattctggcacatgccaatggtctgacactgagccagcctctgggagatacgctgattcttgtccgtgcaccaggtgcatctgatacgcgcattgaaaaccagacgggggtgtctacagactggagggggtatgctgtactgccttatgcaacagactatcgtgaaaaccgggtggcactggataccaacacccttgcagataatgttgatatagagaataccgtggtcagcgtcgtgcccacgcatggtgccgttgtgcgggctgactataaaacccgtgtgggtgtgaaagtgctgatgacgctgatgagaaacgggaaagcagttccttttggctctgttgttacggccagaaacggggggagcagtattgccggagagaatggtcaggtttatctgagcggaatgcctctgtcaggacaggttagtgtgaaatgggggagtcagaccacggaccagtgtactgcagattataaattaccgaaggaaagcgccggacagatattaagtcatgtcacggctagttgcaggtaa

SEQ ID NO: 28919 - DNA, 603 bp, Escherichia coli; identical to SEQ ID NO: 9019

SEQ ID NO: 28920 - DNA, 195 bp, Escherichia coli
atgcgtattcaccgtcagcatccggcatcccgtctttttccgttctgtaccggcaaataccgctggcacggcagtgctgaagcgtataccggtcgtgaagtgcaggatattcccggtgtgctggccgtgtttgcagaacgccgtaaggacagttttggtccgtatgtccggctgatgagcgtcactctgaactga

SEQ ID NO: 28921 - DNA, 768 bp, Escherichia coli
atgacggcatcagggacaacaacaaccggagcaattaagacaacgggtaatgcgtctgttgcatcagatctgagtgtgggtggaacatctacccttaatggtcctgtaaatatcaacaacaacctgaaagtaaaatccgacacctatctgaacacgctatcaacaacaggtctggcgaagtttggtagtcgtatcgcgacgaatggacttaatccaaacgatctgcctgctgggtgggctggtggtgttcgcacctatgatttgtatgcgtcagggactgttggtgtaggaacaggtaaaacagttaaagcttacatgaacaatgcgggtaatatttatgcgtcaggtaatcttactgctggaacgataaaatccaatggaacaattgaatcaacaggcagaatcaaagcaggtgaatatctccatttgaatggtcaggcaacattaaatgcgaaatgtacgcctaatggtctggtggggcgagacagtacaggtcgagtgttatcgtgtgtcagtggtaaatggcagacagcaagcggtgatggcctgaaaggtatttttataacaataaccgatcaaacatctggatataaatgtgtaatacccaatagtgatacaggtgcatgtgcttgtccggggtcgatgtatgactcaaggtatggttttttatctggaacacttattgcggaatatgatgaacgtcgttgtagtggtagtaagaacgagcactgttatagtaattttagaaggttatatgcatgcaaataa

SEQ ID NO: 28922 - DNA, 123 bp, Escherichia coli
atgatcctgatttccctgagcagtatcagcgcttattggagcgtctggattatcagacgatgcccggtactaaagcatcaggccagcgtaactctggctacagcggtttttgacctgttgtaa

SEQ ID NO: 28923 - DNA, 192 bp, Escherichia coli
atgaaattagataaagcatctcacgccgaaataactaaagaattagagcgtctgaaaaaaggtggcagaaaagaagatgctacaccggaaattcgtaagcttgttaagcaactgactggttatgaatatgaccagtgcttcggtaataacaatgttggctttaaatttgaaaacaaagcaggggcattctag

SEQ ID NO: 28924 - DNA, 1272 bp, Escherichia coli
atgactgaagaaaacagaagaataaaagccataactcgtttttcatatggtagtggaaatcttatcggcagtggagctctggctattagtggagcatggttactttatttctacactacattttgtggattgacagtttttcaggccactgtaatattttccattgctacttatctggatgtcatcctgaatccactaatggggtttattacggataatttttatcagacaaaactcggtcgtcgctttggtcgtcgtcgcttcttcatattaattgccattccatgtatgattatctatccattgctttgggtaaatggtatgagtttttggtattatctttctacttatatcatttttgaagtggtatatactatgattatgataccgtataataccttacctgttgaaatgacaaaggatttcaatcaaaggacctatttgacaggttctaaagctatgtttggtaaagtagctaatttcttagcagccgctattcctggtatctatttttacttcttcaataaagattcagccaccccatttttcctgaccggtttaacttatgctattattatgatcacttcattaataatgctctatttcaacagttgggaacgtccaactgatgatgtagttgatgaatcaacgcatggttttatggagggctttaataaactttttaccgatcttttctcaacctttaagctaaaaaccttcagaacccatcttggtatgtatctatttggtttcggcgctgaatggctatttacagcgacatttacctatttcattgttttcaaccttgaacaaccgagaacatttgtttctgagatgaactcattaagcagtatttgtcagttcttctctacagcattctttatgatgtggtgtgccaaacgaggatttaaacgcccatttatcattgctatcttaattgttgtatcttcagtgattggttatgttggtgtgtactatcttaatattccccatctgacctggctcattattggcatcactatctggtttggtctggggacggggggggtatattacattccgtggagtgtatatgtattccttgccgatgttgatgaggtcttaactggtcgtcgtcgtgaaggtctttatgctggtgcaatggttatggccggtaagttaatgagagccactgtagtattttgtctgggggttgtcctcagtctgtttggttttgagtcaggcattcatcaatatattagaggcctggggatattcttctgttccagctga

SEQ ID NO: 28925 - DNA, 819 bp, Escherichia coli
atgcgattagcaagtcgttttggttatgcgaaccagatacgccgtgaccgtccgctgacacatgaagagctgatgcattatgtacccggtatttttggggaagaccggcatacctcccgcagtgaacgctatacgtatatccccaccatcaccgtgctggaaagtctgcagcgggaaggcttccagccattcttcgcctgtcagacccgcgtacgtgacccgggccgccgggaatacaccaaacacatgttgcgtctgcggcgggccggagagataaacggacaacatgtccctgaaattattctgctcaactcccatgacggtacctccagctaccagatgctgccaggttacttcaggttcatctgccagaacggctgcgtctgtggtcagtctctgggggaagtgcgtgttccacaccggggagacgtagtggagaaagttattgaaggggcttacgaggtggtgggcgtttttgaccggatagaggagatgcgtgatgccatgcagtcgctgattctgccgccaccggcacgccaggcgctggcacaggcggcactgacttaccgttatggtaatgagcatcggcccgtcaccaccgctgatattctgacaccgcgacgccgggaggattacggtaaggacctgtggagtacttatcagaccatccaggagaatatgctgaaaggcgggatttccggtcgcagtgcaaaaggaaaacgtatccacacccgtgccattcacagcatcgacaccgatattaagctcaaccgcgcattgtgggtaatggcggaaaccctgctggagagcctgcgctga

SEQ ID NO: 28926 - DNA, 372 bp, Escherichia coli; identical to SEQ ID NO: 9063

SEQ ID NO: 28927 - DNA, 549 bp, Escherichia coli
atgaagttaaaattcatctccatggctgtattttcagctctgaccttgggtgttgcgacaagtgcgtctgccgcacctgctactgtcaatggtggtacagtccattttaagggggaagtggttaatgctgcatgtgcagtaaatgcaaattctttcgatcagacggttcagcttggtcaggttcgtacagaaaagctaaaagccgacggggataaaagtgctgctgttgggttcaatattgaacttagtgactgtgacacaaaagtctcaaatggtgcatcgattttattcagtggcacaactgttgcaactaagaataatgtattggctcttcaagggtccgcatcaggaactgcaacaaatgtgggagtgcaggttcttgaccatactggtagtgctgtaacgttcgacggaaatactccaacagctagctatacattatctgacggaacaaataaaattccgttccaggctctttatattgctactggtcaatcaacagctggtacagccaacgccgacgccacctttaaagttcagtaccagtaa

SEQ ID NO: 28928 - DNA, 219 bp, Escherichia coli
atgcttcctcccggaagcatgacatgccagtggtttccggccagtgcagcgggagacagcaaaaataacattactgccattttcgatattttcattaatctcacccccgcatggataaaaacagccctccctggccgggtatatatccgttacactgttctgatattactggtactgaactttaaaggtggcgtcggcgttggctgtaccagctgttga

SEQ ID NO: 28929 - DNA, 489 bp, Escherichia coli
atggtccggcacccggatatccaccaggcccagtgcctgtaccagacgttccgtgataagccggtctgccttactgggtgtgacttcaccggacgggtgattgtgcgccagcaccacggcagcggcattgtggtacagggcgcgtttaatcacttcccggggatggacttccgtgcggttgatggtgccggtgaagagggtttcaccggcaatcagctgattctggttattcagatacagcacccggaactcttcacgctccagtcccgccatgttcagaatcagccattcccgtgccgcacgggtggaggtgaaggccacgccgggttcatgaagatggcggtccagggttttcagagcccgcagaatgagactgcgctcgccgggcgtcatttctccgggcagaaaggaaatctgttgcattgttcctgcccctttcagtcaatgatgcgcataatggcgctgcattccggatgctgcagggcgtaa

SEQ ID NO: 28930 - DNA, 549 bp, Escherichia coli
atgatcgtgtgggcatggaatgaacatgtcgttatttctgagatgatgaatattcctcctcaaaataatatggttgtgcttgttgacgaattagaagctcatttacatccaaaatggcaaagagcatttttaccatctttaatagcacttgataaggtattttcaagtgagttgaagatccaatttatcatcgctactcactcccctttagtaatggcatcctctgaggaagtattcgatatcgagacagatagcttatatcacttacaattggataacaaaggtcatataacacttgatgaattagacttcgtcaaatatggagatgtttcctcttggttaatgtccccaatttttgaattacgacaagcaagatcgcaagaaggcgaagcagctatcgaggatgcaaagaaaatacaggcacttgaaaatcctgatatagaaatgatagaagatataacagttagattgcgtaaatatctttcagccacagacaaattttggcctcgttggattatatttgctgaaaggaatggggttaagttatga

SEQ ID NO: 28931 - DNA, 1128 bp, Escherichia coli
atggggaatgaagtttatcaaagtcaaaaatgcaagttgaaatattcaaaatctcaaattgatagggctgctcaattgataaggcacgggtgtagtgacgaagaaaggcagcaatctattgaaatgatacaaaatttccgtgagctgcatctttatccattaatgctcatgaaaaatcatttagcaagagcagctgctaaggttgacaaggacaaaaagattctcgttgcaagaagacttaagcgactttctaccataatagataaactagagcgtcctagtcttgatggaggcagaactagcaatgcaattaaattaacacggatgcaggacgttggcggatgtagggccattgtcagaaacttagaccagttgatacagctaaaggaacgtcttttaaaaagcaaatctgttcataggattgttaaagagtatgattatcttactcccaaagacagcggctatagtggaatccaccttgcatacagttgcttcgatcagaaagaggatcaatatccgtggcgaaaaacaaagattgagatacagttaagaactcaattgcagcatgcttgggctactagccttgaaataattgatacccttgaaggtatcaagctgaaaacttcaagtgaagggcatccagaatggagacgatttttctatctagccggatgtcttgtagcgcacgacgaaaaagcctgcactcttgatgagctagttgtatctcagtatgaaggcgagcttaaagagctggaacggactttatctgtacggaggaaactaagcacatacaccatcgccttaaatttaacttctgacgcgaatttgattaagaagttgccaaaaaatcataaggggcattacttagtaacaatgagaaatgcagaaaacaagcccaatacaaaaaacaaaaaaatgttcctagtgtctgttcgcgcatttaaaacaaaagaagcagatgaagcccttgaggccttaaataaagacgattctaatcctaatgtattgatatctgttctcgttgctacagataacattaagtcactaaaaaaagcctaccccaactattttggctcaacaaaccagtttacaaaattcttagataagcatcttcgtaacgaaggatag

SEQ ID NO: 28932 - DNA, 123 bp, Escherichia coli; identical to SEQ ID NO: 23009

SEQ ID NO: 28933 - DNA, 219 bp, Escherichia coli
gtgcctacattattcagaaaagaatatccgcgaaaaagtagagcgacagaacttttgtttctcattctgtttatcgtgttgatgataccgatatccccgctaatttttgtctgggcaatcgggaaaataattgaaccagttattgaattgtataacgacgtggtatgggcgtcgttcaacacactgcacaataaaattaatccgtataaggaaaactga

SEQ ID NO: 28934 - DNA, 165 bp, Escherichia coli
atggttataaaagcacgtctaattctggctttgttttttctcgtgctatctgtgctggtggatttcaccagcaccatcctgtcggttttatccgacggggcgttggtagcagtagctgtaacattggtatggccgatatttaaaccagcctcgaaggatcagtga

SEQ ID NO: 28935 - DNA, 360 bp, Escherichia coli
atgtccgatatggaaattgaaaaagagattctggccaaaggcaaaacagcaccacgcctgactcctgatcacatcgagagtgtgattgccgaagagcattatttcacagcttttgacggcattcgcgctgcgcatgaaggcgttcgtgaggtgctgtctgttcatccctctacgcgtagcctgaccatctgtgtcttggtgctgtgcaatggattcgttgttaccggggaaagcgcctgtgccagccctaaaaatttcgacgcggagattggccgtaaggtggcccgtaagaacgccattgagaaaatctggccgctggaaggttatctgctgaagcaaaagctcagcgagcagatttaa

SEQ ID NO: 28936 - DNA, 402 bp, Escherichia coli
atgtttgcggttaaacaagaaataaacaacgctacttctttgttcgaaattgagagtattaccgttggatatcctaggtcagatcaatttaaacaggcgttcgagattgctgaagaactgggtatcaaaacgcctgatgcgattgaatatatccctgttgcgtacgaagatgaggagatgacaaaggcaatcggggaagagcaaactttgagtacagagcgtaaggatgtacagcgggatgactgtatcgccgtgatttgctctggggttgcttctgaaatgttccccgacctccctgccataggaggtgttggttatcaattcctctacaaaggtgatacgttacgcatctatacaagtagtttgttgatcgaagaagtaggtacggaaaacgacaactaa

SEQ ID NO: 28937 - DNA, 3516 bp, Escherichia coli
atggatgaaaatgctttagggttggcctcatactggcgcaactcgcttgcggatgctgagtcaggaaagggcagttttgaacggaaagacgccaaaaatttcactcactggcatgggatagcggcgggacgtcttgacgaagcgattgtcagtaaattttttgagggagaaaaagacgatgtcgaaacggtcgatgtcgtcttgcgcccaaaagtttatttccggttactgcagcatggtaaggaccgttccgcaggcgcacctgatattgttaccccgctagtgacgccagccttgctaagccgtgagggttttttatatccgacgccagcgacctccattcccagagacctgcttgaacctttgccaaaaggagcattttcgattggtgagattgggcagtatgacaaatacaagacaatccatacctcgttctctatcaactttgatgacagcattgataagactgccgaaacggatgaagaacgggaagcacgatatgcagccttgcagcaggagtggcgtcaatatctggatgattcagagaggctgctgaagaacgttgccggcgactggattaaaaatcctgagcaatatgaactcgctgagcacggttatattgttaaaacggcgcaatctggtggtgccagtttccatatcctttcgctttatgatcacctgcttgtttgcaagaaggatgtgccgctcttcaatcgcttcgcctcgcgagaggttcatgctgcagagtctttgctggccccaggagcaaaattcagcgacaggcttggacactccggagataagtttccgctggcaaaggctcagcgcgatgccttaagccattttctggatgcaagacatggcgatatccttgctgttaatggacctccgggaaccggaaaaaccacgctggtgctttctatcatcgccacgcagtgggccagagcggctctcgaaaaatctgagcctccggttattatcgcgacttcaacgaacaaccaggctgtaacgaacattatcgaagcgttcgggaaagatttttcacagggcactggtgcaatggccggacgatggttacctgagctgaaaagcttcggcgcttattttccctcaagcactcgtaaagctgaggcagccaaaaaatatcaaactgaagatttcttcaaccaggttgagtcaaaagagtatgtagaggatgcactgctgttttatctcgagaaagctaaggcagcttttcctgaaaaagagtgttcatcccctgaaaaggtcattgaactcctgcatggtcagttggtagcaaaatccgagcaattgaaaagactgaacgcaacatggcaaacgttaagccaggtacgggctgcgcgtgagcttattgctaatgatattgagcaatatctcgataatttaaataaattactttccggacaagaacaaaaagtcactctactgaagagtgctaaaacggaatggaaaaaatatcgcgccggtgaatcactgatctattcattattttcctggctcccagcggttcgtagtaagcgacagtaccaaatacagctgtttctcgaagataaattaggcgcgctgattgcaggaaatcagtggtctgatcctgaaactatcgaacgtaatattgatgggctgctcaattccgctgagcgcgagcaaacaacataccggcagcagattgactccgcccatgaaatcgttcttaaagaacagcaggcggttcaggagtggcagaggctggcatttgatttagggtatgagggcgacgaggaactgagcttctcacaggccgatgaactggctgatacgcagattcgcttccctgcatttttactgacgactcactactgggaaggtcgttggctgatggatatggccagaattgatgatctgcaggaagagaagaagaaaaaaggcgctaaaggggtaaccgcccgttggcaacgtcgaatgaaactcactccatgtgtggtgatgacatgctatatgctgcccggcaatatgcagataagtgagcacaaaggacaacgtaaattcgagaaaagttatttgtatgattttgccgatttactcattgtcgatgaagccgggcaggtgcttcctgaagtggctgctgcctcgtttgcattagctaagaaggcattagtgattggcgatacggagcagatcccgccaatatggagtattgctcccgcgattgatgtcggtaacatgcttgcggaaaaaattctgtctggcagtacgcaagaagagattaccgagaaatatacggcaatcgcagaccttggtaaaagtgccgcatctggcagcgttatgaaaatagcgcagtttgcttcgcgctatcaatatgatcccgaactggctcgtggtatgtacctatatgaacaccgccggtgcttcgataatattattggatactgtaatacgctctgctatcacggtaagttgttgcctaaaagagggcgtgaagagagcaatttaatgcccgcaatgggttatctccatattgatggtaaaggagagcaggcaagtagtggaagtagatataatttgcttgaggctgaaacgatagcggcctggttggcagagaaccagcaaaatattgaagcgcattacggcaaatcgcttcatgaagttgtcggtatcgtgacgccttttagcgcgcaggtatccactatcaaacaggcgctgggtaaacaaggtatcagtacgggcgcgaatgaaaagtcgctcacagtgggcaccgtgcactctcttcagggagcggaaagagcgattgttatattctcgccagtctattcaaaacatgaagacggcgggtttattgatagcgataacagcatgctgaatgttgcagtctcccgtgcgaaggatagcttcctggtcttcggcgatatggatctgtttgaggtccagccagcctcatctccacggggattactggcaaaatacctctttgagtcagagaagaatgcgctctcttttgattataaagagcgtaaggatttaaaaacttccgagaccaaaatctacacacttcatggtgtggagcagcatgataacttcctgaatcagacgttcgaaaataccgataaacacatcacgatagtttctccatggctgacctggcaaaagctggagcaaaccggttttcttgattctatgattgcggcgtgttcacgtggtattaacgtcacgatagtcactgacagaagctacaacactgaacataaagattttgagaagcgaaaagagaagcagcagaaccttaaagcggcgctggagaaactgaatgcgctgggtattgctacaaagctggtaaaccgtgttcatagcaaaattgttattggtgatgatggtttgctatgcgtgggatcgttcaactggtttagtgcgacacgggaagcgcgatatgaacgatacgatacctcaatggtttattgcggtgataacctgaagggtgagattgaggctatttataatagtcttgagaggcgtcaggtttag

SEQ ID NO: 28938 - DNA, 891 bp, Escherichia coli
atgaataaaaaatatgaactggttgttaaggggataaataattacggggataaggttactgttactgtgaagccggaaggtgacgggcaagcgtcgctgttgttgccagatgtggcgattagtcttgaccgtactgaaggtgccacgctggagttttacgaagctgaggcgaaaaagcaggcgaagcagtttttcatggatgttgctgccgggttatgtgaaggggatggtccgttgccggaaaagcgccccgtaattttagaggcgcaggatgtgttgataacctacaaaggaaagctaccgggaagaattacttgttctctgaagatgccgccgtcaacactgcggtcagaaaaagatgatgttgaatcacgtattgaaaaactggagagctacgtcgttgagctgaataagaaatggtcgatattggtgccttctggcgatgaaaagcagtttgctgcgtttgacgattattgtcggaaagtgatgagcagaaatctcgcagagtgtttcagtattcataatgataatttcagtgacccggaatgggagtgtaaccggccatcctttgttgtatccggtgatgctgggaaaataaccatctcagaaaatgggaaagtaacacctccatcgcaccagcacagtgaggagctcattgaatttgccattgattacctgaagaacaataaaaagcaggggctgatgaagcgcgttggccgttgcatgggatatcttcaggtagccgctgagattgaagcgctggccagtggtgctgataaggatgcaattgtgcgggaggctcttcttcgtgattttaatactccaccctttaaaaaagtgccggcttactggcttcatccggggctgacttatcttaaagtgcgtatttag

SEQ ID NO: 28939 - DNA, 648 bp, Escherichia coli; identical to SEQ ID NO: 7899

SEQ ID NO: 28940 - DNA, 738 bp, Escherichia coli; identical to SEQ ID NO: 28338

SEQ ID NO: 28941 - DNA, 1047 bp, Escherichia coli
gtgcgggtattacttcgacctgttctggtaccggaactcgggctggtgatcgttaagccgggccgtgaatccatgccggtattccacaatacccgggtactggtggagccggaaccgaaaagcatgcgtaatctgccgtccggggtcgttcctgccgttcgccagccgctggcggaggataaatcattactgccatttttcagcgacgaacgagtgattcgtgctgctggtggcgctggcgcattgtctgattggttactgcgccatgttaaatcctgccagtggccacacggcgattatcaccacagtgaaaccgtcattcaccgttatggtaccggcgcaatggtgttgtgctggcactgcgacaaccagctgcgcgaccagacctccgaatcactcgggcaacttgctcaccaaaacctgtctgcatggatgattgacgtcatacgccatgcaatgaatggctcgcaggaacgggaattatcgctggctgaattatcctggtgggcggtccgcaatcaggtggcggacgcgctaccggaagcggtattacgtcgttcgctggggttgcgtgcggaaaaaatccgctcaatgtaccgtgaaagcgacatcgtaccgggagagcagaccgccaccagcatactgaagcagcgcacaaaaaatcttgcgccgctgcctcacgcccaccagcaaaccccgccacaggaagagacggtggtcagcattgccgttgatcctgagtctccggaatctttcatgaaacgacctaaacgtcgccgctgggttaacgagaaatacacacgctgggtgaagacacagccgtgtgcgtgttgtggtaagccagccgacgatccccatcacctgattggtcatggtcagggcggaatggggacaaaatctcacgatattttcacgctaccgctgtgtcgggagcatcacaacgagcttcatgcggatcctctggcgttcgaagaaaagcatggttctcaggttgatttaatttttcgttttcttgatcacgcctttgcaactggcgtgcttgggtaa

SEQ ID NO: 28942 - DNA, 1044 bp, Escherichia coli; identical to SEQ ID NO: 5311

SEQ ID NO: 28943 - DNA, 531 bp, Escherichia coli
atgcgcttcccgctggccgtattacaggaagtaaaaaatgtagtctatgaatatgcgacaaagccctttgctatcggttacagaatatctcctgaagaatctgtaacaggggggctgcggatagaggatacttataaactccttgatcggctcatttcatccggtatttcgtatatacatacctcgctggtcagtattaacgatagctaccctgttgagtcgccaaatggcccccgaactattgaattgattttaaatcatattgcaggcagagtgccggtaatcgccgcaggtaaaatacgcacaccgtctcaggctcaagaagcaatttccgctggcctgccacttgttgcgatcggtaaagggctggtgataaatccagaatgggtgactttagctgaatcaggtagaagtcatgaaattcaaacagcccttaatccacaacgcgttcctgaattaaccattccggataaactatgggatcaaattcaggcatcgaaaggaactggctggtttccgttaatggattaa

SEQ ID NO: 28944 - DNA, 561 bp, Escherichia coli
  misc_feature (456)..(465): n is a, c, g, or t
atggctcctatgacaacctggtcagctaatcctgatggaaccatctctgagcaagaactcgaattttataaacgtcgctcacaaaatgttggtttagtaataacaggatgtacctatgtcacgccaagcggcattgggtttactcatgaatttgccgcgtatgacgaccgtttcattaacagccttgaaaagttagcagctgcagccaaaagtggcggtgctccggctattttgcagattttccacgccggtaataaagccatcccagagcttgtgccaaataacgatgttattagtgccagcgcatcaagcgtaaaatctggtgactttatgaagagagtggtacaaagcagggaaatgactgaaaacgaaattcaggaaaccattagagcattcggagatgtcacaaaaagggcgattaaagcaggttttgatggcgttgaacttcatggtgcnnnnnnnnnnatttcttctcccctctatttaaccagcgtaatgaccgatggggaggagatcttgaaggacgtatgcgcttcccgctggccgtattacaggaagtaa

SEQ ID NO: 28945 - DNA, 207 bp, Escherichia coli
atgcgttccctgatcatcctcgataaagacattccggtactgtgcggcaacggcttcagcctgttcgcgggtaaaggagccgtcaggcagcccctgaagtattctgaaatattcgctcatcctcatctctccggtgatgccccgcactggacggggcggttttcacagtcagtcattcagaacgggatatcgtctgaaaaccagtaa

SEQ ID NO: 28946 - DNA, 249 bp, Escherichia coli; identical to SEQ ID NO: 12861

SEQ ID NO: 28947 - DNA, 576 bp, Escherichia coli
ttggataaaaagattatctctgatatctctctgaataatgtacttttagtttcattgtatgccagtcagcggcaaacggaacatgggccagtaccattatttaatgcctggatcagcaacctggatattcaggttccgcaaggttgcacaattaatgagggtacgagttttactgttaatatgccggatgtgtgggccagtgaattgagccgggctggtgccggagcgaagcccgctggtgttactcctgtagcaaccactattccgattaattgtacgaataaagatacagatgcggtaatgacgttggtattcgacggtaacatttcagctacacgtgataccaatgggaaacaaagtattattcaggcacaagataatcctgatgttggtattatgattatggatagtcagcaaaactccgtagatttaaatgctctggcaacatcagtaggcgttccattcagattggtggaaaaccagacggcttctgcgcaaactgctgatgttactttcctgactttacctgttagtacaactggaaaagtgcctgcatggcaggagtggggggcataa

SEQ ID NO: 28948 - DNA, 486 bp, Escherichia coli
atggttctggttaaggctcctggcgctgataatgtcaaaatagagaaccagaccggaattcataccgactggcgtggctatgccatattaccatttgcgacagaatatagagaaaatcgtgtcgctcttaacgcgaattcccttgcagataatgttgaactggatgaaaccgtagtcactgtcatcccaactcacggtgctattgccagagcaacatttaatgcacaaatcggcgggaaagtattaatgacgttgaagtacggtaataaaagcgttccattcggtgcaattgtcactcacggagagaataaaaatggcagcattgtcgcggaaaatggtcaggtttatctgactggacttccacagtcagggaaattacaggtttcatggggcaaagataaaaactcaaactgtattgtcgattacaagcttcctgtagtctctcctggaaccttgctgaaccagcagacagcaatctgtcgctaa

SEQ ID NO: 28949 - DNA, 192 bp, Escherichia coli; identical to SEQ ID NO: 4944

SEQ ID NO: 28950 - DNA, 273 bp, Escherichia coli
atggaaaaagcgcctccggcgcggccttttccggggtttttgttttttgctcacatgttctttccggcgttatctcctgattgtgtggataaccgtatcaccgcttttgagtgcgcagacaccgctcgccgcagccgaacgaccgagcgcagcgagtcagtgagcgaggaagcggaagagcaccggcatttgcatgttctccttacgcatctgtgcgacatttcacaccctgcatggtgtacttttcatacaatccgcactgatgccgcatga

SEQ ID NO: 28951 - DNA, 405 bp, Escherichia coli
atgttgcccgatagccaacatggtttcgctccggtgattcatggtattgctcgtggcaccgcacaagtgagtgtaaaacagaatggatacgatgtttatcagactactgtcccacccggcccttttactattgatgatatcaactctgcggccaatggtggtaatctgcaagtaaccataaaagaggcagacggcagtattcagacattatatgttccttattcgtctgttccggttctccaacgtgctggatatacgcgttatgcacttgccatgggggaatatcgtagtggaaataacctgcaaagcacccccaagttcgtacaagcaagcttgatgcatggtctgaaagaaaaggcaccaaaaagtcctaaatctttaccaataccaaggttgaaggcctga

SEQ ID NO: 28952 - DNA, 216 bp, Escherichia coli
atggagatcatcaataacgtgagcgaaaaccgccaggtgactgtccctgctgaactgctggcgtccctgattcagaccgctgaacaggcattgtggaaacgtgaatgggccgcctgggatcatggcctcgccgtcccggaatgcgtcacccgccgtcaggcggtggttaatcaggtccgcatcctgctgaaaaacaacacacacgaaaacgactga

SEQ ID NO: 28953 - DNA, 138 bp, Escherichia coli
atgggttccgatgtcgatattgaacgtctcaacgaagcgatcaagatcgttatcgaggcatttcccgtactctctcaatctggcatggtcggcggctggggaggcaaactggtgggttgtttgatgggtaaatcatga

SEQ ID NO: 28954 - DNA, 138 bp, Escherichia coli; identical to SEQ ID NO: 16164

SEQ ID NO: 28955 - DNA, 240 bp, Escherichia coli
atgtgcaataaaaccacaccggacgcagccgccgccgcgctcactacgctgatgcacgcgcttattgatatttctgttattgctgacagggcgcataagcacgccaccagtgaaacagaatatgcaggggctttcgttcctcattcgctggcggttatgcaacttagtgcggatatggcgctgaatgaggctaaagccatcctgattgctgattgtgaaaatggggggggttatgcgtga

SEQ ID NO: 28956 - DNA, 1158 bp, Escherichia coli
  misc_feature (376)..(385): n is a, c, g, or t
atgacaaataaacacccatcattgttttctccttttatgctgacagaaaaaataaagctacgtaatcgtatcgttatggctcctatgacaacctggtcagctaatcctgatggaaccatctctgagcaagaactcgaattttataaacgtcgctcacaaaatgttggtttagtaataacaggatgtacctatgtcacgccaagcggcattgggtttactcatgaatttgccgcgtatgacgaccgtttcattaacagccttgaaaagttagcagctgcagccaaaagtggcggtgctccggctattttgcagattttccacgccggtaataaagccatcccggagcttgtgccaaataacgatgttattagtgccnnnnnnnnnngtgccagcgcatcaagcgtaaaatctggtgactttatgaagagagtggtacaaagcagggaaatgactgaaaacgaaattcaggaaaccattagagcattcggagatgtcacaaaaagggcgattaaagcaggttttgatggcgttgaacttcatggtgcgcacggattccttctgcagaatttcttctcccctctatttaaccagcgtaatgaccgatggggaggagatcttgaaggacgtatgcgcttcccgctggccgtattacaggaagtaaaaaatgtagtctatgaatatgcgacaaagccctttgctatcggttacagaatatctcctgaagaatctgtaacaggggggctgcggatagaggatacttataaactccttgatcgactcatttcatccggtatttcgtatatacatacctcgctggtcagtattaacgatagctaccctgttgagtcgccaaatggcccccgaactattgaattgattttaaatcatattgcaggcagagtgccggtaatcgccgcaggtaaaatacgcacaccgtctcaggctcaagaagcaatttccgctggcctgccacttgttgcgatcggtaaagggctggtgataaatccagaatgggtgactttagctgaatcaggtagaagtcatgaaattcaaacagcccttaatccacaacgcgttcctgaattaaccattccggataaactatgggatcaaattcaggcatcgaaaggaactggctggtttccgttaatggattaa

SEQ ID NO: 28957 - DNA, 855 bp, Escherichia coli
atgagcaaaccagtaatgattgattctgataattctgggcgttatattgttctggcagcggcaaaatccgttgccgggattggcgtcccggaattttccacagcgcacaaccgcgctaaagcggtttttttgtgtgcaatgcaaggctacatccagattatggtgggccgggcaggggcatcgaaagatgcgccggtatctgtggaagccggttacgccaaccctgttcggttcaccaccagtcagattggcgtctgtggtggtgattgtccaaatcattccacaggggctgtcgtgatgactactatcccaaccctcgcacaacctgaaattacggttatcaacggcctggccgttacttcttccctagctattgccgactacttcgccaagcgtcatgacgatgttctgaaaaagatccgtacgcttgagtgctcacctgagtttcgtgcccgaaattttgcggagacatcaatttcagtcaatcagccaaacggcggtacacgcaagctcccttgctaccaaattacccgtgatggtttcgcgtttctggctatgggcttcacaggcaagcgcgctgcacgtttcaaagaagcgtacataacggcctttaaccagatggaacaggcgctgatcggaaaggttgatacttcatgtgtcgcgcacaatgcccacgttgtttacctctacatggctgaaattcaccgcgtttggttagaacaactttatccgatgctggtttcagttcagtctccgctggcttcatcgctctacgactacatcaacgatggtgtattcgttgccgggctggtggactcggaactgaacgaaaagcataaggaggtgcgtaagtga

SEQ ID NO: 28958 - DNA, 693 bp, Escherichia coli
atgaaattttccaaattttctgagttggtgaatcgtattttgtccaacaaccacagccatcgtcgcgatatggatgtaacaatcgttgttcattcgcctagcagcattggttcaacaccttcagttgaggttcagtcaattcacgctggttttgattgggattccggtaaagtgcttattttcccatcacagccactgaccacgctaacaccagaacagattactgatatcactgatagtgtgcgcaaaggtcagtcttggcacgcatatcaggaatacaagaagcatcaagagcagttggaaaaattgtcgattgaactggatgccgcaaaacagcgcattgcagagctggagggtaatcgcacggcgctggcggcggagaatgatctggctcgtaaagcagttcaggcattctgcgatgttgttggcgacaacactgaggttatctgtgaggaggttgggagagatggcgttctggttattttggaggccatgaaggcaacaggaaatatgccagccaccgacgctttcctggctgaagtacgggctaaggcgtttaatgacctttgctcggcgttcgttaaggacgcgacggttgtcgggctggacgatggcgacatcgttacggtgaaagaagcgactgacgccctgctgcattgtgcggaacagcttcgcaaaggagacaaccagtga

SEQ ID NO: 28959 - DNA, 1359 bp, Escherichia coli
atgaatgaacttgcaaatgcagaactggaaaagatagctaataaatctttaactgacagattcgaaagtgatcaagaaagactaagctggatttatcataattattttaaaaagctaattaagaatccgagagagttaaaaagattttttaaccatttgagattcgttttagagcaaattgaagggcaggtatgtttttctgatctctttgctttatctctggtcgccactaaatcgagtttggtatacgagcatattaaaagcacaccagaggcatatatagggaagagattcactaatgatggccttttgatggataaacctcaagatattgtggatagatttagtgatgagcgaaataagaaactgagtaatttttctgatcaagagcgttcagtgatgcaggaactcttaggagatattttcccacttctacagtcaagcgggtattctcattatggggtttctgatcccgatacagcaggaagggtttctgcaccacaaaggcttcatattgcgtttcattataaaactccagcagggtatatttctgatcatgatattatcagtttcattaatggagatgttaaaagaaacgaatttctaagagatgtgctctcgcaaaatgcagaagaaagattttttgaaatgatgaataattattcgagttattgtaaggataatagttttgaaatattaacgtgtatttatgatacttttctgttttctcaagaattgaaatcctcattggaaagaaactatggttttttgacaaaagatctttatagaaggatgaattggctcactaataaggtaatatctgaaagtgatgataaatatgggttgataaagggggttgtaggtaggcatgagaatgcgccacttggtgcagacgtattatgccaagctcgtaaacagattcaaaatggatggaatgacaaaatatgggttagtattgaagaattggctgaacttgaaggtatctttcaacaggtggctattaaagttttaagtgataaaatatattttgattatcatcttgaatctcatatatttttcgaattaaagagagtttcatctcaatttacatcagagtttattgcttctgtattatcaagtgatggcctgattaggatgtgtgagattattggtgaaacaggtagtgattcaacaaatggcccttattttaagtttgatgaaatttacttcggggaaatacttgatgtgaatgaacttcgaaataaagcgaaaaatttagatttttcaatttatcccacacgcattcaagctgtacttaagagtattctggatggacaaaaatattatttgagagatgcaactgttggtgaagattggtaa

SEQ ID NO: 28960 - DNA, 294 bp, Escherichia coli; identical to SEQ ID NO: 17060

SEQ ID NO: 28961 - DNA, 480 bp, Escherichia coli; identical to SEQ ID NO: 3493

SEQ ID NO: 28962 - DNA, 1011 bp, Escherichia coli
atgagcagtaaagtcagtggcatgaatacgttgctctccgttagcgcgcggactaataaccctgaacctggtttccagttgattaaccagcgaatcacccacagcacgattaacgacaatatttgggcatcgctgcaaaatgctcaaattcaggcgttgaaaacgctcgaccagcgtccagcggagaaattcgcccagcagatgtatgagacgcgctatgccgatgaccgcacgaaattaccgcaagaaaatcagattgcacagtttactgccgcagatgcgctggctgccgatcgccagttgttttcatctccagcggatatcacgtttgtcattgtcggtaatgtcgcagaagacaaactcgtggcgttaattacgcgttacttaggatctatcaaacactctgattcgccattagccgcaggtaaaccattaactcgcgcgacggacaacgcatcggttactgtaaaagaacaaaatgaaccagtggcacaggtttcacagtggaagcgttataattcccggacacctgttaatctggcgacgcgtatggcgctcgatgcttttaacgtcgcactggcaaaagatctacgcattaatattcgtgaacaggcatctggggcatacagcgtttcttctcgcctctcggttgatcctcaggccaaagatatcagtcatttgctggcttttacttgtcaaccagaacgacatgatgaactgttaacgttagcgaatgaagtgatggttaagcgtctggccaaagggatcagtgagcaagaactgaacgaataccagcaaaacgttcagcgcagcctcgatatccaacagcgtagcgttcaacaattagcgaacaccattgtaaatagtcttattcaatatgacgatcctgcagcatggattgagcaggagcaattgttgaaacaaatgacggtagagaatgttaacactgctgttaaacaatatctttctcatccggtgaatacgtataccggagtattattgccaaaataa

SEQ ID NO: 28963 - DNA, 1683 bp, Escherichia coli
atgaagtctgcattaaagaaaagtgtcgtaagtacctcgatatctttgatactggcatctggtatggctgcatttgctgctcatgcggcagatgatgtaaagctgaaagcaaccaaaacaaacgttgctttctcagactttacgccgactgaatacagtaccaaaggaaagccaaatattatcgtactgaccatggatgatcttggttatggacaacttccttttgataagggatcttttgacccaaaaacaatggaaaatcgtgaagttgtcgatacctacaaaatagggatagataaagccattgaagctgcgcaaaaatcaacgccgacgctcctttcattaatggatgaaggcgtacgttttactaacggctatgtggcgcacggtgtttccggcccgtcccgcgccgcaataatgaccggtcgagcgcccgcccgctttggtgtctattccaatactgatgctcaggatggtattccgctaacagaaactttcttgcctgaattattccagaatcatggttattacactgcagcagtaggtaaatggcacttgtcaaaaatcagtaatgtgccagtgccggaagataaacaaacgcgtgactatcatgacaacttcactaccttttctgcggaagaatggcaaccgcaaaaccgtggctttgattactttatgggattccatgctgcgggaacggcatattacaactccccttcactgttcaaaaaccgtgaacgcgtccccgcaaaaggttatatcagcgatcagttaaccgatgaggcaattggcgttgttgatcgtgccaaaacacttgaccagccttttatgctttacctggcttataatgctccgcatctgccaaatgataatcctgctccggagcaatatcagaagcaatttaataccggcagtcaaacagcagataattactacgcttccgtttattctgttgatcagggtgtaaaacgcattctcgaacaactgaagaaaaacggacagtatgacaatacaattattctctttacctccgataatggtgcagttatcgatggtcctctgccgctgaacggggcgcaaaaaggctataagagtcagacctatcctggcggtactcacaccccaatgtttatgtggtggaaaggaaaacttcaacccggtaattatgacaagctgatttccgcaatggatttctacccgacagctcttgatgcagccgatatcagcattccaaaagaccttaagctggatggcgtttccttgctgccctggttgcaaaataagaaacaaggcgagccacataaaaatctgacctggataacatcttattctcactggtttgatgaggaaaacattccattctgggataattaccacaaatttgtccgccatcagtcagacgattacccgcataaccccaacaccgaggacttaagccaattctcttatacggtgagaaataacgattattcgctcgtctatacagtagaaaataatcagttaggtctatacaaactgacggatctacagcaaaaagataaccttgccgccgccaatccgcaggtcgttaaagagatgcaaggcgtggtaagagagtttatcgataacagccagccaccgcttagcgaggtaaatcaggagaagtttaacaatatcaagaaagcattaagcgaagcgaaataa

SEQ ID NO: 28964 - DNA, 762 bp, Escherichia coli
atgtcgctcgtttgttctgttatatttattcatcatgccttcaacgctaacattttagataaagattacgccttctctgacggcgagatcctgatggtagataacgctgttcgtacgcattttgaaccttatgagcggcattttaaagaaatcggatttaatgaaaataccattaaaaaatatctacaatgcactaacatccagacagtgacggtgcctgttcctgcgaagtttttacgtgcttcaaatgtaccgactggattgcttaatgaaatgattgcttatctcaactcggaagaacgcaatcatcataatttttcagaacttttgcttttttcttgcctgtctatttttgccgcatgcaaaggtttcattacactattaactaacggtgtgctatccgtttccgggaaagtgagaaatattgtcaacatgaagctggcgcacccatggaagctgaaagatatttgtgactgcctgtacatcagtgaaagcctgttgaagaaaaaactaaagcaagagcaaacgacattctcacagattcttttagatgccagaatgcagcacgcaaaaaatttgatacgcgtagaaggttcagtcaataaaattgccgaacaatgtggttatgcgagtacatcttattttatttatgcgttccgcaaacatttcggcaacagtccgaagagagtttctaaggagtaccgttgtcaaaggcacacgggtatgaacacggacaacacgatgaatgctttagctatttga

SEQ ID NO: 28965 - DNA, 462 bp, Escherichia coli; identical to SEQ ID NO: 6061

SEQ ID NO: 28966 - DNA, 1434 bp, Escherichia coli
atgggtaactatcatatcggggatggtgaatgtagatttagagtcgtgtgttcttcaccagatgtatgtgaagtaggaggttacaaggttccttttgacagttaccagactttagatagtgaaagacagtacagttcaacggtatgggcgcgtggatgcagagctttaaatgttggttcagtgattgctggaactcaaagtaatgccggtaaaggtgtcatatccggtacatctcaaggaacgggtgactgtgttattttaacgggaagtccgactgtaacaatagaagggaaacctgttgcttatcatggttcagttgttgggattaataaccacaactgccttggtaaattgtataccaaaataaaatcaccaatgatttctgtcattgatagaacttttaattatgaaaggactgctgaagtaatacacgatttactgcttctgaaggatctcctctctgttggtaatatttttgacggagatatttcacctgaggttaaaaataatttatttcaaataaaagatcctgaccaatcatggggggagtttttttcaataaagaatatcagagaatctctcaggaatggtattgaaggagataaatctcagatcagagaatggtttggagagaacacacttactcaaatggggaatggagcaatcaccactttacatggtgtggcggatttagccttagttacattcgatgctctgttagatacggcaacggcaacggttgcttgcccgataggcgaagatgggttatgtgaacaggcaaatataaatttaaatgaaaaagaacaggctttatttaatattagtaattcattgataaatgggcaagcatgggatgcacttaaaaaaatgataatggatacaaataatggtgatcagattgctctggagcattttgccagctttttatggggctttatgatacccgcaaaaataccagaagaaaatatctctgggaaagtatttgtagagccagtagttttagaaggtggtgctggtggcaattggacagtatttgatgaggttttagattcaaatgtaataaagcaattgactttaacaggctgtggagcggcctgtggggaaatgttgcttagggataggtatatttttgttacgcaaaatgtaattggaacagaattaacatctatgacgtcgctggcaaacaagcttaataaatttgatgtcggctgggaagggaatgcagtgagcgaatctagtttatatgccctcagtaatactggttcatggggagcaatgatgtgggattctggaagtaaagtagggcattgggtacttgttaagggtgttgatgatgctgggaatgtgataatatatgatccatatcacttcaaaaaatcgagatgtgtttccccaaatcctctatatcttcccagcattatgcaccagaaataa

SEQ ID NO: 28967 - DNA, 270 bp, Escherichia coli; identical to SEQ ID NO: 8342

SEQ ID NO: 28968 - DNA, 267 bp, Escherichia coli; identical to SEQ ID NO: 11114

SEQ ID NO: 28969 - DNA, 459 bp, Escherichia coli
gtgtccaatctgttcggtctggtcaccgggatggcggaagacctgcagagtctggtgggggccacggtggtccgccgccgggtgtatgcccgttttctggatgcggtgaatttcgttgcgggcaatccggaggcggacccggagcaggagctgagtgaccgctgggtggtggagcagatgtcgcagctgacagccatgacggcctcgtttgtgctggctacaccgaccgagacggacggggcgctgtttcccggtcgcatcatgctggcgaacacctgtatgtgggattaccggggagatgaatgcgggtataacggtcctgcggtggcggatgagttcgacaaccccaccacggatatccgtaaggacagatgcagcaagtgcatgcgcgggtgtgaactgcgcaggaatgtcggcaattttggcggtttcctttccattaataaactttcgcagtaa

SEQ ID NO: 28970 - DNA, 744 bp, Escherichia coli
atgacacagactgaatcagcgattctggcgcatgcccggcggtgtgcgcctgcggagtcgtgcggcttcgtgataagcacgccggagggggagtggtatatcccttgtgtgaatatttctgcagagccggaggcgtattttcgtatcgcaccggaagactggctgcgggcagagatgcagggggagattgtggcactggtccacagtcatcccggtgggctgccctggctgagcgaggctgaccggcggctgcagataaaaagcgcactgccctggtggctggtctgccggggtgacattcacaaattccgctgcgtgccgcacctgacgggacggcgctttgagcacggggtgacggactgttacaccctgttccgggatgcataccatctggcggggactgaaatgccggattttcatcgcgaggatgactggtggcgccacggtcagaacctttacctggacaatatggcggtcaccggcttttaccgggtgcccctgtcctctgcacaggcgggcgatattctgctgtgctgctttggtgcttcggtaccgaaccatgccgccatttactgcggcaacggtgagctgcttcaccatctgcctgaacaactgagtaaacgggagaggtattccgaaaaatggcaacgacgaacgcattctgtctggcgtcaccgccactggcacgcatctgccttcacggggatttgcaacgatttggccgccgcctcagcctgtatgtga

SEQ ID NO: 28971 - DNA, 534 bp, Escherichia coli
atgaacaccaaaatcaaatacggcctgtcggctgccgttctggcgctgattgccgctggtgcgcctgcgcctgacattctcgaccagtttctggatgaaaaggaaggcaaccacaccacagcataccgtgatggtgcaggtatctggaccatctgccgtggtgccatcatggtggatggcaaacctgtcgttccgggcatgaagttgtcgaaggaaaaatgcgaccaggttaacgccattgagcgtgataaagcgctggcgtgggtggagaaaaacatcagagtgccgctgaccgaaccccagaaagcggggatcgcgtcattctgtccgtacaacattggtcccggtaagtgtttcccgtcgacgttttacagacgaattaatgctggtgatcgaaaaggtgcctgcgaagcgattcgctggtggattaaggacggtggcagagactgccgtattcgttcaaacaactgttacggtcaggtatcccgtcgtgaccaggagagcgcgctggcgtgctggggtatcgacagataa

SEQ ID NO: 28972 - DNA, 306 bp, Escherichia coli; identical to SEQ ID NO: 5972

SEQ ID NO: 28973 - DNA, 267 bp, Escherichia coli; identical to SEQ ID NO: 11114

SEQ ID NO: 28974 - DNA, 276 bp, Escherichia coli; identical to SEQ ID NO: 11424

SEQ ID NO: 28975 - DNA, 216 bp, Escherichia coli; identical to SEQ ID NO: 6015

SEQ ID NO: 28976 - DNA, 276 bp, Escherichia coli; identical to SEQ ID NO: 16135

SEQ ID NO: 28977 - DNA, 129 bp, Escherichia coli
atgaataatcctgccatgacaatcaagggtgaacaggcgaaaaaacagctgattgctgcggcactggcacagtttggtgaatatggaatgaacgccaccacccgcgagatagccgcccaggccgggtag

SEQ ID NO: 28978 - DNA, 123 bp, Escherichia coli
atgtataattttatcactataatgtatgatgtcttttcatattttggtgttctggctaaaaaccagaatacccgtgacatccgaaatattaaaaatttttcctcacatcaagttcgcagataa

SEQ ID NO: 28979 - DNA, 783 bp, Escherichia coli; identical to SEQ ID NO: 4541

SEQ ID NO: 28980 - DNA, 282 bp, Escherichia coli
atgcacgatcccatagtaatggaagcccgggcggagttaacttcggcacaatcccgcatagagcaggcaagctctgcacattggccagttgtcacagctacaggaagtaaactcctttcacaaagtcaccgttattcctacgattatgacactgaagatattttacccggtattcgtggtgaagtgaatatatttgcttcaggggctattgaggcggatgtgcgtcggagtgagtcagaagccgaatattatcattataaaatggaagaaacaaaagagtga

SEQ ID NO: 28981 - DNA, 204 bp, Escherichia coli
atgacaggccattccacccacaaagattatgggaaacctatcattattttatgggaatgggtatttatcgtagtaaaggctttttctggctaccaggaagacctgacatggctctgctctggaaccatgccgcaggaagtatcaatctggagtttatcagctactggaattccggtgtattggcagaccctgataatcacctga

SEQ ID NO: 28982 - DNA, 684 bp, Escherichia coli
  misc_feature (606)..(615): n is a, c, g, or t
atgtgcttacttgcaccagaaaatccttatccgatatatgcactaccaccgctggtgagaaatgcaataattgaaactcaaaaaaatacacaggcacctttggctatggtggcaacatccgcattaacagcgacctcaattgcctgtcagaatcaggttgacgtgtgcagacctggaaatttacgtgggcctgttaatctttactctctgattctggctgattccggtgaaaggaaaacgaccgtggataaagtgtttatgaaagcattttatctcagggatgaagccctggcggaagaatacgcgaaactggttgagaattacagtacagaaaaggaaatatgggagcaaaaacaaaaagcgctggaatcaaaatttcataaagagattcgtgccggtaaagattacaaggcaacagaatcagagcttgaaacgcatctgaataagtctcctgttccgccgcagatacgtcgaacaatttttaatgagacaacgatagagggaatgttaaaatattactccgatagcaatcgttcttttgctcttgtatccagtgaagggggggtaatttttgacagccgggccatgagtaaactgggaattatnnnnnnnnnnttattaacactttgtgggatggaggttctcttttcatcgacaggaaatcatctcccggaattaatttga

SEQ ID NO: 28983 - DNA, 309 bp, Escherichia coli; identical to SEQ ID NO: 10409

SEQ ID NO: 28984 - DNA, 573 bp, Escherichia coli
atgctgcgcctgcgccgtaacggagagataaacggagagcatgtccctgaaattattctgctcaactctcatgacggtacctccagctaccagatgctgccgggttacttcaggttcgtctgccagaacggctgcgtctgtggtcagtctctgggggaagtgcgtgttccacaccggggagacgtagtggagaaagttattgaaggggcttacgaggtggtgggcgtgtttgaccggatagaggagatgcgtgatgccatgcagtcgctgattctgccgccaccggcacgccaggcgctggcacaggcggcactgacttaccgttatggtgacgaacatcggcccgtcaccaccgccgacattctgacgccacgacgccgggaggattacggtaaggacctgtggagtacttatcagaccatccaggagaatatgctgaaaggcgggatttccggtcgcagtgcaaaaggaaaacgtatccatacccgggccattcacagcattgataccgacattaagctcaaccgtgcattgtgggtgatggcagaaacgatgctggagagcctgcgctga

SEQ ID NO: 28985 - DNA, 123 bp, Escherichia coli; identical to SEQ ID NO: 3258

SEQ ID NO: 28986 - DNA, 693 bp, Escherichia coli; identical to SEQ ID NO: 11600

SEQ ID NO: 28987 - DNA, 633 bp, Escherichia coli
atgatgcctgctgaacctaaaacctataaacgcaaatcaacgcaatttaagccactaaccgcaatgcaggaggcttattgccagtcatacatcaaaacgcctgaaaaccagactcaggcagcgattaacgcaggattctccccaaatacagcggcagttaaagccagtgtcatgatgcgcgatgaacgcattcaaaaacggattgccgagttgatggaggagcgcaacaaacgaatgcgcgtcagtgccgattacgttctcatgcgcctggtggagatcgaccagatggacgtgctggatatactgaacgatgacggcgggatgaagccgatcgctgaatggccgaaggtctggcgtacctctctcagtgctatggatatcgctaccatcaagacaacccaggcttccctgcaaaaagagaatggcgaggcggatctctctgttgaggatgtcgagcatatcctgaagaaggtgaaatggcccgacaaggtgaaaaacctcgagctcatcggtaagcacgtcgacgttaacgcgttcaaagaacgtctggatgttaatgtgaatgtgacaattgctgatcgcatagcagcagccaggaagcgactcaaagaacgtcaggatggtaatcagtga

SEQ ID NO: 28988 - DNA, 1020 bp, Escherichia coli
atgaaaacagcgcagcgtactttatttgccgcaacattgctgactattttttcgacctcagttatggcgcaggatgtcacgattatttataccaatgatcttcacgctcatgtggattcctataaagtaccgtatgtcgcagacggaaaacgcgacattggtggctttgccaatatatccacgttagtaaaacaagagaaagccaaaaataaagccaccttttattttgatgctggagactatttcaccgggccatatatcagtagcctgacaaagggcgaagcaataattgatattatgaataccatgccttttgacgcagtatcaatcggtaatcatgagtttgaccatggctgggataatgccctccgacaattaagcaaagcgaatttccctgttttattaggcaatgtttatcataaagagagtgagaaacccttctggaacaagccctacaccatcctggaaaaagatggcatcaagattggtattgttgggctacacggcgtatttgcatttaatgacacggtctcggagctctctctccagggactcgataatgacaataataaccgatttgataaatcttccgcgaccctcaagaatcaggggattgaagcacgtgatgaagtgaagtatttgcagcattatatcgacgagttacgtgataaggttgacctcaccgtggcgctggttcatgaaggcgtaccggcgcgtcagtccagcattggcaatacagatgttagacgtgcgctggataaagatattcaaaccgcaagcaaggtgaaaggattggatattctgattaccgggcatgcccacgtcggaacgccagaaccaatcaaagtcggcaacaccttaatcctttcgactgacagtggcggtatcgatattggtaaattaatccttgatgtcaaccctacagctcggactcataaagtgaagagctttgagctgaaaacggtttatgccgatgaatggatacccgatccaaccacacaaaaagttatcaatggctga

SEQ ID NO: 28989 - DNA, 153 bp, Escherichia coli
ttggaaaaatatccagatgttttgggcaaggagattatgtttaaaatttactttaaatatagtattccgaatgaatgcatcgaatttataaatagagttagagaaattttgttgcctattaaaattcagctagcatatgaagaaaaaagctaa

SEQ ID NO: 28990 - DNA, 255 bp, Escherichia coli
atgcatgatgatgtaattaatggtgtccttgattgggtggaagaaaacataaatatgcctatttctcaggctgatgttgttaaaaaatcaggatatagccaaagatattttcaggatatctttttaggaaaaacaaaattaagtattgctaagtatatattagcaagaaagttatcgctctcctctgtcttacttcggttaacaaatctttctgtttttgaaatatcaaccatttattcttttcactcgcagtaa

SEQ ID NO: 28991 - DNA, 1374 bp, Escherichia coli
atgattgttgaagcgacagaactgttaagtgcttttgtaaaagaagaacaagatataattgaaagcatcaacatgccacatatgccaacgttggggaaagcctacgaggagattacgaaacacggtattaaccaatcattttcaatccctaaggggttggatctctctgttgttagcggattcatccgcgttggggaagagcaactacccaatcagatagattgcatgttggtgaaaggcaagggggataaatatggattaacggatgaatatatatatgatatagaaaatgtattagccatatttgaagtaaagaaaactcttaataaagatgattttatcgatgcatatgaacatttggctattctaagaaagaaatatagtgaatatttttctgggaaaatggatgctatggagttgaggccaaatataaatgtggcttcggaaatttttgcaaaaataacaggtgtaagtggcccaattaactatgatgatatttttcatttagataatgaaagtcaagtgttgttttactcgctagtaattgaacagttggcgccagtgacaattattcacgggtatggtgggtataaatcagagaaaggcctaagagatgtccttttggattatttagatgaagataattacttaaaaaaccttacgaagaaaaagaaaaaagagaaagaaaaaaatacaggttccattagcatgattagaggcataaatagtattccgactctaataactgcaaatgagttttcgttagtgaaaacaaatggtcttccttattccttttcaaaagaaaggaataaaaatgactgggcggttatagcttcgggaagagataatcaacttgggattatgcttgaattaatttggagtaaaatatccattcagttcggtataagtatgccatggggcaatgatgatcatgtcgaagaattagccccattactttatgctaaggttgttaaaaaagatgaatcattaggttggtactataggtcattcgagatgtccacgaaaaaattaaaatcgcttctgccttcgaaatatgagccgctaaaaatttctaacggagcaattcatttggttcgtaaattgccattaatgcctgatggatatataataaataacgaaagtcgaaatgaatttaatacaaaaggatttaatcttgacgaggtggttgcggaactaatatccacatcatattttgcacttaatggtactaatttgcttacaattcattctgcaacatatatatgcgattttgatgagtatggtttcatagatagtcaatttcagcggctaaaatcatggtgtgataataatgaagtgaatgcaggaattactcattgtgtcattttaagttga

SEQ ID NO: 28992 - DNA, 786 bp, Escherichia coli
atgcctgtgcggcctgataaaaaccaattaaagaaaattgatccattctcaaccccgttggaaatatgggatgacagagagccgacaaatgaagaagttgatgatttattatcgaaaggggagtggagaccatttattaaaataaaattaaaattaaactcagtattgaagactgcatatgatgcggcaaagctaattgctgctaacaaagatgaagttaggatagatcatcatgttattagctaccttaataaaaatatcgaatacaataaatggcgcagctttatgccttacccaacacctgagccactaattgcttatcaggaagattatcctccagaaaattttgaaactataaactctttagttttaaagcatggcatattgattccaaaaggtcaggttttatttcatggaggtgcatggcctttagaaaaatcaggtgaaatgatggagtcattcttgacagatcgtgtattttcaacatcgttttgcccgagagttgctttaaataatggcgattggatggggaaggcatttgatgctggccgaatcgacattatggttattactataaaaaacaagaataagaaagcctttgttttttcactagacgagggggctaatagtcatgagatggaagtgctttttgaacgaggtgtccagctaaatcttattggtagttcaacgatcaacctgaatttcaaagcctgcaaatcgacaagtgcatcgagtgttaattgtaaattcatcgtcgctaatgttcttaatgttgaaatgatgtag

SEQ ID NO: 28993 - DNA, 174 bp, Escherichia coli
atgttttcatttgtagggagttggtcagagtatattattttgtctaatgttatatacacaagagaattaccgcgattaaatgtgaaaagaagatttggttttgatattgaaatattttctccctctaataataatgatatttgttcattgcattattttattccggtgtgttaa

SEQ ID NO: 28994 - DNA, 405 bp, Escherichia coli
atgatgtatatggatgatgattttttagaaaatgatttggactggtttttatccagtcaggacggttttttagctcactttgcaacagggggaaaaggctcagttccggagaaaattagagagtctattgataactatgaattaatatatgattatttctactcactggaacctttatctgacgtggaggttattgaatacaatcttcctgatttttcagatgaggaacggcgttctcgttatttgaaatcattcatagaaatgtcacgtaaaggattatttagttatgactataggaatgacaagtataagttaatatcaaagcctatatccccattgagatatagtgtattacccgatgatataaaagggattatttatatctcgtctgaaaatatatcataa

SEQ ID NO: 28995 - DNA, 240 bp, Escherichia coli
  misc_feature (197)..(206): n is a, c, g, or t
atgccattcaataataaaaacctgtttattactctcttatccctctgcacatttcagacttacgcagcacaatgcactgcggaaatcttcgctaaaaacaaactgaataacttcatccttcagagccagcagataagaactgaaatccccaagtctgtatcaatcactattgatagtcccgatgtgcggagataccnnnnnnnnnnggtcaaagcaacttcagtcaatgcggtgagctaa

SEQ ID NO: 28996 - DNA, 1119 bp, Escherichia coli
gtgaaaaaaaatcaattggtcacacttggcaaacatatagacatattgtccgggtgtgcattcccttcaagtggattcaataggaacaatggtgttccactaatccgtattagagatattctttcagggaaaaccgaaacctattatgaaggcagttatgacttaaaatatcttattaaaaaaggtgatttactagttgggatggatggagatttcaaccgtgagtattggaaaggtactgatgcgttgttaaatcaacgggtatgtaaaattacgccaaatcctgaaacacttgataaaaattttctatatcatttcttgcaaaaggaattggataaaattcatgccacaacagatgttgtgactgtaaaacatttgtctgtaaaaaagatacaagatattaaaattaggcttccttcattaaaagaacaaaaacgcattgctgctattcttgataaagctgatgctatacgccaaaagcgcgaacaagccatcaaactggctgatgattttttgcgtgctacgtttgctacaatgtatgggaatcctattacaaaccccaaaaaatggcctgtccatcttatgggagaaattattgaatttaaaggtggaaatcaaccacctaaaagtgattttatttttgaacctaaacagggttatattagattagtacaaattagagattttaaatccgataaatatgcgacgtacattccgcaagaaaaagcaaaacgtattttcgaagttgatgatgttatgattgctcgttatgggccacctgtgtttcaaatacttagaggtttatccggcagctacaatgtggctttaatgaaagcttcacctaaagaaaatattaggaaggggtttatattctatcttctacaacttccggaatatcatgatgttgttgtaaaaaactctgaaagaacagctggacaaaccggtgtaaatcttgaactattaaacaaattcaatgttcccctcccacctatatactatcaggatgagatattagctagattagctagaattgaaaaatttaaagaaaaaatagaaatatcattaaatcatttagaaatgcaatttttatcactacagaagagattaatgggtttttaa

SEQ ID NO: 28997 - DNA, 1590 bp, Escherichia coli
atgaattttaagaaaaaaatcgaagagcattttaagcagttcgaagcatcccctgtgttatttgttggctccggtgtatctcgtcgttatcttggtgtgccatgttggcaagaccttttgaagcattttgctgaggcgattggggaaaatcatataaaattaaaaacaaaatctaatggtgacttacccgaatatgcacaattattggtgtcggcatacgctgagaaatggtgggatactgaagaaggacaattagcattaagtgaaaaagaacaggagaaaactttcattaacgaacagtctcctttgaaattgtcaatatctaaatatattgagaatgcacataaaaatataatagataatgatgagttaaaacacgaaatttccctttttgcgaaagcaaatattgatggaatcattaccacaaactgggatgtttttctagaaactctttttcctaaatttacaacatttataggccaggatggattgattactggcaggagccacggtattgccgaaatatataaaatacatggttgctgcactgagcctaactcattgattttaacatcaagtgactatgataaatatagaaagaaaaacccttatctatcatctaagttactaactatgtttatagagaggcccgttattttcttaggctactctttaacagatgaacatatatctgaaatcctggaagatatagttagttgttttcctgatgccagtttggattttttacagaataaattattgtttgttgaatggaaacctgaacttgaagaggctgacattagtgattctgtgattcataaaaaaatcccggtaaaatatgttcaggcaccatcctataaagaaatatttgaagtgctaagtgaaactaaaaaaaggattccagcacatttattcagaatgataaaagatgaactttatgaattagtcttaaccgatgatcctaaaggaaaattatatgtgagggactcagagaagattgaagagggcgtcagtacaacagagtttgttgtagggtatggtgctatttcgatggtaaaaaaatcagagtcgatggcggcaaaaggattggttggactggagcgtgtagatctcatccgagaggttgtatttgaaaatggacattatgattggggatgtgttgttaatgatgttctgccaaatatatgcaaaggcaatgcgcgcattcctatttttcacttcttaaatcacgctaaattaattaatcctgatgggagtataattaatgaaacagaactctcaggtggcgttttatctcgattaaaaatcactcctattagttttcagtctcaaggatgggataaacgacgctctgaaaccgttcctgaggtcaaggtgggggtcaatgagttatatcttgcttatgatttcagtttctttttaagaatgatgccttatatggagcttggattaatcaagcgcgatatgggagagcttctcaaaatattgaaaaaacatatagatgaagctatgaatactcaggtgttgtcaagtaatttttgcaaactagtgtgtatttatgattatatcaaaaatagtcacaggtattaa

SEQ ID NO: 28998 - DNA, 519 bp, Escherichia coli
atgaaaaagagtatctatttcattttatgtccagttctttctctatattgtggaatgacgatggctgtaacacaaccaccgtcaaatactatttctagtagtagcactgcatttgcgcaaggtgagatcgaaataactaacaattgtaaggttagtatcaccacccctagtaaaattgtacgtcctgctacacaggccacacaagcttatagtgtgaattttactattactcaaaataagtcttgtgcagatataggctccagaattgcttattggtctgaaggaagtcagtcgccttttagaatggtcaatacaagtaattctaatatagtttacagtttttctaactttagcgaaagcccctcaacagctctattaagtggtacaggtggaaaaaaatattcgctagctaataaaggggttcagagagtaaatgtgactatcccaattccccaatcaggtgtttatattcctggtcgttatacacttggtcttaacgcaggcttggtcataaactaa

SEQ ID NO: 28999 - DNA, 552 bp, Escherichia coli; identical to SEQ ID NO: 11816

SEQ ID NO: 29000 - DNA, 1083 bp, Escherichia coli
atgatagttacgcaggacttccagcctgactgggtatctccacccggtgatacaattatagatctaatggatgaacatgggctttctggtgaagaactgagtaagaggattggattgtctcttatccggggtcagcaacttcttgaaggaaaaatccgactcaatgagtctctggcttgtaagcttgaggagttattcaacgtatcgacagacttctggatcaagcgcgaagtcgcttatcgccagcaaattggatacctcgagaaagtgaataatgattggctcgaatcattgcctgtacgtgatatgatggagtttggttggatccccaaaactacaactcgggaaagtaaattccagcactgcctatcgtttttcggaataaattccgtcaatgattttttttataaaattcagtcagatgctcctttggtcgcttttcgtaaatctcttaatctggcaaccgagcctatggccgatttggtgtggctgactagggctgcacaacttacctcaaaccaaaactgtgctgtatgggataaagaggtgctgatagcattgttgccagaactgcgcaaagctacaaatgaacccgacatgaggatttttatcccttacattcgcgaccttctcgccactgctggagtttctctcgttgtgttgccaacgccaaagggatgtcgggcaagtggtgctacctgcttttttacaccagatcgcgcaaccctagtcatgagtttccgttatctgaccgatgaccatttttggtttacgctgtttcatgagattgggcatctcatcttgcatgaagctgtccgagttcgcgtagaaggtaaagatagtctttcgtcggaagaggaaaaggaagcagataaatttgccgttgatgttcttatcccagaagaataccggcagcaacttagtcgctatggtgtccggcattggaaagagatcatccggttagctaggaaaatgggggtatccaaagggatcgtactgggatatttgcagcatgaaggtaatatacctttttctcaccttaatcggtttaaagtgagattccgtaaagaagatatcgtctga

SEQ ID NO: 29001 - DNA, 297 bp, Escherichia coli
atgcgtcagcgtgatgttgctgcgctcgatgcaaaatacacgaaggagttagctgatgcgaaagctgaaaatgatgctctgcgtgatgatgttgccgctggtcgtcgtcggttgcacatcaaagcagtctgtcagtcagtgcgtgaagccaccaccgcctccggcgtggataatgcagcctccccccgactggcagacaccgctgaacgggattatttcaccctcagagagaggctgatcactatgcaaaaacaactggaaggaacccagaagtatattaatgagcagtgcagatag

SEQ ID NO: 29002 - DNA, 465 bp, Escherichia coli
atgaactgctgggaaatattaggtttacaatctggtgcggaagaacgagatattaagcgtcgttatgcgcaactggtaaaaaattgccgcccggaagatgatcccgcagcctggcaacaattgcacgatgcttatgaacaggctttacgttatgacgacgaagatcagtggcaagaagaggaagaagagcaaccgatcaatatgtccaggggtattgttcatcctcgtcctgtgatgacatttcgcgcactcaacaccttttctggtcatccacttcctgatgtcactattaaatcagagggggaagtcacttggcaagccgtgctggatatgctctgtgaggagaatgaagctattcccgaacacgcccccatgcaacttgctaaggcgttatctttccttgagaaaaaagatctcagctcacgaatgtgctttgaagaagcgttattactgcatcttcggtaa

SEQ ID NO: 29003 - DNA, 396 bp, Escherichia coli
atgctgcagggcgtaatcccgcaaccggtaataatggaccgtcatggcataacactccgtacgacaggcatgatgactgtacgtcatcagacaggcagcaatgccggcagcttccggactcatttcagcgcggttaccgttcatggcattgaacagtacccatgtttcgtcatcatcgtcatccggttcgggtgccataaatgccccgccgttgttcagggtgtacagattccagataccaccgcagtagtcttcacacagacggtccatccagccgaagacacggggctccagggccacccactgtggaatgaggccaaagtgctgcggccagaagctgatgcgctgttcatcagggactatggtggcaaccagctgaggctggtcattccctga

SEQ ID NO: 29004 - DNA, 537 bp, Escherichia coli
atgataaaaagcacaggcgctcttttactgtttgccgcactgtctgccgggcaggcaatggcctcagatgtggcattcaggggtaatctgcttgacagaccctgccatgtgtccggtgacagtctgaataaacatgtcgtcttcaaaacccgcgcgtccagggatttctggtatccgcccggacgttcgccgacagagtcgtttgtcatcaggctggaaaactgccatgcaacagcagttggcaaaattgtgacactgacctttaaggggacggaggaggcggccctcccgggccatctgaaggtaaccggagtgaattccggccggttaggcattgcactgctggacaccgatggcagcagtctgctgaaacccggcacctcccataacaaaggccagggggaaaaggttaccggaaacagtcttgagcttcctttcggcgcgtatgttgtggcaacgccggaagccctgcggacgaagagtgtggtacccggtgattatgaagcaacagccacgtttgaattaacatatcgttag

SEQ ID NO: 29005 - DNA, 822 bp, Escherichia coli
atgcgattagccagtcgttttggttatgctgcaaaccagatacgccgtgaccgtccgctgacacatgaagagctgatgcaccatgtgccggggattttcggggaagataaacacacgtcccgaagccagaactatacgtacatccccaccatcaccgtactggaaagtctgcagcgggaaggcttccagccattctttgcctgccagacccgtgtgcgcgacccgggccgtcggggatacacaaaacacatgctgcgcctgcgccgtaacggagagataaccggagaacatgtccctgaaatcattctgctcaactctcatgacggtacctccagctaccagatgctgccgggttacttcaggttcgtctgccagaacggctgcgtctgtggtcagtctctgggggaagtgcgtgttccgcaccggggaaatgtggtggacagagtcattgaaggggcttacgaggtggtgggcgtgtttgaccggattgaggaaaagcgtgatgccatgcagtcgctgattctgccgccaccggcacgccaggcgctggcacaggcggcactgacttaccgttatggtgacgaacatcagcccgtcaccaccgccgacattctgacgccacgacgccgggaggattacggtaaggacctgtggagtgcttatcagaccattcaggagaatatgctgaaaggcggaatttcaggtcgcagcgctaaaggaaaacgtatccatacccgtgccattcacagcattgacactgacattaagctcaaccgcgcattgtgggtgatggcggaaaccctgctggagagcctgcgctga

SEQ ID NO: 29006 - DNA, 396 bp, Escherichia coli; identical to SEQ ID NO: 11876

SEQ ID NO: 29007 - DNA, 651 bp, Escherichia coli
atgtgtcaaccaacatcaacgcaggggacaaggataataaccggagataattattcatcacagtatcaggatttgtttgaagagaggatcaatgagcttattgatgaaagtctggcgatgagtggtgaacgacgttgccttcacttttctcctcaggctgccagaatctggacggattattacaatgatgtggaatcgaagctggggggattggggcctttaagacattgccgggaatatgctgctaaaaatgcagagtatatggcaagactggcaggacttatttaccattcgagcggtgaagagggggagatttccccttacactgcagaaatggcgagagaattagcaatatggtacggtaatgagtatgtgcggttgtctaatccgttaacttttgacaactctgccctgaccgtacctgtgcgactcattccagaggagcttgaacttttcaactggataaaaagctattgtattgagaaggggatcctctgtatgaaaaaaaatgacattttacagcgtggtccgaaccgtttccggaaaaaggataaaatcaactggttactggatttactgtatgaacaaaacagagttgtaccggttattgagggaaaaacgttgtgtgtcgcacctaactttgacctctga

SEQ ID NO: 29008 - DNA, 309 bp, Escherichia coli
gtgatcagccgctggcgcatcgagcagtgcagcgaactgagtgcggtcagtgcctcctttgtgttgtccacaccgacggaaacggatggtgctgtttttccggggcgtatcatgctggccaacacctgcacctggacctatcgcggcgatgagtgtggttatcacggtccggctgtcgcggatgaatatgaccagccgacgtccgatatcacgaaggataaatgcagcaaatgcctgagtggctgtaagttccgcaataatgtcagcaactttggcggctacctttccattaacaaactttcgcagtaa

SEQ ID NO: 29009 - DNA, 405 bp, Escherichia coli; identical to SEQ ID NO: 2569

SEQ ID NO: 29010 - DNA, 639 bp, Escherichia coli
  misc_feature (405)..(414): n is a, c, g, or t
atgcctgttacagaagattgccatataggcggaacattaaacccatatggcacatcgaagtatatatcagaactgatgattagagatattgcaaaaaaatatagtgacactaattttttatgtctgagatattttaacccaacaggtgctcacgagtcgggaataatcggggaaaatcctgcagatataccaagcaatttagttccatatatattacaagttgcgatgggtaagctagaaaaacttatggtatttgggggggattatcctacaaaggatggaaccggtgttcgtgattatatacacgtaatggatttagcagaagggcatgtggctgctttatcttacctttccagttgcaataacactaattatcatgtttttaatttaggtactggtaaaggnnnnnnnnnnggtaaaggatattctgttttagaattggtttctacctttgaaaaaatatctggggttggaattccgtatgaaattgtttcgagaagagaaggggatgttgctgaaagttggtcatcacccgaaaaagcaaataagtatctcaattggagtgctaaaagggcgttggaaacaatgcttgaggatgcctggcgctggcaattgaagaatccaaatggttataaataa

SEQ ID NO: 29011 - DNA, 396 bp, Escherichia coli
atgctgcagggcgtaatcccgcaaccggtaataatggaccgtcatggcataacactccgtacgacaggcatgatgactgtacgtcatcagacaggcggcaatgccggcggcttccgggctcatttcagcgcggttaccgttcatagcattgaacagtacccagttttcgccatcatcgtcatccggttcgggtgccataaatgccccgccgttgttcagggtgtacagattccagataccaccgcagtagtcttcacacagacggtccatccagccgaagatacggggctccagggtcacccactgtggaatgaggccaaagtgctgcggccagaagctgatgcgctgttcatcagggacgggagtggcaaccagctgaggtgggttattccctga

SEQ ID NO: 29012 - DNA, 264 bp, Escherichia coli
atgaataaagagaaatctccggattattttgtgaaacgattacaggatgcaacagagtcaatgttgattgccctgaataattactcttacgaagaggccgtaacggtacttgagtggataaaggaaaaaataacggaagacagcatcgtcaagatgcagagtatcaacatctcccgtgacaaaacatttccactgcgaataccgccaaaacgacgactggtttactcgataccagtctcaatgcagtgcaaattgccgaaatag

SEQ ID NO: 29013 - DNA, 231 bp, Escherichia coli
atgagaacagccgaatcacccggcagaaaaataaccgccagaccagctaaccatcatgcacatatcagcattgccgcaagaaaagccgagcgtgcgcatatctgcgaattgctgcatgacctggttaacacagcgagagagaagcacacctccccggaggaaacctgttcatccattgaacgactgattgcaatactcgccaacccagacgaactgaaggggtgcgcataa

SEQ ID NO: 29014 - DNA, 228 bp, Escherichia coli
atggtcgccatcctgaatgtgtgttgctgcccccccctgaacgtggaaagaaaagcccgcgcatcgctgcgtttattccgcgacggcgtgcggaatttttcacgcataaaaccccacgactacctggtaataagaatcggttttcgctggcgattgctgagcaaaaacaacggggcgtcatgggatttattaacgcacgaaacctataacaaagaggccgcgttatga

SEQ ID NO: 29015 - DNA, 237 bp, Escherichia coli
atgaatagcgaaaacaacaaagagcttttgcgggaattgcgtctcatcgcccgtgcacatgaggaagcagcaaaagttatcgcagctgctggaagaccagagctcgttatcgcttcagcaatctcactgaggatcaccatggaagcaatccgggtgattcaggatcaggaaagtgaaatcgccacccttaaaaagcagctcaacgagaaatctgccgggcaaaggagtcagcaatga

SEQ ID NO: 29016 - DNA, 219 bp, Escherichia coli
atgatccaggaatcaaccgttatccggttcacagccaacggccgtcagtacgaggtagacgaaagcctgattgaccagggcatgacacgccaggactcacgcaattctgagatgcatcacatccgccttatcaacggttcgcacttctgcgccacgaacatggaagaagtacgcgtgctgacagcaacacgcaatacgggaggtaaagcatggcagtga

SEQ ID NO: 29017 - DNA, 351 bp, Escherichia coli
atggcagtgatttatatcgccggtccaatgaccggatacaaagatcacaacagaacggcgtttttcacagaggcgatgaggctcacggcagacgggcacgttgtgctgaaccctgccacgttgccggaaggattaagccagcagcagtacatgagtatttgtattccgatgctcatgtgcgccgatgccatttacttactggatggatgggaagagtccgctggcgcacgggctgagtacgcaatggcgctcaaactgaacatgcatgtgtcattcccggaaaaccgggcagccggcgaaaccgtcgcgcagctgcttcacaaatcaaaagccgcacaggcgactgagtaa

SEQ ID NO: 29018 - DNA, 1107 bp, Escherichia coli
atgattgcgcgcagagctaccaaccgtctcacaggctttattccaggcaaggttgatcatgcactccatcacggggctgtcactttcctcaacaaaggagaggcgcgcaatcatgcattccggggtgagcatgtggcgctggctaatcagtctttgatagctaagcgcctgccattcagccttttcagctctgatagaaagagaggaagccatgacctgccacaccagaaagagcaccacactggcgaaaacaaacgttgcgctgtcgcaaaaaatgaatgcggcaacaatcgcaaggaaagcgctaatcctcagaaccaaggaagcgcgacggtggagaaggcttgtcatgtgttcaagccagtagctgtaccacaggtcaaaaagaatttcgtaatcagaagggagcttatcactcatcagaaacaccccgcgtatgcagacaatcaccagttgccaggtgatattaattcgcaacattctaaccacatcagcacgcaacacaaaaaccgcttgccagcgctcgtcgtgtcaggttacatttccgctgcacctcataaaacgggtgccgggatttccaccccgctgacaaacgaagcgcacagccgcgccagcggtttttttgtgcgtactgtatcgccacgtctttttcgcgtcagaattatggcggggcgtacagggccgacttcggtcgggccggtttcttcgtttgccggttgtggaaaccctgtacgtctcgccaccctgagttttccacctctggttggtgagttttcaaaattcacaaacgaagaggccacaccatggcaaaccgcaagcaacagcgcgcccgcgctgagcgtcgtcacatccagactgaaatcaaccgcagacttttccgcgcaacacgcgtcgcgcaaatcatgcatatcaacatgctgcatgagcacacgcacgcactatcaaaccgttactgcgctgctgtcttcagctatctcgccgaagatctggcagaactgcaaagcctcatcaaccagcaccgataaaccacatccggaagctatcccacacctgcacgcgggaggcttccgcacgtctgttaccggaggttctcatgaagagcgttaa

SEQ ID NO: 29019 - DNA, 417 bp, Escherichia coli
atgaagagcgttaagggactttcagatattcaggacttctttaactggatgtgggcggtggatcccctgctggcttcccgcctgaacaactggcacgactattaccgccgcgcctgtaaacaggctgcccgcagcgtcaccacatacggggatttctccttcaccgtggacggtcgttaccgcgtggacgtgaaaggtgatggtgatggactgggtttatttcacatcaacggcaccgacagtaccgccatcagctggtcgtcatcagagatggcgctggttctggaaatgacaacccacagcgtggccgtgaaaggtatatacaccgcagaaggttttatcggcgaataccagcgccttctcgtgctgtaccgcgcggcgtttcaggtggcaactgccggggagtgcgacgcatga

SEQ ID NO: 29020 - DNA, 273 bp, Escherichia coli
atgattctgtttaccctcctggttacgctgatatattttcttccgggtgaagattcattctattccgctccctatgagtacagtcgcggtagctcaaaaagttgttcaggggcatttgttgatgatcctgatttgcaaaaaacaatctttatttgctacccatacggtgactatcaggatggtaatgtgatttatgtgaagaagcgtgtgaatgcgctgggtgcggtggtcacctatgcatacgcgacaagcggccgatttcggtttgactga

SEQ ID NO: 29021 - DNA, 444 bp, Escherichia coli
atgagagtcaccgtcatcattgtctggctggttgtgacgcttctgttatgtgggctggtcggctgggaagcataccgcaaggggcaggaaagtctggggagacaacaaatgatggatgtcatcgaggacaaccgggccgccatgcatgaagtccgcgaggcatacagcgatttttcgcgggtgattaacatcatccggatcctggaccagcaacgcatcaccgaaggagagcaacgacgtgaagctatgcagaaggccgcacagaatgatgcgtgtgctggcgctcatcctcccggcgctgtcactgagcggctgcaacagcacatcgcacacgttgaaaaccagactcgtttacgagccggtgccggaagtactgacaaggcagacgccgatcccctttctggagcgaccggtgacctggtaccggataaccgaatggagtga

SEQ ID NO: 29022 - DNA, 1938 bp, Escherichia coli
atgagcaaaaaacattttgagttgattaccgccatgagccgtacggagctggctgagaaagttaacgaacgtctggcgctgggctggcagcttcagggcgacgcacaggttgcgtcagagccgggcgtgccgtggtatttgatgcaggccatgaccggtgatcagcccgtcaccgacgagccgcaaattgctgtggatgacgaagggaacacaatcaacgaaccggaatactacttcgtcattgctctggccgggcaatccaacggcatggcgtatggcgaaggtctgccgctgcctgagacatacgatcgccccgatcagcgcattaagcaactggcacgccgcagtactgtcacgccgggtggtgcgtcctgtaattacaacgacattattcctgcggaccactgcctgcatgatgttcaggatttgagtaagttttcacacccgaaagccagcgcagctcagtatggatgcgtggggcagggattacatatcgcgaagaaattgttgccgtttattccggcgaatgcgggcattcttctggttccgtgctgtcgtggtggatctgcgtttactacagggggtgatggcgctttcagtgaaacaaccggtgcaacagaagcatcgtctcgttggggggtcgataaaccgttatacaaggatctactcacccgaacaaaagccgcactgaaaaccaaccctaaaaacattctgcttgcagtggtctggatgcagggcgagtttgacttaaaacaaacaacggcatattccaaccagccagcggcgtttgatgccatggtggcaaaataccgctccgatctggcgggcgtatcaggtcagtgcgttggtggctcttcatcatcagtaccctggatttgtggtgatacaacttattactggaaagagacatatccaaccgagtacggtgttgtctatggcgcatacaaaaacaagcaggctaaaaacatcttctttgtgccgtttatgacggatgaaaacggtcagaatgttggcaccaacgagccagatgaagatcctgatatcactgaaatcgactattacggttctggatggcgcaaagataaaaccacatggacaacggcagatcgtaaaactcactttggctcatgggcacgtcggggaattatttcagatcgtcttgctacagcaataattgagcatgcaggtaaaacggaagcacttgtttatggcagggtaacgctcagtaaagaggaagagcgcccggaagaggaagatgaacccattgtaaaacccacagctgaacagtcagttatactttacgacgctaaaaatgcctcagataccaatttacaggcgctgaactgggagttgaaggatgtcaccccctctctgattcaggagggaagtaataaggcgttgcgtcttgagaaaagcaacagtgcgaaaccatggtcattacttcatagtattgcagccgaaaaatcaggacaacttctggaaaaaggcggagaaatttccgttcgcttcaaaatacctgaaaacacctctcttgatacaggaaaaaataagtatgtgttagggctgtactggaaaatagcgggatggccaggtgatggcggagaaggctatctgagttcttttcttgttcagacagataaagcaaacctggatgttgtttaccattacaacagtaatcaactgaaagatattggtacatttgatgcgtttgatcatgactggcatacgctcgcattcaggtttgaaggcggtaacagcctcagcgttacaccggtgctcgatggtaaagatggtcaggcgtttgatcttgttaagtggactaattcagctaatgaggccaataagtttattttgaccgatattactggcacagctgaaacgtatcctgtccttattgagacaatcgaagttaaagcaaaccaggcagcagcgaaataa

SEQ ID NO: 29023 - DNA, 636 bp, Escherichia coli
atgagagacgctcacgaactggatgccatctttcaggacattctttccggcctgtcggctgctggcattcagcgcacagcaatgaacgtgggtaagattatccggcagcaacaggccagacgcatcagaaaccaggtatccccggaaggccagccctgggagaaacgaaaacgccgcataatgcgtatacaaaaaggcgtgaagtttatctggaaagacggacaggtgagaaacctgaaaaactggagcacatcccggggacggttcgggcagaaaattaccggctacgatacagacaccgggggtatccggacgttttacaaagcggatatcgaagattacctggaaattaacactctgcgtgttggcgcgaaaacaactcgcccttcccccatgtttgaaaagctgagaacgccgcgcttcatgaaaataaccccggctcctgacggcgtaagcgttgggtttcaggggcgggccgcgcgtattgccagggtacatcagttcggagaagtgagcctggtatcacccgggaacgccacgaaataccccgtgcgcgagctgctgggcctgaacgggaaagacaaacagcaaatcacagaaaccgtgatagccggactggggaaagcgacgaaatga

SEQ ID NO: 29024 - DNA, 582 bp, Escherichia coli
atgaacatcgagcttatgcgactgctgcacaacattgtccgcattggcgtggtcacagaaatcaacaccgacaactgggaggttcgcgtgcagagcggcggactgaccaccaactggatcagatggaactgcgggcgggccggaaaattcagaatctggatcccgccatcaccgggcgaacaggtgcttatcctgtgccccggcggcaacccggaaaccgccgtcagcgcgggtagcctgtacagtaatgacaacccaccgccggactcgctggaaaacgaaatggtcatcaccgcaccggacggtgcagtgtttcgctataacgcacaggaaagcgcgctgactgcaacaggcattaaaaccgcaaccatcacagcggaaacccgcatcacgctggacacgccaagggtggaatgcacgcagcacctgaaggcaaaaacattcgagctgaccgaaggcgggaagatgaccggtaacatcacgcacaccggaggaagcctgacctccaacggcatcacggtacacagccacgtacacggcggagtcagaagcggcggagacacaagcggaggtccacagtga

SEQ ID NO: 29025 - DNA, 369 bp, Escherichia coli
gtgagcattgactacaccggcatgaatccgcacggcacgggaacaatttcagggcacgaacacctgaagaacgccatcatggacatcatcatgacacctgtcggaacacgcgtcatgagacgggactatggcagcctggttcccggactcatcgacagcccgatgaatgatgtaacccgccttcagtgcatgagtgcagctgtaatagcaatcagccgctgggagccgcgcgtggccgtgagcgccgttgatgtggcatgggataaacaggggcgggccatgctgtccctgaactgcctgattgtaaacaccatggaaaaactggagttttctgtagagatgggaggaaaggcggatgccggccattga

SEQ ID NO: 29026 - DNA, 897 bp, Escherichia coli
atgccggccattgatttatctgaactgccaaaaccgaacgttatcgaaacgctggattacgaggtgatactggcagaaacgaaagcattcatcaccggtctttacccggcagaaatgcaggcagccgtcactgccgcaatgacgctggaatcagaacccctgaacattattgcccagggcatggcttttcgtgagctcattattcgccagagaatcaatgacgccgcaggtgccgttttgctgagccatgcggtatccacagacctggatcatgttgccgcgaacctgaacaccattcgccttgtcaccacacctgcaacagatacccgtgacgccatcatggaaagtgataccgctctgcgtcttcgggcacagtctgcctttgacggactgagtgttgccggaccgacaggtgcatatgagtattttgcccgaagtgtgagcggaagcattgccgatgtaagggcgacgagcccatcccccgcccaggtcaccgtggcagtattgtccactgacggcgacggcagagcttccgaagacttgatcgaaaaagtcagaaccgcactgagcgcggaggacgtccgcccggtgggagaccgtcttaccgtaaagagcgctgaaatcattaactaccaaatcaacgccagactctatttttatccgggaccggaatcagagccgatactgaatgcggcaaaaaacaacctggaagcctggatcagggagcaaagaaagataggccgtgacgttgcgctttcggccatcatggcggtactgcatgttcagggggttcagcgggtggagctgattgagccaaagcaaaacattaccgtcagtgatgtgcagtcagcctattgcacgtcattcaatgtaagcaccgggggaaccaatgaataa

SEQ ID NO: 29027 - DNA, 534 bp, Escherichia coli
atgaataagacatcattgctgcccccttccgccacagaattcatacgcaaagcagagcgtggcggtgaacggttaatggcgctgcccgtcggtattcgccatctctgggatcctgactcatgccccgtgcagctgctgccttatctggcatgggcgttgtcggttgacagatgggatcagaactggccggaggaaaccaagcggcaggtcattcgcgattcatgggatattcaccggcataaaggcaccatcaaagccattcgccgggttgttgagccgtttggttatgtgatcagggtaaccgaatggtgggaaaccaacgaaacaccaggaacattccggctggatatcggcgtactggatatcgggatcaccgaagagatgtacagggaagtcgaacgcctggtggccgacgcgcgcccggtcagtcgccacctgatcggcctgaacatcattcaggacgtaccgggttacatgtacaccggcggcatcgcctacgacggcgacatcattacaatttatccggcagagtag

SEQ ID NO: 29028 - DNA, 2982 bp, Escherichia coli
atgagcgtgaaatttaaaactgtgatcactaaaagcggcgcagcaaaaatcgccgcagcgaccagcgcatcaggaaaaaaagtcaacatcacgcacatggccgttggtgatggtgacggtaatttacctaccccctcctcatcccagaaaaaacttattcgtgaggtctggcgcggcacaccaaataaggtcgttcaggacagcaaaaaaccaaaccagattattgctgagctggtcatccctcctgatgccggtggattctggatgcgtgaaattgggttgtttgatgactcgggaacgctgatcgctgttgccaatatggccgaaagctacaaaccgctgctgtctgaaggttccggcagggcgatgacatgccgcatggttattgtcatcagcgatgtaagcgcggtgaaggtgtctgtggacaccacgacgattatggcaacccaggattacgttgatgataaaatcgctgagcatgagcagtcgcgccgacatcccgatgccaccctgacccagaaaggcttcacccaactggacagctcggtaaacagtagcagtgaggcgaaagctgcaacaccaaaagcagtaaaaacactgaacgatacaaaggccccgctgaacagccctaagctgaccggaacaccgactgcccccacggcagcaaaaggggtcaacaacacccagatagcgacaaccgcttacgtgatggcagcaatcgctaatttagtggactcatcaccggacgccctgaatacgctgaacgagctggcgcaggcgctgggagatgacccaaacttttctgccaccatgacaaaggcactggccggaaagcaaccccttgacgccacgctgacagcaatagcagcactggctacagcagctgataaactgccttacttcaccggaagcgacaaggcagcactgacagcgctgacgaaagttggccgggacattctcgggaaggcatccgtcagtgaggtcattacatacctgggcctcactaacaccatcacgcaggcatcgggcgcacttcagaaagcacagaacggtaaagacatcccgaataaagcaacttttctgacgaacattggcgttaccagccagacattcatgaagcacaacggagaactgcccgaagatgcggacctgaatacctatggcccggttgcggcaacactgggaacatggggaaaagcctcatcaaccaatgcaacgatcgctaaaaatttcccggaagagagcgctgtggggatactggaagtccttactggcggatcatttaacggaacgcaaaggtacacctgccgcagcgggaatatttatgttcggaccctgaccgccagatggaacggtacaaacggaccatggggagtgtggcgaaacgtacagatggcgaccaggccacttagcacaaccattgatctgaataccctggggaatgcaggtgatatcggcatatggaggaacagtaacgccagtattgcttcattcaccagaaactaccccgaagaaggcaataatgcccaggggattctcgagcttatggaagggggtgcgtatgggcgaacccagcgctacacgaccattctcgggaacgtgtatattcgcacccttacaacaacatgggacgcgtccgcgccgaaatggggagggtggcacagagtcggacatcagtctgacggggcatatcgtgatgatgacctgaacaccatgaaaacgccgggcatttacagtgtgaccaacaaggcaaaaaacggccccatgaagagcggaaatgaaaatttgctggggatccttgaagtcataaggcgactggatggcagaacctttgtgcagcgttacaccacagccggaacggcgacactgacccgggggcgatcttttgaaagaaccttcagcggtgacgcctggacagaatggcgggaaatctataactcattcagtcttgcccagagtctggggatgggtcgtgcggtagcaagactatccagcctggactggcagacctacgactttgtacctggcagtttgatcaccgttcggctggatgacatgaccaacattcctgacagcatggactggggggttatcgatggcaacataataaatattgccgttggcccgagtgaggattcaggttctggcaggtcagtaatggtatggcgcggtacagtaagtaaagcgaactaccgtttctttatggcacgaattgccgggaatccgggaaatcgcacgatcacaacaagacgagtaccaattattgatgaagcccagacgtggggggcaaaacagatattcagttctggcctttcaggtgagttatccggcaacgcatcaactgcaacaaaacttaaaaccgctcgcaagattaacggcgttgcgtttgatggttcggcaaatattgaagcgtttccccccggcgttccactgccgtggccatcagatacaccacctgctggctatgccattatgcaggggcaaaccttcgacaaggcaaaatacccgaaacttgccattgcctacccgtcaggaaagcttcctgatatgcggggatggacaatcaaggggaaacccgccagcggtcgggcggtattatcgcaggagcaggacggtattaaatcgcatacccatacggccagcgtgtcaaagaccgatctgggttcgaaaacgaccagttcatttaattatggaaccaaaacaaccagcacaggcgggagacacgagcatgatgttccgctcaagtatcagaacggtggcggtgtaaactttgactggctggacggagcatcaaacagtggtgttattgcatacggtaaagtacctgccgccggtgaacacacccacaccgtggcaatcggggagcacactcataccgtcccattgggatcacacgggcacggcgtgaccgttaacgccacaggcaacacggaaaacaccgtgaaaaacattgcgtttaactacatcgtgaggcttgcataa

SEQ ID NO: 29029 - DNA, 747 bp, Escherichia coli
atgacctttacaatggaagacgaagccagaatgcttcacgtatttcatattcacccggaaaccagcgaactgactggagaaagcgacgtatatatcccaccgtataccgggttgcccgcaggctgtacgacgaccgagccgccacatatcccggaagggttcgtggcgctttttgatgacgtgcgccagcgctgggagcttgcagaagatcaccggggaaaagtggtgtggaatacggcatccggggatgagatcgcaattacggaaatcggaccgctacctgaaaatacaacaacggcagccccgtcaacagccgcagacaagtttattgatggcgagtggagagaagatcgcagtctggcaatcagcataaaaaataacgagataaacgaatggcgaagcaccatggaagccgcgaattacgttttcacgttcaatggtcgtagctgggattacggaaaagaaacccagtcccggctggatccatcagtgacagccgcaaagtccgggttattaccggagggatttttctggacggatgccgataacaacgatatcccggttaccgcagatgaattgatcgcactgagcaatgctgcatctgctgcaatgtttaccaagggaatggaaatacatatccggcaacgggaaatgaaaaaagccatagaggaattacaggaccccggcgaaatcatggcatacccggtgggatggaaaacagataccggagacggtgccggtgagtga

SEQ ID NO: 29030 - DNA, 2859 bp, Escherichia coli
atgagtaataatctccagatacgtgtagccctcactgcggtcgaccgtctcacccaacccgtcaggcgcgcccgggaaatgaccggcgcgctttccgaatctctttcctccacgcagaacgctcttaagtcactccagcgaagcagtgatgcgttttcccgtgcccgtcagcaggttgcctcgactgaaaacagcctgaacgaggcgcgtgggcgacttcagcgcctcctggaggtccagcgtactggcacgacactgacggaaaaacagcaggaagctatccgctcactgactgcgaagattgagcgtcttaataccgtttacgcccttcaccagtcccggctacgggaagccggtcgtgagctggagtctcacggtatacgggcggacggaagtaaccgcaccactgaagaagcaatcaggcgaacgcaggaatacaacgatcagcttgagcgccagcaggctcagcttgcgcgcgtcacgcaggcacaacaacgttacgatcgtgttcaggatatcgccggtaaactcagccagcgcggtgcgcttgccatggcagcgggcagtgctggtctgtacgccgccggacgtgcggttgcacctgttgttgaagagcaacggcagggtgcgctcattgcggcacagagtggaggcagcgcagaagacggccagcgctacagccgtatgattcagaacatccgtgcgtcaggtgcggctacggatatcgcgatgatttccgaagcggcagctgcggcgcaaagcacgcttggcgcactgggtactgtagggactgaagaactagagagggtgacacggcaggcaatcgatcttgctcaggtcaccggcggtaatgtggctgaacaggttcaggcggccggcatcatgctgaaaaacggtctcgctgcaaatgcaggtgaggccgtggacctgatggcggcaggcatgcagaaaatgtccgccgaaatgcgcggcgaacttcctgaaattctgcatgagtattccacgcatttccgcaatatggggctctccggctctgaaaccatgacgctgcttgtcagcatggcgcagcaggggaaattcgccctggataaaaccggcgatgccgtcaaggaattcagtattcgtggctcggatatgtccaaagcaagcgttgaggcttatgggctgattggccttaatgcggaaaaaatgtcgtcagcgattgccagcggaggcgcggctgctcgcgaggcaatgcagcgaacggctgccgggctgctgaagattcaggatcctgcggaacgagccaatgcggcgatagcgctgttcggcacacccatcgaagatctggccgttgatcagatcccggattttctccgctcgctggcaacggtgtctgaccgtatggggcaggtgcagggaaccgcccggcgtatgggtgatgttctgcgggataaccttggcggtgatgccgatcgcctgtctggtgtcttctccggtatacgcagtgatgtcgttgcccttgtcaccgatgacctccgcgaacttgttcaggtagcggcatcatggggtgaacggctcagaggatgggttcaggataatccgcaactggtgcgtactctggcgattgttgccggtggtgttcttgcggccacgacagcccttggggcgttgtccctgacctccggggtgctgaccggtatttttgcaaaacttcagcttggctctgcgcttcttggtggcgggttttcctctgttgcaactggcgttggtggtcttgcccttcgcctgtctggccttccggcactgtgggggatggtatccggtgcggtttcagtgctgggcggggcgcttgccggtcttctcagtcctgttggtctcgtggttgctgcccttgccggtggagcgctgctcatatggcgtcactgggaacaggttaaggcttttatgctcggaacattccgggcgctgtgggctggccttgcgcctgttcgtgaaggtgttgctcagtttgcgccgctgtttgatctggtatcgggtgcggtgtccacggtgtatgactggttcaggcggttactcacacctgttcagaccagccatgaatctcttgaacggtgtgcctcggccggggaaacttttggtcgcgtgctcagcggggcgatatcgcttgcgcttactcctcttcaggcgttgatggacggcctggcatgggtgctggaaaaactcggcgtgctcccttctgaagttgagcgggcgaaaaatcgtgctgaggcagttgcaaaggctccggttatgtgggagtgggaccctgttcagaaaaaaatggttcagaagtcctgggtacccactccggccgctcctgtcagcaataataacaacgggaatggtaatccacagaatgacggtaaaaccagcaatccccccggcataaccagcggtaacagcgccgttcttcgcaggcttaaaggtatcgagggtaatacgtcgggcatgcttcatgaagcccgcaagcgtatcggtcccggcgatatcgtgtttaaaaacctcccccgtgcgctggctgttcgcgggcagtggaatgagccgactgttgcgccaggactaccggttatgcctccggtttcgcctgtgcctccggaggtctcccgggatgcttcccgttccgtggaggttaagcagtgggcgccagtctccccggctacccgggaggcttcgcgctctcctgaaccgtcgtctgtgttcggtggggaaatccacgttcatcttcacaacgtggcgacgcagaacccgcgcgaccttgccagaatggtgggggaggctgtacgggaagaaattcgcagacaatccgccgggatgaacagcttccgcgatcgtgattag

SEQ ID NO: 29031 - DNA, 393 bp, Escherichia coli
atgtcaaaaaaacaaaacgaagtactggttgccggtgctgataacgtcgacaactttgatgttgctgatggtaatgaggttgcctataacggtgagcccattgagttaaccgttccggttgtccgtggtgaacaggttattacacatgtgaagattggcgaacgtgcccgtcagagtggttcactgcgtggtctgtctctggctcacctgtacagcctgaactttaacgcgatgtgcgtttatctcagccgtgttacagagccccgccttactgaagcggaactgtcgaccatgcgcacggaggatttcggggcgctttccacggcggcaacgtattttttctcgccgaaggccttgcccggcaagaaaaagacgaatacaggtgtgatgtaa

SEQ ID NO: 29032 - DNA, 141 bp, Escherichia coli
atgccgcaaaaaacgatcatcgtgagcattttatgcttaaccatgttgttgaccgtctggatgatacaccgttcgccgtgtgaattcagacttaacatcatgtggtcagaatttgcggcgttcttgcagtgtaaaccgtaa

SEQ ID NO: 29033 - DNA, 381 bp, Escherichia coli; identical to SEQ ID NO: 3044

SEQ ID NO: 29034 - DNA, 1029 bp, Escherichia coli; identical to SEQ ID NO: 19683

SEQ ID NO: 29035 - DNA, 2175 bp, Escherichia coli
atgtcacctcgtcagataaggggttattattgcgaaatcatcgcttcacggaaagacgtcagaatgaaagctacagaagcccgcctactcgattttttaaaatgttcgcagcagtttgttattcccatttatcaacgcacctattcatggaccgggcaacaatgtcgtcaactttgggacgatatcattcgggccggaaagcgtgacgatatatcagcacattttatcggttcggttgtttatattgagcaggggttgtatcaggtttctggtatctctccgctactggtcattgatggtcaacagcggctgacgaccgcaatgttgctgattgaggctttatcacgccatcttggcgaagaagaagtttttgatggcttctcggcaatgaaattgcgtaattattatttgctcaatccttatgagtccggcgagaaaggatataaattattgctgactgagactgataaagacagtttgctggcgttaataaaacaaagaccaatgccagaaaactattcccatcgaataatggaaaactttactttctttgatgagcaaattgccaaactcggtgatgacttgatccccttatgtcgtgggttagcaaagttattaattgtcgatgtggcgcttaatcgtggtcaggataatccgcaactgatttttgaaagtatgaactccactggtaaggcgttaagtcaggccgatctggtgcgcaattttattctgatgggtctcgaaccagagcatcaaacccggttgtatgaagatcactggcgtccaatggaagtcgcttttggtcagcaaggttacagcgaatattttgacagttttatgcgtcattatctgacggtaaaaacgggggagatccctcggacagatgaagtctatgaggcatttaaactgcatgctcgtagcccgagtgttgccgaaaaaggtgtggatcggctggttgaagatattcacatctacgcggagtattactgtgcaatggcattgggtaaagaaagtgacaaatcgcttgccacggcttttcaggatttgcgcgagttaaaggtcgatgtggcgtatcctttcttactggcgctttatcatgactataaaaatggcgttttgtctcaagaagatttcctgaacataattcgtttaattgaatcttatgttttccgccgtgcagtgtgtgcgattcagacaaattctctgaacaagacgtttgccactttttataaggtcattaataaagaaaaatatctggaaagcattcaggtacattttatgaacctgccttcatatcgtcgtttccccaacgatgatgaatttaaacgggaattaaaagttcgcgatctctataacttccgcagtcgcagctactggttacgacgcctggaaaacgataaacgcagagagcgcgtggaagagtttacgattgagcatattatgccgcagaacgaaaatttgtcggctaaatggcgtgaagagctgggaagtgactggcaacgcattcataaagaactgttgcatacgttggggaatctcacattaacgcgctataactcccgctacagtgacagacctttcgcggaaaaacgcgatattgaagacggctttaaacatagcccgctctatttgaatatcggtcttggacagtgcgaaaaatgggatgaagcagccattcgcgcccgtgcagatcgtctggccgatctcgcggttcaggtctggcaagcgcctgctcttcctgaagaggttttagctgtttatcgggcgcagccggagaacaaaaccagttacagcctgagtgattatccttttcttgctgatggttcgcatagccgggtgttatttgatcatcttcgcgatgaagttatgcgcctggacgcagggatcacgcaggaagttttaaagctctatattgcgtttaaagctgaaacgaattttgttgatgttgtaccgcaaaaaagccgactgcggttgtcgcttaatatgcagtttcatgaactggtcgatccgaaaggtattgccaaagatgtgacaaatgttgggcgatggggcaatggtgatgtggaaattggtttcagtgacctcgcacaacttccttacattatgggattaattcgtcaggcatttgaaaaacagatggagagcgcgggtgatgctgccaacttactgatttag

SEQ ID NO: 29036 - DNA, 486 bp, Escherichia coli; identical to SEQ ID NO: 4570

SEQ ID NO: 29037 - DNA, 882 bp, Escherichia coli
atggagaagtcaacttcctttaaggtgttttatgacgccaatgataaagaattgtcaaagcatgctattgacgctgaaacacttggtaaatcaatactttccatgacaactcttattaataaagctgatagcttgttaaatgagggcaacaaatctgtaaaaattttagtcactgcccccatccagaaaggatctgtgggtattgcatatactgtagtgcaactcctaccgcatgcaattgacgttctgcaaactatcgggattgttggaactgtgggcgcaacagctcatgccaccgctttatcgttaataagacaattaggctcaaaaaaagttgtttcgattaccaaaaaagcaggaacagataaggctgttcttgaatttgaagatggtgagattgaatgctcatcagcagttgcaaccttggtaactgagccaacaattcgggatgcgttgatttctgttgttcaggctcctttagatggtaaagactctcccatttttaaaattgtagatgagaatgataaagttttgctcaagcttgaaggagagcaaactgaagagattaaaccccttcccagagggacgcttttgaccaaaacagttgaagaaaaagaggttaatgtaaaatttacccaagttaactttcatagtgagaaggggtggaggatggactacaaccaagatgagcactccgtactacttacagactatgagtttttagctaaagtaaggcaagcagagggaacgatcactagtgaagatatgttttctgtgcttctagaaacaacacgtacaacttccgcacgaggacaaacagaaaagtatgttatcaagaaagtacttcgtcatcgcgtgattcaagggaaaaaattgatctag

SEQ ID NO: 29038 - DNA, 264 bp, Escherichia coli
atgattcagcaacagcttttacaaatcgttttttggttgggggtgcttgtaagtctcccgaccttctatcgctttgtttatgctggttccgcgttgttgtggcgtaaaatttttcctacaaaaatcgtagaactaaggttttacagtgctgaacgcatgcttgaaaaaacgattactatccacttagatgctaaagatggaaagaagatcgttgagctaattgatgatgcaaccgcgcacaggcagtcaaataatgagcggtga

SEQ ID NO: 29039 - DNA, 399 bp, Escherichia coli
atgagcggtgataaaaaaagcattttaagtagtaattctggtctaacaacaggcgggattggcgcagttctaactacattggtaccactattggcgcctgaccctaatagtgaatggagagcttttttgtatgccctcgccccattagtgtcagcaatgctaacctacattatgttgtatgttatcaatcgacatggacttgagtctccagccgaagccgccctaagaaatcgccttgagcgagatttaaaaggtattgatgagcaactgaaaagccctcatctaagcgagaaatttaaagctgagcttattgctgatcgggaagaaactgttagaaagattgttaacattggtaagaatgtagaagttttacctattgaagttactaaagaagaataa

SEQ ID NO: 29040 - DNA, 369 bp, Escherichia coli
atggtgcgtgatattcagatggttcttgagcggtggggggcatgggctgcgagtgatagctctggggtagactattcacctatagcagctggttttaaggggcttatgccgcagataagtaaaacacgaatttcttgtacagacgatgacgctcttatcattgagagctgccttgctttactaaaaaagaaaaaaccgtacgaacattctctgattgtggctcattacctatacggcatctcgaaacggaagattgcaaaggcacgtaaaaaagatgagaaattgatacggatagagatccagatggcagagggctttatcgatggctgtctctcaatgcttgatgttcgtctcgagatggaattgtga

SEQ ID NO: 29041 - DNA, 993 bp, Escherichia coli
atgactgaaaagaaaagtggcgaagggaaagctaagggcggtatcgctcgcgcaaagtcgctgactaaagagcagcgttctgaaatagcaaagaaagcagcggctgcaagatggaaggataaaccattaattgctacgcataagggatcgttccagcatgaattcgggattgatgttgagtgctatgtgttaaatgatgataacaaaactgccgttattagccagagaggcatgggagaagcgattggtcttggcgaaggtggcagcaggttgccaaagtttattcaggggaaaactatttctcagtatatcgggcatgaattaagggcaaaacttgaaaatcctcttatttttcaatacaaacaggcgggcacgaacactccagctaatcctgtaatacatggctacgatgtaacaatattaattgatttatgtcgagcaatctctaatgctaaagctgaaggtaagttgctttccagtcaggaagggattgctaagcaagccagaatcattattgatgcatcagccaaggcgggcattcaggggcttgtttatgctttggcagggtatgacagaacaaaagaagaggtaattcaagcatataagcgatatgttgctgaagaggctcgtgagtatgaaagagagttcacccctgaactttatgagcattggtatcgtctgtatggtatagacaaaccagttagagggcgaccatgggcgtttaaatatcttacgatagatcacatttattacccattagccagaagtgaaggaaaggtatttaatttagcaaaaacgtcaaaagaagaaaaaggcagcaaaaacgataaaatacaccagtttttatcagaggttggagttaaggctcttagaacccaaataggtaaggttactggtattgcaatggtttctgatactcgagaagagtatgagaaatacatagatgaaaaggttattggacaaagaaccatagacttaaaagataaagaataa

SEQ ID NO: 29042 - DNA, 258 bp, Escherichia coli
atgatttacccatcaaacaacccaccagtttgcctgattggataccagccttgcagtttttatggaattaattatgccatgctcaagagccttgttagcatccaaaatggtcgagtctgctatcagggatgcccacctaatatgggttccgatgtcgatattgaacgtctcaacgaagcgatcaagatcgttatcgaggcatttcccgtactctctcaatctggcatggtcggcggctggggaggcaaagcaccataa

SEQ ID NO: 29043 - DNA, 225 bp, Escherichia coli
atgaatagtatagcaattttagaagcagtgaacacctcttacgtaccattcaacggtcagcaaattatcaccgccattgctgccggagttgcatatgttgcgatgaagccaatcgttgaaaaccttggaatgagctggtcaacgcagcaaacaaaactcatgaagcagattagcaaattcaactgtgttcatatgaacatggttgccgctgatgggaagctttga

SEQ ID NO: 29044 - DNA, 240 bp, Escherichia coli
atgatgtccgttttatcaacagagggttgcctttatcagcaggatgttgtggattatctcgttaaacaacataacgagcagcacctcaaagaaaatgcggatggcaaccaagcgctatcaacaaaagtgattaataaattcagggttgatagcggtgaaagtgttgtttgggttaagccagataagtactggcgtttccgtgtgcctgaagacgaaaacggtcgtgaagctcgcggttaa

SEQ ID NO: 29045 - DNA, 183 bp, Escherichia coli
atgaacgatgactttaaaacaggtgacattgttaaactgaaatcaggcggacctgacatgactatcaggtcattttcatctacccacggtaactcttttctttgtcaatggtttgctggcaagaagcttgagcaaggatatttcaaaccggaatctcttgagcgcgttaccccaaagccatag

SEQ ID NO: 29046 - DNA, 603 bp, Escherichia coli
atggacatcaacgagggtgctgactgggctacttcgctggcgattgaagacggcgctgaccactacctgtgggatggcgatggtgtcggtgccgggctacgcagacagacaacggaagcgttctccggcaagaaaatcaccgccacgatgttcaagggcagcgaatcgccattcgatgaagatgctccgtatcaggccggagcatgggctgatgaagtcgtacagggcgacaacgttcgcactattggcgatgtattccgcaataagcgagcgcaattctattacgcgctggctgacaggctgtatctgacatatcgggcggttgtccacggtgagtatgcagaccccgacgacatgctgagtttcgacaaagaagtgataggcgagaagatgctggagaagctgtttgcagaactgacgcagattcagcgcaaattcaataataacgggaaactggagcttatgactaaggtcgaaatgaagcagaagctcggtatcccatctcctaacctggctgatgcgctgatgatgtgtatgcattgcccggagtcggctgcgcaacccgactattccagttactcaattccttgtggtgtaggttga

SEQ ID NO: 29047 - DNA, 1452 bp, Escherichia coli
atggctacgtggcaacagggtattaattctggtggttttctggctggaattggtgcgcaaaatgagaatgcgccaaaggcaagcgacattaacgcaacgcttggtctgattcgcgaaaacaatgaactggctcgctcaggtgcaaataacgttggtctgaccgcgttacgtggtctggctggagttgctgatatttataagcagcagcaacagcaggaacgtaaagcggcattccagaaaggttatgcggatgcttatgcgtccggcgacagggagcagatgcgtaatcttattacagcattccccgaagagtttgaggaagtccgtaaaggcatggggtatgtcgatgacgcccagcggaatgattttggcaatctggcgctcaaggctcaggtagcttcgtcgcttggtccgggtgcatttggcaggttcatgatggataacgaaaaggagatgcgtcgtttaggtatccctccagaaactattgcggaaatgcaggttaatgacccgcagggcttccagcacttcgcaggtaatctggcactattttctctcggtcatgagaagtatttcgatatcaaagatcaaatggaaggtcgggatattgagcgtggcaagttggcagagacgattcgcagcaataaagctggggaaggtttaaaggcgcaaagcattgctgttagccgtgaaaactccctgcgcactgctggaggtgctgttcctgcatctgttaaagaatatcaatatttcaacagcctgtctccagagcaacaaaagacatatcttcgtgttcgaggtcgtcctgatgctggcggggagaatgttgtgcaactggcagatggcagaacggtaacggttggtaggaagcttcacggcgctggtgctaatgcgttctacgaaggaatagacaacgagggcaatatgattcgcgtccccgccagttctattgctgctccggctacatcggcagctaatgcacagaattacgaaatgaagaaagatcttgatgcaatttctggcgcatcaattgacgatcttggcttcatgacaggtattacaggttcttcaggttcttttgctcttggtgcagatattcgtagcagggcatctggtgttgaggagaggaggctatacaacgctgcacagcgaatcatgggcaaaatgcaaaatcaggggattgcagcagcccgagatatgggggcatctggcatcaacaccgaagcagaggccaataggtattttcagggtatgccaaagcctgatttctcaagtcctgaagcgctgcaacaatcaatgcgcgacattcagcaatataccgacaattacaaccagcaatataacgttaatgttggtaatggcgggaagaaatcatcaaggcaacagccagctactcagcaatcagcaggaggtagctacacgtcaaaatcaggcattcaatttacggtggaatga

SEQ ID NO: 29048 - DNA, 534 bp, Escherichia coli
atgaacaacctgaagccgtttactcctctggctgggaagtatgtcggcagccttgagaacttatcgtctctggaagggcaaggtcaggcacttaaccagtattacaactctcagcagtataaagaccttgcaggtcaggctcgctatcagagtctggcggcagcggaagcaacaggtggattgggttccaccgcaaccagtaatcagttagcaacaatcgcaccaacgcttggtcagcaatggctgtctggacaaatgaacaattacaacaacctggcaaatatcggtcttggcgctcttcaggggcaggcgaacgccgggcagacatacgccaacaacatgagtcagatttcacagcaaagcgcggcgctggctgcggcaaacgccaaccgaccgtcagcattgcggcagggtgttagtggtgctgcatccggtgcgcttttgggtggtggcatagccagtgctctcgagctatcaactccgtggggtgctggtatcggtgctggtcttggtctgcttggctcgttgttttaa

SEQ ID NO: 29049 - DNA, 162 bp, Escherichia coli
atggctacggttggtatttgtttggtttttgaactacgaaaatttcgtagtgctatccatcaaggccatcgccgcttagttgctacggtgaattttgggcataaaaaaacccagccgaagctgggtcgttgcgttggttatctgtcagtagttatgtactga

SEQ ID NO: 29050 - DNA, 672 bp, Escherichia coli
atggcagcgacgcacacactccctctggcgtcaccgggcatggcacgcatctgcctttacggggatttgcaacgatttggccgccgcatcgaccttcgtgtgaaaacgggggccgaagccatccgggcgctggccacacagctcccggcgtttcgtcagaaactgagcgacggctggtatcaggtgcgtattgccgggcaggatgtcagcacgtccggattaacggcgcagttacatgaggctctgcctgacggcgctgtgattcatattgttcccagagtcgccggggccaagtcaggtggtgtattccagattgtcctgggagcagccgccattgccggatcattctttactgccggagccacccttgcagcatggggggcagccattggggccggtggtatgaccggcatcctgttttctctcggtgccagtatggtgctcggtggtgtggcgcagatgctggcaccgaaagccagaactccccgtacacagacaacggataacggtaagcagaacacctatttctcctcactggataacatggttgcccagggcaatgttatgcctgttttgtatggtgaaatgcgcgtggggtcacgtgtggtatctcaggagatcagcacggcagatgaaggggacggtggtcaggttgtggtgattggtcgatga

SEQ ID NO: 29051 - DNA, 366 bp, Escherichia coli
gtggcaaacgcaaaaggtggtgtttacacatcggcaaatctgagtgcttacagtaacactattgtggatacaccgacgtattttgcttttgcgaaaggtgccgggctgatgggcgaggccgggcctgaagctatcatgccactgacacgggcagcggacggctctcttggggtcagagccattggcaatgtgaatagtggcggggggggtgtttattctcccgtgtatcacatcagcattcagaatcaagggagcaatggcgagatagatgcgcgctcagccaggggactggtggatctgatcgacagcagggttgtgtcaattatgcagtcatcgcgtcgggatggaggattgtacagtgcctga

SEQ ID NO: 29052 - DNA, 522 bp, Escherichia coli
gtgaaaaacgatgaacaggatgtcgaactggctgaccacgatgcaagaatcaccgcaaacacaaaagcgataaatctccttgaggtcaggttaacaaccgccgaagggaagatagttgtactgcgtagcgatgttgattacttgctggatgaggttatcgatattcaggcgcatctggtcactgttgaccaaagactggatggcgtagaaagcgatatatctgacattaagagtgattacgtatcgaaaaccgtaacagaatcgcagtctcttgcgtcaccgctggatgtaaaaacatcatattcagttgatggaattcaggtcgttggagcaaggcagaccggatggacagcggccacaggcacaccacttcttggctcattcaacgctaaccagtcatacacggtcggcactacgtacacacaatccgaagtcgcagctatcgctacaggtttggagcaggcgcggcagcgtattctggcgcttgaaacagcacttagattacatgggctgattgactga

SEQ ID NO: 29053 - DNA, 150 bp, Escherichia coli
atgccaaaagcaaaaaccacggcagccacaaccccgacggttaaggggagcaacggcgcagtaatcaacaacctcgacaaattgaaagccaaggcgctggaaactggtgactggacgccgtatttcgccgctaaaaaggcaaaaaaataa

SEQ ID NO: 29054 - DNA, 180 bp, Escherichia coli
atgctcaagagccttgttagcatccaaaatggtcgagtctgctatcagggatgcccacctaatatgggttccgatgtcgatattgaacgtctcaacgaagcgatcaagatcgttatcgaggcatttcccgtactctctcaatctggcatggtcggcggctggggaggcaaagcaccataa

SEQ ID NO: 29055 - DNA, 207 bp, Escherichia coli
atggcggttgaggctgcgggtggtgtgccgccttattcttatgtctggaagaaaggtggttctcctgtttccggacagacggcggcaacgttcagtaaggcatcggcagtatccggtgatgcgggtgcatatacctgcgagatttctgattcagcaagcccggttaacaaagtgacctccacttcctgcactgtaaccgtcagttaa

SEQ ID NO: 29056 - DNA, 1437 bp, Escherichia coli
atgacgtttagtaatgaaattgaagttttcataaaagattttgttaaagatcttgaaaatgattgtgctgctattttttctggcgcaggaatgtctaaaagtcaaggttatgttgattggaaagaattacttagcgatatagcagaagagcttagtttagacattaataaagaagacgatctaatatcgcttgctcaatttcatgttaatgaaaagaaaggggctacaaaactcacaaggaagataatcgaagagttttctgagcaagccgagccatcagaggttcataatataattgctcgtttaccgattaagacattttggacaacaaactatgacactttaattgaagatagtctgcggaaagtttacaaaattgcagatgtaaaaagaaacatagatgatttaaatacaacacgacctaagcgagacgcgatagtatataaaatgcatggtgatatttcgtccccatccaaggctattttatataaagagcagtatgaaaaatactacagaacacacgcttcatttatcaccgcacttagcggagatttaatatcaaaaacctttctattcatagggtttagttttaccgacccaaatctggattacattttgagtcgtttgtatactcattctggggacaagaggacacactattgctttatgaagaatgaggctaataattccctagatgatgaagaaacagtaaattataagatcagaaaacaaaaactgcgaatcgatgatctcaagagatttggtatacaagtattattaatagatgaatattctgacatccctaaaattctagctaagatagagcaatcatttaaaaagaaaacgatatttatttctggtagtgcagaaaaatatggggatcttgaaagacctaaagcattagattttattcacacattagcatatgagattataaagaataattataggatagtgaatggatttggatggggcgtcggaagttctgtgataaatggtgcgttggatgcaatttatagtaggccagataaattatcagaagaacagctcattgttagaccatttccacaaactgtcagtaaggggaaagatattcaagaactttgggaggagtatagacagagaatgattcctcttggtggtattgcattgtttatttttggaaataaacaagaggaaaataatgatatagtaaatgctaggggagtatttagagagtttgagattgctgttcaacatggccttgtaccaattcctttacccaataccgggtatatgtctaaatatatatttgaacaaatatcacaagatcctaagaaatattatggaagtaatgaatggatatataatgatttgtctgagcttactgaaaaagatttttcggtaaaaaaaacaatagaagttgtaataaaaatcataaacaaactgaataaataa

SEQ ID NO: 29057 - DNA, 612 bp, Escherichia coli
atggctcatgaaacattcatatcatataaatatagtgaagcacaggatttaagagacaaaattgtcaaggcattaggtgatgatgctgtttactataaaggggaaacatcggagtctcctgatataagtaatacaacagtagataatataaagaacaatcttaaaaatatgattttcgggacatctgttttaatcgttattatttccccgaatatgattaaaagtaaatggattgactgggaaattgaatatgcattgaaagaatacaagagaggaggaaccacttcccgaactaatggtattgttggtgtgataatgaaggttaataatagctatgactggttagtatcttcttcaatcaagcctgatggatgttcatcaagaactattgacacaactaaactatatgacattattaataataataggtttaatttaacttcagaagataaatattgttgccctgagtgcaaatcatatgatcaactgactggttcttatatttcattgatagaagaagaccgatttttagcagatgtatctttatacattgaaaatgcctatgagaaatctaaaaaattaagttcctacgatttatataaacaaaaatag

SEQ ID NO: 29058 - DNA, 483 bp, Escherichia coli
ttgccaaccattatcgaaataaaagaagaagcagttaagcttcgtagattaattgaaagttgtgataaaaagaacaccagtcttgttatagactgttttcctgttatgagttgtaagcttacctcaatgcttctttcttaccattttctgaccctatggcctgaatgtgagctaaaaggagttagcgcagctaccgggaaaaatggtcaaataacccattactggcttgagatagataatattgtagttgatataacaggggatcaatataacattatcaatgataaggaactaaacaataagattataaaaaataggccatatcctgccatccatgtcgtatataaagaaagtagttatctttataacttattcaaaattcgagataaagaacctattatacatggatttccaacatttagtgaagattttattgaagaaatggaacttggatataatcaactattcaacagaaaagaatga

SEQ ID NO: 29059 - DNA, 876 bp, Escherichia coli
atgaagaatgacacttccgaattgagcaacctgccaacagcctttgtaaaaaagttacaaaactatgatgagcttaaaaaacgtcaggatgaatcagagaaatcatatgctttaattgtgataggcattttagctctcatatgtttggctttaggtatagcaaagacagactcagatgattggttctctcaatggcaatttacatgcatactattatcaataattttttctacattatggttaggtgtatttattgaaagaacattgatttttaaggtgctatggaactcaataattacaaaatgtattacctctatagccatatcaggattgattattttttgcaccgcaaaatcatcagcacttttaaatagtgtatttggcattgattcatcatcctttccttatacacgttcttttttaactggttttctatttttaaaatatatcaaccctattttattgtttattctagcaacattctttttaactcacataataaaaataatttgttttttatttaaagatgaagctttcgatctccctcctgtgagttcattcgcaaccgttttgttttcttttttaatttttatattcattttatcttggcaaaatagttatttcagtgaagaaaaccttccagtcaaaacctatgctcttgctcacttgttagactttaatataaatcatcattgcattaaccttagtgcagataaggtcaatgttatttttattggttcatcccaagataaggtgctcattgatgattatgatatgcacataaatagcatagagtcatttttaaaagggaactcttcatccttctttatgaaggataatctcaacttcaaaatccaagaatgtgtatacaattaa

SEQ ID NO: 29060 - DNA, 300 bp, Escherichia coli; identical to SEQ ID NO: 11894

SEQ ID NO: 29061 - DNA, 306 bp, Escherichia coli
atgaccacatttaccaataaagaactgattaaagaaatcaaaaaacgaatcagcaacctagaggttcgagacgatattgagcgccgtgcttatgaaatcgcactcgtatctctggaagtagagccagatgaacgcgaagcctatgaattattcatggaaaagcgtttcggtgacttagtagatcgtcggagagcaaaaaacggcgataacgaatacatggcatgggatatgactctcggttggatcgtctggcagcaacgagctggtatccatttttcaacaatgacacagcaagaggtgaaataa

SEQ ID NO: 29062 - DNA, 342 bp, Escherichia coli
atgacaaaacgccagcgtaaaaaccgtaagcgtattaatcgtcttgtggaactctggcctgagttattcaaccgggaaaaaccccaaccgcttaaagttgagatacctgacgacctgatacaggatatcgccatcagagaactggcgtttggcgctggtacattacacgcggcagtggcgtcttatgtgcagtctccgcactattcatgtgcgttaatggcagatggcgcccgttacgatctgaaggggctgccgtgcggggaagtgacactacaggaacagaaagaggcagaggcccggctaatggtgctgaatgaccgacgaaaagccagaaagcgctga

SEQ ID NO: 29063 - DNA, 174 bp, Escherichia coli; identical to SEQ ID NO: 8961

SEQ ID NO: 29064 - DNA, 1941 bp, Escherichia coli
atgaaacatttaaatgatttccccaaaagagatagaaatcacagaattgaaagacttgcaatatcagcttttgaacatttccttagtgattcgaacgatttctttattcaaagtaaggatataaatgattacggcgtagactatcaactcgagatcacaacaaacggtcaagcaactaacattagactgtttgttcaactaaaaggtactgaacaagagttaaataatgatggttcggttagcatatctgttaacagagccaatctcaactatctattaatgcacccttattcgttctatgtgtgttttcatgcgccaagcgacactctaaaaataacattcgcggacagcgtgattcggagttatgaacaatctgaaaaaaaatggattgagcaagaaactataactgtaagattcattgataatatatctgagtctcgtttgcacgaaattgcagaggtggctaggcttaatgctttagataatcgtaatgcaaggatagaatttataacaaagcctatttcaaatgttagtgcagttataaataaaaccataccgaagatacatataccagaagataaaaaactagcccatgaattgcttaattcgttatatgaaaataatcatgatgatgtgataagtgctaattttgatgaattcttagctattttcggtcctgaacatccggctatgatatttccatacatgtcagaaataaataaagccatggacagagttaatggtaataaaaaaagggtattggatggtatccaatacctcaggaatagaattaatgagggttacataactaagggaagtttatactattcaataggtaatggatttacagctcttggcaaggatgaagaggctattcaagaatataatgcagctcttaagaagatgactggggcagaaaaattagctgcacaatgttacaaaaacatgggtagtagctactcaaatctcggaaatgagaatgaagcatttgaatgctataagaaagcacttgaattagatccaaacttaaacgaggctaatttagctgttggaataatccataatcataggggtaattatgaactagcattagaatatttagacatggtgatgtttccaggaatttatcagcataaaataatacatgttacaaagtggagagtgaatactctttttaatatgggagattatcgctctgcatatagagaaatcaacaacctattaaccagaaataataatgaagaggacttatggaaatggtgcttaatgctagttggaacattctgtcgaacttcgactatttcagccaagctaagtttgccttttttgaatcgttttttagaaatgtacccgaatcactctgaagcatctagagaaattctattagtaaaaaattacttaagagtaaatgataatgtaactaagtattcttatcttgattttaagaatgaatttgaatttagaataaataatatcagcagtgaagatagggctttcttatgggatcgtataggtcattgggcacaggatgaagacgagtgggaagatgctgagatgtattttcgtaaagcttatgaaatggcagggggtgaatatggatattgtctcggtgtggctctgaatcatcttggtcgctttaaagaaagcttgcccattttgattgaacaagcggaaaaaatccaacctgatgattttagctggtttcaagtcgctattgcctacgaatttcaagggtatattcaggaggctattaactcttacaagaaatgtttagcaatcaatgagaaaaacgaactagcattgttcaatcttggaggcatttactggaattcgagaaattatgatgaagcacgacatatctggaaactagcagtagaatattatcctgaccatgagctttcgcgtaagcttcgaaaggatattccatttattttagattga

SEQ ID NO: 29065 - DNA, 471 bp, Escherichia coli
atgagcccgtcgtccggtgatgctcttctctgttttgtaaaaagagcggtaccagccggaagaaagtgtacaaactggtaccgccaaagcagtggctgttgtggtggggttgtcactcaggcgtatggtcaacctgacaatccggtgtcctcaacggggaaagagtacccccgccatacttaccgccgcgccatttcgcggattaccacaacactgagagcacttagccagttacggcaccacactttgtcgcggctccataaatgccctcatcgttgcaccctggtctcttcccaggcgtcaaaccggatcgccacgctggttaggcgtcttatcagcatcatcattgacttgcacattccggctacttggtttgtttgcccgagcaagaagtggattgtcccctttaacgtccccagaccgctaacgacgcatgtgccatacgccgtgttgcaaccaaattttgtttga

SEQ ID NO: 29066 - DNA, 1029 bp, Escherichia coli
atggctacactggacgcatttagtagagtaataactcatcatactattacgatcgatacacaataccgtacacagaaaattgatgatagcatcagatcgaactgtgtttgcccggtaccaacaatgcgtgaacttgcttctaaaatagtacgttgtaaagcaatgatgcacagttatgaaaaaggagacttagttttaactttacaagatgtaatattcttatcaaacagagccgataaaaaacccagccatcttggtcttttaattaatgctgtagataaaaatggaagcactactgtattaaaaaacattaatacagatgttcgcaccgaaatatcaccaaaacatgaggaaggtgaaggttacgaagtttcttctcatatgattatttctctagacggaaatatgcgaacgtatgacatgagttttatgccaataccaggagtttccacagcaaaaataaatggtttcctgaataaagttctctttaacgtagccaaagataatgaagatatcttttcatgtaacactttaacaaatgaagtgtcaagtttaacaaagaaaaaaataaaagtattatacaagccagtctttgatatatctggaaagttagatgaagatttgttcaataaaataaataaagaaggactttctgatgtcgttttggtaaagaatgaatacagaactattaatgcgccagatgttaacgcggctattattcctaaagaaagtactttacgcttagtaccaaaccatggccccaacaatgtccttggatggataaaatctgtctcaaacttctttaaagaagataaaaatggaggttatgacttaataaaaataaaattcaaagagccagagacaggattcacaagacaagttgaccttcaaacttcaaatgtaaggctggatgggctggaaaaaacatttatcaaaaagagtgtaataaatggtttttcttcgcgcttaaaggattcttatgatagtattaacatggagtttgtgaataagattatcgaggtcatgtga

SEQ ID NO: 29067 - DNA, 576 bp, Escherichia coli
atgattagtatattttcacatttatttagaccgtttggttaccttttcattaagggaattagtggtaagtgcgcatacgatttttatgcacctgccgggcttgctgtgatttcttttttttacttttatttatttaaaatacctacatcagacctactaaaagatggcggctttattaagtctatatctggatttgtatcaaatctgccaggtttttatatagcagctcttgcagcaatagccactttcaacagagaacaaattgactaccctctgataggaactaatggcactccttttattaaaattacacgaacaaaagaaaatggtagaattgttgacactcaagagaaacttaccagaagattatttctgtgcatgttattttcatttttaactgccctcagcatatgcatagtgattttcaacgcttttatcacaccactaataaacatactgaataatgatatagcaaactggtgctatatcattatctttttattccttacatggcaaatgcttgtttcaacattttttggactatactatcttggtgataggattcacattaattaa

SEQ ID NO: 29068 - DNA, 390 bp, Escherichia coli
atgaagctgatcctgccttttccgcccagcgtgaacacgtactggcgacaccccaacaaaggggcgtttgctggtaagagcctgataagcacggcggggcgaaaattccagagcgcggcgtgcgcagcaatagttgagcagttacgtcgtctgccgaaaccaacgtcggcacctgcttcagtggagatcgtgttgtttcctccggataacaggatccgcgatctggacaactataacaaggcgctgtttgacgccctgacccacgcgggggtgtgggaagacgacagtcaggtgaaaagaatgctggtggagtggggaccggttatcccggaagggaaggtcgagatcactatcagtaagtacgagaaaacggcgggtgcagctgcctga

SEQ ID NO: 29069 - DNA, 261 bp, Escherichia coli
gtggggaatctctaccggctgatgcgcggctatgccaccggcggttatgtcggtacaccgggcagtctggcggacagccggtcgcaggcgtccgggacgtttgagcagaataaccatgtggtgattaacaacgacggcacgaacggtcagatagggccacaggcactgaaggctgtttatgacgtagcccgtaaggcggcaatggatgttgtgaccgggcagatgcgcgatggtggtctgttctccggaggtggacgatga

SEQ ID NO: 29070 - DNA, 162 bp, Escherichia coli
atgcggactctgcagggctggttgttgccggtgtttatgttgcctatggcagtatatgcacaagagggtagatgttataacaaagaaaccagccccggcattggaaaaaaagaaataagtaagatacaaattagatttgtaaaaataaatgaaaatatatag

SEQ ID NO: 29071 - DNA, 222 bp, Escherichia coli; identical to SEQ ID NO: 6534

SEQ ID NO: 29072 - DNA, 303 bp, Escherichia coli
atgaaatgcatgaatgctaactggaataaatcacttgcgaaaaatacagcttttatcgcacaatatctaaataaaaataattttattaccgatagtgtcaaacttttagttgaaaggtatggcaggactgatgaagaaaccctgctatccattaataatatacaatctcttgttcattctgttgattttaatactgacaaaactcttgtaaatagatactgggatgacttagaaccatttttatcaggttgttggcgtttcatcaaagaaatagatgataaaaaaaattcgatggctaactaa

SEQ ID NO: 29073 - DNA, 222 bp, Escherichia coli; identical to SEQ ID NO: 8150

SEQ ID NO: 29074 - DNA, 1269 bp, Escherichia coli
atgaaaactcgcgactcgcaatcaagtgacgtgattatcattggcggtggcgcaacgggagccgggattgcccgcgactgtgccctgcgcgggctgcgcgtgattttggttgagcgccacgacatcgcaaccggtgccaccgggcgtaaccacggcctgctgcacagcggtgcgcgctatgcggtaaccgatgcggaatcggcccgcgaatgtattagtgaaaaccagattctgaaacgcattgcacgtcactgcgtagaaccaaccaacggcctgtttatcaccctgccggaagatgacctctccttccaggccacttttatccgcgcctgcgaagaagcagggatcaacgcagaagccattgagccgcagcaagcgcgcattatcgaacctgccgttaacccggcactgattggcgcggtgaaagttccggatggcaccgttgatccatttcgtctgacagcagcaaacatgctggatgccaaagaacacggtgccgttatccttaccgctcatgaagtcacggggctgattcgtgaaggcgcgacggtgtgcggtgttcgtgtacgtaaccatctcaccggcgaaattcaggcacttcatgcgcctgtcgtagttaatgccgccgggatctgggggcaacacattgccgaatatgccgatctgcgcattcgcatgttcccggcgaaaggatcgctgctgatcatggatcaccgcattaatcagcatgtgatcaaccgctgccgcaaaccttccgacgccgatattctggtgcctggcgataccatttcgctgattggcaccacctctttacgtattgattacaacgagattgacgataatcgagtgacggcagaagaagttgatattctgctgcgtgaaggggaaaaactggcccccgtgatggcgaaaacgcgcattttgcgggcctactctggcgtacgcccgctggttgccagcgatgacgatccgagcgggcgtaacgtcagccgtggcatcgtgctgctcgaccatgctgaacgcgatggtctggacgggtttatcaccatcaccggtggcaaactgatgacctatcggctgatggcggaatgggctaccgacgccgtatgccgcaaactgggaaacacgcgcccctgtacgaccgccgatctggcacttcctggtcacaggaacccgctgaagttaccttgcgtaaagtcatctccctgcctgccccgctgcgcggttctgcggtttatcgtcatggcgatcgcacgcctgcctggctga

SEQ ID NO: 29075 - DNA, 1044 bp, Escherichia coli
atgtactatttaaaaaacacaaacttttggatgttcggtttattctttttcttttacttttttatcatgggggcctacttcccgtttttcccgatttggctacatgacatcaaccatatcagcaaaagtgatacgggtattatttttgccgctatttctctgttctcgctattattccaaccgctgtttggtctgctttctgacaaactcgggctgcgcaaatacctgctgtggattattaccggcatgttagtgatgtttgcgccgttctttatttttatcttcggaccactgttacaatacaacattttagtaggatcgattgttggtggtatttatcttggcttttgttttaacgccggtgcgccagcagtagaggcatttatcgagaaagtcagccgtcgcagtaatttcgaatttggtcgcgcgcggatgtttggctgtgttggctgggcgctgtgtgcctcgattgtcggcatcatgttcaccatcaataatcagtttgttttctggctgggttctggctgtgcactcatcctcgccgttttactctttttcgccaaaacggatgcgccctcttcagccacggttgccaatgcggtaggtgccaaccattcggcatttagccttaagctggcgctggaactgttcagacagccaaaactgtggtttttgtcactgtatgttattggcgtttcctgcacctacgatgtttttgaccaacagtttgctaatttctttacttcgttttttgctaccgttgaacagggtacgcgggtatttggctacgtaacgacaatgggcgaattacttaatgcctcgattatgttctttgcgccactgatcattaatcgcatcggtgggaaaaatgccctgctgctggctggcactattatgtctgtacgtattattggctcatcgttcgccacctcagcgctggaagtagttattctgaaaacgctgcatatgtttgaagtaccgttcctgctggtgggctgctttaaatatattaccagccagtttgaagtaatgccgatcagttaa

SEQ ID NO: 29076 - DNA, 426 bp, Escherichia coli
gtggtgacgcaggctgacaaaacggagccctgccatgaatgggatatggccggtattcagccctctcccgcacaggcacagaacattcgcgaaaaaacggaggcggtattccgtctgttccggcctgtacatccggttgtggccgtatcggcccgcaccggctgggaactggatacgctggtcagtgcgctcatgacagcgcttcccgaccatgccgccagccccctgatgacccgactgcaggacgagctgcgcacggagtctgtccgctctcaggcccgtgaacagtttaccggtgcggtggaccggatatttgacacagcggagagcgtctgtgttgcctctgttgtccgtacggccctgcgcgctgttcgtgacaccgtggtctctgttgcccgcgcggtatggaactggatcttcttctga

SEQ ID NO: 29077 - DNA, 1257 bp, Escherichia coli; identical to SEQ ID NO: 13723

SEQ ID NO: 29078 - DNA, 342 bp, Escherichia coli; identical to SEQ ID NO: 9277

SEQ ID NO: 29079 - DNA, 1083 bp, Escherichia coli
gtgagttcggcgatggtgaagttaggggatgttattaatgttcactacggaaaagcattaaaagctgatcagcgagtatcgaatggaagtgtccatgtttttggtagttcaggaattgtcggcaaccacgataaaacgctttgcagctatcccacgataattattggtcgcaaaggcagcgttggtgctattacctgggctcctgacggaggttggatcattgatactgcttattacgttgagatcaaagataataataagttagatctccgatacttgttttatattctgagcggaattgatctcactaagaaaacgattaccacaagtattcctggattaaatagagacgatctctatgatacatttattaaattaccaccttttgaagagcagaaacgaattgtggatcttctcgataaagctgagggtatacgccaaaaacgcgaacaagccatcaaactggctgatgattttttgcgtgctacgtttgctacaatgtatgggaatcctattacaaaccccaaaaaatggcctgtccatcttatgggagaaattattgaatttaaaggtggaaatcaaccacctaaaagtgattttatttttgaacctaaacagggttatattagattagtacaaattagagattttaaatccgataaatatgcgacgtacattccgcaagaaaaagcaaaacgtattttcgaagttgatgatgttatgattgctcgttatgggccacctgtgtttcaaatacttagaggtttatccggcagctacaatgtggctttaatgaaagcttcacctaaagaaaatattaggaaggggtttatattctatcttctacaacttccggaatatcatgatgttgttgtaaaaaactctgaaagaacagctggacaaaccggtgtaaatcttgaactattaaacaaattcaatgttcccctcccacctatatactatcaggatgagatattagctagattagctagaattgaaaaatttaaagaaaaaatagaaatatcattaaatcatttagaaatgcaatttttatcactacagaagagattaatgggtttttaa

SEQ ID NO: 29080 - DNA, 1170 bp, Escherichia coli
atggctaagggtgatattaaaaagttgaagtttgaaactttctacgatagtgaatcgaataacgaagttattcgattaacaccaacagatattctttgccatcgcaattatttttatcaaaaatgttttacaaatgatggtaaaaaattgattttcgctgctgagtttgattgtaaccggaattattatcttatggatttggtaactcagacagcgaaacaactcactgaaggagttggagataacacctttggtggcttcctgtcccctgatgataattatcttttttatgtgaagaatgaaaaacatttgcagcgtgttgatttgaccacattagaagaagttaccatatacacagtaccggataattgggtggggtacggaacatgggttgctaatactgattgtacggaaatcgtcggaatcgaaatcagtaaaactgactggaccccgcttagcgactggaaaatatttctggaattttatcataagaatccacgatgccgtttaattacgattgatctggaaaccggaaacgctgaagtgatattggatcgtaatacttggttagggcatccaatttttcgtccaaataataacgatactatcgccttttgccacgaagggccccatgacctggtggatgcaagaatgtggatgattaaccgtgatgggacaaatgagcgtaaagtgcatgagcaccaacctggtgaaagttgcacacacgagttctggatccctgatggatctgcactggcttatgtttcctatatgaaaggacagcaacagcgttatattcgcaaatataatcctgatactgatgaagattcattagtgatggaaatgccggcatgttcccatttaatgagtaaccataatggtattctctatgttggtgatggttcaggtagcccggttgatgttaaagatacctgcagttataaaattgaaaatgatccctggatttacattcttagcagtaaaaataaaaaaatacataaattggtgaaacataatagttcctggagggtacagaaaggagaccggcaggtaacgcacccgcatccatcattttctccagataataagtacgttttatattcttgcgatgccgaaggtgaaccagcactatatatggctaaaatccctgaggaaatcttaacccagtaa

SEQ ID NO: 29081 - DNA, 264 bp, Escherichia coli; identical to SEQ ID NO: 16624

SEQ ID NO: 29082 - DNA, 228 bp, Escherichia coli
atgtgcttacttgcaccagaaaatccttatccgatatatgcactaccaccgctggtgagaaatgcaataattgaaactcaaaaaaatacacaggcacctttggctatggtggcaacatccgcattaacagcgatctcaattgcctgtcagaatcagattgacgtgtgcagacctggaaatttacatgggcctgttaatctttactctctgattctgacaggcaattga

SEQ ID NO: 29083 - DNA, 447 bp, Escherichia coli; identical to SEQ ID NO: 13687

SEQ ID NO: 29084 - DNA, 1365 bp, Escherichia coli
atgtggaaccttttgcggcgaacccgaaaaaaccagaaatcaggacgtgatgtaaaagaggtgggctggaccagcctgtttcaggcggtggctgagccttttgccggtgcctggcagcagggtgtgaaagccgatccggaaaccgttttgtcctttcacgcggtgttttcttgcatttcgctgatatcccaggatatcgccaaaatgcggctgcgcctgatgcagaccgatacacaggggatccgccgtgaaaaacggcagggggatattgcccgtctctgtcgtcgtcccaatgcacagcagaatcgtatccagttttttgaactgtggctgaacgccaaactgcgtcacggcaatacggtggtgttgaaaatccgtaactcccgggggcagatcaaagaactgcgtattctggactggagccgggttgaacctctggtggcggatgacggcgaggtgttctatcgcattacaccggaccggaactgcgggatcactgaggcggtgacggtgcctgccagggaagtgatccacgaccggtttaactgtttttttcatccgcttgtggggctgccgccggtgtatgctgccgggctggcggccacgcaggggcatcatattcaggcaaattcaacgtcttttttcagaaatggcggcaggccgtccggggtgattgagatccccggcagtattacggaagaaaatgcgaaaaaactgaagagcaactgggacagcgggtatacaggcgaaaatgcggggaaaacggccattctgagcaacggggcaaaatacaaccccacgacgttttcaccggtggatgcgcagacggtggaacaactgaagatgactgctgaaattgtctgttcggtgttccgtgtcccggcctacaagattggcgtgggacaaccgccttccagtgacaacgtggaggcgctggagcagcagtattattcccagtgcctgcagacgctgattgagtccattgaactgttactggatgaggcgctggaaacgggggaaaacgagagtacagaatttgatgtcaccacgctgctgagaatggacagtgagcggcgcatgaaaacgctgggggatgcggtgaaaaatacgcttctcacgcccaatgaggcccgtaaacgggagaacctgccgcctctggccggcggtgatgcactgtatcttcagcagcagaactacagtctggaggcgctgtcccgtcgtgatgcccgtgaggatccgttcgcgtcgaccgggaaaacagtttcatcacaactgcctgacggcgcatctgacggtaataaggccataagcgaaacagagcgtgatgcggtgaaggcgatgttcagggggatactgcgaaaatga

SEQ ID NO: 29085 - DNA, 222 bp, Escherichia coli
atggcaaaaatccagtatctgcagggcacgcatgatgcccgggccggggatatccgtgatgtggcacagccgtgtgcggaggtgctggttcgcctggggaaggcggagtacatcacagtgcgacgtccggcaggtcagaaaaagaaacgtgatgcggagcatggcgaatgtggaaccttttgcggcgaacccgaaaaaaccagaaatcaggacgtgatgtaa

SEQ ID NO: 29086 - DNA, 582 bp, Escherichia coli
gtgaacacggcagcggaagccattcgcgccctgtcgatgcagatgccgggctttcgccgtcagatgaacgaaggctggtaccagatacgtattgccggtgatgacacggcaccggaggcggtgtatgcccgtcttcacgaacagctgggtgagggaacggtcatccacattgtgccgcgactggccggggccggaaagggtggactgcagattgtgctgggggcggcagccatcgtgggctctttcttcactgccggtgcctcgatggcgttatggggtacagccctgagtgccggcggtttttctgccaccacgatgctgttttcactgggtgccagcatgatactgggcggtgtggcccagatgctggccccgaaggcaaaaacaccggattaccgcgcaacggataacggcagacagaacacgtacttttcctcgctggataacatgattgcccaggggaacccgatgccggtgccttacggggaaatgctggttggctcccgccgtatatcccaggacatcagcacccgtgatgaaggcgggggcggaaaggtcgtggttatcgggcggcaggggtaa

SEQ ID NO: 29087 - DNA, 189 bp, Escherichia coli
atggaaacgttattaccaaacgttaatacgtctgaaggttgttttgaaattggtgtcactatcagtaaccctgtatttactgaagatgccattaacaagagaaaacacgaacgggagttattaaataaaatatgcattctttcaatgctggcccgtttacgtccgatacaaaaaggatgtgcacaatga

SEQ ID NO: 29088 - DNA, 156 bp, Escherichia coli; identical to SEQ ID NO: 9232

SEQ ID NO: 29089 - DNA, 501 bp, Escherichia coli
gtgaatgcgaactccgggacgctcaacaacgtcacgattaacgagaactgtcgggttctgggaaaattgtccgcgaaccagattgaaggcgatctcgttaaaacagtgggcaaagctttcccccgggactcccgtgcaccggagcggtggccatcaggaaccattaccgtcagggtttatgacgatcagccgtttgaccggcagattgttattccggcggtggcattcagcggcgctaaacatgagcgggagaataacgatatttactcctcatgccgtctgatagtgcggaaaaacggtgctgaaatttataaccgtaccgcgctggataatacgctgatttacagtggcgttattgatatgcctgccggtcacggtcacatgacactggagttttcggtgtcagcatggctggtaaataactggtatcccacagcaagtatcagcgatttgctggttgtggtgatgaagaaagccactacaggcatcacgattagctga

SEQ ID NO: 29090 - DNA, 549 bp, Escherichia coli
atgcggtgtgaaatgccgcacagatgcgtaaggagaaaataccgcatcaggcgctcttccgcttcctcgctcactgactcgctacgctcggtcgttcgctgcggcgagcggtgtctgctcactcaaaagcggagatgcggttatccacagaatcaggggataacgccaaaagaaacatgtgagcaaaaaacgagaacccgaaaaaggctgcgccgttggcgtttttccataggctccgcccccctgacgagcatcataaaaatcgacgctcaagtcagaggtggcgaaacccgacaggactataaagataccaggcgtttccccctggaagctccctcgtgcgctctcctgttccgaccctgccgcttaccggatacctgtccgcctttctcccttcgggaagcgtggcgctttctcatagctcacgctgtaggtatctcggctcggtgtaggtcgttcgctccaagctgggctgtgtgcacgaaccccccgttcagcccgaccgctgcgccttatccggtaactatcgtcttgagtccaacccggtaa

SEQ ID NO: 29091 - DNA, 432 bp, Escherichia coli
atggattggtacgatgtaaaatggtttttccgcgatgtttgcgactccgtttcaaatgtggcaggtaatatttacgatgtggcagctgacggcgtaggggctgttacagattttattgaagagaaccctaaaacatccattgcaataggaactgtggttgggattgcaacagcaggggtagcagctccagcaatagcagcaagcattggagcaacaggcgttttaggaacaactgccggaggtacggctatatcttccttaagtggagcagcgctatccagcgcatctttagccgccttaggagggggttcaatcgcagcaggaggagcgggtatggctggcggaacctgtgtggttgcagcaggaggaggcattgcagcagggaccgttagtctaggaggggttgcagcgacaaaaacgataaaaagctaa

SEQ ID NO: 29092 - DNA, 207 bp, Escherichia coli
atgcggagcggttcgtttatcaaggataaaataaccaaagaagcagaaacaaaacaggatactaccgaacaacagaagacttttaagcagcaaccaaacgggtggtcaagtttgagtacgacagggaaaatcatttctgccaccgggatcgccattggttgtgcagtgctcggtatctttggtaatccatttgataaaagaaattga

SEQ ID NO: 29093 - DNA, 237 bp, Escherichia coli
atggaacttccagtatttatatgggataaagccgcccttgcggatttcattgtagataatagaataggatatgcagtgggatcaatcaaagaaatgcaagagattgttgactccatgacaatagaaacttataagcaaattagtgagaatacaaaaattatttctcagaaaattcgaacaggaagttacttcagggatgttcttgaagaggtgaacgatgatcttaaaactcgctaa

SEQ ID NO: 29094 - DNA, 1083 bp, Escherichia coli; identical to SEQ ID NO: 21801

SEQ ID NO: 29095 - DNA, 816 bp, Escherichia coli
atgaatactttccaccaaatgtggggagttaaagatcctcaagaagctcaaaatatcattaatgctcagaaaaaaaagtatggtgacaaggtacctgaaaatttggaggagcaggcgatttcattagttggggaggacttataccaagcattgataaagggttatacggagaagcagtggggaagaagtgcaaaagaattgcctgcatttattattaagcgaatcccagtgagatttacgtttgataacaattatttttccgatcgctatcaaggtattccggtgggaggctacactaagcttattgaaaaaatgcttgaaggtgtggacgtaaaattaggcattgattttttgaaagacaaagattctctagcgagtaaagcccatagaatcatctacactggacccattgatcagtacttcgactataggtttggagcgttagaatatcgctctttaaaatttgagacggaacgccatgaatttccaaacttccaagggaatgcagtaataaatttcactgatgctaatgtaccatataccagaataattgagcataaacattttgactatgttgagacaaagcatacggttgttacaaaagaatatccattagagtggaaagttggcgacgaaccctactatccagttaatgataataaaaacatggagctttttaagaaatatagagagttagctagcagagaagacaaggttatatttggcgggcgtttggccgagtataaatattatgatatgcatcaagtgatatctgccgctctttatcaagtgaaaaatataatgagtacggattaa

SEQ ID NO: 29096 - DNA, 381 bp, Escherichia coli
atgactgaacgcatagaatttgttttgccttacccgccaacggtgaacacttactggcgacgccgtggcagcacatattttgtatcaaaagccggggagcgttatcgccgggcagtggcgcttattgttcgccagcagcggctgaaattaagcctgtccggaaggttggcaataaaaattattgcagaaccaccggataagcgccgccgtgacccggacaatattctgaaagcgccgctggatgcgctgacgcatgcggggttgctaatggacgatgagcagtttgatgaaatcaatatcgttcgtggtcagccagtatctggtggacgtctgggggtgaagatttaccccataatgcttgaagggcaggtcaaaaaatga

SEQ ID NO: 29097 - DNA, 405 bp, Escherichia coli; identical to SEQ ID NO: 20458

SEQ ID NO: 29098 - DNA, 216 bp, Escherichia coli; identical to SEQ ID NO: 26858

SEQ ID NO: 29099 - DNA, 225 bp, Escherichia coli; identical to SEQ ID NO: 8892

SEQ ID NO: 29100 - DNA, 186 bp, Escherichia coli
atgcgagagctgaaaatgaaactcttcgcgctgacgttgccgctggtcgtaagcgcctgcgtatcaacgccacctgtccaggtcccgtgcgtgaagccaccggcaccgcccgcgtggataatgcaaccggcccccaactggcagacaccgctgaacgggattatttcatcctcagagaacggctga

SEQ ID NO: 29101 - DNA, 327 bp, Escherichia coli; identical to SEQ ID NO: 7566

SEQ ID NO: 29102 - DNA, 240 bp, Escherichia coli
gtgaataccggtgcgctgctgacaatgtcagtcagtgtcaacgggggaacgccgccttataaatacgcctggaagaaggatggtcagccggtcgagggacagactactgacactttcagtaaagccaatacgcagtcaggtgataagggggcttatacctgcatggtaacggattctgcagaacagccgcagagaattacctctgacgcgtgcacggtaacggtaaatggcgcaggttga

SEQ ID NO: 29103 - DNA, 582 bp, Escherichia coli
atgaatatacttactcagtatgggaaagaaatatttgcactttttgttcctatttttaccttatttatcaataagatttttaaaaatggagcgaaaatttgctatggagagcttcaccaatatagctatttaattaacgagccgttacgtaatgctgaaggtgaaattgttaaggcaaaacaggtggtgcatacaaaatcctatgcctttaaaaacgaaggaaaagaacctgctactaatgtggagataattttcaattacccacctatgtacgtaaacatttggccctcaaggcattacacaattaagagtgatgccgaagaaaggcaggttatgttgtttgattatcttgcaccacatgaatctatacgatgtgaggttatgtcgataaatactgacttacccgcgttgctcacagtgagatgtaaagaaggaattgcacgaaatataaccttggttcctcaaaaacttcaccatccggcctttattcatttttgtcaactattgctgtttctggggtctgtaactttaatctacattgttgttgttttcctccagtggttgttgctgaaaacaggttag

SEQ ID NO: 29104 - DNA, 1056 bp, Escherichia coli
atgagtgttcgtaaacttcctactggcgaatggatcgccgacttctacaccgtcaaccgcagcaatggtaaaaacgggaagcgtatacgtaaaaaatttgccactaagggagaagccctggcatttgagaatcacacgcttcaaaaggtagatagtgcgccgtggttaggtgaagggaaagataaacgaacattaatcgacctgattacaatgtggtacgagcgccacggcgttgccctacgcaatggtaaaaagcgtaaagacgcaatgacctgggcggcggagtgtatgggttttccgctggccactgagtttaatgcccagctgtttacagcataccgtgcaaaaaggcttgaagggcattatgcccgtactaaccgtgtttctaaggtttcacctaaaacaatgaaccttgaacacgcatattttctggctatgttcaatgaactgaaacggatcggtgagtggtcagcccctaacccactggagaacgtcagacagtaccgtacagatgaaactgaaatggcatttctcactgctgaggaaattgatcggcttttgctggaatgcaaacgcagtaaagtaagttatttagagttagtcgtaaaaatctgtctggcgactggcgcaagatggaatgaagcggcaacactcaaaagttcccagatagctggcggaaaagtcaccttcataaaaacaaaagggaaaaggaaccgtaccattccgttagatgatgaactgctggctgaactacccgaaacaaaaggcgctctgtttccaaagccctgctataacgctttccgttccgctctggaacgtgctggcattgaactaccagcaggtcagcttacccacgtactacgccatacatttgccagccactttatgatgaacggcggcaacattctggttctccaaaaaatcctcggccatgccgatatcactatgacaatgcggtatgcgcatttcgccccaagccaccttgaagacgctgtgcggcttaatcccttaaaatgccgcagcagcttagaaatactgtcgagtaccaaaacataa

SEQ ID NO: 29105 - DNA, 582 bp, Escherichia coli
atgagcacattcaaaattgacctgaacgttgacagcaccccgattctggatcgggtgatcgaggcttacggatttacgcagaagttacagctagcagaacatctggacatggctgccagttctctatcatcacgctataaacgtggagttttcccagctgatatcgtcgttaaatgtgttgctgaaacaggcgctaacctggaatggctagctactggtcacggcccaaaatttaatgatgaagaattagacattctcagaattccacgcagcaagatcgttgatggccagctttacgactcaggcactcttatgcttgataaagtcactttcctaccaggtaaatcactaccacaacagccgttatgcgttttggatggtcttgtacagtacatcgttgaccagtcttactctgaagtttatgacgacgattggctggttgaagtagaaggaaaaattagcattcgtacactgacaagaattccagtacgcaaagtaagagttagtggcgtgggcatggcttttgattgtggcatcgacgacataaaaatcattggccgcgtagttctgacgattaaataa

SEQ ID NO: 29106 - DNA, 222 bp, Escherichia coli
atgcgtccaaacattacaatcatcatcccagaaccatacctgcctctagacgagtattgccgccgtactggtactaacaaagaaaccgctaggaacctgatcgaatacggaaaattacctatcaagccgaagggtaagcaaaagaaaggcctggtcgaagtcaacatggccgcgcttaccattcaggcgttaagcgaatgtgatatttcgcttaacgcgtaa

SEQ ID NO: 29107 - DNA, 504 bp, Escherichia coli
atgtttgattaccagacctctaaacatgctcactttgatgcggcttgccgagcatttgcaattgaacacaatctggaagatgtagccgctgccgttggtatgaggccgcagattctgcgtaacaaattgaatccagcacagccgcaccgtttaacctgtgacgagcttttagctattacggattacaccgaagatgcacgtttactggatggaatgctggggcagataaactgcctcccatccgtaccggtgaacaatgccacagaaggcaacatgcagttgtgtgcactaagtgccacagcctgtgtgggtgcaattgctggggaagccgtatcaactggtcatatgaccgccgcccgccgtacacaaattctggatcgcgctcgcgatgccatccgcagcttatccgtgctggcttataccgttgaaagccgtatccagtctgcgcccgttttggccgcagcggtggatctggtgacggctaatgcgaccggcttgatgtga

SEQ ID NO: 29108 - DNA, 174 bp, Escherichia coli
atgaaagcgttcgtcacttatctgaaaaatgaatcaccggctaagcagctgccaagcggttccactggctggatcgaactgccaactggtcagcgctggaatccaagtcatatgtacaaattcaatggtcagcaaccgcgccgtccgtggtggcgtcgcctgatggggctatag

SEQ ID NO: 29109 - DNA, 429 bp, Escherichia coli
atggcaattagtcaggaacagcaacagcgcggactggaacagcttaaaaagattcgccgcaaatacttcaataccagtagtgaggctgctgactggtgggacaaattaacacctgaatggcgcggggtagttctccatgccgccgctgttaattctggcttgagtgtattcaaagcccacttaagcaaatgctgctggcgggagctgtttgagcgtctggattaccgggcaatgattcaactgcgttgcggcatttcacgagcgcgtctgacgatgaacggattcgggtcattgcgtgacagtgatttttctaaaagtaccgtgaaccgtccgataaagcgggtttatccaatcaataacaatcgggggccgcagatgattatcgcgcctcacatcgtccataagttgcaacaacaagggaatctctga

SEQ ID NO: 29110 - DNA, 402 bp, Escherichia coli
atggccattatttccgttgaaggtaaatcgttaggggctgaattggccgcgtggggagttcctcacaattacgctgtggcttttgctgagaaaagtaccagtaaaaatggccgtatcgctttgcatcctttcttcttcaatgacaccgaacacatgactaacccgcgtcattggctggcgataaatgccgctttctggtgctgcgtgtaccgcgaggcagagagcaaagaagcgcaaattgaagcaattgccggaatccgcgcaattttctatacggccggggcgttgggtgttggcgagattaaagcactgatccaggagtggtggcggacaacgtacgagctgcaccttattccagcaccgaatcattccgcagtcactgtacaacccgcttttcactaa

SEQ ID NO: 29111 - DNA, 234 bp, Escherichia coli
atgcacatgacacgtcaggatttacccgcaacaaaatcaggcactgacctgctggctatgctcaccaaagccacgcaggaaggtaaagcagctgctgctgatctgtgttccacccgcctggataagctggccacccatgccgtcaatgaaggtttaagcgcaacagaaatcgttgagttaatccgcgaagaagccgcagcgatttgcagtaaaggcggtgcagcatggcagtaa

SEQ ID NO: 29112 - DNA, 870 bp, Escherichia coli
atggcagtaaaaactccgcttaagtgggtgggcagtaaagcccgccttatgccgcagttgcttccccatctgccggagggcaagcgccttatagaaccttttgctggttcctgtgcagtcatgatgaatacggattatgacgagtacctgatcgctgatgtgaatcctgatctggttaatctgtataagactatggcctatcagactgatgcattgctcattgagctggaagctttattttctgccggttcattaggcgatgaagaaagtcgcgctgttttctattacgcggtgcgtgatgccttcaaccagtccggcaaatcctttggttctgaatctgtggaagctgctgcgcgttttctttatctgaaccgtcactgcttcaatggcctgtgccgatacaatcgtcgtggccagttcaatgttccgtttggtaagtacaaaaaaacctactttcctgctgatgaaatccgcgcttttgcagaaaaagcgaaacgtgcaacgttcattactgcccactattcagaaacgcttgatttggtaagggacgggcatgacgttgtttattgtgatccgccttacctgactgataccgacaatttcaccgcgtaccatgagcgcggtttttctcacatggatcaggggcggctggcgcgtaagctgcgccgcctggctgagcgtgggattaaggttgtcgcgtcaaacagcgatctggaaatggtgcattacctgtatgcaggatttgacgctgtgcgggtaaatgccccacgcagtgtgggtgcagcagctgcaagccagaaagttgccgcagagctgattcttaagtcacctgcaaaccccgcgatcggcgttagggcggtgatggcatga

SEQ ID NO: 29113 - DNA, 213 bp, Escherichia coli
atgatgacggaaattatcaccggcttttatgccttgtttgcctgtatcactttcgcctttctcttatggggcgaatgccaggacgaatttgatcatgatgctgaggatttagggttaatcacactgagcgcggttttctggctaccactggtagcggccgtacttgtggcctttctgattgatttctggcgcaagtgggttaaccgtggttga

SEQ ID NO: 29114 - DNA, 2016 bp, Escherichia coli
atgctggagcctggccaacaccatgccgtcaatgcctggcggcgtgaaacctttgcgcctggtaccccgtcagatgcgacgatcaccgaacgccgcctgtgggctgttaacccacaggattatgaatggcgttcccagtacctgcatgagatacccgactggttagccgggtatttcggcaaccgttacgaaaagctgctggctggtcgtgacgggcgtcgccgtgccaatacattcttgcgcaaaactatcggcgagaatgtattgccacgtctgcgcaaagtggctgcacgttacaagctggctgctgatgcacttgatcttcctttcggtaagtcgctggagcgactgccgtcacttgaccgcccggacctcaaaaaattggctggccagatatctggctggatctcacagtcactttatgacttcaccgatcagtttgtgggcagcactgacggtgccgcagagctgcgccgccgtacgctggagtcttaccgccatttatgcacgtgttccctgatgctgaacaatcaaccgccgtactgggcagaacatgaagctaatggcggacaactggaaacacgtaagactgaatccgggattctccgcatgatggcacctgaatggtggtatctgcgtcttaagcgggcgcgggatatgcagcgtgagcatatggccattgccgtggggcaggtgcaaaaagcagccagtgcttatgtgtcccgtaaaaccctgggtgaatggatagaccagaaaaagcggaaccttgagttctttaaaaagtttgatctgctgaatgatgaagggctgcgtattgcactggacagcatggtgcaccgcagcgttgctaatccggcgatccgtcgctgtgagctaatggtaagaatgagaggatttgaagatatggccaatgaagaagggctggccggtgagttttacaccatcaccgcgccatcgcggttccatgcggtacacagcaaagggggctttgtttcacagtgggatggctgcaccccacaggacacccagcgctatttatgtggtgtatgggcgaaagcccgcgctgctatttcccgtgcaggtatccatgtttttggttttcgtgtggtagagcctcaccacgatgggacaccgcactggcatatgctgctttttatgcgtcctggtgacgtggataccgtgcgcgatattctttgctatcacgccagaattaccgactccgaagaactgcaaacgccaaacgcgctaaaggcacgttttcatgttgaagccatcgatcccgctaaaggttcggctacgggttatatcgccaaatacatatccaaaaacattgatggatttgcgctggatggtgagcaggacgatgaaacaggggaaagtctgcgggatatggccaaatccgtttctgcatgggcttcacgctggcgcattcgccagtttcagcagattggtggtgcgccggttacagtctggcgtgagctgcgccggttacgtgatcaggtactgactgaccgcagaatggatgcggttctggctgctgcggatgttggggactgggcggcatatacccaggcacagggtggcgcactggttgcccgccgcgatctggttgttcgtctggcttatgaaatcactgagcagggtaatgaatacgcagaggacgtgcagcgcgttcagggtgtctattctccattggttccagattcggcggtatgtacgcgcctggtgaagtggcagaaggttgcgaagttggccgaagcgccagcggaggcgggtttttctggcggcaacgccgccccttggagttctgtcaataactgtacggagggtggaacccgcagacggttaaaactggaattgcgcagccggggttttgatggttctgacgatgaaatagccattctcatgcggggcagtggtttgagatttggccaggtggcattgatttaccgtaatggccggttgcaagagacacgaagcgagccaacgcacgagctgtggccggggtggttgtag

SEQ ID NO: 29115 - DNA, 207 bp, Escherichia coli
atggatcttttggaagcgtcggcacagctggagcgcattgagttattggccaaaattgcccatgtgtacgaaagtaaccagagagaaaaaacaatcgctttggcctggattggtgagattgctggagaaatgcgggagatggtcagaacagaagctaaaaacccccaggaagggggcttatcaggcggcgggagtcgctttcagtag

SEQ ID NO: 29116 - DNA, 270 bp, Escherichia coli
atgcgagttctgaaaatcgaatgcccggaatgcggctcaaaggctgttattcgtaaaacaaaccggaagcaccggcagattgcggatatttactgcgcctgttcagatgtggagtgtggccatacgtttgtgatgaatctgacgttctcccacactctcagccccagcgcgaaaacgggtgatgcgatggtgcagaaaatactgaatgcactttcacccgatcagcgccaaatggcattagacctactgaaagcgactcccgccgcctga

SEQ ID NO: 29117 - DNA, 1062 bp, Escherichia coli
atgagtaaaaaaaaccgcttcgttaagcgcaacccgcgcggcgataagtccaaaaaaatgagcatcatcacattcggcaaaccggaacctgtcctgaccaccggcacggattaccgcgacatctggtacgacaatgccgccgatcactttacccagccgattgaccggctggcactggcacagcttatcaatctgaatggtcagcatggcggcatcatccacgcccggaaaaatatgattgtgtctgattacctgggcggtggcctgacttacgaccagttggaagccgcagcgtttgactatacaaccttcggggatattgcgattggcaaaatccgcaacggatggggggatgtaattgccctggaacctttacccggcctgtatattcgccgccgtaaagtcagggacaacgccacagaccagcccggcgattatgtggtgttacaggacggtgaaccgcaggtatggccgcaggaagatatcatttttatcaagatgtacgacccgcagcagcatatctacgggctgccagactatatcggtggcgtacactcggcattgcttaacagtgaagccgtgattttccgccgccgctactaccacaacggcgctcatactggcggcattctctatacacgcgatcccagcatgacggatgaaatggaagaagaaattgaacagcagctgcgtgacagcaaaggtatcggcaacttctccaccattctggtgaacattcctggcggggatggggatgcgatcaagttcattgaaatgggggatatctccgcaaaagatgaatttgccaacatcaaaaacatcagtgcgcaggacattctcaacgcgcaccgctttcccgctgggctggcaggaattgtcccgcagaacactgccggtctgggggatgttgaaaaggcggaaaggatttacaagaaaagtgagatagcgcccattcagcgccggtttatgaccgctgttaacaacgatcccgaaataccggaacgtctgcaccttaactttgatttaagttacacagaatcaacggataaggatgcggcatga

SEQ ID NO: 29118 - DNA, 1776 bp, Escherichia coli
atggctaaatactcagaagaactaaaaggcgttgtccgcgcactttatttgcgccgctatacgccaaaagaaattgcattagaattaaatctgccgaatgcgcggatcgtttactactgggctgagaaatacagctgggctgatttactcagttttgaaagtacagaggaggcaatcgaacgccgctaccagctgctggccagccgcgataataaaaccgatctcgacctgaaagaaatggacatgctgattgcccacgccacaaagctgcgtgctcaaagcaataagcataaagaaaagatggccagcggccagagtaacggtcaggcagctgagcgggacagtaacagcgatgaaccgcgccccaaacgcaaaaacaggaaaaacgatatttcttctctgactcaggcggattttgacacctgggcggatgaacatctttttgaataccagaaacacctgcgcaggaatattggccagcaggtcaggaacatccttaaaagccgccagatcggtgccacctggtactttgcatttgaagcctttgaaaacgcggtcatgacaggcgatccgcaaatcttcctgtcagcctccaaagtccaggcggaatacttccggtcttacatcgtcaacattgcagagcagtattttggcatcacgctgaccggcaacccgatccgcctcagcaatggcgctgaactgcgttttctctcaaccaacaaaaacacggcacagtcctacagtggccacctgtactgtgacgaatatttctgggtgcctaacttcgccaggcttaacgaagtggccagcgcaatggccacccatgacaaatggcgcaccacctacttttcaacaccatcggccaaaacacaccaggcttacccgttctggacgggtgaggaatggaaacagggcagcaaaaaacgcgcggccgcccggttcccgtcctttgatgaaatgcgcaacggcggacggctttgcccggacggtcagtggcgctatgtcatcacgatggaggatgccattgcgggcggcttcaacctggccaacatcgagaagctgcgcaaccgctacaacactgccaccttcaacatgctctatatgtgcgtgttcgtggacagcaaggattctgtattcagcttttcagatctggaagcctgcggtgtggaggtggacacctggcaggatcacaacccggacgctgcgcggccatttggtgacaggccagtatggggaggctttgacccggcacgcagcggcgatttgtcgtgttttgtgattattgccccgccgatgtatgccgcagagaaattccgcgttctgaaggtcattaactggaagggcatgaacttccgctatcaggccaggcagatcgaactcctgtttaaaaaatacaacttcacctatctgggagtggacgttaccggtattggccagggtgtttttgacaacatccagcattttgccatgcgcgtggccgtcgccattcgttacgacatgaacacaaaaaatcagctggtactgaaagcggcggacgtggtggaaagtcagcgtattgaatgggacaagaaccttaaagagatcccggccagctttatggctgtacgccgcaccaccacgcaaagcggtaacgccatgacatttgtcgctgaccgcagccaggacactggccacgcggaggcgttctgggcaattacccacgccctgcataacgaaccactcaactacgaaaacaaaccgaaatcccgctggggtgtaaggaaagaggctgcatga

SEQ ID NO: 29119 - DNA, 804 bp, Escherichia coli
atgtcgcatttaaaaactgactggctgtgtgttgctaccgaaggggataccgttgacggcagggatattaaacgccagtggattatcgatatgggggaaacctatgactataaccactatgtcgctttaatctggccagaacacgaggatgattgcggtaattttggggaggtactggaagccacctggcatgatggtgaggacggactggcgcggctttacgtcagcctttgcccgaatatgcgattaatattcgccaaccatgaagatcagctcctgttcttctcgattgaaccggaagaaaactggcgcggtagtgggcgtacatacctcaaggggctggcggttacagatactcccgccagtgttggcaccacacggctgcgctttagtagtcggcgcaaaaaattatctaagcagggatattacagttgtgtgatttcccgtgatggaaaaattaaacaggaaatacgaatgaagaactggcaaaaattgtttggtattaaaccgaagtttgaagatgaaacgccgcctgatgataccgcgcagggtgatgataagttacaggcgctggccaacgcggtaaacgaactggaaggccgtgtagccaaaattgaaaatcagctcaatgatgttcagggtgatgtggataccattgcggaagtggtcgataccgaagaatttgcggttattcgtgataatgcaaaagatatcgttaaacgttttaacgatctgggtaataaatccacccgtacaccagggcgcaagatttcagaaaaagcgggtaaatttaatttcctgtaa

SEQ ID NO: 29120 - DNA, 1023 bp, Escherichia coli
atgcaccttaataatcgtgcacgggatttactggataaatattcgagtggtatggcgcagcagtttggcgcacgtgataccagtcgttatttttccctgaatgacccgcaggaaaatgcgctgcgtctggcgctgctggagtccgtggagttcctgaacatgatcacctgtctggatgttgaccagctgagtggccaggtgatttctgtcggctcctccgtgctgcataccggccgcagtgaaaatggccgctttgttcgtcaggttggcgtggacggcaatgactattcactggttgaaacggacagctgcgccgcactgcgctgggatctgctttccgtctgggccaatgccggtaaggacgaaaacgagttttacaacctggtccaggcgtttaccacacaggcgtttgcgctggatatgctgcgtattggttttaacggtaagagccgtgccaaaacgacgaatccaacggataacccgaacggcgaagatgtcaacatcggctggcatgagcgtatgaaaacgctgctgggtggtaatcagattatgaccgatccggtcgtgctggatgaagccggggattacaagtcactggatgcaatggcttcagacctgattaacgccaagattcctgcccagttccgcaatgacccgcgtctggtggttctggttggtgccgatctggttgctgctgaacagtaccgactgtatcaggccgcagaccgcccgactgagaaaatcgcggcgcagatgctgggcagcactattgctggccgtcctgctgttatcccgccgtttatgccgggtaaacgtatggtcgtcacgccactttctaatttgcacatctacacccagcgcaacacccgtatgcgtaaggctgaatttgttgaagatcgtaagcagttcgaaaacaaatacctgcgcaatgaaggttacgcggttgaagtgccggagctgtacgcggccattgatgaatccgccgtgaccattggcaaggtttccgaaccagcagagggctga

SEQ ID NO: 29121 - DNA, 702 bp, Escherichia coli
atggcactttctcccgcgcagcgtcacagccagcgcattgcgatggaacaaaagctgaaacgcagtcaggcactggaaaccacagaaagcatgcacctgctgattaaggcgctggaaacggatgtggaacatgcccgtaacctgccgacaatcgcggatcgcgttgagtttaagcgggatgtgttgctgccgcgctggacaccgactgtggaagcgtatctggaaaacgggcaggtgtacgccaacccggtatttgcctggtgtgttatctggctgtttgacgtgggcgatctggataaggcgctggactgggctgacattgcaatcagccagcagcaggcaaccccggatcggttgcgcagtaattttcccacgttcgtggccgatacgatgctggcctgggcgcaggaaacatcagggcgcggggaaagtgttgaaccgtatttctcccgcacctttgatcgtgtcgccagtacttggcggctgcatgaacaggtcacggccaagtggttcaaattcgctgggttgaggctgctgcgcaacgaagatggccagacaacggcagcgagtgtcgatgatatcgaaacgctagagaaagccgatcaactgctggccaccgcagaaaaatactatttaaaaatcagcgtcaaaacggcacggcagacgattgccgcccgtatccgaaaactgacgcaggggtaa

SEQ ID NO: 29122 - DNA, 504 bp, Escherichia coli
gtgtgtcactgtgccgtggaaaccggtcagtccgcctttttcgggggaattatgtttagcggaaaaccgctggattatcaggatgaaccgctgacgaataacgggttctggccggatctgaatctgaaggactttcaggcgcagcggtcactgccagccgatattgacgcggacaccatcagtcaggcgctgctggccgctgttgcagaggtgaatgccgagctggaaaacgtggaggccagctggaaagcaaaaggccacacgctggcagcagatgttccgggcgtaaaaatgggcgggcttaacagtctgtgtgcccagtacatgaaagcggtatttgccagggcaaaagcggatctgctgggggagttcgccactgtagggcgacgtgaaacccatccgggacaggaaagtatggaaacccgcgccgggttactggctgaggcttcagtggttatccgccgcatgaaggggcttaaacgtgcaacggtgaaaaaagtatga

SEQ ID NO: 29123 - DNA, 507 bp, Escherichia coli
atgagccagacgcagcttgagagcctgactgcattttttcagcaaaacgtgccgccgcgcgccatgcagtcatttgacagtgtgctggatgaaatgaagttcatccccgccgcgaaggactacgggctgggacagtaccgccaggcggtgattcgctatgacgcggtaatcagctggcagcgtttcccgtaccgcctgtgtccgccgcagttgcttatgtcgctgctggccgcgtggctggatgaggctgacagggaattactggatgaagtcggcctgactgaagctgaaccggactgggatgtgtcagtggaggatgaggaaaccgccaccattgtactgacagttccaatggcggaagaactggtgatcagggaggacgaaaacggggcgatcccgtggcaggggaaacgctggtcactggttaaccctgaggtctggatagcgatcaccgccaatatttatggcgtggatgaaaccggtgcgccgataggcggtaacgaatga

SEQ ID NO: 29124 - DNA, 708 bp, Escherichia coli
atgattgccggtggtgagctgaataaaaagcagcttgcagagttgcgtaaatcactggccagcatggagctgtcgcccaaaaagcgccagcgccttatctggaggctggccaaatacggcgtgattgccgccgcaaaacggcacgttcgcaatcaggaagcaccggatggtcagaagtggccggggcgtaaaacgaagcgcaaagggaagatgctgcggaacctgccaaaactgctgcatatccgtgaaatgccagaaattcaggcggtacggatctatttgcagggtggtggctaccggaacggggaaacgccggtaccggccgggacagtcggatatgcgcaacaaaacgggatgcgcgtcagtgtcagccgtcgcagccagccacggaaggtggaggccggaaaaatggccacgccagcccaggccaaaaaactgcgggcgctggggtaccgggtacgcaccggtaaacgctggaaaaagcccacgctgggcgagttaaccaaaacgatgccatacagccgggcggggctactgattcgaaaactcagcggtaaggcggtgaaaaccagctggacagtggatgttcctgcccgtgtttttctgggcatgagtgacgatgaatttgataacgcgctggcgcgtcagcttcaggccatcggctttggctgggatgttaaggcgcaggatattaaggggaaaacatga

SEQ ID NO: 29125 - DNA, 1128 bp, Escherichia coli
atgacctggccaaacgtgaccgtgaaccaggtaaaccagctgctgggtgaaaccaatgaagtggaacgcacgctgctgtttatcggtacgggtaccaaaaatgtggggaaaacgctggcggtgaatgcccagagtgattttgatgcactgctgggagaaggggaaagcccgctgaaaagcgatgttctggcggcgctggcaaacgccggtcagaactggtgggcatttattcatgtgctgcccgcagatgctgaggacgatgcctgggtgaaagcggtcctggccgcacaggtggtgtgttcggtggaaggggtggtgctgtccagtgatgtgacggcaaaagcccaggtgaatcaggcggcgacgttacgatccacgctgatttccaaatatgggcgctgggtgtggttcatcctggccgtgcagggaatgcaggaagaagaagcccaggcggattacctgacccgtgtgtctgctattcaggatggtattgcagagaaggcggtgcaactggttccgcgtctgtggggaaatgagccgggtgtgctggctggccgtctgtgcagtcgtgccgtgactatcgctgacagtcccgcccgtgtgaaaaccggggcgctgctgaatctgggcagtaatgaaatgccggttgatggtaccggggcggtgctggaactggccacgcttcaggcgctggaagcacagcgctttagtgtaccgatgtggtacccggattatgacggtttttattgggctgacgggcggacgctggatgtggaaggcggcgattaccagtcgattgaaaccctgcgagttgccgataaagcggcgcgtcgtgtgcgtctgctggctatcagcaaaattgcggatcgttcactgaacagcacaccgggcagcattgctgcacaccagacgctgtttgcacgtccactgcgtgaaatgtccacggcggccagtatcaatggcgtgtcatttccgggagaagtgaagccgccccaggaaggtgatgtgaccattgtctggaagaacaaaaagacggtggatatttatctggtggtacgcacctgggaagttccgctgcaaatcaccatcagtctgttactggatgccagtctggagggtgctgcatga

SEQ ID NO: 29126 - DNA, 456 bp, Escherichia coli
atgagtaaacgtatttcgggtatgtcgtttgatacctatcttgacggcgatctgatccacatcgagaaaatcacgctcgatatcacggataacagcgccgccgcccagacccgtggtgtgccggatggtcatgttgatggcgatgtggccgcagagggcgaaattgaagtcagttccaaagtgctgggtgtgctgacggccaaagcccgcgcagcaggttcgtggcgtggtattccgccgctggattttcttttctatgccaaagcgggcagcgaagaaatgaaagtggaatcgttcggcaacaaactccagctgagtaatctgctggatatcgatccaaagggcggcggtgtggcgacgcacaaaatcaaatattttgtgaccagtcccaagttcgtgaacatcaacggtgtgccgtatctggaagcggaagccacggaaaacctgatcggataa

SEQ ID NO: 29127 - DNA, 303 bp, Escherichia coli
atgcaggaacatgaaaaaagtctttattcactgctgattatgggggcgctcattgctgttgcaaaagtgctggccagtgatgatcccattacaccgcgcctgtttatcagccgcgtgatcctgggcagttttgtttcagttatcgctggcgcggcgctgattcaaatcccggaggccagcccgctggctattcaggggctgggggctgcgctgggtattgctggttatcaggctgttgaaatgtggctgcgcagacgtgcagcgggaaagaagaacgggagcgtgacaaatgaccctgagtga

SEQ ID NO: 29128 - DNA, 342 bp, Escherichia coli
atgaccctgagtgaaaagcagcagctgtttaccgtcatggtggccaacctgatccactgggcggaagaacgcggctaccggctgacgtttggtgaagcgtaccgcaccccggaacaggcggcgctgaacgcgaagaagggcagcggcatttctaacagtctgcacacccagcgtctggccgtggattttaatctgtttgtgaatggccagtaccagacccgtacagaggactatctgccgttgggtgaatactgggaatcactgggcggaagctggggcgggcgcttcaaatccagaccggatggtaatcatttcagcctggaacataacggggtgcgctga

SEQ ID NO: 29129 - DNA, 381 bp, Escherichia coli
atgagtcacgcgcagtggctggttgtggtggcgctggcgtttgtctggggctggctgacagctgactggcggcgcgacagtctggagctggcaatcaacacggcggcgcaggtggctggcaatgaatcgcgaaaggttatgcagggcattgccagtgattccgccagggagctggaagataaactggaggcgctacgaaatgcgcaaccgcgagagatccgcacggaagtgcttaagccggtttttactaacaggtgcctgtctgatgagtttgtcagcatgtacaacagcgccgtcgccggtaccgaacgtgcgttatcaggaaaacctgaaaacacgatgcgccacgcagctgccgcgcctgaacggggcaacaggtaa

SEQ ID NO: 29130 - DNA, 258 bp, Escherichia coli
atggaacaaattaaactgagtgtttgtggcgcagatattgtttttgaacctaatcagactgcttacaataaactgattaatgaaatggcaatggataataaagttgcacctgcaaataattatctgatgcgtattgttaccccggaaacgaaagaagcactggttgatgtattaaaacgtccgggtgcagcgttgcaactggtcagtaaggttaatgatatttacgcgccagaactggagattgaagtaaaaaactga

SEQ ID NO: 29131 - DNA, 2061 bp, Escherichia coli
atgaaacagttagattttacattaagccttattgataaattgtcccgcccgttaaaacaggcgcagggcaacgtaacgggctttgctgaaaaatcaaaagaagcctttatgcagattggcggcggtgttctggcgctgacgggtacagggatggccattaaaggtgcgctgatgcccgccattgaaatgtatgacgcgctgaatgatgcggccgcaaaagggatcgatgattctgcgcttaaggctgttcagcgtgatgcgctgcgcttcagtacaacctacggcgccagcgcagtggagtttgtacagtccacggaaagtataaacgcctccattgccgggctgaccgggaatgagctgccgaaagtgacgaaagtcgccaataccctggcgtttgcgctcaaatccaccgcagcggaaaccgctgagtttatggggcagatgttcggtaacttttccgccgatgccaaccggctgggaaaggttgagtttgctgaacagctcgccggaaaaatggtgtacatgcgcaaaacctttggcacggaaatggctgctatcaaggatttgatggaaggggcgcgcggcgtgggtaccaactacggcgtggggctggatgaacagctggccgtgctgggacagcttcagcggacactgggcacggaagccagcagcgcttatgaaggctttatgaccggagccattgagggcggtaaaaagctggggatgtccttcacggattccaccggcaaaatgttgtccatgcctgaaatgctgatcaagttacagggcaagtatggcaaaagcctggaagggaatctgaaagcccaggctgaactggatgcggcatttggtgacagttcggctgtggtgaaacacctttatggcaatgtggcgctgcttcagcgcaatatcacagagctgggcggtgctgatggtctgaagcgtacccaggaaatggcgcagaaaatggtgaagccgtgggatcgctttgtcgcaatcctgaaggctatccagaccgtaatcggcctgacgctgatcccggtgctttatccggttctgaaccgcctggccgatatggggcagacttttgcccgctggatgcagctgtttcccaacattgcgcgtgttgtcgggtatgcggcaatggccttactcagctttgcagctgtgggggcagtcgccaatatcgtgatgggtgtctccagattcatcatgatggggttgcgcgggatctgggtggcgctgacgaccgtcacgaaaatctacaccgccactgtctggttggggaacattgccgtggttgcctggaacgccacgctgaaatttctgcgcggtacgttgctggcggttcgtatggcggcaatgatggccgggataggtattaatctgatgagctggccgatcctgcttgtgattggtgccgttgccttacttgctgctggttgctggctgctgattaaacactgggacacggtaaagaacgcggtcatggataccgctgcatttcaggcatgcgccagggtagtggcatggcttgccggggtgtttgcttcagcctggcagtttatcagcgaaggctggaacagttttatttccatgctgaccgggttttctccttctcaggcattaagcgggctggccacgggcattgtgtcattgtttgataatgtctggctgtcggttaaaaacggctttctgaaatcatggaactggattgtaagtaaattaaataatattccgggtgtcgatattgaactggcgggggcttcttcagcaggtatcgctaaaaatgaaacagcggtgtatccggtaccagagttaaaacaatccgcaaaagctgaaggcgcacttcctgcggtgacgcaaaatagtttcaccccagacaggcttttaaccggaggtgaattaaaagacattgagaagggcggaattaccaaaacgattaacagtaatgctaagtccttgaccgacaatagccggaaaattgacacagtaaacatttatccgaaagaaatgattacacccggtcagttaatggaatttcaggagctgggcgcatga

SEQ ID NO: 29132 - DNA, 330 bp, Escherichia coli
atgagtgagagtctttatattgatttgcttattcagggcggtgattttgttctgaataccggatatgaacctgaactgtgtaataaccgtaaaagtatcggacaggacattattcattccattattgaaagcgggctggcaacggaactgattgccgaacgcagcccaacaatgcgggcggatatttttacccgtatggaattactgattgaagatgatgaacggattattccgggaacagtggaaatcagtgaggaaagtcagaaacgattatggataacggccagcacctatgattttggcggcatttctgcgcaggtggatttatga

SEQ ID NO: 29133 - DNA, 1185 bp, Escherichia coli
atgacagaaaaaccgcaggttgattttgaggaagtggtgaaggccagcgggatgccggtgacggaatctgaagtgcgggatcgctttaatgcgattgcggctgaggaaggcatgatcaccaacacatcccgcatgtcaccgttctggcggttagtcacggccattgtgactgcgccggtgatgtggctgaaagaggttctggtatccacggtgctggccaatatgtttgtggccacggccagcgggagcatgttgcgtctgctggcctgggcggtgaacgtgacggcgaagcccgccagcgccgcgcagggtgtgatccgcttctttaaggaagatgccagagccgttgtgacggtgaaggccgggacggttatccagactgaacgcatcaacggcagggtgtacgaactggcgaccaccggcgatgtggtgatcccttccggcacggccagcgcattgctgccggtgaaagccaccggaaccgggggagcctataaccttgcaccagggtattaccgcattttgcctgtggccgtggatggtatcagtcatgtggccagcgaggaaaactggctgacggtgccgggtgccgatgaagaaagtgatgatgaactgcgtgaacgttgccgcaaccagttcaacctggtgggcaattaccacacggatgcggtttaccgttcaatgattgccggtgttgccgggctgagtattgaccggattttctttgagcatgaagcgccgaggggaccgggtaccgcaaacgcctatttattgttggatagcggggtggcttccgcgccgtttgtgaatgcggtgaatgattacatcaacacgcagggacaccacggccacggcgacgatatgcagtgttacgccatgccggaaacccgtcacgatctggccgtaacggtgtacgtcagaaatctggccaacctgacagacgacgaacagaacagcctgaaggccgggattgaaaacatgatccgctgtgcttttcgtgaaaacgctgattttgacgtcagaaaaacgtggccatattcgcggttctcgttttctcagttggggcgggagatccacaaaacctttgcgctggcggattcgctgtccttttcactgggagacattaccagtgagctgaatgtgccgcgcctgaagtcactggtagtgagtcttgagaatgaatga

SEQ ID NO: 29134 - DNA, 588 bp, Escherichia coli
atgaatgagttcatgaaaaagctggccgggatggtgcttccctcctggatggatcagggggagccgaacaagctgctgaaaacagcccggcgattctgggcggaggtttacggctggataacctggccactgaaccagtttgatccgctgacctgcacaccggcattactgaacctgctggcgtatgaccgggacataacccgctttgatggtgagccattgagtctgttccgcaaacgggtggcgtttgccttcgtgaatgcgcgtgatgccggttccgttgagggatttatcaacatctttgaacggctgggcattggatatgtggagctgcgggagcgtcagccgggtattgactgggatgtgatcctggtacgtgtgacagacagccagatagcggacaacacgcagttgcttatccagataatccggcagtacgggcgaacatgccgccgttatcagtttgaggtgatcacatcggaaaaaatggctatcagagccggatgggatcagggggaatatgtggtttatccggcttcgttagcagggacggaaacccacagcgcgacattcagcgcaggtttgtaa

SEQ ID NO: 29135 - DNA, 2049 bp, Escherichia coli
atgtcacagacagctatcacgctggcatttgagcactggaaagcgcagcagggtgcaaccggcgagccggtgttactggatgaatttgtgtttgcgaatgtaccaggactaaccccggatacacctgttgatcgcagtgaagcaatgccgcctgtggagcagattgtgcaccggcagcctgttacccgcactggcgtggtgaatgaaaatggcgtggtgtattccgccgttctaggcgctgatgtgggtgatttcagtttcaactggattggtctgctgaataaggccagcggcaccctggccatgattgttcatgcgcctgtgcagcaaaagctgaaaacagcggaagggcagcaggggaacgtgcttacccgttcgtttctgatggagtacaacggcgcacagaccgaaaccgggattactacaccggctgagacttggcagattgacttcacggcgcgtatggccgggatggatgagcgtcagcgcctggaaaatgcggatatttacggcgctgcggcattctttggcgatggttatctggtcggtaaaacgggcaatcagttctttgtcaccaaaggcaccggctatgtggcgggactgcgtacgtcactggctgcaaatcagaatatcactgtgacggtaaagccagtcaaagtctggctggatgtgtgctggacgggagcactgaccagtgtctggaatgtgcagaacaaaatcaccgtggcggaaaacctggctgattacgtgcagaacggtgtgcagcattacgtgtttgctgtggccagtgttgatgtaaatggcaatatcactgatttacggcctaaagggtcgctaaatgagcaggtggccagcgatgcgctaaaaaagcatgagcagtcccggaatcatcctgatgcgacgaccagcgcgaagggattcacccagttaagcagcgcgacagacagcgccagtgaagaactggccgcgacgtcgaaagcggttaaaatcgcgatggataacgccaacgcacgtcttgcgagagaccgaaacggttctgatattcctaatccagccttgtttgttcaaaacattggtttgcagagtactgtaaataaagctgacggtgctattcagaggtccggcgacaatatggacggaccgctcggtcttaaacgaacatcctcttttggtgtgggtactgagaacgcgctcggcggaaactccattgccatcggtgacaacgattcagggtttaagtcaaatggtgacggtaacattgcgctgatggcaaatagtgttcttgccgggtatttttcggaaaatgaattacagcatcggaaaaaaatgctgacaaaaatttttcaggccattgcagaaaacaactggacggaaggtgccggaggttttggttcgcaacttggaagtggcgcaccttttatcagtccgcgaataacccgaccaaatgatgacaacaattatttccctttctggaagcaaattgtctctcttgtctctggttatcccgttgccgcttcaatggggttaatgacgacagggaaaacaaactttccgcagattgttattcatgcgaaaacggattttgaggtcaatgacaagctatgggtgtttgatgttgcaaccggagagtttcgcgcaccggctaaaattaccgcccgcgaaattgagcttagcagcaatggtggcgtagccgctgatggccagttacgtggctctgcgtggggcgggacgttaagtaactatctggataacaggttcaaccgaaaaaatacggcaacactaggtttttctggctggagtcgtgatgaatcaacggggctgattatgcagtggggaaatgttgacaatgccagaggaacctattctttcccaagagcattcagtgatacttgctttgcagtatttgcctgtaacaaagacgggcaactcggggcaatagacaacgcatatggctatccggtgagtaaaacgcagttctatctcgcgagtaaagcgaactctggcgctgatactgcatgcggcatttcatggtttgcactggggtactga

SEQ ID NO: 29136 - DNA, 417 bp, Escherichia coli
atgactgagcaatattactacagctattcggcgaagggctttttctggctgagtgcagatgaacttaagggaaaagatattcccgctgacctgatacccgtcagcgaggaagatcacgccgcactgttcctcggtcaggagcaggggaaatacattaaccatactcctgatggaccccttctggttgaccagcctgattactcgccagaagaactcattgcacaggcagaaatcaaaaaggaaaaacttctatcagaggctgaagttgtcatagcgccactggctcgggcagtaaaactgaaaattgcaacagatgaagagattgcattgctggaagcatgggaactctacagcgttatggttaaccgtgttgatacttcagatcctgaatggccggaggtgcctgatgtggcgtga

SEQ ID NO: 29137 - DNA, 726 bp, Escherichia coli
atgtggcgtgaagcgcgtctggcttttactgactcactggccgcgctgaattgttcggtcattccggcgcatccgtggataaacggactggggcaacagacggataacggcgcatatcttagcccggtgaatgccgtccgttatcttgctgaaagactggccggaacaggggggaatatcgatgtgatgatcatgatggtgactggtcagacgcatgagaattttatgacccgcctcaacggtctggtcgatgttttcccggcaccggcattcacgcaggtaaaacgcctggcgcaatccgctgcggcgctggccatcgaaaaaatgcagatccccgccaaagctagggcggggttgccggttgccattccgctgtcagttccaaccaccagggcggcattgtctgcggcggctgtcagccaggcacagaaagcagccagtgcgggattcagcctggacggattaaagcagcaaatgggtgagttcgcgcagctgcgcgacagcctgatcagtgatgtggccagcgggctgaatgatttgcaggggaaaagcgcgagggcatgggtgtttaccagcaccggcgatacggccaccacgctgctggaactggtaaaagatatcccgcaaccgtcagccgtctataccgcggcggtgatgctggtcggtgacaatctggatggaataaagggagtgattcatgacttcgatcccaacgctggcgcttaa

SEQ ID NO: 29138 - DNA, 546 bp, Escherichia coli
atgacttcgatcccaacgctggcgcttaatggtgaagctatccagctgaaaaacatgcgtgtgaccgtatcgcagcaatttcaggataaagaccagtccggccagacaagcgccacaaccaaatcagaacagggggcaaaagggaaagagctgcgtatcagtggtgaaattccgtttaaaagcccggagatcctgaagcgtatttttgaactggccagcgccacggatgccggaggcaaccgccagaaataccgcgtggcacatgaagcggccagagccgtgaattttcgcgaggcgacattcagtggaatgcttgatgccccgcagcaggacgggaaaatggcctggctggtcacgttcaccctgacagaacatatcagcgtgcaggaaaagcgggaagccagggcaacaggtaaaacgtctgccaaaaaacagacggccggtaatgcgggacaatctggcggtcagagtgccggggaagatgaagaaaaactgacgtggtttgaaaaacgggtgctgaaacccgtcaatgatgctttgggttaa

SEQ ID NO: 29139 - DNA, 1704 bp, Escherichia coli
atgatgaaaccagttaaacgcctgtacctttcaacggatgaagttcacctggctgatgccagcctggtgctggagctgaacagctgcggccggggatttatcaccgcacagactgacgcggattacaccgggaaactggtgcgactggatgtgggatattccgatctgcttttgcgatggtttaccggctacgtggaacgctcgcaaccagccgaaaacggttttcagcgtctgtttgtgcgcgagctggtcggcgtatttgaaaggatgtggccatgttcatttcagcatcccactttgcgcaagatagccagctggctggaggaaaacagcggaattgttgtcagtgtgccggatgccccctacagcgatatgccgatcccccatttcacccataacggcacgggttatcagttgctgaataatctgggcagagcattcagtattcaggattacatctggtaccagttgccggatggttccctgtatgtgggcggtgcggaaaaagcgatgtttgccggtcgtccggtcgatatcccggcagagttcagccagggtgctgctggcggtaattccatgacgctgccggtgatccagagtctgcggccgggagtggagctgaatggggagcgtgtgaccaaagttcatctgaccaatgacacaatggccgtcacctggacacccagaaaccgcgcaacaggtcagccattacagaaaacacctgcacagcgccagattgagagccattacccggaactggcttccgggctgcatctgccaaaactggccagagtggtggcacccagtgaggctgtgaaaagtggtaattttgccgatccgttccggccgcgctatgccgttgatgtgcagctgcttgatgcagatggcaacccggacaaccagacaccggtttattctgcggtgccgctgccggtacctatggccgggaatgactctggcatgttccagttcccgccagaagggacgctggttgaagtggcatttaccggaggtcgcccggataaaccgtttatcaggcagacactgccggatggtaccagcctgccggatgttaaacccggtgagcagctgcaacagcagcgggcggaagtgtcgcaacgcgttacccaggctggcgactgggtgaggcagaccgatcagaccatcagcgaaacatcgatggcgcggacgatcaaagccgatacggaacagcgcgagctggtcagccgtgaaacaacggttaaagctacggataagaccacggttctgggtacctccaccctgatggccggagccatccagcaggtcagtgccggtgattatagccaggccgtgaaatgcaacaggctggccagcattgaggggaatgacgaagccgatataactggcaaacaatccacgaaagtggccggtgccgtggatgttgatgtggggggagtcctgacagaaaagattgccgcattgcgtaaatcggtggcggcgggcggccagcagattatggggccaaccgtccatattggcagtgagagcgtcaacaccctgaccatgatgctggacaccattgatttgctggcagagctggcgcggcaatgtgcgagccattcacaccccagcgttggtacgccaaccaatgccgaagcatttacccagacagcagagaaggccggacagacccggagtaagtaccagaaaataatcgcctga

SEQ ID NO: 29140 - DNA, 171 bp, Escherichia coli
atggttgaagataaaccggctaacaatccaagaactatccacgatggttggcaacctgtagaaaaaggttaccagcctacaagcaggccagaccaacaaaacaatggctaccaaccaccacgccagacccaacaaacccaacatattgctccaccacctaaaaaacgttag

SEQ ID NO: 29141 - DNA, 627 bp, Escherichia coli
atggacatactagaaaagggtaaactactgttatttgtgcttttcatcatgcccggctttattagcatgagagtttacaggctctttcacccatctgcggattctgacacttcaaaaattctgatagatgtagtttcttatagctgtataaattattcttttctattaataccaatatatctaattgaagataatgatatattccttactaacccaatcctttattatttattttatttctgtgtattaatagttatccctgtactactacctatatttttaatattcattcgaaactgtgaaatggtcaaacgtttcctacctcaccctattgggcgttcatgggactacttcttttcaaccagacaatgctgctgggtgctggtcacacttaagaatggtaaaaaatatggtggctattatggtagtgcttcatttgcgtcaagtagtcccgaaccggagcaaatatatctagaaaaacattgggcactagatgacaatagtgatttcgatcacgaactaaccgatacattagggataattatattgactaatgaaatagaaagtgttgaatttattaaagtacataatagtaatcctaacaaaggtgaggcagaaaatggttga

SEQ ID NO: 29142 - DNA, 258 bp, Escherichia coli
atggctaccagataccaaactgagcttgccctcaaggcattattaacagagttaaatcactcaggatgcgatttgtatgagctaattgaaagaacgattcttcgtatgcagcaagaacgtctttacatcaaagaggattctcaccgcgaaagaggtggggcagaagatgtccttttcagagaaacagaaaatctcgtgggtaaacgtccccaggctaaacctgctgacattaactcattcgatattgaagatttctaa

SEQ ID NO: 29143 - DNA, 498 bp, Escherichia coli
atggcactcactaaatgcaaagaatgcaaaaaagaagtatcaacctctgcaaagacctgccctcactgcggcgttaaagatccgggctttggtgctaaacagaaacttagcggctgtctgatactgattattattgtcgggatagtcatgtacttcgttggcaatagcgacgacgataaagcagctgaggccacgaaggtatgctctaacacagacactcagtgcaactttgataagaacctgatcgatgcggtgaccaaatgcaaaccattggttgagcgttcggcaaaatatgaatttgaatggactgatgggatgttagaccctatgttttcacatggccgaattgatagcaaaaagaaccagttaactttcatcggtgataaggtcaaattcaccaatggcttcaatgccaaaatgaccatgacttatgcttgcacgcttgatctgaaaactaaagaagttgtggacttcaagatttcggaaggaaagctgtag

SEQ ID NO: 29144 - DNA, 441 bp, Escherichia coli
atgcctattaagggcgttaaacgcgtcagggagcgattgaagcaggagctaaaggaaattacagacagaaaaacgcacgatgtattatggcgagtggggcttgttgctggtggatttgctgcaaatatgacgccgatcgatactggttttttaattaacagtcaattccagtatataggtgacactcctgagggtatgcaattacgtctgggttataccgcccgctacgctgaatgggtgcatgacatgccgggcacattaaaaggccagccgcgcgaacatttcggtaaaaccagagaaggcgtcgaatttggcggcggtactggtaagggtaattactgggatccgaacgcggagcctgaatttttgcgcaaagcattcgaggaaccagataacgcagacgatatttataaaacgattatagaaggttacaagacatga

SEQ ID NO: 29145 - DNA, 1053 bp, Escherichia coli
atgttgtttaataaacacaaccttgctaccaacagccgcattcgtgcccagtgggatcacctttgggcgcagcgcaacatgttcaatgatcaggacggcgctcttattgccgcaaatatggcaaacatgaccgctgacatcctggcatgtaatgccgttggcggcttcgatcaggagttctggaaagctgtcgataaccagattatcgaaatgagcaccgaagagactggtattgaaatcgtaaacgatttgatggctgtgcaaaccgtattgccaatcggtaaaaccgagaaaatgtacagcgtatccggtgatattaacgatgaagttgtcgttagtatcgatggtcaagccccgcatggcttcgatcacactgaatatggcagcgatggcgacccgatcccgatgttcgcagcgggttacggtgtcagctggcgtcattccgaaggtctgaaaactgttggtattgaccttgcactggatagccagcgcctgaaactgcaaaaattcaacaaggcccgcgttgattattaccttaacggtaacgcaaaaatcaacgtcaacggtaaacctggccagggtattaaaaatcaccgcaatacccagcaactagtcatgacctccgaagatctcaccactgacggattcgatgctctcatcaaattcttcaccactggcgcattcggtgttatggcccgcaacaaccgcgttgaccagtatgatctcatgtgggtgtcacctgaaattatggctaacctggcagcgccgcacattgcaaacgggactgtcgtaggcagtgttctgaatatcgttaaaccgttcattccggttaaagaaatccgtcagacctatgcactgaaaggcaacgagttcattgcctatcaacgccgccgcaacgtcattaccccgctggttggtatgactactggcgtagtgcctctgccgcgcaccatgcctaccgataactacaacttcaaaatcatgtctgccgaaggcttacaaatcacctgcgacatgctgggccgttccggtgttgtttacggtcacaaataa

SEQ ID NO: 29146 - DNA, 402 bp, Escherichia coli
atggcccgttttcgtcgtgtaaatattgacggcaaatccgttactgaaacagcagtatctgccgcagcacttaagccgggtactccggtaaaaatggcgtctggtaaattcgctgccgcaactgataccacaggacgtatttatgttgttaacccggcataccatgaaggtttaggcattgaagatgcgatcccggttggtcattccgtggttgctgactacgcagaagaaggacgtgaatttgcgattctgcttcctgaaggtgcttacaccaaagacgctgccatcaccattggtgaaggtggctttaaattggttacatctgatgaacctgttttcgctttctgccaggaaactgtaacccttgaagcggctgattttgtacgtgtccgcgttgcataa

SEQ ID NO: 29147 - DNA, 1515 bp, Escherichia coli
atggagactgcgacgacaaagattgacagagaggttctaagggggttgtgtgttaaaggttgtgctcccaaagacatatcagcacctttgttttttagttcctacttttataagcaacaggttggcaaggactttttggttgggcgtcatcacagaataattgccgatacgctacaacgagttattaatggtgaaatcaccaggttgataatcaacatcccaccgggctatggcaaaacaatgattgccacaattcacatgatggcccgctgcctcgcaatagaaccccgcaccagattcctgcatgtatcgtattcacacggactcgccttgcttaattcctcagagacaagaaacataatcacgatgccgcaatatcaggaattgtggcctatgcaaatgcgcaacgattcgaacgcgaaaaacctgtggtggaccactcagggtggcggcgtgtatgcgacgtcatcgcttggacaggtgacagggttccgcgccgggtacatggaacctgggtttaacggcgcaatgattattgatgaccccctgaaaccagctgacgcttattctgatgtggtgcgaaagcaggttaataccaattacaacgacacgctttcttcgcgcctggctgtgcaaacaacgccagtgatcgtcatcatgcagcgtatccactacgatgatttatccggctacctgttacgtggcggtagtggtgagaaatggcatcacctttgcctgccagtgaagatcgacaacagtcttgactattgggatctgtacccggaaaacaaatttgctattcctgttcctcacaacctgccggatggctggctatggttgcataagcatagtgataaagatgaatcaactcttaaatcacatcgccgaacattcgaagctcaatatatgcagtgtccgcgcaagttcgatcaagagggcgcattgtggactgaagcgatgataaccgccgcgcacaggatgcagataacgcgggagaaaattcgcacggtgatagccatcgacccggcgacaacatcatctgatgagtcagacgaaacagggattgtagcctgttccgcttatggtggtggcaagaatgctcagtattcagtagacggtgactactcaggccgcatgtcacctaatgactgggcgcaagcagcaatgaacgcctacaacatccatgaagctgacgcgatggttatcgaaaccaaccagggtggtgatatggtagaggccacactacgcaatgccggattcaaaggccgcattgttaaggtacacgcaagcaaaggtaaattcgcccgtgccgaaccaatatctgcgctatatgcacagggaagggtggcccacactggtgagttgtacacgctggaaaatcaaatgatggaatacgtgccagccaccgctaaaaaatcccctgaccgtatggacgctatggtatggggtatcaccgaattaagccaaccacaggcgatgggccttatgttacctaagcgcctgcgcggattttaa

SEQ ID NO: 29148 - DNA, 516 bp, Escherichia coli
atggcccgcactaaaaaggcaaatgctgacgataaaaagccagccgcaaaaagggtgggccgtccgcatggttatacagaagaaaaagcgttagagatctgcgaactggtggcggacggtcagagcattaacaaaatatctaaaatgcctggtatgcctacccgttccacaattctgaaatggtttagggatgtaccggaattctcgatcatgtacgcgcgcgcgaaggaaatcggcttcgaggtgttggctgatgaaatcatcgatctggctgatgccgcagagaacgcagataaggaccaattgcgccgccatcaactgatgattgagacacgcaagtggctactggcaaaactccagccgcgcaaatacggcgaacgtgtcacacaggagatcgtcggtaacaaggaagaagcacccgtccaggtagaagtaaatcagactactgtccttgagataatcgataacctgaataaggagtacaatactcatggagactgcgacgacaaagattga

SEQ ID NO: 29149 - DNA, 183 bp, Escherichia coli
atgatcgaagatggtatatacgcagcaacgctaatagacgaaatgtcttaccgcgtagaaggtgatgatattcgtgtcagtattgatagcggtgagtggagaaaaccatttattgagacgacgcgagaacacgttaaaataatgcttgataatggtgatttggtgagggttagcgacctatga

SEQ ID NO: 29150 - DNA, 246 bp, Escherichia coli
atgaacatggtgaagaccctaacgatatttatcacgatcttgggggtgaagatgattgagtgccttattgctgttattgttttgctttatatcgctggcgctatcctgatgtcttgtttcatcacaagtaacgatctcgaccgtggggggcttgagatccctttctggcctatagcggtgtttattgctttcgtcgatgccacgcgcacgcaaatcaaaagagccattaaggagcgcaagaaatga

SEQ ID NO: 29151 - DNA, 132 bp, Escherichia coli
atggaagagtggaataaaaatttattgatcatgtttcttgctgaaaattgggaactatttgagcgtttttgcgatgaacatggtgaagaccctaacgatatttatcacgatcttgggggtgaagatgattga

SEQ ID NO: 29152 - DNA, 195 bp, Escherichia coli
atggaacagaaaactgattatagaatacctgacaacctgaagttggttggtattggttttggctgtcattttgtatctgacacaaacggtgcaatttatttagtgcgcatcattgatggcgttcagcatataagaaggctaggactttacatcaaagcattcagaaggggttatttaaaaactcatgaaatttaa

SEQ ID NO: 29153 - DNA, 207 bp, Escherichia coli
atgagacgtgtaatcttttattcagttgaaacattcattgatgaatcacatttccgtttcccatgcaattcttgcggcgcgatggtttatacaccgccactaatgcggaaatataaacacgtaaaatttaaccggttttttgtaccaatgcgtgacgcgctgcgggcgctgcgcggggaattacgaaacacaatgcgtattgtgtaa

SEQ ID NO: 29154 - DNA, 198 bp, Escherichia coli
atgaatagggagttagatttgaccgtggaagacttaagcacaattgcggaatacatgcgctgcgacgatcctgataagcctgttgtggttgatatgaaacatttaaaaggcgcttttatgacaagctcgcgcctaatttctttgcaggcgatcatgtatgcgcgggcacagtggaaaaatagtaacgatgtatcatga

SEQ ID NO: 29155 - DNA, 663 bp, Escherichia coli
atgagtgaatcaagagtaattggcataattcgtcatcgcactaaccctgatgtttacccgtcgtttgaggtaacaacatgccgcacggaatacaattttggatcatgctatttagttggcgtccgcgctgatactcgcggcacttattcagttatggcggcaagctggaaatttgataaatacgctaatttatctaacaaggatgatgacggcatgaataaagaaagtgaaattattgatggattaatcgaagatgaacgccgtgactgcgaaacacaacaagaaaaaacggaatgggtcgtaggtgataagcctcctgttaatgtgtggcttgattgcgtaggtttgacaagtggaactattcttgatgtcgtcaggtttaaatatgttggtgataaatgggctatatgtgaaagcaaggaagatttttgtggcgagaggccgctatcatggacaacatgctctttcaagctgcatatagatccgaaagaaaaggcacttgctgaaatcgcgcttgcacttgctgtcaatgttatgggtgaagacgcggcaaaagagattgactttaaccacgacaatgatttttcgtgcgattatcgcaatatggcgcaagctattattgatggatgtatcggacacgttgaatacacgggggataaataa

SEQ ID NO: 29156 - DNA, 570 bp, Escherichia coli
atgacctacaaatacaaccccttctggcagcaacgtattcgtgagacggtgcggcacgcactgaatgttcatccccgcctgacggcattgcgggttgacctgcgtttcccggatgtaccggcagcaacggacgcagctgtgatatcccgcttcatcaatgccctgaaagcccgaatcgacgcttaccagaaacgtaagcatcgggaaggtaaacgcgtgcatcccacaaccctgcattacgtctgggcccgggagtttggggagtgcaaaggtaaaaaacactatcacctgatgctgctggtcaaccgggatacctggtgtcgtgccggcgattaccgcgctccgggatcactggccgggatgattaaacaggcgtggtgcagtgccctgggagtggatgccggacgttatgacacgctggcacattttccggtcaggccggcggtgtggctggaacgcgatgatgacaccggctttcagcaggtgctggagcgtgctgactatctggcgaaggagagtaccaaagcttacggcaccggtgagcgcaactttggctgcagtcgtggctga

SEQ ID NO: 29157 - DNA, 198 bp, Escherichia coli
atgttactctggatgagatcaaagaagctgttaaaaaacactctgattcagaaattgaatttattgagacagcagtcgcaaaagactttaatgagtcattggctattcgtaatcatgaaaataaaaaaagtgacaacagcaactcatcaattatacctgagcgaaaaaccccagagtttgcagatgcaatttaattaa

SEQ ID NO: 29158 - DNA, 423 bp, Escherichia coli
atgttcctgaaaaccgaatcatttgaacataacggtgtgaccgtcacgctttctgaactgtcagccctgcagcgtattgagcatctcgccctgatgaaacggcaggcagaacaggcggagtcagacagcaaccggaagtttactgtggaagacgccatcagaaccggcgcgtttctggtggcgatgtccctgtggcataaccatccgaagaagacaaagctgccttccatgaatgaagccgttaaacagattgagcaggaagtgcttaccacctggcccacagaggcaatttctcatgctgaaaacgtggtgtaccggctgtccggtatgtatgagtttgtggtgaatgatgcccctgaacaggcagaggacgccgggtctgcagagcctgtttctgcgggaaagtgttcgacggtgagctga

SEQ ID NO: 29159 - DNA, 198 bp, Escherichia coli
atgacccgactgcaggacgagctgcgcacggagtctgtccgctctcaggcccgtgaacagtttaccggtgcggtggaccggatatttgacacagcggagagcgtctgtgttgcctctgttgtccgtacggccctgcgcgctgttcgtgacaccgtggtctctgttgcccgcgcggtatggaactggatcttcttctga

SEQ ID NO: 29160 - DNA, 291 bp, Escherichia coli
atggtgaagaccatcgcgccatcagccagaaaaccgaattttgctgggtgggctaacgatatccgcctgatgcgtgaacgtgacggacgtaaccaccgcgatatgtgtgtgcttttccgctgggcctgccaggacaacttctggtccggtaacgtgctgagtccggccaaactccgcgacaagtggacccagctcgaaatcaaccgtaacaagcaacaggctggcgtgacagccggaaaaccaaaactcgacctgacaaacactgactggatttacggggtggatctatga

SEQ ID NO: 29161 - DNA, 234 bp, Escherichia coli; identical to SEQ ID NO: 8563

SEQ ID NO: 29162 - DNA, 1035 bp, Escherichia coli
atgggaaagagtaagaagaaccgcgctgcggcgacgaaacagatccagcataaaaaccagacttcagccgaagcattcagcttcggcgatcccgttccggttctggaccgccgtgaactactggactatgtggaatgcgtacagacagatcgctggtatgagccgccagtgagttttgacggactggcgcgaaccttccgcgctgccgtacatcatagctccccgattgcagtaaagtgcaacattctgaccagtacctacatccctcacccgctgctcagccagcaggctttttcacgttttgtgcaggactatctggtatttggtaacgcctatctggagaaacgcacgaaccgcttcggtgaggttatcgcccttgagcctgctctggcaaaatacacccgacgcgggttagacctggatacctactggtttgtgcaatacggtatgacaacccagccgtatcagttcacgaaaggcagcatttttcatctgatggaaccggatattaatcaggagatctacggcctgcccggctatctttctgccattccgtcagccctgctcaacgaatccgccacgctgttccgccgcaagtattacattaacggtagtcatgcaggcttcatcatgtacatgaccgatgccgcgcagaaccaggaggatgtgaacaacctccgcaaggcaatgaaaagtgctaaaggaccgggcaacttccgcaacctgtttatgtactcgcctaacggcaaaaaagacggccttcagatcattcctctgtcagaagtcgcggcgaaggatgagtttttgaatatcaaaaatgttagtcgcgatgacatgatggcggcacaccgcgtgccgccgcagatgatggggattatgcctaataatgttgggggatttggggatgttgagaaggcggcgcgtgttttcgtacgcaacgaacttacaccactccaaggccgcgtgatagaaattaacgagtggctggatgatgaagtgattcgctttaacccatacctgactgaggaagattaa

SEQ ID NO: 29163 - DNA, 720 bp, Escherichia coli
atgggaagcgaggatttattcaaaaagaaacgtgcccctaaaacggctaaggatctagcaagacgtaatgcaataaaatcccctctcgctaaaatattaattgtttgtgagggtaaaaaaactgaaccaaattactttgaggatttgataaatcattttgaattacttacagcaagtgtaattgatgtaactggagaatgtggctctagtcctatgtgtgttgttcgtcatgcaaaagcacagcataaaaaaatgactgaacagggggctccttatgatcaaatctttgtagtgattgataaggatgcccactctgattacatggcagcgcttgacgctatcaggagaagtaaaccaagctcaacttggtttactgtgaattcagtaccttgttttgaatattggttacttctacattatacctattcgacaaaggcatttagaaatttacctggtaatagttcaggaaatcaaattgtaaatgagttaagaaaatatattaaggactatgagaaaggctcaaaagggatttttcagaaaaccctaaacgctttagagtcaaaagatttaaatgaagtagtccttagggctaagagaagtttacaggctgctgaagctagcgatactgataatccaagtacaaaagtgtttgagttagttgaaaggcttatccagctaaaaaaacaaatagagtcaaaccgtaaacagaaacgctcttag

SEQ ID NO: 29164 - DNA, 1266 bp, Escherichia coli
atgcttattgaattcaatgttgagaactatctctcaatcaaaaacaaacaaacactttcacttattgctaacaaaagtaacgagttaaaagagaatatctttacagtagagggaaacgttaaccttaatgttctaaagtcagctgttatttacggtgcgaatgcagcgggcaagtcgaatgtacttctggctgtcagggctatgatggatttagttatccactctgcatctaactctcaggctggtgaagaggttcccgtattccccttcaagcttgattcagattcaattaaaaaacctactgaatttgaagttacttttattgcagagggcacccggtatcaatttggtttttctgctacaaatgaaagaattattgatgaatggctctttgcgtacccaaaaggaaggcctcaaaagtggtatttcagagcttgggatgaagagaagcaggaatatgattgggattttggcgcatcactacttggtgaaaaacaagtttggcagcgttcaactagaaataatgccctgttcttgtctacagctgttcaattaaatagcgagcagcttaagcctgtttttacttggtttaaaaaaacactgagactttctggaattaatggatgggctaatacattctccgctaaacgctgcaccgaggatatgaagaaagatatcttgaattttttgcaagctgcagatattggcattgatgatgttttagttaagaaagaaaaatttaatccagatgatttgccatctgatatgccagatgatatcaaaaaaatcgttatttctaatatgaaggataaagaagtttttgatgttactactgtccattataacgataaaggtgagccggtaagtttttctcttgaagaggaatctcatggcactcaaaagcttttttctttagctggtccatggttagatgcgctcgataatggatatgtactattaatcgacgagcttcacgatacattgcatccaaagttggttagtttcttggtaaatctttttaatagtccggttactaataaaaaaggtgcgcagttaattttctcaacacatgaaacatccattctgaatcaaagcatttttagacgtgatcaagtttggttttgtgagaaaaatgaactcagtgaaactaatctatatccattgactgattttagtccaaggaaaggaagagaaaatttagaagccgcatacctagacggtcggtatggagcattgccgttcatcaagaaattgacggggatttga

SEQ ID NO: 29165 - DNA, 564 bp, Escherichia coli
atgaatttggaaaaaggcggtcgtggggccatagagcgcatggttgaagcctatggtttcaagacaagacaagctttgtgtgatcatttgggcatttctaaaagcaccttagccacgcgctatatgcgtgactcattcccggcagaatgggtaatccaatgtgcacttgaaaccggcacgtcgctagagtggctaactactgggcaaggttcaaaagaaagttcacaaaaagaaaacacaaaagagatcgaaaggaagattttatcaagcggaaaactacttcctgatggttactacattttcgacaacaactttttgcctgaaaaactaaaaaaaccttttgttgtgatcgatggcgcatcagagtttatctgtgattcggattatgaggatgtacgtgatggtaagtggatcgttgatattgatggcgaggttgctatcaggaatctgacaagactgccgggacgtcgtctaaatgtcgatggtggcagcagttcctttgaatgcaaaatagatgaaattgatatcataggaaaaattagaagcgcgatcgtcaattattaa

SEQ ID NO: 29166 - DNA, 1332 bp, Escherichia coli
atgaataatgatatgacttttgaaaacagagatgagtataatagaaaaatcattgctgaaaaaataataagcttactcgagtcccccttaaaaatatcccctattgttatcgatggggactggggtaccggtaaaaccgaattttcaaaaaaattagcggcattgattgaaaaaaatgaatctgggcataaagtagtatatattgatgcatttactgaagatcataatgatgctcccatacttactataatggctgcaatagttgcattatatccagagagtgaaaagaaggaattaatatcaaaggcattaccagcattgagatttggacttaaaactgtactcaaagctggcgctgggtggattttaaaacaaaatgcagatgatattgcggatgaattcgaagatgctattaaagatgcggctaactcagctatagatggtactgtagaagcactgcttgatgatcatattgaagcaaagaaacatttgcttgctctcaaggaagtacttgctgaactaactagcgaaaataaaataacaattatcattgacgaacttgaccgttgtaaaccaagctttgccatctctatcatcgaaaatataaaacatgtttttgacactgaaaatcttaacttcttgttagttgctaacatctcacaattgaaagcatcaataaatcatatttacggtgcaggtgttgactcagaaagatatcttgataaatttataaaattcacttacagcctgccagtgactttcactgaaaacaattacgataaaattttggcttcgaactctcattttagaatgctatgtaacgagtctgaaagactaaaagaaattggagaaagtagtattcatatagttcaaaaatttatcgaactaaaaggcttgtcgctacgggaagttgaaaccttatcaagatatctagaaatttatcaaattttatctcaaaatgaaatcagcaataaatttataccaggctattgctgttatcgaacccttgcagtaattctttattcgtttggtcgtgaactggcccttaactacgtagaagataaaatagatgcacaattaataattaatttcttcggtgttaatagactcccatatcagacagatcaatataacatcaacatctactattatgcattatttggtataacttataaatatatgccagaaggttctcctttacttccttctgaaaacgatgaaaaaaacagatgggctgaaataagtgattatcatattttaaaaggaaatgcaggtgtagaagaccctgttagaatattcaaaaacaccttaaaagttttcttgctccaatga

SEQ ID NO: 29167 - DNA, 243 bp, Escherichia coli; identical to SEQ ID NO: 8603

SEQ ID NO: 29168 - DNA, 444 bp, Escherichia coli; identical to SEQ ID NO: 15094

SEQ ID NO: 29169 - DNA, 480 bp, Escherichia coli
atgaagaagattttactcgttgctggcgcggctctggcactggcgggatgtggtgagaaaggtgattttgagaaagcgatcaatgccaagattgggcagaccagatactgcttctcgctggataacaataacaccagcttcccgatccgtcttgccaagccacgacttgattcgactggcacagggacgaattcagtgatcctcgatggatttgtagagcagggaatgatggtctttgagcagggctatgattcgaacgtattagggataacagaggaaggcaaaaaagccaaagtctggagcacaacagatggtgcctgtgttaatcagaaagtagttcgcgtgacttatacgtggaagctggttgacgttccgggctggattgacaaaaaagcattcgccagcgttaaaggaatgaatgaacctgctgatggtgccatgaatctctttaagaccagtaatggctggaaagccaattaa

SEQ ID NO: 29170 - DNA, 342 bp, Escherichia coli; identical to SEQ ID NO: 12242

SEQ ID NO: 29171 - DNA, 321 bp, Escherichia coli; identical to SEQ ID NO: 5987

SEQ ID NO: 29172 - DNA, 405 bp, Escherichia coli; identical to SEQ ID NO: 13528

SEQ ID NO: 29173 - DNA, 774 bp, Escherichia coli
atgataaagcatacgttattagtgccgtttttttttagtgcattgcccgcttatgccgggttaacttccattaccgcgggctacgattttaccgattattctggcgaacatggcaaccgtaatttagcgtatgctgaactggtagcaaaagttgaaaacgcaacgctgctttttaatctttcccaggggcgtcgtgattatgaaactgaacatttcaatgccactcgcggccagggtgcagtctggtacaaatggaataactggctgacaacccgaacgggtattgcctttgcggataatacgccggtctttgcccgccaggattttcgacaggatattaacctagccctgttgccaaaaacgcttttcacgaccggttatcgctacactaaatattacgatgatgtcgaagtcaatgcctggcaaggcggcgtatcactctatactggcccggtgatcaccagttaccgctatacccattatgactccagcgatgcaggtagtagttatagcaatatgatttccgtgcgtctgaaggacccgcgcggtgctggttatacgcaactatggctaagccgcggaacaggtgcttacacctacgactggacgccagaaacacgctacggcagcatgaagagcatcagtttgcaacgaattcaaccgctgactgagcaacttaatctcgggttgacggcaggtaaagtgtggttcaacaccccaaccgatgattataacggtctgcaacttgcagcccacctgatctggaaattctag

SEQ ID NO: 29174 - DNA, 1419 bp, Escherichia coli; identical to SEQ ID NO: 18120

SEQ ID NO: 29175 - DNA, 498 bp, Escherichia coli
atgttggggcttgaaccgaagaacacagagttgagtgcgtctatcctggaggacgttgctgttgtgcctcaaaaagccgttctggtgcagggaactattcgtgataatattctgtatggaaccgatgacattcttcccgatgatgaactgttttgcatcctgaattcattagggttaattaaagaggactgcggagaacatttccttgctttcctagaccgggatattaatcctctgggtagtggtttgagtggtggagagatccagcgattatgcatagcccgcgccctagcccgtaagaaaaagattatcgtacttgatgaacccacggcctctattggcgaagaactcgcgataaagatcattacctatatccggcagcattgccctaccgttattattacaactcataatccacgaattctggagctcgccgatcatttttttgatggtatgtcaaagtcttgcgtcattgctggagaaggcagagaccaataa

SEQ ID NO: 29176 - DNA, 390 bp, Escherichia coli; identical to SEQ ID NO: 18152

SEQ ID NO: 29177 - DNA, 501 bp, Escherichia coli
atggaggacgccgggcgtggttggcggcgtacagttccctctcctgcgccactggaaattattgagcaccacaccatcgctcaccttgtgcgccagggatatctggttatagcctgcggcggcggcggtatacctgtggtgcgagacgggcaacaactgaaaggtgtggaagccgtgatcgataaagacctggcctccgcattgctcgccagtcagttaggcgctgatctgctggtgatccccaccggtgtagaaaaagtggcgattcactttggtacaccacaacaacaatggctcgacgctatcagcgtctacgaagctcaaacgctgttgcaggaaggtcagtttggtgtcggcagtatgcaacccaaagtggaagccattattgatttcatcaatgccagccagcaacaaggcaaacaggccagcggactgattacttcaccgcaaaccataaaagcagccctggcacatcagagcggaacatggataaccctttaa

SEQ ID NO: 29178 - DNA, 723 bp, Escherichia coli
gtggtgaatttcctcggggcgaatccgcatgatctggcacgtcccaatatcactgccgccaccacacttgccagcgccgccgacatcgctgtggcgttactgaatgatcagccacttccggctgtcgagaacgaggtttcctgcgacgatctcacaatgttacaaaacgcctgccaaagtctgccagtccatcgccaggcgatacgcggtgttttcgccggaggaaccttctgttacgaagctcagcttatctgccaacaaaagggattccatgccgcctccaatacgccagttgcgggtaatcgtgctctggcaaatatctggcaaagtgaagatcatacactgattgatatgggggacgatgatttcacccgtggcaaaccgcatccaatgatcgacccgactctgcgcaatcaacgtctgctcaacgaactcaacgactcacatactgccgttgtgttattcgaccttgtacttggttatggcacctccgctacgcctgtcagcgaattactggaccaactttcacacatcgacatgaataatgcaccgttgctgattgcccacgtttgcggaacagaagctgatccgcaaatacgcagtcagcagataagctcactacaaaatgcaggtgtcatcattgccaacagcaatgcacaggcggcgctatgggccagcaccgttgcacagactcagttgcagaaaaaggagctaaatgcatga

SEQ ID NO: 29179 - DNA, 723 bp, Escherichia coli
gtggtgaatttcctcggggcgaatccgcatgatctggcacgtcccaatatcactgccgccaccacacttgccagcgccgccgacatcgctgtggcgttactgaatgctcagccacttccggctgtcgaaaccgatgtaccctgcgacgatctcacaatgttacaaaacgcctgccagcgcctgccagcccatcgccaggcgatacgcggtgttttcgccggaggaaccttctgctacgaagcgcaacttatctgccaacaaaagggattcagcgcagcttccaatacgccagttgcgggtaatcgtgctctggcaaatatctggcaaagcgaagatcacacgttgatcgatatgggcgacgatgatttcacccgtggcaaaccgcatccaatgatcgacccaactctgcgcaatcaacgtctgctcaacgaactcaacgactcacacactgccgtcgtgttattcgacctggtacttggttatggcgcttccacgacgcctgccagcgaattactggaccaactttcacacatcgacatgaataacgcaccgttgctgattgcgcacgtttgcggaacggaagctgatccgcaaatacgcagtcagcagataagcgcactacaaaatgcaggggtcatcatcgccagcagcaatgcacaggcggcgctatgggccagcaccgttgcacagactcagttgcagaaaaaggggctaaacgtatga

SEQ ID NO: 29180 - DNA, 696 bp, Escherichia coli
atggatgttgctgccgggttatgtgaatggaacgaaccgttgccggaaaagcgccccgtaattttagaggcgcaggatgtgttgataacctacaaaggaaagctaccgggaagaattacttgttctctgaagatgccgccgtcaacactgcggtcagaaaaagatgatgttgaatcacgtattgaaaaactggagagctacgtcgttgagctgaataagaaatggtcgatattggtgccttctggcgatgaaaagcagtttgctgcgtttgacgattattgtcggaaagtgatgagcagaaatctcgcagagtgtttcagtattcataatgataatttcagtgagctggaatgggagtgtaaccggccatcctttgttgtatccggtgatgctgggaaaataaccatctcagaaaatgggaaagtaacacctccatcgcaccagcacagtgaggagctcattgaatttgccattgattacctgaagaacaataaaaagcaggggctgatgaagcgcgttggccgttgcatgggatatcttcaggtagccgctgagattgaagcgctggccagtggtgctgataaggatgcaattgtgcgggaggctcttcttcgtgattttaatactccaccctttaaaaaagtgccggcttactggcttcatccggggctgacttatcttaaagtgcgtatttag

SEQ ID NO: 29181 - DNA, 159 bp, Escherichia coli
gtgatcgttacctgtgataaatgccacgacgcgctggatatgttcctgtggaagagagcaggccagcaatgccgggagcaggcgcttaatcagcaaaccggtagcggcagcattgcggttatgaacttcatcccccatatgcagcgcctgcgccattaa

SEQ ID NO: 29182 - DNA, 144 bp, Escherichia coli
atgcagcgctttctggaacatgtatccaatggcgccttgggtatcacccacggcgtaatccagaggaaccggagaaacttcgttactggcaagttcagagcggcgcagaataaagcctacctgcgggccattaccatgggttag

SEQ ID NO: 29183 - DNA, 282 bp, Escherichia coli
atgtcgcagctgacagccatgacggcctcgtttgtgctggccacaccgaccgagacggacggggcgctgtttcccggtcgtatcatgctggcgaacacctgtatgtggacctaccgctctgatgagtgtggttacacgggcggggcagtggcggatgagttcgataaacccaccacggatatccgtaaggacagatgcagcaagtgcatgcgcgggtgtgaactgcgcaggaatgtcggcaattttggcggtttcctttccattaataaactttcgcagtaa

SEQ ID NO: 29184 - DNA, 282 bp, Escherichia coli
atgtcgcagctgacagccatgacggcctcgtttgtgctggctacaccgaccgagacggacggggcgctgtttcccggtcgcatcatgctggcgaacacctgtatgtgggattaccggggagatgaatgcgggtataacggtcctgcggtggcggatgagttcgacaaccccaccacggatatccgtaaggacagatgcagcaagtgcatgcgcgggtgtgagatgcgcggcatggtggctaattttggcggtttcctttccattaacaaactttcgcagtaa

SEQ ID NO: 29185 - DNA, 1419 bp, Escherichia coli
atgggaagaggttattttctggtcaggggcgataagaccacctgcggcggcaaaattattgaaggggcggacgaccatacgatcatgggtatcccgcaggcgcgggatatggaccgggtcacctgcggcagatatccgggaatgtttattattgtgggcggcgttcctgaaacagatattcacggcaggctgatggcggggacgctggacagtcagagcagttgcccgtgtaaagcacggtttattgcgtcaatgatggatgatacgtatgagacggatgacggggaaagtgaagcggaacaacatgcgcagtcggcgaaaaaggatctgacttctggttctgattcatcctctgatgatgtaaaactggattacagaattaaattatcaggtaataagatactgacgccactgaatatacctgattataaagaaatgattagcggtggtagtacgaagaatacagaaaaaatagattttaccatcacaaataaaggcgatgaggctgaagcgctttctctggaagtgcttgatggtaatgaagtgatttatagtgaacggcagaccggtaaatattgtgataagggagagcatgcctggcaatgggatggctacagtaatcaaggcatactggatacaactaagctaaaaagcaaatcactacttgtaagactgattgctttatgtggtgatatgatgataaaagttgattatccacttcataattcaccagaggaacaaaaatgggtcgatgtaaaggtagacagaaaacaaaaaacagtagatataatatggcgactggcagttagtgatggagggataaaaggaagtaatcctaagttatccccagttccttataacgacttggttaacctgaccaaaaatggagttgaattttattggtctcgaaatggaagtcgcggcggggggattggtgaaaatattgttacagcgattggtgtttttaaagtaaatgtaaaggctgagataaatattactccatccatgcgaactttttctttgatatcatcattagatcctgactttcaggcatccgttagtctatcaggatttgaaaaaatatattataactacggtgatagttataaggatattcaagatgaattacaggcgcttcttgacgctaataacagatataaatgggatagtgctcatgaaatggggcataaagtactggatgaatatggagagggttctagccctgattattcgtggactcataaaggaacatctactcttatgcaaaaaacaataccagggaatgttatgcccgctcagggagagattgatgtgatgaaatatggaaaatatcgtcctgacatgtatactcgattggttgcagcagatgaagatgttcagggattgatctggttaagcaggataaaatttgatgactag

SEQ ID NO: 29186 - DNA, 333 bp, Escherichia coli
atgactagagtagttattgctttaatatttcttgccggatgtacttcgcaaatgaagtattccaatgtcgtcaggattaggaatgtatgttcctcagatattaatgtgtttattcctgagtatgtttttggaggtaatgttattaagcaacatcatatttacttacctgttaatgggattgatgttttgtcttatttttatactgaaaacatcaatgatggtttccaatatgaagaagcattcaccgcaaataaagatagctcgggtaattttgattatccgtttgttatcttatcatcaggacgtgaaaaaaatttgggaaaaacgatctaa

SEQ ID NO: 29187 - DNA, 1761 bp, Escherichia coli
atggacgacctgacccaacgctactacgaagccgaaatgcgctacctgcgtgaagcggggaaagaatttgcgcaggcttaccccgaccgcgccgcgatgctcaatcttgataaacccggcgcacgcgatccctatgtggagcgcctgttcgaaggcttcgcttttttaatggggcgactgcgcgaaaagctggacgacgacctgcccgaactgaccgaggggctggtcagcctgctgtggccgcactacctgcgcaccattccgtcgctttccgtggtcgaactgaccacggatcaccagcaaatgaagcaaagtgatacgctgaaagagtttcaggtgctatcccgtcccatcggcgaacgcagaacacgctgcgtctacagcgccacgcgtgatatcacgctgcatccgctggcgttgccggacgtgtcattgcaatatgaaccggacggacgctcggttatccgtctgcgctttgaatgcggcccgctggttggtgactggtcacagatcgatttatcccgcctgccgctctatctcaatgccgacagcccggtggcctgtgcgctgcaccgggctttaacgcttggcatccagcagttctggctgcgtctgccggggcaggaacgccgtgtgctggacgcccacttttccccgatgggttttgatgacgatgaccgactgtggccgaaaggcgagtcggcgttcagcggctaccagttgttgctggaatatttcaccttccgtgagaagtttatgtttgtggcgctgaacgggctggagaacgtcatctggccggaaaggataaccggctttgagattgacgtggtgctggcggaaaactggcctcatgatttgccgtttaataccgacaatctccgcctgcactgcgtgccggtcatcaacctgttcccgctcgaagccgatccgttacacctttcgccgctggaaaacgaatttctgctgcgcccgatgcgcattcaggacgggcataccgagatttattccgtcgacaacattatttcttcgcgccataccggcagtcaggcgtatgtccccttctccagctttcgtcaccggggcgggatgctgcgccacgatgcgccggaacgctattaccacacgcgggtaaagcgcggcccttccggcctgcatgacacctggctgattctgggcggcgatgcgtttgatactgaccggatgctggaggatgaaacgctctctttaaacctgaccggtactaacgggcagcttccccgtaaggctttacagagcacgctgctcgatacgccagttcatgcctcacagaacgtcctgcgggtgcgcaacctgtgcgctccgacgcagccctgctatccccctgcgcgtgaccgcttccactggcgggtgctcagtcaccttggttctaactttttatcgatgatggataacgccgaaattctgcgcggcacgctggcactgtacgactggaccgaaagcgagatgaaccgccgtcgtctggaggcgattgtcgacgttcagcacagcctgatacagcgttttgaaagaggctttctgctgcgtggcgtggatattcaggtgacgctggacagtaacggctttgccggagaaggtgatatcacgctgtttggtgaactgctgcaccgctttttcgcactgtatgccgatatccacttattcactcaactgaccttaattctgcaacccacaggaaagtgcctgcaatggacagagcatcacagccagcgcgtaccgggctga

SEQ ID NO: 29188 - DNA, 1080 bp, Escherichia coli
atggacagagcatcacagccagcgcgtaccgggctgaccgaccggctggccccggatattgcgcgaatcaatttttaccgtttttgccagttgctggaacagagccagcagaacgcgccgctgggcagtaccgacagccccgccaccgatgcggtgcgctttcgtcctcatccaggtatgggctttccggtcagcgagttaaaaaacgttgaacgtgacgtgggcaatcccgacgcgccccccacggtgcgcaccacttttctcggcctgtacggcgtggattcgccgctgccaaccgcctatctggactacattacccagcgtcatgacggacatgacgcagtgatggcgtttctcgatatttttaaccatcgctttattactcagtactaccgcatctggcgcaaatataactacccggcgtcgtttgaagcaggtgccgtggatgacatttcccgttgtctgctgggactcatcgggctgggtattcccggcagcgagaaccatatcgccacgccggtatcccgttttctggccctgctcagcgtgatgcgcctgccgacgcgcacggcggaaggcgtcacggcactggtagggctgcttgccccgctgaccaaagcgacggtggtgcctcacgatccgcagcctgtaattctcccggcccctgcgggtctgtcaaaaaattcacgcatcagcctgaaaacgcgaacgctgctggggcgtaccggtaccgacgtcaacagccagttgctgctgaaactgtataccgaagatgccgcagaagcacgtggctggctgcccgacgggcaactgcacagcgatttgctggtgctgctgcgcgtttatctgggctggcgctgtcaggcccgtctgcaactgacgctgcccgtcagcctgttgcctgctgcccggctgggaaaacagcgtgtacagattagccgtaccggcatccttcgcgcctcctttgccgcgcccgcgaccggaacagtgacggtcagtctggggcgttatcagggattaatacccgctttttccattcgtaacagggagagtatgactcatgtttcctattcgttttaa

SEQ ID NO: 29189 - DNA, 537 bp, Escherichia coli
atgtttcctattcgttttaaacgtccggcgttgctctgtatggcgatgctgacggttgttctgagtggctgcgggctgattcagaaagtggtggatgaatcgaaaagcgtggcctcagccgttttctacaaacaaatcaaaatactgcatctcgatttcttctcccgcagcgccctgaatacggatgcggaagatacgccgctttccacgatggtgcatgtctggcaactgaaaacccgcgaagattttgacaaggcggattacgacaccctgtttatgcaggaagagaagacgctggagaaggacgtactggcaaaacacaccgtctgggtaaaaccggaaggcacggcatccctgaatgtgccgctggataaagagacgcagtttgtcgccattattgggcagttttatcaccctgatgaaaaaagcgacagctggcgtctggtgatcaaaagggacgaactggaggccgacaagccgcgctcgattgaactgatgagaagcgacctgcgactgctgcctctcaaggataaataa

SEQ ID NO: 29190 - DNA, 429 bp, Escherichia coli
atgtcgacaccttccttatatgaaatgctgacgttcagtttcagcggcgagttaccgctggaacagatcagcgagcgggatcagcttatcctttccgtgatggacaatatgcaacgcattatcaactgccgggcaggcacgctggcgcatttgccggattacggtctgccggatctcagtctgatccatcaggggatggctgcgggtattcatggcctgatgcgtcagattgaagaaacactgctgcgttatgaaccacgcctgagtcagatacaggtggaattactcccccagccccgtccggggcatcttaattacctgatccacgcgcagcttcccgataccggctggatacgctttgatggcgtattttctccggaaggacgaattgttctgcgtcatctcaaacaacaggagcgggcgtactga

SEQ ID NO: 29191 - DNA, 1377 bp, Escherichia coli
atggcaagtaacgcgaattttatcagccagttcgtcatgggcggcgatccctgtacttataaggaatccggtgaactgcaggctgaaatgagtaaactgactcacccggcccgaccggatgtggactggcgtcaggtggaaaaactctgcctcgcgctgttccggcaaaatggcgtggaactacagacgctggtctgttacgtactggcgataaccagacggcaggggctggcagggatggcagacggactcggttcactggatatactgctccagcgctgggctgacttctggccggtacaggtacattccagaatatcactgctcagctgggtcacagaaaaaatgcagcaggcactgagaacgctggatattcagtatcaggatctgccgcagatctaccgttgtgtacagcatctttccgccatcgaaaccacgctgcaacagtgtgaactgtggcatatgacgaaactggatctactggccgggcagtttcgcaataccgcattgcgtctggaacggctggcgcctcagggagcggaaaccactatcactccccctgaattaccccgccgggaaatgaatcaaccgaaaaagtcagaggaaagtccacagccggtttttgcaaccagatccgttcagcaaaacgataaggatgccagtccacccgttccatcccctgaaatctcccggcagcggacatggccgatatttatgaccggaatggttgtgatggccggtctcggcggaacaggattatggggctggtcgcagcttaatcagccggacgcgctaatccagcgaatacaactgtctgtcatgccgttgccgctgtcgctggagagcggcgaactggcaaagctggatgtaaaggataaggcgctgctggctcaggacagaacaattgcggcaagtcagatgcaactggagcagttaaacaaattgcctgcccgctggccactggagcagggatatcgccagctacgccagcttgatgccctgtggccggataatcctcaggtcagggcgctgaacgcgcagtggcgcaaacagcgggagctgagcgccctgtctgctgaggcactgaatggctatgctcaggcgcagagccagctacagcgcctgtcggcgcagctggatgcactggatgaacgtaaggggagatatctgaccggttcggaactaaaaacggcggtgtacggcatccggcagtcgttaaaggagccgccgctggaagaactgcttcggcaactggaagagcaaaaacagaccggagaggtttcgccaacgctgttgacgcaaattgatacccggttaaatcagttgttgaatcgctatgtcattttactggatacgaaggtggaacaaagtcagtaa

SEQ ID NO: 29192 - DNA, 948 bp, Escherichia coli; identical to SEQ ID NO: 2237

SEQ ID NO: 29193 - DNA, 597 bp, Escherichia coli
atgaataacacggatcttatccatctcattaaacattttatgcgtaacgaacataaagcagttgaagaagttattgattcccctctttcggaggtcgcaaatttaattaaagtattacaatcttgtcagggaaaagttgtttttattggtgttggtaagtccggtattattgccaggaaactcgccgcaacatttgccagcaccggaactccctcgttttttgttcacggtacggaagctgtacacggcgaccttggaatggtggcgaaagacgatgttgttattcttatttcaaacagtggtgagacggcggaaatcctggcgacactgcctagtctgaaaaaaatgggtaattatttgatctcttttacccgcagtcatcactcatcgcttgcgataagttgtgatttatctgttgaaatccccgtcaaaagtgaggcggataatttaggtttagcaccgtcatgctcgtcgactgttgttctggttgttggtgatgcggtggcgcttgcactctctgaattgaaaaaatttactcgtgctgatttcggcttatatcatccaggaggtgcactcggcattaaagcaaattcataa

SEQ ID NO: 29194 - DNA, 1176 bp, Escherichia coli
atggatgtttttaatactcctgtttcccgcaaaggaacatattgtacccaatgggacttttgcgaggacagatttggtgtaaaagatgtactaccattctctatttcagatatggatcttccgataccagacgctatcaccagagcattaaaaaaacgcctggaacacccgattttagggtacagtcgttggcaacatggtgaatatctgaatgcgatagtaaactggtattatcaacaatatcaaacagatattaaacctgaatggataacctatagccccagtgtgatgtactctattgcaaaagcaatagagttattgacatcgcatggtgataatattctcgtttttacacctgtctataattcattttttgatgtaattaaacatagcgagcgaaatattctgacagcctctttgattataaaaaatgaggggggctacgctatcaactggcaagattttgatcttaagattaaaagcgcaaagatgatgttattatgtaatcctcataacccaacaggaacagtctggtcggaagaagaactgcataaaatcgctgcaagctgtacaaggcataatgtctggttatgttcagatgaaatccatagtgattttgtttttaatcgtagctttacatccgcgcttaaaataaaaaaagaaaaagtagtagtatttaactcgatatcgaaaacatttaatgttcctgcactaacaggatcgtatatgatttcaactgacgataattttaatcataagttcagaacgatatcgaggtatcgcgattttgtaaactccccatcagtactgaatataattgcaactattattgcctacaacgaatgtgagggatggttaaagtcattaaaggcacatatagcctctaacattcaattcacccagcagtatctgaatgaaaatattccagaattgatcgtaaggccagctgatggttgctatttttcctggatagattgttctgctattggttatccttttgatgaattctacagtcgattaattcatgaaggcaaagtgggcattatggcggggcatgtctatggaacggagggggagggctaccttcgtctgaacctggcctgcggtcgagaaaaattatatatggggcttacgcgtcttgtgagtgtaattaaaaatattaatcagggagaataa

SEQ ID NO: 29195 - DNA, 1581 bp, Escherichia coli
atgaaacaaaagaaagcctggagtttttttcagagcctggggaaggcatttatgtatcccattgctctgctaagtgtatgtggcatgatgctagggctgggaagtggtttagccagtgatgatatggcaaagttaattccatttctggctattccaataattaaaaccatacttgatttcattgttagtcttggtttgtttgcctttgttaatttacctgtattgtttgcgatagcgattcccttaggattattaaaagataaagaggataaagcctatggtgctttttctggcttaattggttttatggcgatgcatctgggaacgaacttttatcttaaacagcacgacttattggtcgttgctgaccaaatgtcgacacatgggcaaaccatcattctggggatccagtcctacaataccagcgtgttggggggaattgttgctgggttattagtcgccagcatgtataaaaagatcgttaatttacgcattccagaatcattaggtttttatagcggcccacgtctggtgcctatcattacactgattgtgatgagtggatttggtctgatcattccttttatctggccgccatttttcaatctcttcatgctcattggccactggatatcaacttccggtcctgttggttatttcttctatgcagttgccgaacgtgtgacgattccttttggcttaaaccatctggtgacgtcagtgttccgctttacgccaatcggcggttcggctgtgattggcggtgaagaatattacggcaccctgaacatgtttatggcatacgtcaaagagaatgcggtcattccgctggatttggcggggaaaatggagcagggcaaactgatgattcagtatggtctggctggtgccgcgctggcgatgtatcgcactgctcatgctcaaaacagaaaggctatcaaagcattgcttatttccggggtgcttacggtgattattggcggcgtcagcgaaccgattgagtttctgttcttatttgtcagtccactgctgtttgtcttccatgcctttatgaatggattcgctaacatggttctgccatatatgggcgtgaagatgggatttactggtgatctgattcaatttattagctttggcgtattgcgtggcacaagaacaggttggccgatcgcggtatgtgtcgaagtggcctatttcttcatttattactttgtgttccgttggaccattcttaaatttaacctgatgaccgtaggccgtgaagagtccagtcctgtcacgctgaacgctcacgaagatacggctatagcggatatcccaactcctgataaatcagagctgcaagcggcggagcagatggttaaggcacttggtggtaaagagaatattaagtcactggataattgcgtaactcgtttacgtttaacaatcgcagatatgggattgattgacgaggctgcaataaaaagagctggcgggattgcggttgttaaacttgatcaaaataccctacaagtcattatcggcactaaagtcatcgccctgcgtcgggatatggataactatatggggatatactga

SEQ ID NO: 29196 - DNA, 768 bp, Escherichia coli
atgatcatcgaaaaagtcatgaacaataattgtgtacaggcatcgatgaatggacaggaggttatcatttctgggcctggcgtcggttacaacaaaaaatatggaatgtcggtccctgagcatccggctaaccggattttttatgtcagaaatgaacaaaaaaacaaactttataaattgattgaacatgtagatattgagtatgtgtttgttgccgaaaaaatagtgcaatatgcggagaaaaatctcgaaaaaaatctcaatccatcgctactattgattcttgcggatcacatttcgaatgcaatatcccgagtcgtttcaggtatacaaattaataatgttttccttgatgaaatcaaagcgttgtacaaagcagagtatgcgataagtcgcgatgcattaactatcattaatgagcaattcagcgttcaacttcctgatgatgagattggttttatagcattgcatattttaaataattatgaaaattcagttgattatgaatcagtacggattattgagttgtcgcaaataatcacggggcttattgaagttgtttataacagaaaggtggacagaagttcatttaactattccagatttatgatgcaccttaaatatttttcaagtcgcgtgttatgcaatgaaaaaataaaacagaaagatattggtgatatctatgaacagtttcttgaaaaggacatcctgttacagcgcgcaattcatgaaattgaacggtatctgtatgccactttaatggactaa

SEQ ID NO: 29197 - DNA, 1254 bp, Escherichia coli
atgtcaggatccaacactgcaatcagccgtcgtcgtttactgcaaggcgcgggtgccatgtggctattgagcgtaagtcaggtcagcctggctgcggtcagccaggtcgtggcggtgcgcgtctggcctgcgtccagctacacccgcgtgacggtagaatcaaatcgtcagctgaaatataagcagttcgcgttgagtaatcctgaacgcgtggtggtggatatcgaagatgtaaacctgaactcggtgctcaaggggatggctgcgcaaatccgcgctgacgacccgttcatcaagtcggcgcgcgtcgggcaatttgacccgcaaaccgtacgtatggtttttgaattaaagcaaaacgtaaaaccgcagctgtttgcccttgcgccggtcgccgggtttaaagagcgtctggtgatggacctctatccggccaatgcacaggatatgcaggacccgctgctggcgctgctggaggattacaacaaaggcgacctcgaaaagcaggtgccgccagcacaaagtggtccacaaccgggtaaagctgggcgggatcgtccgattgtcattatgcttgaccctggccacggtggcgaagactccggtgcggtggggaaatacaaaacgcgcgaaaaagacgtggtattgcaaatagctcgccgtctgcgctctctgatcgagaaagagggcaatatgaaggtgtacatgacgcgcaatgaagacatcttcattccgttgcaagtgcgcgtagcaaaagcccagaaacagcgcgctgacttgtttgtttctatccatgccgacgcctttaccagtcgccagccgagcggttcatcggtgtttgcgctctcaaccaaaggcgcaaccagtactgcggcaaaatatctggcacaaacccagaacgcctcggacttgattggtggcgtaagcaaaagcggtgaccgctatgtcgaccacaccatgttcgatatggtgcagtcgctgaccattgccgacagccttaagtttggtaaagcggtgctgaataagctcggtaaaatcaacaagctgcataaaaatcaagttgaacaggccgggtttgccgtactaaaggcaccagatattccctccattctggtcgaaacggcgtttatcagtaacgttgaggaagagcgtaaactgaaaacggcgactttccagcaggaagttgcggagtctattcttgcgggaattaaagcgtattttgccgatggggcgacgctggcgagaaggggataa

SEQ ID NO: 29198 - DNA, 1332 bp, Escherichia coli
gtggtaaaggaacgtaaaaccgagctggtcgagggattccgccattcggttccctatatcaatacccaccggggaaaaacgtttgtcatcatgctcggcggtgaagccattgagcatgagaatttctccagtatcgttaatgatatcgggttgttgcacagcctcggcatccgtctggtggtggtctatggcgcacgtccgcagatcgacgcaaatctggctgcacatcaccacgaaccgctgtatcacaagaatatacgtgtgaccgacgccaaaacactggaactggtgaagcaggcagcgggaacattgcaactggatattactgctcgcctgtcgatgagtctcaataacacaccgctgcagggcgcgcatatcaacgtcgtcagtggtaattttattattgcccagccgctgggcgtcgatgacggcgtggattactgtcatagcgggcgtatccggcggattgatgaagacgcgatccatcgtcaactggacagcggtgcaatagtgctaatggggccggtcgctgtttcggtcactggcgagagctttaatctgacctcggaagagattgccactcaactggccatcaaactgaaagctgaaaaaatgattggtttttgctcttcccagggcgtcactaatgacgacggtgatattgtctccgaacttttccctaacgaagcgcaagcacgggtagaagcccaggaagagaaaggcgattacaactccggtacggtgcgctttttgcgtggcgcagtgaaagcctgccgcagcggcgtgcgtcgctgtcatttaatcagttatcaggaagatggcgcgctgttgcaagagttgttctcacgcgacggtatcggtacgcagattgtgatggaaagcgccgagcagattcgtcgcgcaacaatcaacgatatcggcggtattctggagttgattcgcccgctggagcagcaaggtattctggtgcgccgttctcgcgagcagctggagatggaaatcgacaaattcaccattattcagcgcgataatacgactattgcctgcgcagcgctctatccgttcccggaagagaagattggggaaatggcctgtgtggcagttcacccggattaccgcagttcatcacggggcgaggttctgctggaacgcattgccgctcaggcgaagcagagcggcttaagcaaattgtttgtgctgaccacgcgcagtattcactggttccaggaacgtggatttaccccagtggatattgatttactgcccgagagcaaaaagcagttgtacaactaccagcgtaaatccaaagtgttgatggcggatttggggtaa

SEQ ID NO: 29199 - DNA, 1827 bp, Escherichia coli
atgaaattgcaaaagcaattactggaagctgtggagcacaaacagctacgcccactggacgtgcagtttgccctgaccgtggcgggagatgaacatcctgccgtcaccctcgcggcggcactattaagtcatgatgccggagagggacacgtttgtttgccgctttcacgactggaaaataacgaggcatcgcatccgctgttggcgacctgtgtcagtgaaatcggtgagctacaaaattgggaagaatgcttgctggcttcacaagcggtcagccggggagatgaaccaacgccgatgatcctctgtggcgatcgtctttatttgaatcgcatgtggtgtaacgagcgcacagtggcacgctttttcaacgaagtgaatcatgccattgaggttgatgaagctctactggcgcaaaccctggacaaactttttccagtaagcgatgaaattaactggcaaaaagttgcggcggcagtggcgctgacacggcggatctcggtgatttccggtggtcctggcaccggtaaaacgaccaccgtagcgaagttactggcagcgttaattcaaatggccgacggcgaacgctgccgtatccgtctggctgcaccaacgggtaaagctgccgcgcgcttaaccgaatctctcggcaaggctttgcgacaattaccgctgaccgatgaacaaaagaaacgcattccggaagatgccagcactttgcaccgattgctgggtgcgcagccgggtagccagcgtttacgtcatcatgccggtaacccgctgcatcttgatgtgctggtggtagatgaagcgtcaatgatcgatcttcctatgatgtcgagactgatcgacgccttgcccgatcatgcgcgagtgatctttctcggcgatcgtgatcaactggcctcggttgaggctggggctgtgctgggcgatatctgcgcttatgccaatgccggctttaccgccgagcgtgccgggcagctaagccgcctgacgggaactcacgttccggcaggaactggcacagacgcggcatctttgcgcgacagtctctgcctgctgcaaaaaagctatcgtttcggcagcgattctggcattggtcagttagctgcggcgatcaaccgtggtgataaaacggcagtgaaaaccgtttttcagcaggattttactgatatcgaaaaacggcttttacagagtggcgaagattatattgcgatgcttgaggaagctcttgcgggttacggacgttatctggatctgctgcaagcgcgtgccgagccggatttaatcattcaggcgttcaatgagtaccagcttttgtgcgccctgcgggaagggccgtttggcgtggctggactgaatgagcgaattgagcagtttatgcaacagaagcgcaaaattcatcgtcatccgcactctcgttggtacgaaggccgaccagtgatgattgcccgtaatgacagcgcgcttgggttgtttaatggcgatattggtattgcgctggatcgcgggcaggggacgcgcgtctggtttgcgatgccggacggcaatattaagtctgtgcaaccgagtcgcctgccagagcacgaaacgacgtgggcgatgacggtacataaatcgcagggatcggagttcgaccatgcggcgttgattttaccgagtcaacgcacgccggtagtaacgcgagagctggtttacaccgcagtgacccgcgcgcgtcgccgtctgtcgctgtatgccgatgagcgcattttaagtgcggcaattgccacgcgcaccgagcggcgcagtggtctggcggcgttgtttagttcgcgggaataa

SEQ ID NO: 29200 - DNA, 3543 bp, Escherichia coli
atgagtgatgtcgccgagacactagatcctttgcgcttgcccttacagggcgagcgcctgattgaagcctctgccggcacaggcaaaacctttacgattgcggcgctctatttgcgcctgttacttggactaggcggttctgccgcctttccccgcccgctgaccgttgaagaactgctggtggtgacctttaccgaggctgctacggcagaattgcgtggtcgtatccgtagcaatatccacgagttgcgcatcgcctgtctgcgtgaaaccaccgacaatccactgtacaaacgcctgctggaagagatcgacgataaagcgcaagccgcgcagtggttgttgttagccgagcggcagatggatgaagcggcagtctttactattcacggcttttgccagcgcatgctcaacctgaatgcctttgaatccggcatgctgtttgagcagcagctgattgaagatgagtctctgctacgctaccaggcctgcgccgatttctggcgtcgccactgctacccgctgccgcgtgaaattgcccaggtcgtctttgaaacctggaaagggccgcaggcgttgctgcgcgatattaatcgttatctgcaaggcgaagcgccggttatcaaagcaccgccccccgatgatgaaacgctggcttcccgccacgcgcaaattgtggcgcgtattgatgccgtaaaacagcagtggcgcgacgcagtgggtgaactggatgcgctgatcgaatcttctggtattgatcgacgcaagtttaaccgtagcaatcaggctaaatggatcgagaagatcagcgcctgggcagaagaagagaccaacagctatcagttgccggagtcgctggaaaaattctctcagcgtttcttagaagatcgcacgaaagccgggggggaaaccccgcgacatccactgtttgaggcgatcgaacaactgcttgcagaaccattgtcgatccgcgatctggtgatcactcgcgcattggctgagatccgcgaaacagtagcgcgtgaaaaacgccgccgtggcgaattgggttttgatgacatgttaagtcggctcgattccgcgctgcgtagtgaaagcggcgaggtattggcagcggcgatccgtacgcgattcccggtggcaatgatcgatgaatttcaggataccgacccccagcagtaccgaatttttcgccgtatctggcaccatcagccggaaaccgcattgttgctgattggcgacccgaaacaggccatttatgcattccggggtgcggatatcttcacttatatgaaggcgcgtagcgaagttcatgctcactacaccttagataccaactggcgttccgcaccgggaatggtgaacagcgttaacaaacttttcagccagactgatgacgcgttcatgtttcgtgaaataccgtttattcctgtgaaatcagccgggaaaaatcaggcgttacgttttgtgtttaaaggtgaaacgcagcctgcgatgaaaatgtggctgatgaaaggcgaaagctgcggcgttggcgactatcaaagtaccatggcgcaggtatgtgctgcgcaaatccgcgactggttacaagccgggcaacgcggcgaagcgttgctgatgaacggcgacgatgcgcgtccggtgcgtgcttcggacatcagtgtgctggtgcgcagccgccaggaggccgctcaggtgcgcgatgccttaacgctgctggaaatcccttccgtttacctttcgaaccgcgacagtgtttttgaaactctggaagcacaggagatgctttggctgttgcaggcggtgatgacgcccgaacgtgagaacaccctgcgcagtgcgctggcaacgtcaatgatggggctgaatgcgctggatattgaaacgctgaataatgacgaacatgcgtgggatgcggtagtcgaagagttcgatggttatcggcaaatctggcgcaaacgtggcgttatgccgatgctgcgggcgctgatgtcggcgcgtaacattgcagaaaacttgctggcaacggcaggcggtgagcggcgtcttaccgatatcttgcatatcagcgaactgctacaagaagccggaacgcagctggaaagtgaacatgcgctggtacgctggttatcgcaacatatcctcgagccagacagtaatgcctccagccaacaaatgcgcctcgaaagtgataaacatctggtgcagattgtcacgatacacaaatcaaaagggctggaatatccgctggtctggttgccatttattaccaatttccgcgtccaggatcaggcgttttatcacgatcgccacttgtttgaggccgttctggatcttaatgctgcgccagaaagcgtcgacctcgcggaggccgaacgtctggcggaagatctgcgtttactttacgtggcgctgacgcgttcggtttggcattgcagtctcggcgttgcaccgctggtgcgccgtcgtggcgataaaaaaggtgataccgacgtccaccaaagtgcgctcgggcgtttgctgcaaaaaggagaaccgcaagatgcggcagggcttcgtacctgtattgaagcgttgtgcaatgatgatattgtctggcaaacggcacaaattggtgataaccagccctggcaggttaatgatgcattaactgcagaactgaatgcgaggacgctacaacgattgcccggcgataactggcgtgtcaccagctactccggtttgcagcagcgtggtcacggtatcgctcaggatctgataccacggctggatgttgatgccgcaggcgtggtcagcgtcgttgaagaaccgacgttaacaccgcatcagttcccgcgcggtgcgtcaccggggacattcttgcacagtttgtttgaagacctcgattttacccagccggttgacccgaactgggtacaggaaaaactggagctcggtggctttgaaccgcagtgggaaccggtgttgactgagtggatcacggctgtcctccaggcacctctcaatgaaacgggtgttagcctgaatcagctttccgatcgcgataaacaggtggagatggagttttacctgccaattagcgaaccgctcatcgccagccagcttgatgcactaattcgccagtttgacccgctatccgctggctgcccgccgctggagttcatgcaggtacgtggcatgttaaaaggctttatcgatctggtgttccgccacgaagggcgttattacctgctcgactataaatccaactggttgggtgaagacagttcggcttacacccaacaggctatggcagcggcaatgcaggcacaccgctatgatctgcaatatcagctttataccctggcgctgcaccgttatctgcgccatcgtattgctgattacgactatgagcgccactttggcggcgttatttatctgttcctgcgtggcgttgataaagaacatccgcaacaagggatctacgcgacccgacccaacgccgggttgattgacctgatggatgagatgtttgccggtatgaccctggaggaggcgtaa

SEQ ID NO: 29201 - DNA, 2889 bp, Escherichia coli
atgccccgcagcatctggttcaaagcattattgttgtttgttgccctttgggcacccttaagtcaggcagaaacgggatggcagcccattcaggaaaccatccgtaaaagtgataaagataaccgccagtatcaggctatacgtctggataacggtatggtggtcttactggtttctgatccgcaggcagttaaatcgctctcggcgctggtggtgcccgttgggtcgctggaagatcctgaggcgtaccaagggctggcacattaccttgaacatatgagtctgatggggtcgaaaaagtacccgcaggctgacagtctggccgaatatctcaaaatgcacggcggcagtcacaatgccagcacggcaccgtatcgcacggctttctatctggaagttgagaacgacgccttgcccggtgcggtagaccgcctggcggacgctattgcagaacccttgctcgacaagaaatacgccgaacgtgaacgtaatgcagtgaatgccgaattaaccatggcgcgtacgcgtgacgggatgcgcatggcacaggtcagcgcagaaaccattaacccggcacaccccggttcaaagttttctggtggtaacctcgaaactttaagcgacaaaccaggcaatccggtacagcaggcgctgaaagatttccacgagaagtactattccgccaatctgatgaaggcggttatttacagcaataaaccgttgccggagttggcgaaaatgtcggcggacacctttggtcgcgtgccgaacaaagagagcaaaaaaccggaaatcaccgtgccggtagtcaccgacgcgcaaaagggcattatcattcattacgtcccggcgttgccgcgtaaagttctgcgcgttgagtttcgcatcgataacaattcagcgaagttccgtagtaaaacggatgaattgattacctatctgattggtaatcgcagcccaggtacactttctgactggttgcaaaagcagggattagttgagggtattagcgccaattccgatcctatcgtcaacggcaacagcggcgtattagcgatctctgcgtctttaaccgataaaggtctggcgaatcgcgatcaggttgtggcggccatttttagctacctcaatctgttacgtgaaaaagggatcgataaacaatacttcgatgaactggcgaatgtgctggatatcgacttccgttatccgtcaatcacccgtgatatggattacgtcgaatggctggctgataccatgattcgcgttcctgttgagcatacactggatgcagtcaatattgccgatcggtacgatgctaaagcagtaaaagaacgtctggcgatgatgacgccgcagaatgcgcgtatctggtatatcagcccgaaagagccgcacaacaaaacggcttactttgtcgatgcgccgtatcaggtcgataaaattagcgcacaaactttcgcggactggcagaaaaaagccgccaacattgcgctctccttaccggagcttaacccctatattcctgacgatttctcgctgattaagtcagagaagaaatacgaccatccagagttgattgttgatgagtcgaatctgcgcgtggtgtatgcgccaagccgttattttgccagcgagcccaaagctgatgtcagcctgattttgcgtaatccgaaagccatggacagcgcccgcaatcaggtgatgtttgcgctcaatgattatctcgcagggctggcgcttgatcagttaagcaaccaggcgtcggttggtggcataagtttttccaccaatgctaacaacggccttatggttaatgccaatggttacactcagcgcctgccgcagctgttccaggctctgctggagggctactttagctataccgctacggaagatcagcttgagcaggcgaagtcctggtataaccagatgatggattccgcagaaaagggcaaagcgtttgagcaggcgattatgcccgcgcagatgctctcgcaagtgccgtacttctcgcgagatgaacggcgcaaaattttgccctccattacgttgaaagaggtgctggcctatcgcgacaccttaaaatcaggggctagaccagagtttatggttatcggcaacatgactgaagcccaggcaacaacgctggcacgccatgtgcaaaaacagttgggcgctgatggttcagagtggtgtcgtaacaaagatgtcgtggtcgataaaaaacaatccgtcatctttgaaaaagctggtaacagcaccgactccgcactggcagcggtatttgtaccgactggctacgatgaatacaccagctcagcgtatagttctctgttggggcagatcgtacagccgtggttctacaatcagttgcgtaccgaagaacagttgggctatgccgtgtttgcgttcccaatgagcgtagggcgtcagtggggcatgggcttccttttgcaaagcaatgataaacagccttcattcttgtgggagcgttacaaggcgtttttcccaaccgcagaggcaaaattgcgggcgatgaagccagaggagtttgcgcaaatccagcaggcggtaattactcagatgctgcaggcaccgcaaacgctcggcgaagaagcatcgaagttaagtaaagatttcgatcgcggcaatatgcgcttcgattcgcgtgataaaatcgtggcccagataaaactgctgacgccgcaaaaacttgctgatttcttccatcaggcggtggtcgagccgcaaggtatggctattctgtcgcagatttccggcagccagaacgggaaagccgaatatgtgcatcctgaaggctggaaagtgtgggagaacgtcagcgcgttgcagcaaacaatgcccctgatgagtgaaaagaatgagtga

SEQ ID NO: 29202 - DNA, 3369 bp, Escherichia coli
atgttaagggtctaccattccaatcgtctggacgtgctggaagcgttgatggagtttattgtcgaacgcgaacggctggacgatcctttcgaaccagagatgattctggtgcaaagtaccggtatggcacagtggctgcaaatgaccctgtcgcaaaagtttggtattgcggcaaacattgattttccgctgccagcgagctttatctgggatatgttcgtccgggtgttaccggagatccccaaagagagcgcttttaacaaacagagcatgagctggaaactgatgactctgctgccgcaactgttggagcgcgaagactttaccctgttgcggcattatctgactgacgatagtgacaagcgaaaactgttccagctttcttcaaaagcggcggacctgtttgaccagtatctggtctatcgtccggactggctggcacagtgggaaacaggacatctggtagaagggttgggagaagcacaggcctggcaagcgccgttgtggaaggcgttggtggaatataccgacgaacttgggcaaccgcgctggcaccgcgccaatctctatcagcgctttatcgaaacgctggagtccgcgacgacctgcccgccggggttaccttcgcgcgtctttatatgcggtatttccgcgttaccgcctgtttatctccaggcgctacaggcgctgggtaaacatattgaaatccatctcctgtttaccaacccctgccgttattactggggcgacattaaagatcccgcttatctggcgaaactactgactcgccagcgccgacacagttttgaagatcgcgaattaccgctatttcgcgacagcgaaaatgccgggcagctctttaacagcgatggtgaacaggatgtcggcaacccgctgctggcttcatggggcaagcttgggcgcgactacatttatctcctttctgacctggagagcagccaggagctggacgcttttgtcgatgtgacgccagataacctgctgcataatattcagtctgacattctggaactggaaaaccgcgccgttgctggtgtgaacatcgaagagttttcccgtagcgataacaaacgcccgcttgatccactggatagcagtatcaccttccacgtttgccatagcccgcagcgtgaagttgaagttttacacgatcgcctgctggcgatgctggaggaagacccgacacttactccgcgcgacatcatcgtgatggtggctgatatcgacagctacagtccgtttattcaggctgtgtttggtagcgcacctgcggatcgttacctgccttacgccatttccgaccgtcgggcgcggcagtcgcatcctgtacttgaagcgtttatcagcctgttatcgctgccagacagccgctttgtgtcggaagacgtgctggcattactggatgtgccggtgctggcagcgcggtttgacatcaccgaagaagggctgcgttatttacgccagtgggtcaacgagtccggcattcgttgggggatagatgacgacaacgttcgcgagctggaacttcccgctaccggtcaacacacctggcggtttggcctgacgcgcatgttgctgggctacgcgatggagagcgcgcagggcgagtggcaatcggttctaccttatgatgaatcgagcggcttaattgcagaactggtggggcatctgtcttcactgctaatgcagctaaacatctggcgtcgcgggctggcgcaggagcgtccgctggaagagtggttgccggtttgtcgcgatatgctcaacgccttcttcctgccggatgcggaaaccgaagcagcgatgacgctgatcgaacaacaatggcaggcgattatcgccgaaggtttaggtgcgcagtatggcgacgcggtgccgctgtcactattgcgtgatgaactggcacagcgcctggatcaagaacgtatcagccagcgttttctcgccggaccggttaacatttgtactctgatgccaatgcgttcaattccgttcaaagtggtttgcctgctgggaatgaacgacggcgtttatccacgtcagcttgcgccattgggctttgatctgatgagccagaaaccgaagcgtggcgaccgtagccgtcgcgatgacgaccgctatctgttcctggaagcgttaatttccgcgcagcaaaaactctatatcagctatatcgggcgttccattcaggataacagtgaacgtttcccgtcggtactggtgcaggaactgatcgactacatcgggcaaagccattatctaccgggcgatgaagcgctcaactgtgatgaaagcgaggcaagggtaaaagcgcatcttacttgcctccatacccgaatgccgtttgatccacaaaactaccagccaggcgaacgacaaagctatgctcgtgaatggctacctgcggccagccaggctggtaaagcacattctgaatttgttcagccgctgccatttaccttaccggaaaccgtgccgctggaaacgctacaacgattctgggcacatccggtacgggcgtttttccagatgcgtttgcaggtgaacttccgtaccgaagacagcgaaattcccgacactgaaccttttattcttgaagggcttagtcgttatcaaatcaaccagcagttattaaatgtactggttgagcaggatgatgccgaacgcttgttccgccgattccgggcggcaggtgatttgccgtatggtgcctttggtgaaattttctgggaaacgcagtgtcaggagatgcagcaacttgccgacagagtcattgcctgtcgccagccagggcagagtatggagattgatctcgcctgcaacggtgtgcagataactggctggttgccgcaggtgcagccggatggcctgttgcgctggcgtccctctttattaagtgtggcgcagggaatgcaactttggctggaacaccttgtctactgtgccagcggtggtaatggtgaaagtcgcctttttctacgcaaagacggcgagtggcgttttccgccgcttgcagccgaacaggctttgcattacctctcacaactgattgaggggtatcgtgaaggaatgtccgcgccattgctggtgttacctgaaagtggcggcgcgtggctaaaaacctgttatgacgcgcaaaacgatgccatgctggatgacgattccacgttgcaaaaagcccgtacgaaattccttcaggcttacgaaggcaacatgatggtgcgtggcgaaggtgatgatatctggtatcaacggctctggcggcaattcacaccagagacaatggaggctatcgttgaacagtcgcaacgtttcctgttaccgctgtttcgctttaatcagtcatga

SEQ ID NO: 29203 - DNA, 324 bp, Escherichia coli
atgtcagcttccctgaggaatcaacaaggctttagtctgccggaggtaatgttggcgatggtgttgatggtgatgattgtcactgcgttatcgggtttccagcgaacattaatgaacagtcttgccagcagaaaccagtaccaacagctctggcggcatagctggcagcaaacgcaactgcgcgcgatttcgccacctgctaactggcaggtcaaccgaatgcagacatcgcaggcgggatgtgtcagcatcagcgttacgctagtttcacccgggggcagagaaggcgagatgacccgcctgcattgcccgaatcgtcagtag

SEQ ID NO: 29204 - DNA, 408 bp, Escherichia coli
gtgaaccgcgaaaagggtgtttcgtcactggctctggtcctgatgctgctgattttgggtagcttgctattgcaaggaatgagtcagcaggatcgcagttttgcttctcgcgtgagcatggaaagtcagtcattgcgccgccaggccatcgttcagtcggcgctggagtggggaaaaatgcactcctggcagatgcagcccgcagttcagtgcttactgtatgctgccaccggtgcccgggtttgtctgcgtttactggcagataatgaagccttattgattgccggttatgaaggcgtttcgttgtggcgaacaggcgaagtcatcgatggaaacattgttttttcgccacgcggctggagcgatttttgtccgctgaaagagagggcgttatgtcagcttccctga

SEQ ID NO: 29205 - DNA, 564 bp, Escherichia coli
atgtctgtaaaagagcaaggtttttctctgctggaagtgttgattgctatggcgatcagtagcgtattgttgctgggggctgcacgctttctgcctgcgttacagcgtgaaagtttaacgaacacccgtaagctggcgctggaagatgaaatctggctgcgggtatttaccgtcgcgaagcatctccagagggcgggttattgccatggcagctgtacgggcgaagggctggaaattgtcggacagggtgactgtgtcattgtgcagtgggatgcgaacagtaatggtatctgggatcgcgaaccggtaaaagagtccgaccagattggatttcgtctgaaggagcatgtgctggaaacgctacgcggtgcgacatcctgtgaaggtaagggctgggataaagtcactaatccggatgccatcattatcgacacttttcaggtcgtacgtcaggatgtcagcggcttctcgccggtgttgacggttaatatgcacgctgccagcaaggctgatccgcaaaccgtggtggatgccagctatagcgtgacaggatccaacctgtga

SEQ ID NO: 29206 - DNA, 471 bp, Escherichia coli
atgaaaacacaacgtggttatacgctgattgaaacgctggtcgcgatgctgattctggtcatgctaagcgcaagtgggctctatggctggcaatactggcagcagtcgcaacggctttggcaaactgccagccaggcgcgggactatttgctctatttacgtgaagatgccaactggcataaccgcgaccacagtatcagtcttatcagggaggggacgttatggtgccttgtgagttccgttgctggggcgaatacctgtcatggcagttcaccattggtctttgtgccgcgctggcccgaagtcgaaatgagcgacctgacaccttcgcttgctttctttggcctgcgcaataccgcatgggccgggcatattcgcttcaaaaactcaacgggcgagtggtggctggtggtttcgccgtggggaagactccggctttgtcagcaaggagaaacagaaggatgtctgtaa

SEQ ID NO: 29207 - DNA, 795 bp, Escherichia coli; identical to SEQ ID NO: 2252

SEQ ID NO: 29208 - DNA, 876 bp, Escherichia coli
atgaccagtagctatctgcattttccggagtttgatccggtcattttctcaataggacccgtggcgcttcactggtacggcctgatgtatctggtgggtttcatttttgcaatgtggctggcaacacgacgggcgaatcgtccgggcagtggctggaccaaaaatgaagttgaaaacttactctatgcgggcttcctcggcgtcttcctcggtggacgtattggttatgttctgttctacaatttcccgcagtttatggccgatccgctgtatcttttccgtgtctgggacggcggcatgtccttccacggcggcctgattggcgttatcgtggtgatgattatcttcgcccgccgtactaaacgttccttcttccaggtctctgattttattgccccactcattccgtttggtcttggtgccgggcgtctgggcaactttattaacggtgaattgtggggccgcgttgacccgaacttcccgtttgccatgctgttccctggctcccgtacagaagatattttgctgctgcaaaccaacccgcagtggcaatccattttcgacacttacggtgtgctgccgcgccacccatcacagctttacgagctgctgctggaaggtgtggtgctgtttattatcctcaacctgtatattcgtaaaccgcgcccaatgggagctgtctcaggcttgttcctgattggttacggcgcgtttcgcatcattgttgagtttttccgccagcccgacgcgcagtttactggtgcctgggtgcagtacatcagcatggggcaaattctttccatcccgatgattgtcgcgggtgtgatcatgatggtctgggcatatcgtcgcagcccacagcaacacgtttcctga

SEQ ID NO: 29209 - DNA, 2247 bp, Escherichia coli
atgctcactcgcctgcgcgaaatagtcgaaaaggtagccagcgcaccacgcctgaatgaggcgttaaatattctggttaccgacatctgtcttgcgatggataccgaggtctgttcggtctacctggccgatcatgatcgacgttgttactacctgatggcgacccggggactgaaaaaaccacgtggtcgcactgtaacgctcgcgtttgatgaagggatcgtcggcctggttggcaggctggcggaaccgataaaccttgcagatgcgcaaaagcaccccagcttcaaatacatcccctccgtaaaagaagaacgtttccgcgcgtttttaggcgtaccaattattcaacgtcgccagttgcttggtgtactggtggtacagcaacgagagttgcgccagtatgacgaaagtgaagaatccttcctggtgacgcttgccacccagatggcagctattctttctcagtcgcagttgactgccttgtttgggcaatatcgccagacgcgaatccgtgcattaccggcagcacctggtgtggcgattgccgaaggctggcaggatgccacgttacctttaatggaacaggtgtatcaggcatcaacgctggatccggctctggaacgcgaacgactgaccggggcgttggaagaggcggctaacgagtttcgccgctatagcaaacgctttgctgccggtgcacaaaaagaaacggcggctattttcgatctttactcacacctgctttcggatacccggctgcgtcgcgaattgtttgccgaggttgataaaggctcggtggcagagtgggcggtaaaaacggtcattgaaaaatttgccgaacagtttgccgcgctaagcgataactatctcaaagagcgggctggcgatttacgtgcgctgggtcagcgattgctgtttcatcttgatgacgctaatcaagggccgaacgcctggccggaacgtttcattctggtggcagatgaactgtcagcgacaacgcttgctgagctgccccaggatcgcttagtcggtgttgtcgtgcgcgatggcgctgccaactcccatgctgcgatcatggtacgtgcgctggggatacctaccgtgatgggcgcggatattcagccttcggtactgcatcgtcggacgctgatcgtcgatggttatcgcggtgaattgctggtcgatccggagccggtactgctgcaagaatatcagcggctaattagtgaagagatcgagcttagccgtctggcggaagatgacgtcaatttacccgcccagttaaaaagcggcgaacgcattaaagtcatgctcaatgccggtttaagcccggaacatgaagaaaaactgggcagccgtattgatggcataggactttatcgcactgaaatcccattcatgctgcaaagtggttttccgtcggaagaagaacaggtggcgcagtatcaggggatgctgcaaatgtttaatgataaacccgtcaccttgcgtacgctggatgtcggagcagataagcagctgccttacatgccgatcagcgaagagaatccatgcctgggttggcgtgggattcgcattacgctcgatcagccggagatcttcttgatccaggtgcgggcgatgctgcgtgctaatgccgctacgggcaacctgaatattctgttgccgatggtcacaagcctcgatgaagttgacgaagcacgccgcctgattgaacgtgccggacgtgaagtcgaggagatgatcggttacgaaattcccaaaccacgtatcggcatcatgctggaagtgccgtcaatggtatttatgctgccgcatctggcaaagcgggtcgatttcatctctgttggcaccaacgatctgacgcaatacatcctggccgttgatcgcaacaatacccgggtggcgaacatttatgacagtcttcatcctgcaatgttacgagctctggcgatgatcgcccgggaagcggaaatacatggaatcgatctccgtttgtgcggtgaaatggcgggcgatcccatgtgcgtggcaatcctcattgggcttgggtatcgccatctgtctatgaacggacgttctgtagcgcgcgtaaaatacctgctgcggcgcattgattttgctgaagcagaaaatcttgcgcagcgtagtctggaagcgcaactggcgaccgaagttcgccatcaggttgctgcctttatggagcgtcgcggcatgggcgggctgattcgcggggggttatag

SEQ ID NO: 29210 - DNA, 531 bp, Escherichia coli
gtgattgatgacgatggctaccgcccaaacgtaggtatcgtgatttgtaatcgccaggggcaggtaatgtgggcccggcgatttggtcagcactcctggcaatttccgcaaggcggaatcaaccccggagaatccgcagagcaggcgatgtaccgtgaattgtttgaagaagtaggattaagccgcaaagacgttcgaatccttgcttcaacgcgtaactggttgcgctacaaattaccgaaacgtttggtgcgttgggacacgaagccggtttgtatcggccaaaaacaaaaatggtttctcttgcagctggtgagcggcgatgcagaaatcaatatgcaaaccagcagtacaccagagtttgacggctggcgatgggtaagttactggtatccagtcagacaggtggtgtcatttaaacgtgatgtctaccgtagggtaatgaaagagttcgcgagtgtggtgatgtcactgcaggaaaatacgccaaaaccacaaaacgcatctgcttatcgacgtaaaagaggttaa

SEQ ID NO: 29211 - DNA, 147 bp, Escherichia coli; identical to SEQ ID NO: 2256

SEQ ID NO: 29212 - DNA, 690 bp, Escherichia coli
atgtcccaacctcgcccactgctctctcctcccgaaactgaagaacaattgttagcgcaagcacaacaactttctggttatacattgggagaactggcggcacttgccgggctggttacgccggagaatttaaaacgcgataagggctggattggcgtgttactggagatctggctaggtgccagcgcagggagtaaacctgagcaagattttgctgctctgggcgtggaacttaaaactatccctgtggatagtcttggtcgtccactggaaacaacattcgtttgtgttgccccgttaacgggcaatagcggggtgacctgggaaaccagccacgtgcgccacaagctcaaacgcgtgctgtggataccggttgaaggcgagcgcagcatcccgctggcaaagcgtcgcgtaggatcaccgttgctgtggagcccgaatgaagaggaagaccgacagttacgcgaagactgggaagaattaatggatatgattgttctcggtcaaattgagcggatcaccgctcgtcacggggaatatttacagatacgaccgaaagcagcgaatgcgaaagcgctgaccgaagctattggtgcccggggcgaacggattctgacgctgccgcgcggattttatttgaagaagaatttcaccagtgcgctactggcccgtcattttctgatccagtag

SEQ ID NO: 29213 - DNA, 714 bp, Escherichia coli
atgttatttgcatggataaccgatcctaacgcctggcttgcgctcggtacactgacgctgctggagatcgttcttgggatcgacaatattattttcctttctctggtggtggcaaagcttcccacagcacaacgtgctcatgcgcgccgtctggggttggcgggagccatggttatgcgtctggcgctgctggcatccatcgcctgggttacgcgcctgacgaatccgctttttacaatattcagtcaggaaatttccgcccgtgatttgatcctgcttctgggtggcttgttccttatctggaaagccagcaaggaaatccacgaatccatcgaaggtgaagaagaagggctgaaaacacgcgtttcatcattcctcggcgcgatcgtgcagattatgctgctggatattatcttcagcctcgactcggtgattaccgctgtgggtctgtcagatcacctgtttattatgatggctgccgtggtgattgccgtaggcgtgatgatgttcgccgcgcgctcgattggtgattttgtcgagcgccatccttcggtaaaaatgctggcgctctctttcctgattctggtgggctttaccctgattctggaaagtttcgacatccacgtaccgaaaggttacatctacttcgcgatattcttctctattgcggttgaaagcctcaacctgattcgcaacaaaaagaatccgctctga

SEQ ID NO: 29214 - DNA, 219 bp, Escherichia coli; identical to SEQ ID NO: 2259

SEQ ID NO: 29215 - DNA, 1041 bp, Escherichia coli
atgcaatatcaccgtataccccacagttcgctggaagtcagcacgctggggcttggcacgatgacgtttggtgaacagaacagcgaagccgacgcccacgcacaactcgactatgccgtcgctcagggcattaaccttatcgacgttgccgaaatgtacccagtacctccgcgccccgaaactcaagggctaaccgaaacctacgtcggcaactggctggcgaaacatggcagccgcgaaaagttaattatcgcctccaaagtgagcggaccgtcgcgcaataatgacaaaggcatccgcccggatcaggcgctggatcggaagaatatccgcgaagcgctgcatgacagcctcaagcgtctgcagactgattacctcgatctctatcaggtgcactggccgcagcgcccaaccaactgcttcggcaaactcggttatagctggacagattctgcgcctgcggtttcgctgctggatacgctggacgcactggcagagtaccaacgcgcgggaaaaattcgttatatcggcgtgtcgaacgaaactgcatttggcgtaatgcgctacctgcatctggcggacaaacacgatctgccgcgtattgtcaccattcagaacccctacagcctgttaaaccgcagttttgaagtaggtctggcagaagtcagccagtatgaaggggtcgaactgctggcctattcgtgcctgggtttcggcacactgaccgggaaatatctcaatggtgcaaaacccgctggcgcacgtaatacgctctttagtcggttcacccgctatagcggtgagcagacgcaaaaagccgtcgcggcgtatgttgatatcgccagacgtcatggcctggaccctgctcagatggcgctcgcatttgtacgccgtcaaccgtttgttgccagcactctgctgggcgcaaccacgatggagcagctgaaaactaacgtcgaaagtttgcatctggagttgagcgaagacgtattagctgaaattgaagcggtgcatcaggtttatacgtatcctgcaccataa

SEQ ID NO: 29216 - DNA, 1194 bp, Escherichia coli
atgagtgagtcagtgcacactaacacttcgttgtggtcgaaggggatgaaagcggttatcgtggcgcagtttctctctgcgtttggcgataatgcgctactgtttgccactctggcgttactgaaagcgcagttctatccggagtggagccagcccatcctgcaaatggtgtttgtaggtgcttacattctttttgcgccgtttgtcgggcaggtggcggatagcttcgccaaaggccgggtgatgatgtttgccaacggcctgaagctactgggcgcagccagtatctgctttggtatcaatccgtttctcggctatacgttggtgggtgttggtgctgcagcctattcaccggcgaaatacggtattctcggcgaattaaccacgggtagtaagttagtaaaagctaacggtttaatggaagcgtctaccatagcggcgattttgctcggttccgtagctggtggtgttctggctgactggcatattctggttgccctggccgcatgcgcactggcctacggtggcgcggtcgttgccaatatctacattcccaaactggcggcggcgcgtccggggcagtcctggaatctcatcagcatgacccgcagtttcctgaatgcctgcacctcgctatggcgcaatggtgaaacgcgtttttcgctggtgggcaccagtttattctggggagcgggtgtcacgctgcgtttcctgttggtgctgtgggtaccggtggcgctgggtattaccgataacgctacgccgacctatctcaacgcgatggtagcgattggtatcgtggttggtgcaggtgcggcagcgaagttagttacgctggaaaccgtgtcacgctgtatgccagccgggattttgattggcgtagtggtactgattttctccctgcaacacgagctgctgccagcctatgctttgttgatgctgattggcgtgctggggggcttttttgtcgttccgctcaatgcgttgctacaggagcggggtaaaaaaagcgtcggggcggggaatgcgattgcagtacaaaaccttggcgaaaacagcgccatgttgttgatgctgggcatttactcgctggcagtaatggtaggcatcccggtcgtgcccattggcattggcttcggtgcgctgtttgcgctggcaataacggcgctgtggatctggcagcgccgtcattaa

SEQ ID NO: 29217 - DNA, 2160 bp, Escherichia coli
atgctttttagcttttttcgaaatttgtgccgtgttttgtatcgcgttcgcgttacgggtgacaccaaggcactgaagggcgagcgcgttctaattacgcctaatcacgtctcttttattgatggcatactgctggcattgtttttacccgtacgtccggtatttgccgtttacacctcaataagccaacagtggtatatgcgttggctgaaatcatttatcgactttgttcctctcgacccgacgcaacctatggcgattaaacatctggtacgtctggtggaacagggacgaccagtggtgattttccctgaaggacgcatcaccaccactggctcgctgatgaaaatctacgatggcgcgggatttgtcgcggcgaagtctggtgcaacggttattcctgtgcgtattgaaggggcggaacttacgcacttcagccgcctgaaaggtctggttaaacgtcgcttgttcccgcaaattactctgcatattttgccaccaacgcaggtggagatgccggatgcgccgcgtgcccgtgaccgtcgcaaaatcgctggcgaaatgctgcatcaaataatgatggaagcgcgtatggcggtgcgcccgcgtgaaacgctgtacgaatctttactgagtgcaatgtaccgcttcggagccgggaagaaatgtgtcgaagacgtcaactttaccccagactcctatcgcaaattgcttacgaaaacgctgtttgttggacgcatccttgaaaaatacagtgttgaaggcgaacgcatcggcttaatgctgcccaatgcaggcatcagtgcggcagtgatttttggggccatcgcccgtcgccgcattcccgcaatgatgaactacaccgccggggtaaaagggctgaccagtgctattacggcggctgaaatcaaaaccatcttcacttcccgtcagtttctcgataaaggcaaactctggcatctgccggagcaacttactcaggtgcgctgggtctatctggaagatttaaaagcagatgtcaccactgccgacaaagtgtggattttcgctcatttgctgatgccgcgtctggcacaggtaaaacagcagccggaagaagaggcgctgatcctttttacctccggttctgaaggccatccgaaaggcgtcgtccatagccataaaagcattctggcgaacgtcgagcagattaaaacgattgccgacttcaccaccaacgatcgctttatgtcggcgttaccgctgtttcactcctttgggctgacggtaggcctgtttacgccactgctcacaggtgcagaagtgttcctttatccaagcccgctgcattaccgcattgtgccggagttggtgtatgaccgcagttgcaccgtgttgttcggtacctcgactttcctcggtcactacgcgcgtttcgccaacccgtatgacttctatcgtctacgctatgtggtggcaggcgcagaaaaactacaagaaagtaccaaacagctttggcaggataaatttggcctgcgcatccttgaaggctacggtgtgaccgagtgcgcgcctgtcgtttctatcaacgtaccgatggcggcgaaacccggtacggtagggcgtattctaccaggtatggacgcgcgcctgttgtcggttcctggtatcgaagagggcggacgcctgcaactgaaagggccgaacataatgaacggctatctgcgggtggagaagccaggtgtactggaagtgcccaccgccgagaatgttcgcggcgaaatggagcgcggctggtatgacactggcgatattgtgcgttttgacgagcagggctttgtgcagattcagggccgcgcaaaacgctttgccaaaattgcaggtgaaatggtgtcgctggaaatggtggaacaactggcacttggtgtttcgccagataaagtccatgccactgcgattaagagcgatgccagcaaaggcgaggcactggtgcttttcaccacagataacgaactgacgcgcgataagttacaacagtatgcccgcgagcacggcgtgccggagcttgctgtaccgcgcgatattcgctatctgaaacagatgccattacttggcagcggcaaacctgactttgtcactttgaaaagctgggtagacgaagcggaacaacacgatgagtga

SEQ ID NO: 29218 - DNA, 1032 bp, Escherichia coli
atggcgaccataaaggatgtagcccgactggcaggcgtttcagtcgccaccgtttcccgtgtcattaataattcacccaaagccagcgaagcttcccggcttgctgtgcatagtgcaatggagtctcttagctatcacccgaacgccaacgcccgtgcgctggcgcagcagaccactgaaacgatcggtctggtcgttggtgatgtttccgatccgtttttcggcgcaatggtgaaagcggtcgaacaggtggcttatcacactggtaattttttattgattggcaacggttaccacaacgaacaaaaagagcgtcaggccattgagcaactgatccgccatcgctgtgctgcgctggttgtccatgccaaaatgatcccggatgccgatttagcctcgttaatgaaacaaatgcccggtatggtgctgatcaaccgtatcctgcctggctttgaaaaccgttgtattgctctggacgatcgttacggtgcctggctggcaacgcgtcatttaattcagcaaggtcatacccgcattggttatctgtgctctaaccactctatttctgacgccgaagatcgtctgcaagggtattacgatgcccttgctgaaagtggtattccggccaatgaccggctggtgacatttggcgaaccagacgaaagcggcggcgaacaggcaatgaccgagcttttgggacgaggcagaaatttcactgcggtagcctgttataacgattcaatggcggcgggcgcgatgggcgtgctcaatgataatggtattgatgtaccgggtgagatttcgttaattggctttgatgatgtgctggtgtcacgctatgtgcgtccgcgcctgaccaccgtgcgttacccaatcgtgacgatggcgacgcaggctgccgaactggctttggcgctggcggataatcgccctctcccggaaatcactaatgtctttagtccgacgctggtacgtcgccattcagtgtcaactccgtcgctggaggcaagtcatcatgcaaccagcgactaa

SEQ ID NO: 29219 - DNA, 1263 bp, Escherichia coli
atgccacattcactgttcagcactgataccgatctcaccgccgaaaatctgctgcgtttgcccgcagaatttggctgcccggtgtgggtctacgatgcgcaaattattcgtcggcagattgcagcgctgaaacagtttgatgtggtgcgctttgcacagaaagcctgttccaatattcatattttgcgcttaatgcgtgagcagggcgtaaaagtggattccgtctcgttaggcgaaatagagcgtgcactggcggcgggttacaatccgcaaacgcaccccgatgatattgtttttacggcagatgttatcgatcaggcgacgcttgaacgagtcagtgaattgcaaattccggtgaatgcgggttctgttgatatgctcgaccaactgggtcaggtttcgccagggcatcgggtatggctgcgtgttaatccggggtttggtcacgggcatagccaaaaaaccaataccggtggcgaaaacagcaagcacggtatctggtacaccgatctgcccgccgcactggacgtgatacaacgtcatcatctacagctggtcggcattcacatgcacattggttctggcgtcgattatgcccatctggaacaggtatgtggtgctatggtgcgtcaggtcctcgagttcggtcaggatttacaggctatttctgcgggcggtgggctttctattccttatcaacagggtgaagaggcggttgataccgaacattattatggtctgtggaatgccgcgcgtgagcaaatcgcccgccatttgggccatcctgtgaaactggaaattgaaccgggtcgctttctggtagcgcaggctggcgtattaattactcaagtgcggagcgtcaaacaaatgggtagccgccactttgtgctggttgatgccgggttcaacgatctgatgcgcccggcaatgtacggtagttaccaccatatcagtgccctggcagctgatggtcgttctctggaacacgcaccaacggtggaaaccgtcgtcgccgggccgttatgtgaatcgggcgatgtctttacccagcaggaagggggaaatgtcgaaacccgcgccttgccggaagtgaaggcgggtgattatctggtactgcatgatacgggggcatatggcgcatcaatgtcatccaactacaacagccgtccgctgttaccagaagttctgtttgataatggtcaggcgcggttgattcgccgtcgccagaccattgaagaattactggcgctggaattgctttaa

SEQ ID NO: 29220 - DNA, 936 bp, Escherichia coli; identical to SEQ ID NO: 2265

SEQ ID NO: 29221 - DNA, 693 bp, Escherichia coli; identical to SEQ ID NO: 2266

SEQ ID NO: 29222 - DNA, 1419 bp, Escherichia coli
atggttactatcaatacggaatctgctttaacgccacgtcctctgcgggatacgcggcgtatgaatatgtttgtttcggtagctgctgcggtcgcaggattgttatttggtcttgatatcggcgtaatcgcccgagcgttgccgttcattaccgatcactttgtgctgaccagtcgtttgcaggaatgggtggtcagtagcatgatgctcggcgcagcaattggtgcgctgtttaatggttggctgtcgttccgcctggggcgtaaatacagcctgatggcgggggccatcctgtttgtactcggttcgatagggtccgcttttgcgaccagcgtagagatgttaatcgccgctcgtgtggtgttgggcattgctgtcgggatcgcgtcttacaccgctcctctatatctttctgaaatggcaagtgaaaacgttcgcggtaagatgatcagcatgtaccagttgatggtcactctcggcatcgtgctggcgtttttatccgatacagcgttcagttatagcggtaactggcgcgcaatgttgggggttcttgctttaccagcagttctgctgattattctggtggtcttcctgccaaatagcccgcgctggctggcggaaaaggggcgtcatattgaggcggaagaagtattgcgtatgctgcgcgatacgtcggaaaaagcgcgagaagaactcaacgaaattcgtgaaagcctgaagttaaaacagggcggttgggcattgtttaagatcaaccgtaacgtccgtcgtgctgtatttctcggtatgttgttgcaggcgatgcagcagtttaccggtatgaacatcatcatgtactacgcgccacgtatcttcaaaatggcgggctttacgaccacagaacaacagatgattgcgactctggtcgtggggctgacctttatgttcgctaccttcattgcggtctttacggtagataaagcagggcgtaagccggctctgaaaatgggtttcagcgtgatggcgttaggcactctggtgctgggttactgcctgatgcagtttgataacggtacggcttccagtggcttgtcctggctctctgttggcatgacgatgatgtgtattgccggttatgcgatgagcgccgcgccagtggtgtggatcttgtgctctgaaattcagccgctgaaatgccgcgattttggcatcacctgctcaacgacgacaaactgggtgtcgaatatgattatcggcgcgaccttcctgacactgcttgatagcattggcgctgccggtacgttctggctctacactgcgctgaacattgcgtttgtgggcatcactttctggctcattccggaaaccaaaaatgtcacgctggaacatatcgagcgcaaactgatggcaggcgaaaagttgagaaatatcggcgtctga

SEQ ID NO: 29223 - DNA, 762 bp, Escherichia coli; identical to SEQ ID NO: 2268

SEQ ID NO: 29224 - DNA, 837 bp, Escherichia coli
gtggacgtaagacagagcatccacagtacgcacgcaaaaacgctggatacccaggggctgcgcaatgaatttttggttgaaaaggtatttgtcgccgatgagtacaccatggtttacagccacattgaccgtattattgttggcggcattatgccggtaactaaaacggtttccgttggcggggaagttggtaaacaactcggcgtaagctatttccttgaacgtcgcgagttaggtgttatcaatattggcggtgccggtacgattactgtcgatggtcaatgctatgaaatcggtcaccgcgacgccctgtatgttggtaaaggtgcaaaagaagttgtctttgccagtattgataccgccactccggcgaagttttattacaattgcgcacccgcgcatacgacgtatcccaccaaaaaagtcacaccggacgaagtatctccagtcacgttaggcgataacctcaccagtaaccgtcgcacgattaacaaatattttgtcccggatgtgctggaaacctgccaattgagtatggggctgacggagctggctccaggtaacttgtggaacaccatgccgtgtcacacccacgagcgccggatggaagtttatttctatttcaatatggatgatgacgcctgcgttttccacatgatggggcaaccgcaagaaacgcgtcacattgtgatgcataacgagcaggcggtgatctccccgagctggtcgatccattccggcgtcggaaccaaagcttatacctttatctggggcatggtcggtgaaaaccaggtttttgatgatatggaccatgtggccgttaaagatttgcgctag

SEQ ID NO: 29225 - DNA, 1182 bp, Escherichia coli
atgaaagacgttgtgattgtcggggcgttacggacacctatcggctgctttcgtggtgcgttagcgggtcattccgccgtggaacttggcagcctggtcgtcaaagcgttaatagaacgtaccggcgttcctgcatatgcggtggatgaagtgattcttggtcaggtgttgactgcaggggcagggcagaatccggcaagacaatcggctattaaaggtggtcttcctaatagcgtttctgcaatcactattaatgacgtttgtggttccgggcttaaagcactgcatctggctactcaggcgatacagtgtggcgaggctgatattgtcatcgccggtggccaggaaaacatgagccgcgcaccacatgttctgactgatagccgcaccggcgcacagcttggcaatagccagttggttgatagtcttgtgcatgatgggttgtgggatgccttcaatgattatcatattggtgtcaccgccgaaaatctggctcgcgaatatggcatcagccgtcagttgcaggatgcttacgcacttagctcgcaacaaaaagcgcgagcggcgattgacgccggacgatttaaagatgagatcgtcccggtaataacccaaagtaacggtcagacgttggttgttgataccgatgaacagccacgcactgacaccagcgcagaagccttagcccgtttaaatccttcatttgatagtctcggttctgtgacagcgggtaatgcatcatccataaacgatggggcagctgcagtaatgatgatgagcgaagccaaagcacgagcgttgaatttacccgtgctggcccgcatccgcgcatttgccagcgttggtgtggatccggcattgatgggaattgcgccggtgtatgcgacccgccgttgcctggagcgtgttggctggcagttggctgatgtcgatcttatcgaggctaatgaagcgtttgctgcacaggcgctttcggttggcaagatgcttgaatgggatgagcgtcgggtcaatgtcaatggtggtgcgatcgcactcggtcacccgataggcgcttccggttgccgaatcctggtttctcttgttcatgaaatggtgaaacgtaatgcccgcaaaggactggcaacgctttgtatcggcggaggccagggtgtggcattgaccattgaacgtgacgagtag

SEQ ID NO: 29226 - DNA, 1230 bp, Escherichia coli
atgtctaatatttggtcaaaagaagaaactctgtggagtttcgcgctctacggcacagccgttggtgcaggcacgctcttccttcctattcagttaggttcggcgggggctgtggtcctgtttattactgctctggtcgcctggcctttaacatattggccacataaagccttatgccagttcatcctctcatcgaaaacatcagcaggtgaagggataacgggcgcggtaacacactactatggcaagaagattggtaatctgattaccacgctgtacttcatcgccttttttgtcgtcgtgttgatatatgcagtggcaattaccaactcacttacggaacaactggcaaagcatatggttattgatcttcgcatccgtatgttggtgagtctgggggttgtattaatcctgaatctcatttttctgatgggacgccatgcaaccattcgggtaatgggatttttggtattcccattgattgcctatttcttatttctttctatttacctggtcggtagttggcaacctgatctattaacaacccaggtagagttcaatcagaatacccttcaccagatatggatatcgattcccgtgatggttttcgcttttagccatacgcccattatttctacgtttgccatagacagacgtgaaaaatatggcgaacatgctatggataaatgcaaaaaaattatgaaagtcgcttatctcatcatctgcataagtgtattgttctttgtctttagctgcctgctttctattccaccttcgtatattgaagcggctaaagaagaaggggttaccattttatcggcgctttctatgctgccgaacgccccagcatggttgtcaatttccgggattattgtcgcagtagttgcgatgtcgaaatcattcttgggtacgtactttggcgttattgaaggtgccacagaggtcgtcaaaacaacattacagcaggttggtgtaaagaaaagtcgtgcatttaaccgcgcactatcaattatgttggtatcgctgattaccttcattgtttgttgcattaacccgaacgcgatttcgatgatttacgcgatcagcggcccgctcattgccatgatacttttcatcatgcctacgctgtcaacgtatctcatcccggcgcttaaaccctggcgttccatcggaaatctgattacgctgatcgtgggtattctgtgcgtatcggtaatgttctttagctaa

SEQ ID NO: 29227 - DNA, 756 bp, Escherichia coli
ttgagtgcgggacgcctgaataaaaaatctctgggtatcgtgatgttgttatcggttggactgcttttggcgggctgttcgggtagcaaatcatccgatacaggaacgtattccggctccgtttacaccgtgaaacggggggatacgctatatcgtatttcgcgcaccacgggaaccagcgtaaaagaactggcgcgactgaacggcatttcccccccttacaccattgaagtaggtcagaaactaaaactgggtggggcgaaaagtagcagtagtacacgtaaatcaaccgccaaatcaacgaccaaaaccgcatcggttacaccgtcatcagcggtaccgaaatcttcctggccgccagtagggcaacgttgttggttatggccaacgacagggaaagttatcatgccgtattcgacagcagatggcggcaataaagggattgatatctcagctccacggggtacacctatttacgccgcgggtgcaggaaaggtggtgtatgtgggcaaccagctgcgtggctacggtaatctcatcatgattaaacacagtgaagattacattacggcttacgcccataatgacacgatgctggtaaataatgggcaaagcgtgaaggctgggcaaaaaatcgccactatggggagcactgatgcggcatctgttcgcctgcatttccagattcgttaccgtgcaacggcaattgatccgctacgttacttgccgcctcagggcagcaagccaaaatgctga

SEQ ID NO: 29228 - DNA, 879 bp, Escherichia coli
atgtttgattttgcttcttaccatcgcgcagcaacccttgccgatgccatcaacctgctggctgacaacccgcaggccaaattgcttgccggtggctctgacgtactgatacagcttcaccatcacaatgaccgctatcgccatattgttgatatccacaatctggcagagcttcagggaataacacaggcggaagatggcgcgctgcgaatcggctccgcgacaacatttactcagctcattgaagatcctgtaactcaacgtcatctcccggcgttatgtgctgcggcctcatccattgccggaccgcagatccgtaacgtcgctacctacggtggaaatatttgcaacggtgccaccagcgcagattctgccacgccaacgctaatttatgacgcgaagcttgagatccactccccgcgcggtgttcgtttcgtcccgattaatggctttcacaccgggccgggcaaagtgtctcttgagcatgacgaaatccttgtcgcctttcattttccgccacagccgaaagaacacgcgggcagcgcgcattttaaatatgccatgcgcgacgcaatggatatttcaacaattggctgcgccgcacattgccgactggataacggcaatttcagcgaattacgcctggcatttggtgttgccgcgccaacgccgattcgctgccaacatgccgaacagactgcacaaaatgcgccattaaacctgcaaacgctggaagccatcagcgaatcagtcctgcaagatgtcgccccgcgttcttcatggcgggccagtaaagagtttcgtctgcatctcatccagacgatgaccaaaaaagtgattagcgaagccgtcgccgcggcggggggaaaattgcaatga

SEQ ID NO: 29229 - DNA, 480 bp, Escherichia coli; identical to SEQ ID NO: 2275

SEQ ID NO: 29230 - DNA, 1779 bp, Escherichia coli
atggagcttgcgactacgcagtcagtattgatgcaaattcaaccgacaattcagcgttttgccagaatgcttgccagcgttttgcagcttgaggttgagatcgttgatgaaaacttgtgtcgcgtcgccggaacgggcgcgtatgggaagtttcttggccgccagttgagcggcaactcacgcctgctccgccacgtcctggaaacgaaaactgaaaaagttgtgacacagtctcgcttcgatcccctttgtgaaggttgcgatagtaaagaaaattgccgcgaaaaagcatttctgggtacgcctgtcattttacaggatcgttgtgttggggtgataagtttgattgccgttacccacgagcaacaagaacatatcagtgataatttacgcgaattttccgattacgttcgccatatatccaccatttttgtttctaaacttctggaggatcagggaccaggagataacatcagtaaaatattcgcgaccatgatcgataatatggatcagggcgtgttagtggttgatgctgataatcgtgttcagtttgttaatcagacagctttaaaaacactcggtgttgtacaaaataatattattggaaaacctgttcgtttcagaccattaacatttgagagtaattttacccatggtcatatgcaacatattgtttcgtgggatgataaaagtgaattaatcattggtcagttgcataacatccagggccgacaactatttttaatggcgtttcaccaatcgcataccagtttttctgtagcaaatgcacctgatgaaccgcatattgaacaattggttggcgagtgccgtgttatgcggcaattaaaacgactcattagccgtattgcacccagcccatccagcgttatggtggttggtgaaagcggcacgggtaaagaagtcgtcgctcgtgcaatccataagttgagcggaagacggaataaaccctttattgctatcaactgtgccgcgattccggaacagcttctggagagcgaactgttcggttatgttaaaggcgcatttactggcgcttctgccaacggtaaaacagggttgattcaggcggcgaatacgggcacgctgtttctcgatgaaattggtgatatgccattaatgttgcaggctaaattactgcgcgctattgaggcgcgtgaaattctgccgattggtgccagtagcccaatacaagtcgacatccgcatcatttctgcaactaatcagaatttggcccagttcattgccgaaggtaaattccgcgaagatctcttctaccgacttaatgttatcccgataactcttccaccgctgcgtgaacgtcaggaagatattgaattactggtgcattactttttacatctgcatacccgtcgtctgggatcggtttatcctggcattgctcctgatgtcgtcgaaatattgcgtaagcatcgttggcccggaaacctgcgcgagttaagcaatttgatggaatatctggttaacgttgttccttcaggtgaagttatcgacagcacgctattgccgccaaatctgctgaataatggcacaacggagcaaagtgatgtaacagaggtcagtgaggcgcacctgtcactcgatgatgcgggcggcacggcgctggaggagatggaaaagcaaatgatccgcgaggcgctttcacgtcataacagcaagaaggaagttgctgatgaactgggcatcggcattgctacgctctatcgcaagattaagaaatatgagttgttaaacacataa

SEQ ID NO: 29231 - DNA, 1188 bp, Escherichia coli
atgaaaactgttaatgagctgattaaggatatcaattcgctgacctctcacctgcatgaaaaagattttttgttaacgtgggaacagacgccagacgaactgaaacaagtactggacgttgccgccgcgttaaaagcactgcgtgctgaaaacatctcaaccaaagtctttaatagtggattaggtatttccgtattccgcgacaattccacccgtacccgcttctcttatgcttccgcgcttaacctgctcggccttgcacaacaagatcttgacgaaggtaaatcacaaatcgctcacggcgaaaccgtgcgtgaaaccgccaatatgatctccttctgcgctgacgctatcggtattcgcgacgatatgtatctgggcgcaggcaacgcctatatgcgtgaagttggcgctgcacttgatgacggctacaagcagggtgtgctgccgcagcgtccggctttagtgaacctgcaatgcgatattgaccacccgactcagtctatggctgacctggcatggttgcgtgaacactttggttcgctggaaaacctgaaaggcaaaaaaatcgccatgacctgggcctactccccaagctatggcaaaccgctctctgtaccacaaggcatcataggtctgatgacccgcttcggtatggatgtcaccctggcccatccggaaggctacgacctgatcccggatgtcgttgaagttgctaaaaacaatgctaaagcctccggtggtagcttccgtcaggtcaccagcatggaagaagccttcaaagacgcagacatcgtttatccgaagtcatgggcaccttacaaagtgatggaagagcgtactgaattgctgcgtgcgaacgatcacgaaggcttaaaagcactggaaaaacagtgtctggcacagaacgcgcaacacaaagactggcattgtactgaagagatgatggaactgacccgtgatggcgaagccctgtacatgcactgcctgccagctgatatcagcggcgtatcctgcaaagaaggtgaagtgactgaaggcgtattcgaaaaataccgtatcgctacctacaaagaagccagctggaagccttatatcatcgccgcgatgatcctgtcccgtaaatacgccaaaccaggtgcactgctcgagcaactgctgaaagaagcgcaagaacgcgtgaaataa

SEQ ID NO: 29232 - DNA, 1197 bp, Escherichia coli
atgtccgttttctcattgaagattgatatcgccgataacaaatttttcaacggcgaaacatcaccgcttttttcgcaaagccaggcaaaactggcacgccagttccaccagaaaattgctggttatcacccaacaccgctttgtgcgctggacgatctcgcaaacctgtttggtgtaaagaaaattctcgtcaaagacgaatcaaaacgattcggtctgaacgccttcaaaatgctcggcggtgcgtacgccatcgctcaattattgtgtgaaaaatatcatcttgatatcgaaacgctgtcatttgagcacctgaaaaatgccatcggcgaaaaaatgactttcgcgactaccaccgacggcaaccacgggcgcggtgtggcatgggcagcacagcaactcggacagaatgcggtgatttacatgccgaaaggttctgctcaggaacgcgttgacgccattctaaacctcggtgccgagtgcatcgtcacggatatgaactatgacgataccgttcgcctgaccatgcaacacgcgcagcagcacggctgggaagtggtacaagacacggcatgggaaggttacaccaaaatcccaacctggatcatgcaaggctacgcaacactggcggatgaagccgtcgagcaaatgcgtgaaatgggcgtcaccccgacacacgttctgctgcaagccggtgtcggtgcaatggccggtggtgtgctgggttatctggtcgacgtctatagcccgcaaaatctgcacagcattattgttgaacctgacaaagctgactgtatttatcgctccggcgtcaaaggcgacatcgtcaacgttggcggtgatatggccaccatcatggcgggcctggcctgcggcgaacctaacccactgggctgggaaatcctacgtaactgcgccacccaattcatctcctgccaggacagcgttgccgcattaggtatgcgcgtgctgggtaatccgtatggcaacgacccgcgcatcatctccggtgaatccggcgctgtcggtttgggcgttctcgcagcggttcattatcacccgcaacgtcaaagcctgatggaaaaactggcgctgaacaaagatgccgtggtgctggttatcagcactgaaggcgacaccgacgtgaagcactaccgcgaagttgtctgggaaggcaaacacgctgtagcaccttaa

SEQ ID NO: 29233 - DNA, 1212 bp, Escherichia coli
atggctaagaatattccattcaaactgattcttgaaaaagcaaaagattaccaggcagacatgactcgcttcctacgcgatatggttgctattcccagtgaaagctgcgacgagaaacgcgtagtacatcgtattaaagaagagatggaaaaagtcggcttcgataaagttgaaatcgacccaatgggcaacgttctcggttatatcggccacggcccgcgtctggtggcaatggacgctcatatcgatacagtcggcattggcaacatcaaaaactgggacttcgatccgtatgaaggcatggaaaccgacgagctgatcggtggtcgtggtacttccgaccaggaaggcggcatggcgtctatggtatatgccggaaaaatcattaaagatctcggtctggaagatgaatataccctgctggtcaccggtactgtgcaggaagaagactgcgacggtctgtgctggcaatacattattgaacaatccggcattcgcccggaatttgtggtcagtaccgaaccaaccgactgccaggtataccgtggtcaacgcggtcgtatggaaattcgcattgatgttcagggtgttagctgccacggttcggcaccagaacgtggtgataacgccattttcaaaatgggtccaattcttggcgaattacaggaactgtctcaacgtctgggctatgacgaattcctcggcaaaggtacgctgactgtttctgaaatcttcttcacctccccaagtcgttgcgctgtagcagacagctgcgcagtttcaatcgaccgtcgtctgacctggggcgaaacctgggaaggcgcgctggacgagatccgcgctctacctgcagtacagaaagctaacgcggttgtttctatgtacaactacgaccgcccgtcctggactggcctggtttacccaaccgaatgctacttcccgacctggaaagtggaagaagatcacttcaccgttaaagcactggtgaatgcttatgaagggctgtttggtaaagcgcctgtcgttgataagtggaccttctcgactaatggcgtatccatcatgggtcgccacggcattccggtcatcggttttggccctggtaaagaaccggaagcgcacgcgccaaacgaaaaaacctggaaatctcacctggtaacctgtgccgctatgtacgctgcaatcccattaagctggctggcaaccgaataa

SEQ ID NO: 29234 - DNA, 1386 bp, Escherichia coli
atgcgcgtattgataaaaaacggcattgttgttaatgcagatggacaggcgaagcaggatttgctgattgaaagcgggattgttcgccagttgggtaccgatatttcgccgcaactcccttgcgaagaaattgatgcctctggctgttacgttttccctggcggcgtggatgtccatacgcatttcaatattgatgtcggcatcgcgcgcagttgtgatgatttttttaccggtacccgcgctgctgcgtgtggcggtacaacaaccattattgaccatatgggatttggcccaaatggctgccggttacgccatcaactggaagtttatcgcggttatgccgcccacaaagcagtcatcgactacagctttcacggtgtcattcaacatattaatcacgctatcctcgacgaaattccgatgatggttgaggaaggactgagcagttttaaactctatttaacctatcaatataaactcaacgatgatgaagtgttgcaggcattacgccgcttgcatgagtccggcgcgctgaccaccgtacacccggaaaatgacgcagctatcgccagcaagcgggcggagtttatcgccgcagggttaaccgcgccgcgttatcatgccttgagtcgacctctggaatgcgaagcggaagccatcgcccgcatgattaacctggcacaaattgccggtaacgccccgctctatatcgtgcacctgtctaacggcttaggtctggattatctgcgtcttgcccgtgcgaatcaccagccagtctgggttgaaacctgcccacaatatctcctgttggacgaacgcagttacgatacagaagatggcatgaagttcattcttagcccaccgctgcgtaacgtacgcgagcaggacaaactgtggtgtggcatcagcgatggtgcgattgacgtggtggcaaccgatcactgcaccttctcgatggctcaacgcctgcaaatttctaaaggcgatttcagccgctgcccaaatggcttacccggtgtggagaaccgcatgcaactgctgttctccagtggcgtgatgacgggacgtatctcaccggagcgttttgttgagttaaccagtgcaatgcccgccaggctgtttggcctgtggccacaaaaaggattattagcgcccggttccgatggcgacgtggtgattatagacccacgtcagagccaacaaattcagcatcgccatctccacgacaacgctgactactcgccatgggaggggtttacctgtcagggcgcgattgtcagaaccttatcccgtggtgaaacgattttctgcgacggcacctttacaggcaaagccgggcgaggtcgtttcctgcgacgcaaaccgtttgtccctcccgtgctctaa

SEQ ID NO: 29235 - DNA, 933 bp, Escherichia coli
atgagtaagaaaattgttctcgccctgggcgggaatgcgctgggcgatgacctggctgggcaaatgaaagcggtaaaaattacttctcaggcaattgttgatttaattgcccagggacatgaggtcatcgtcactcatggcaacgggccacaggtgggcatgattaaccatgcctttgaagctgcagcaaaaactgaagcgcactcgccaatgctgccgatgtctgtctgtgttgccttaagccagggttatattggttacgatctacaaaacgccttaagagaagaactgctttctcgtggcattaataaacctgtagcaacgctggttacccaggtcgaagtcgatgctaacgatccggcattcctcaacccgaccaagccgatcggttcgttctttaccgagcaagaagcagagctactgacaaaacagggttacactctgaaagaagatgcgggtcgcggctatcgccgtgtcgttgcttcgccaaaaccggttgatatcattgaaaaagaaacggttaaagctctggtagatgccggacaggtggtgatcaccgttggcggtggtggtatccctgttattcgtgaaggtaaccatctgcgtggtgccagcgcggttatcgataaagactgggccagcgcccgtttagcagaaatgattgatgccgatatgctgatcattctgactgcggtagaaaaagtggccattaacttcggaaaagagaatgaacagtggctcgatcgcctgtcgttaagtgatgctgaacgctttatcgaagaaggtcattttgcgaaaggttctatgctgcctaaagtggaagctgccgcctcgtttgctcgctctcgcgcaggtcgtgaagcactgattaccgtattgagcaaagcgaaagaagggattgaaggcaaaaccggaacggtgatttgtcagtaa

SEQ ID NO: 29236 - DNA, 1626 bp, Escherichia coli
atgaatattttcacagaggctgcaaaactcgaagagcaaaattgtccgtttgcgatggcgcaaattgttgatagccgaggctcaaccccccgccattctgcacaaatgttagtgcgcgccgatggttctatcgtcggtacaattggtggcggaatggttgaacggaaggtgattgaagagtcgcttcaggcattgcaggaacgtaagccgcgattattccatggacgtatggctcgtaacggtgcggatgctgtcgggtcagattgtggaggtgcaatgtcagtatttatcagcgtccatggtatgcgtccacgtctggtgttgattggtgcggggcatgtcaaccgggcgatagcccagagtgcggcgctattaggatttgatatcgccgttgctgatatttatcgcgaaagcctcaatcctgaactattcccaccatcaaccacgcttctccatgctgagtcgtttggtgcggcagtggaagcactggatattcgccctgataattttgtcctgattgccacgaataatcaggatcgtgaagccctcgacaaactcattgaacaacccattgcatggctggggttgctggcaagtcgccgcaaggttcagcttttcctgcgccaattgcgtgagaaaggcgtggctgaagaacatattgcccgtttacatgcgcccgttggttacaacataggtgcggaaacgccgcaggagatcgccatcagcgtgctggcagaaatattacaggtgaaaaataacgcgccgggtgggctgatgatgaagccttctcatccttccggacaccagctggtggtgattcgcggtgcgggggatatcgccagtggtgtagcgctacgtctgtatcatgcgggttttaaagtgatcatgttggaagtggaaaaaccgacagtgattcgttgtaccgtggcgtttgcccaggccgtgttcgatggcgaaatgacggtcgaaggcgtcaccgcccgcctggcaaccagctctgcggaagcgatgaaacttaccgaacgcggatttatccctgtgatggtagatcccacctgttcattgcttgatgaactgaaaccgctttgcgtggtggacgctattctggcgaaacagaatttgggaacgcgggcagatatggcaccagtaacaatcgcgcttgggccgggctttactgcagggaaggattgtcatgcggtaattgaaacaaatcgcgggcactggctcggtcaggtgatttactctggttgtgcgcaggagaataccggtgttcccggcaatattatggggcataccacccgacgggtgatccgtgctcctgctgcaggcattatgcgatccaacgtgaaattaggcgatctggtgaaagagggcgatgtcattgcctggattggtgagcatgaaattaaagcaccgttgacggggatggtgcgtggcttgttgaacgacggactggccgtggtcggtggttttaaaattggtgatatcgatcctcgtggtgaaacggctgatttcaccagcgtttctgataaagcccgggcgattggcggcggcgtacttgaggcgttaatgatgttgatgcatcagggcgttaaagcgacaaaagaagtgctggaagtggcttaa

SEQ ID NO: 29237 - DNA, 771 bp, Escherichia coli
gtgaaaagtataattgacccatcggcattattcattgatttaggcgcgcagaaacgtcccactgtgatttctattgttggtgctggggggaaaaccagcttgcttttttggctggcagaactgttccaggcgagtggcaggcgtgtattaatcactacgacgacacatatgtttatgccaacatctcactggcccgtggttttctgtcgtgatcccgccatgcttcctcatgcgtcttttatatcccccatttcattttgttttcacagctggaaagcgaaccagggaaaagtgcagggatttacgccagaagtgattgatgcactggtacaacgaccagagtgtgacgtaattctcattgaggcagatggctcgcgtggaatgccgttaaaagcgcctgatgagcacgaaccttgcatacctaaaagcagttgctgcgtgattgctgtgatgggaggacatattttgggtgcgaaagtgagcacagaaaatgtccatcgctggtcgcagtttgctgatattactgggttaacacctgatgcacccttgcaactgagcgatctcgttgcgctggttcgccaccctcagggggcgtttaaaaacgtaccgcaaggttgtcggcgagtctggttcattaaccgtttttctcaatgtgagaatgcgattgcgcaaagcgagctccttcaaccgctgcaacaacacaacgtagaggcaatctggctgggcgatatacaagaacatcctgcaatcgcgcgcagatttgtgaattag

SEQ ID NO: 29238 - DNA, 579 bp, Escherichia coli
atgtcagccatcgactgtataattaccgccgcaggattatcatcaagaatggggcaatggaaaatgatgttaccctggcaacagggaacaattcttgatacaagtatcaaaaatgcgttgcagttttgtagccgaattattttagtcaccggctatcgtggtaatgaactgcacgaacgttatgcgaaccagagcaatatcactattatccacaacccagattatgcgcagggtttactgacatcagtaaaggccgcagtacccgcggtgcaaacagaacattgttttctcacccacggagatatgccaaccctcaccatcgatatttttagaaaaatctggtcgttacgaaatgatggcgcaatactgccactccataatggcatccccggccatccgattttagtgtcaaaaccatgcctgatgcaggcaatccagcgacccaatgtcaccaatatgcgtcaggcactccttatgggagaacattattccgtcgaaatagaaaatgcagaaataattttagatattgatactccggacgactttattacagcgaagaaaaggtatactgaaatttag

SEQ ID NO: 29239 - DNA, 3099 bp, Escherichia coli
atgggggatattatgcgtcccattccgtttgaggaacttttgacgcgcatatttgatgaataccaacaacaacgctcaatctttggtattcccgagcaacagttttactcacccgtaaaaggtaaaactgttagcgtcttcggtgaaacctgtgccactcccgtcggccctgccgctggcccgcacacgcaacttgcgcaaaacatcgtcacctcctggctgactggcggacgcttcatcgaactaaaaaccgtccaaattcttgaccgcctggagctggaaaagccctgtatcgatgccgaagacgagtgctttaacaccgaatggtctaccgaatttaccctgcttaaagcctgggatgaatacctcaaagcctggtttgccctgcaccttctcgaagcgatgttccagccttctgattccggtaaatcgttcatctttaatatgagcgtcggttacaacctcgaaggtattaagcaaccgccgatgcagcagttcatcgacaatatgatggacgcatctgaccatccgaaattcgctcaataccgcgatgcacttaataagctactccaggatgaggcatttttagcccgccacggattgcaggaaaaacgcgaaagcttgcaagccttacccgctcgcatccccaccagcatggtacaaggggttaccctctccaccatgcacggctgtcctccgcatgaaatcgaagccatttgccgctacatgctggaagaaaaagggctcaacacctttgtgaaactcaacccgaccttactggggtacgcgcgtgttcgtgagatcctcgatgtctgcggtttcggttacatcggcttaaaagaagagtcatttgatcacgacctcaagctgacgcaagcactggaaatgctggaacgcctgatggcactggcaaaagaaaaatcactcggctttggcgtaaaactgactaacactctcggcaccatcaacaataaaggcgcattgcccggtgaagagatgtatatgtcaggccgtgcgctgttcccgctctccatcaacgttgcagcagttctctctcgcgcctttgacggcaaactgcccatttcttattccggtggtgccagtcagctgactatccgcgatatttttgatactggtattcgccctattactatggcaaccgacctgctgaaacctggcggctatctgcgcttaagtgcctgcatgcgcgagctggaaggctccgacgcctggggacttgaccatgttgacgtcgaacgactgaacagactggcagcagacgcgttaaccatggaatacacccagaaacactggaagccagaagagcgtattgaagtggctgaagacctgccgctgaccgattgctacgttgccccctgtgttactgcctgcgctatcaagcaagatattccggaatacatccgtctgcttggcgaacaccgctatgccgacgcgctggaactcatctatcaacgcaacgccctgcccgccattaccggtcatatttgcgatcaccagtgccaatacaactgtacccgcctggattacgacagtgcgctgaatatccgcgaactgaaaaaagtcgcgctggaaaaaggttgggaggaatataagcaacgctggcacaaaccagccggttctggttcacgccatccggttgccgtgattggtgcaggtccggcgggtctggccgcaggttacttccttgccagagcgggccatccggttacgctgtttgaacgcgaagccaatgcgggcggcgtggtgaaaaatatcattcctcagttccgtattcctgcagagttaattcagcacgatatcgattttgttgccgatcacggcgtgaaatttgagtacggttgctcacccgatttgaccgttgaacagttaaaaaatcagggcttccactatgttctgattgccaccggtaccgataaaaatagcggtgtgaaactggcgggcgacaaccaaaatgtctggaaatcactccccttcctgcgtgaatacaacaagggcaccacgctcaagctgggcaaacatgtggtcgttgtcggggcgggtaacaccgcaatggactgcgctcgtgcggcgttacgcgttccaggcgtagaaaaagcaacggtcgtttaccgtcgttcactgcaagagatgccagcatggcgcgaagagtatgaagaagcgttgcacgacggcgtggagttccgtttcctgaataatccggaacgtttcgatgctgatggcaccttaaccttgcgcgttatgtcgcttggcgaacctgatgagaaaggtcgtcgccgtccggttgaaaccaacgaaacagtaacactgcatgtagacagcctgatcaccgccattggtgaacagcaggatactgaagccctgaatgcgatgggcgtgccgctggacaaaaacggctggccagacgtcgaccataatggcgaaacgcgtctgagtgacgtctttatgatcggcgacgtacagcgcggaccatcctccattgtcgctgctgtcggaaccgcgcgtcgggcgaccgatgccatcctgagtcgggaaaatatccgttcccaccagaacgataaatactggaataacgtcaatccggcggaaatctatcaacgtaaaggcgatatctctgtcactctggtgaacagtgacgatcgtgatgcgtttgtcgcgcaggaagccgctcgctgccttgaatgtaactacgtttgcagcaagtgtgtggatgtctgcccgaaccgcgccaacgtatccattacggtcccaggcttccagaaccgtttccagacgctgcacctcgacgcttactgtaacgaatgtggcaactgcgcccaattctgcccgtggaacggtaaaccgtacaaagacaaaatcaccgtcttcagcctgtcgcaagactttgataacagcagcaacccaggcttccttgtggaagattgccgggtacgcgtacgtctgaataaccaaagctgggtgttaaacatcgacagcgaaggtcagttcaacaacgtaccaccggagctgaacgatatgtgccgtatcatcagccatgtccaccagcatcatcattatctgctgggccgcgtggaggtgtaa

SEQ ID NO: 29240 - DNA, 1329 bp, Escherichia coli
atgttgattctgaagaatgtcaccgcagtgcagttacacccggcgaaagtgcaggaaggcgttgatatcgccatcgaaaatgatgtgattgtcgctatcggcgatgccctgacgcaacgctaccccgatgccagctacaaagagatgcatggtcggattgtgatgccgggaattgtctgctcgcataaccatttttactcggggctttcccgcggaattatggcaaacatcgccccctgcccggatttcatctcaacgctgaaaaatctctggtggcggctcgatcgcgcccttgatgaagagtcgctctattacagcggactgatttgttccctggaagcgattaagagcggatgtacatcggttatcgatcaccatgcctctccagcctatatcggcgggtcgctctccacattgcgcgacgcatttttaaaagttggcctgcgcgcgatgacctgttttgaaactactgaccgtaacagcggcatcaaagagttgcaggaaggtgtagaagaaaacatccgcttcgcccgtcagattgatgaggcgaagaaagcagcaaccgagccgtatctggtggaagcacatatcggcgctcacgcgccgtttaccgtaccggatgccggtctggagatgctgcgtgaagccgtgaaaagcacaggtcgtggtttgcatattcacgctgcggaagacctttacgacgtttcctacagtcaccattggtacggcaaagacctgctggcacgactggcgcaattcgatctcatcgacagcaaaacgctggtcgctcatgggctgtacttgtcgaaagatgacatcgccctactcaatcagcgcgatgcgttcctggtgcataacgcccgttcaaacatgaacaaccatgtcggctacaaccatcaccttagcgacatccgcaatctggcgttgggaacggacggcattggttcggacatgtttgaagagatgaaatttgccttctttaaacatcgcgatgcgggtggcccgctgtggcctgacagttttgccaaagcactggctaacggcaacgaactgatgagccgcaactttggcgcgaaatttgggcttctggaagccggttacaaagccgatttaaccatttgcgattacaactcgccaacgccgctgctggcagacaatatcgccgggcatatcgctttcggtatgggctcaggcagcgttcacagcgtgatggtcaatggtgtgatggtctatgaagaccgtcagtttaacttcgattgcgattccatttatgcgcaagccagaaaagccgctgccagtatgtggcgtcggatggatgcgctggcataa

SEQ ID NO: 29241 - DNA, 780 bp, Escherichia coli
atgattgaacaatttttcagacccgactctgtcgaacaagcgctggaactgaagcgccgctaccaggatgaagccgtctggttcgccgggggcagcaaactcaacgctacaccaacccgtaccgataaaaagattgccatttccttgcagaatctggagctggactggattgactgggataacggtgcactacgaattggcgcaatgtctcgcttgcagtcactgcgtgatgcacgatttattcctgcagcactgcgtgaagctctcggttttgtttactcacgccatgttcgtaatcagtcgaccattggtggtgaaatcgccgcccggcaggaagagtcggtgctgcttcccgtcctgctggcactggatgctgaactggtttttggcaacggcgaaacgctgtcaatcgaggactacctggcctgcccatgcgatcgcctgttaaccgaaattatcattaaagatccgtatcgcacctgtgcgactcgcaaaattagccgttctcaggcaggtttaaccgtcgtgacggcagccgttgcaatgacagaccacgacggtatgcgaattgcgctggatggcgtcgccagtaaagcactgcgtctgcacgatgttgaaactcaaaatctggaaggcaatgcacttgaacaggctgtcgccaacgccattttcccgcaggaagatttgcggggcagcgtggcctataaacgctatatcacgggagttctggtagccgacctgtatgccgactgccaacaggctggggaggaagccgtatga

SEQ ID NO: 29242 - DNA, 2871 bp, Escherichia coli
atgatcatccactttactttaaatggcgcgcctcaggagctaaccgttaatccaggcgaaaacgtgcaaaagctgttgtttaacatgggaatgcactctgtacgcaacagtgatgatggttttgggtttgccggttctgacgcaattatctttaacggtaatatcgttaacgcgtccttgcttatcgccgcacagttagagaaggcagatattcgtaccgcagaatctctgggcaaatggaatgagttaagtctggttcaacaggccatggttgatgttggcgtggtgcagtctggttataacgatccagctgcggctctgattatcaccgatcttctcgatcgcatcgacgcacctacccgcgaagagatcgacgacgcactctcaggtctgtttagccgcgatgctggctggcagcaatactatcaggtcattgaactggcggttgcacgtaaaaataatccgcaggccaccattgatatcgctccgactttccgtgacgaccttgaagtcattggcaagcattatcctaaaactgatgccgcgaaaatggtgcaggcgaaaccctgctatgttgaagatcgcgtaacggctgacgcctgcgtcataaaaatgttacgtagcccacacgctcacgcactgattactcatctggatgtcagcaaagctgaagccttaccgggcgtcgttcacgttattactcacctgaattgcccggatatttactataccccgggtggtcagagcgcaccggaaccgtcaccgcttgaccgccgaatgttcggcaagaaaatgcgtcacgtcggcgatcgcgttgctgcggtagtagccgaaagtgaagacattgcgctcgaagcactgaagctcatcgacgttgaatatgaagtgcttaagccggtaatgtcgattgacgaggcaatggcggaagatgcgcctgtcgtgcacgatgaaccggtggtgtatgttgctggtgcaccagatactctggaagatgataacagccatgcggcccagcgcggcgagcatatgatcatcaacttcccgatcggttctcgcccacgcaaaaatatcgctgccagtattcatggtcatattggcgatatggacaaaggctttgccgatgccgatgtgatcattgagcgaacctataactcaacgcaggcgcagcagtgcccgactgaaacacatatctgctttacccgtatggacggcgatcgtctggtgatccacgcctccacccaggtaccatggcacttacgccgccaggtcgcgcgcctcgtgggcatgaaacaacataaagttcatgtcattaaagaacgtgtaggcggcggttttggctctaaacaggacatcctgctggaagaagtgtgcgcctgggcaacttgcgtgaccgggcgtccggtacttttccgctacacccgtgaagaagagtttattgctaacacctctcgtcacgtcgcgaaagtcaccgtcaaactgggcgcgaaaaaagatggtcgcctgacggcagtgaagatggatttccgcgccaacacgggtccttacggtaaccactcactcaccgtaccgtgtaacggaccggcgctgtcgctgccgttatatccatgcgataacgtcgattttcaggtcaccacctactacagcaacatttgcccaaatggtgcttatcagggttatggcgcaccgaaaggtaacttcgctatcaccatggcattagcggaactggctgaacagttacagatcgaccaactggaaattatcgaacgtaaccgggtacacgaagggcaagagctgaaaattctcggtgcaatcggtgaaggtaaagcgccgacctccgttccttccgccgccagctgcgcactggaagagatcctgcgtcagggtcgcgagatgatccaatggtcttcaccaaaaccgcaaaatggtgactggcacatcggtcgcggcgtcgccattatcatgcagaaatcgggtatcccggatatcgatcaggctaactgcatgatcaaactggaatcggatggcacctttatcgttcattccggtggtgcggatattggtactggtctggatactgtggtgaccaaactggcagcagaagtgctgcactgccccccgcaggacgtgcatgttatctctggtgataccgatcatgcactgtttgataaaggcgcatatgcctcgtccggtacttgcttctcgggtaacgctgcgcgtttggcagcggaaaatctgcgggagaaaatcctgttccacggcgcgcaaatattgggtgagccagtggcagatgttcaactagcaacgccgggcgtcgttcgcggcaagaaaggcgaagttagtttcggagagatagcccataaaggcgaaaccggcaccggctttggttcactggtgggaactggcagttatatcacacctgatttcgccttcccgtatggcgcaaacttcgctgaagttgccgtcaacacgcgtacgggtgaaatccgcctggataaattctacgccttgctggactgcggtacaccggtcaatccagagttagcgttgggacaaatctacggtgccactctgcgagctatcggccacagtatgagcgaagagatcatttatgacgccgaaggtcacccgttaacgcgtgatttacgcagttacggcgcaccgaaaattggtgacattccgcgtgatttccgcgctgtgctggtgccgagcgacgataaagtcggcccattcggggcgaaatcgatctcggaaatcggtgtaaatggcgcagctccggcgattgctaccgcaattcacgatgcctgcggcatctggttacgcgaatggcatttcacaccggagaaaatactcaccgcgctggaaaaaatataa

SEQ ID NO: 29243 - DNA, 1401 bp, Escherichia coli
atgtctgatataaaccatgcaggttctgaccttatatttgaactggaggatcgccctccctttcatcaggctctcgtaggtgccattacccatctgttggcaattttcgttccgatggtaacccccgcgttaatcgtgggtgcggccttacagctttccgctgaaacaactgcctatcttgtttctatggcgatgatcgcctctggtattggtacctggttacaagtaaaccgctacggcatcgtcggttctggtttactttcaattcagtcagtcaatttttcatttgttacggtcatgattgcgctgggtagcagcatgaaaagcgacggttttcacgaagagttaatcatgtcgtcgctactcggcgtctccttcgttggcgcatttctggttgtcggctcttcttttatcctgccctatttacgtcgggttattacgcctaccgtcagcggcattgtggtgctgatgatcggcttaagtctgattaaagttggcattattgattttggcggtggttttgcagctaaaagcagcggtacgttcggcaattacgagcatctcggcgttggcttattggttttgattgtggtgatcggctttaactgctgccgcagtccgttgctacgcatgggtgggatcgccattgggctatgtgtcggctatatcgcatcgttatgcctgggcatggtggatttcagcagtatgcgcaatttgccgttaatcaccatcccgcatccgttcaaatacggctttagttttagcttccatcagttcctggtggttggcacgatttatctgcttagcgtgctggaagctgtcggcgatatcaccgccacagcaatggtttcccgccgccccattcagggggaagagtatcagtcccgactgaaaggcggcgtgctggcagatggtctggtttctgttatcgcctccgctgtcggttcattaccattaaccacgtttgcgcaaaataatggggttattcagatgactggcgtcgcttcacgttatgtcgggcgaaccatcgcggtaatgctggttatcctcggcttatttccgatgattggcggcttcttcacgaccattccctcagcagttctgggaggcgcaatgacgttgatgttttccatgattgccatcgcagggattcgcatcatcatcaccaacggtttaaagcgccgtgaaacgcttattgtcgccacgtctttaggtttagggcttggtgtctcctacgatcccgaaatttttaaaatattgccagcctctatttatgtattagttgaaaaccctatttgtgctggcgggttaactgcgattttattaaatattatcctccctggtggctaccgacaggaaaacgttctgcctggtattacctcagcggaagagatggattaa

SEQ ID NO: 29244 - DNA, 1317 bp, Escherichia coli
atgtcaggagaacacacgttaaaagcggtacgaggcagttttattgatgtcacccgtacggtctataacccggaagaaattgcctctgcgctgcggtttattgaggatggtttattactcattaaacagggaaaagtggaatggtttggcgaatgggaagacggaaagcatcaaattcctgacaccattcgcgtgcgcgactatcgcggcaaactgatagtaccgggctttgtcgatacacatatccattatccgcaaagtgaaatggtgggggcctatggtgaacaattgctggagtggttgaataaacacaccttccctactgaacgtcgttatgaggatttagagtacgcccgcgaaatgtcggcgttcttcatcaagcagcttttacgtaacggaaccaccacggcgctggtgtttggcactgttcatccacaatccgttgatgcgctgtttgaagccgccagtcatatcaatatgcgtatgattgccggtaaagttatgatggaccgaaacgcaccggattatctgctcgacactgccgaaagcagctatcaccaaagcaaagaactgattgaacgctggcacaaaaatggtcgtctgttgtatgcgattacgccacgcttcgcccctacctcatctcctgaacagatggcgatggcgcaacgcctgaaagaagaatatccggatacatgggtacatacccatctctgtgaaaacaaagatgaaattgcctgggtgaaatcgctttatcctgaccatgatggttatcttgatgtttaccatcagtacggcctgaccggtaaaaattgtgtctttgctcactgcgtccatctcgaagaaaaagagtgggatcgtctcagcgaaaccaaatccagcattgctttctgtccgacctccaacctttacctcggcagcggcttattcaacttgaaaaaagcatggcagaagaaagtcaaagtgggcatgggaacggatatcggtgccggaacaacttttaacatgctgcaaacgctgaacgaagcctacaaggtattgcaattacaaggctatcgcctctcggcatatgaagcgttttacctggccacgctcggcggagcgaaatctctgggccttgacgatttgattggcaactttttacctggcaaagaggctgatttcgtggtgatggaacccactgccactccgctacagcagctgcgctatgacaactctgtttctttagtcgacaaattgttcgtgatgatgacgttgggcgatgaccgttcgatctaccgcacctacgttgatggtcgtctggtgtacgaacgcaactaa

SEQ ID NO: 29245 - DNA, 1368 bp, Escherichia coli
atgtctggagacatcctacaaacaccggacgcaccaaagccacagggcgcgctggataattattttaaaattaccgctcgtggcagtaccgttcgtcaggaagtactggctggcttaacgacctttctggccatggtttattccgttatcgtcgttccgggaatgctgggcaaagcaggttttcctcccgcagctgtgtttgttgccacctgtctggtcgcgggcttcggctcgttgctgatggggttatgggccaatttgccaatggcgattggttgcgctatttccttgacggcgtttaccgcattcagtctggtactcgggcaacaaattagcgttcctgtcgcactgggcgcagtctttctgatgggcgtcatcttcaccgctatttccgtaaccggtgtgcgtacctggatcttacgtaatttgccgatggggatcgctcacggtacaggtatcggtatcggcctgtttctgctgctgattgctgctaacggtgtgggaatggttatcaaaaacccgattgaaggcttgccagtggcgctcggtgcctttacctccttcccggtgatgatgagcttactggggctggcggtcatcttcggtctggaaaagtgccgcgtacccggcgggatcttgttggtgattattgcaatttcgatcatcggcttaatctttgacccagcggtgaagtaccacggtctggtggcaatgccaagcctgactggcgaagatggtaagtctctgattttcagcctcgatattatgggcgcactccagccaactgtacttccgagtgtactggcattggtgatgaccgcagtgttcgacgccactggcaccatccgtgccgtcgccggtcaggcgaatttgttggataaagacaaccagatcatcaacggcggcaaagccctgaccagtgactcagtaagttcaatattctccggcctggtgggcgcagcgcccgcggcggtttatatcgaatcagcggcaggaaccgccgccggggggaaaaccggtttaaccgcaaccgtggttggtgtgttgttcctgatgattctgtttttatcaccgttatcgtttctgatccccggttatgccacagctcccgcactgatgtacgtaggtttgctgatgttaagcaacgtctcgaagctggatttcaacgattttattgacgcaatggctggcctggtgtgtgccgtgttcatcgttctgacttgtaatatcgttaccggtattatgctgggctttgtaacactggtggtgggtcgcgtctttgcgcgcgaatggcaaaagctgaatattggtacggtgatcattactgccgcactggtcgcgttttacgcgggtggttgggctatctaa

SEQ ID NO: 29246 - DNA, 489 bp, Escherichia coli
atgaaatcgttaattatcgttaatccggctgactgtattggctgccgtacttgtgaagtggcctgtgtggtcgctcacccttcagaacaggagttgaatgccgatatctttttaccccggctgaaggtacaacggctggatagcatcagtgcgccggtgatgtgccatcagtgtgaaaacgccccttgtgttggcgcttgccccgtgggggcgctgacgatgggcgagcaggtggtgcaggccaattctgcccgttgtattggctgtcagagttgcgttagcgcgtgcccgtttgggatgatcaccattcagtcattgccgggtgatacccggcaacaaatcgtgaaatgcgatctctgtgaacagcgggaagaggggccagcctgcgttgaatcttgcccgacacaggcgttgcagttgctgactgaaagagaactcaggcgtatccgccagcagcgtattgctgccagcggcgcgaatcctctttga

SEQ ID NO: 29247 - DNA, 1920 bp, Escherichia coli
atgaataagtttatcgctgctgaagctgcggaatgtataggctgccatgcctgtgaaattgcctgtgcggtagcacacaatcaagaaaactggccgctgagtcacagtgactttcgaccgcgtatccacgttgtagggaaaggccaggctgcgaatccggtggcctgccatcactgcaacaatgccccttgcgttacggcttgtccggttaatgctctgactttccagtccgatagcgtacaactggacgagcaaaaatgtattggttgtaaaagatgcgcaatcgcttgcccctttggcgtcgttgagatggtcgatacgattgcacagaaatgcgacctttgtaaccagcgcagttccggcacgcaagcctgtattgacgtctgcccaacacaggcgttacggctgatggacgataaagggttgcagcagataaaggtggcccgccagcgcaaaacggcagcaggaaaagcgtcatcagacgctcagccatctcgcagtgcagcgttgctccccgttaactcgcgtaaaggcgcagataaaatttcagcgagtgaacggaaaacccactttggcgaaatctattgcgggctggatccacaacaagcgacttatgagagtgaccgctgtgtttattgtgccgaaaaagctaactgcaactggcattgtccgctgcataacgctattccggattacatccgtctggtacaggaaggaaagattattgaagcggcagaactttgccaccagaccagttccttacccgaaatctgcggcagggtatgtccacaggaccgtctttgtgaaggtgcatgtactttgaaagatcactctggcgcagtctctatcggtaatctggaacgctacatcaccgatactgcgctggcgatgggctggcgtcccgatgtcagcaaagttgttccccgtagcgaaaaagtggcggtgattggcgctggacctgcaggattagggtgtgctgatattctggcgcgcgcgggagttcaggttgatgtctttgatcgccatccagaaattggcggtatgctgacttttggcattcctcctttcaaactcgataaaacggtattaagccagcggcgagagatattcaccgcaatgggaatcgactttcatcttaactgtgaaattggccgcgatatctctttcaacgaattaacggcggaatatgatgctgttttcctcggcgtggggacttacgggatgatgcgagcagatctgccgcatgaagatgcgcctggtgtcattcaggcgttaccgttcctgaccgcccatacccgccagctcatgggattgccggagtctgcagagtatccgctgacggatgtggaaggtaagcgagttgtggtattgggcggtggcgatacgacaatggattgtttgcggacttccatccgccttaatgccgccagcgtgacctgtgcgtatcgtcgtgatgaagtcagtatgccgggctcgcgcaaagaggtggtcaatgcccgcgaggaaggtgttgagtttcagttcaatgttcagccgcaatatatcgcttgtgatgaagatggacgcttaacggcggtgggcctgattcgtaccgctatgggtgagccggggccggatggtcgccgtcgtcctcgtccggttgcgggttcagagtttgaattgcccgccgatgttctcattatggcctttggtttccaggcacataccatgccgtggttgcagggcagcggaattaaactcgataaatggggcctgattcaaaccggcgacgtcgggtatttacctacccagacgcatctgaaaaaagtctttgctggtggtgatgcagttcatggcgcggatctggttgtcactgcaatggccgcaggaaggcaggcggcgcgcgatatgttaactctgtttgatacgaaggcatcgtga

SEQ ID NO: 29248 - DNA, 1449 bp, Escherichia coli
atgagcgccatagattcccaacttccctcatcttctgggcaagaccgcccaactgatgaggttgaccgcatattatcactaggaaagctgatcatactcggtctgcaacacgtccttgtcatgtacgcaggtgcagtcgctgttcctcttatgattggtgaccgactgggcctctcaaaagaagctattgcgatgctcattagctcggatctcttttgctgcgggatcgtcacattattgcaatgtatcggtatcggccgctttatggggatccgcctgccggtgattatgtcggtgaccttcgccgctgtaacaccaatgatagccattggtatgaacccggatatcggcctgctggggatattcggtgccactatcgccgcgggttttatcaccacattattagcgccacttatcggtcgcttgatgcctttattcccgccactggttaccggtgtggtgattacttctatcgggcttagcatcattcaggtgggtattgactgggccgccggaggtaaagggaatccgcaatatggtaatcccgtttatttaggtatctcctttgccgtcttaatttttatcttgctcattactcgctatgcgaaaggatttatgtccaacgtcgccgtattactggggattgtatttggctttttactttcgtggatgatgaatgaagtcaatttatccgggctacatgatgcttcatggtttgcgattgtcacgccgatgtcatttggtatgccgattttcgatcccgtttccattctgaccatgactgccgtgttaatcatcgtgtttatcgagtcgatggggatgttcctggcactgggtgaaatagtcggtcgtaaactctcttcacacgatattattcgcgggctgcgtgtcgatggtgtagggacaatgataggcggaacgtttaacagcttcccccacacgtcattttctcaaaacgttggcctggttagcgtgacgcgcgttcatagccgctgggtgtgcattgcttccggtatcattttgatcctgttcggcatggtgcccaaaatggcggtgctggtggcctcgattccgcaatttgtgctgggcggcgcggggctggtgatgttcggcatggtactggcgacagggattcgaattctgtcgcgctgtaactacaccactaaccgttacaacctctatattgtggcgatcagtctcggtgttggcatgacgccaacgctctctcacgatttcttttctaagttaccggccgtactgcaaccgttgctgcatagcggcattatgctcgcaacccttagcgccgttgtgctgaacgtcttctttaatggctatcagcatcatgctgatctggtgaaggaatccgtctctgataaagatttaaaagtcaggacagtacgtatgtggcttctgatgcgcaagctgaagaaaaatgagcatggagaataa

SEQ ID NO: 29249 - DNA, 126 bp, Escherichia coli
atgaatcttttaatgcgcgctatattcagtctgctgttgctttttactctctctattcctgtcatttctgactgtgttgtaatggccattgaaagtcgcttcaaatatatgatgctgcttttttaa

SEQ ID NO: 29250 - DNA, 549 bp, Escherichia coli; identical to SEQ ID NO: 6867

SEQ ID NO: 29251 - DNA, 1518 bp, Escherichia coli
atgtctgaacaacacgcacagggcgctgacgcggtagtcgatcttaacaatgaactgaaaacgcgtcgtgagaagctggcgaacctgcgtgagcaggggattgccttcccgaacgatttccgtcgcgatcatacctctgaccaattgcacgcagaattcgacggtaaagagaacgaagaactggaagcgctgaacatcgaagtcgccgttgctggccgcatgatgacccgtcgtattatgggtaaagcgtctttcgttaccctgcaggacgttggcggtcgcattcagttgtacgttgcccgtgacgatctgccggaaggcgtttacaacgagcagttcaaaaaatgggacctcggcgatatcctcggcgcgaaaggtaaactgttcaaaaccaaaaccggtgaactgtctatccactgtaccgagctgcgtctgctgaccaaagcactgcgtccgctgccggataaattccacggcttgcaggatcaggaagcgcgctatcgtcagcgttatctggatctcatctctaacgatgaatcccgcaacacctttaaagtgcgctcgcagatcctctctggtattcgccagttcatggtgaatcgcggctttatggaagttgaaacgccgatgatgcaggtgatccctggcggtgccgctgcgcgtccgtttatcactcaccataacgcgctggatctcgacatgtacctgcgtatcgcgccggaactgtacctcaagcgtctggtggtcggtggcttcgagcgtgtattcgaaatcaaccgtaacttccgtaacgaaggtatttccgtacgtcataacccagagttcaccatgatggaactctatatggcttacgcagattacaaagatcttatcgagctgaccgaatcgctgttccgtactctggcacaggatattctcggtaagacggaagtgacctacggcgacgtaacgctggacttcggtaaaccgttcgaaaaactgaccatgcgtgaagcgatcaagaaatatcgcccggaaactgacatggcggatctggacaacttcgactctgcgaaagcgattgctgaatctatcggcatccacgttgagaagagctggggtctgggccgtatcgttaccgagatcttcgaagaagtggcagaagcacatctgattcagccgaccttcattactgaatatccggcagaagtttctccgctggcgcgtcgtaacgacgttaacccggaaatcacagaccgctttgagttcttcattggtggtcgtgaaatcggtaacggctttagcgaactgaatgacgcggaagatcaggcgcagcgcttcctggatcaggttgccgcgaaagatgcaggtgacgacgaagcgatgttctacgatgaagattacgtcaccgcactggaacatggcttaccgccgacagcaggtctgggaattggtatcgaccgtatggtaatgctgttcaccaacagccataccatccgcgacgttattctgttcccggcgatgcgtccggtgaaataa

SEQ ID NO: 29252 - DNA, 882 bp, Escherichia coli
atgaaacaggggctggaagatgtttctggtctgctggaactggctgtagaagctgacgacgaagaaacctttaacgaagccgttgctgaactcgacgccctggaagaaaaactggcgcagcttgagttccgccgtatgttctctggcgaatatgacagcgccgactgctacctcgatattcaggcggggtctggcggtacggaagcacaggactgggcgagcatgcttgagcgtatgtatctgcgctgggctgaatcgcgtggtttcaaaactgaaatcatcgaagagtcggaaggtgaagtggcgggtattaaatccgtgacgatcaaaatctccggcgattacgcttatggctggctgcgtacagaaaccggcgttcaccgcctggtgcgtaagagcccgtttgactccggcggtcgtcgccacacgtcgttcagctccgcgtttgtttacccggaagttgatgatgatatcgatatcgaaatcaatccggcggatctgcgcatcgacgtttatcgcgcatccggcgcgggcggtcagcacgttaaccgtaccgaatctgcggtgcgtattactcacatcccgaccgggatcgtgactcagtgccagaacgaccgttcccagcacaagaacaaagaccaggccatgaagcagatgaaagcgaagctttatgaactggagatgcagaagaaaaatgccgagaaacaggcgatggaagataacaaatccgacatcggctggggcagccagattcgttcttatgtccttgatgactcccgcattaaagatctgcgtaccggggtagaaacccgcaacacgcaggccgtgctggacggcagcctggatcaatttatcgaagcaagtttgaaagcagggttatga

SEQ ID NO: 29253 - DNA, 1734 bp, Escherichia coli
gtgaaacaacagatacaacttcgtcgccgagaagtcgatgaaacggccgacttgcccgctgaattgcctcccttgctgcgccgtttatatgccagccggggtgtgcgtagcgcgcaggaactggaacgcagtgttaaaggcatgctgccctggcagcaactgagcggcgtcgaaaaggccgttgagatcctttacaacgcttttcgcgaaggaacgcggattattgtggtcggtgatttcgacgccgacggtgcgaccagcacggctctaagcgtgctggcgatgcgctcgcttggttgcagcaatatcgactacctggttccaaaccgtttcgaagacggttacggcttaagtccggaagtagtcgatcaggctcatgcccgtggcgcgcagttaattgtcacggtggataacggtatttcctcccatgcgggggttgaacacgctcgttcgttgggcattccggttattgttaccgatcaccatttgccaggcgacacattacccgcagcggaagcgatcattaaccctaacttgcgcgactgtaatttcccgtcgaaatcactggcgggcgttggcgtggcgttttatctgatgctggcgttacgcacttttttgcgcgatcagggctggtttgatgaacgcggcatcgcaattcctaatctggcagaactgctggatctggtagcgttggggacagtggcggacgtcgtgccgctggacgctaataatcgcattctgacctggcaggggatgagtcgcatccgtgccggaaagtgccgtccggggattaaagcgctgctggaagtggccaatcgcgatccacaaaaactcgccgccagcgatttaggttttgcgctggggccacgtctcaatgctgccgggcgactggacgatatgtccgttggcgtggcgctgttgctgtgcgacaacatcggcgaagcgcgcgtgctggcaaatgaactcgatgcgctaaaccagacgcgaaaagagatcgaacagggaatgcaagttgaagccctgaccttgtgcgagaaactggagcgcagccgcgacacgctacccggcgggctggcaatgtatcaccccgaatggcatcagggcgttgttggcattctggcatcgcgtatcaaagagcgttttcaccgtccggttatcgcctttgcgccagctggtgatggtacgctgaaaggttccggtcgctccattcaggggctgcatatgcgtgatgcgctggagcggctagacacgctttaccccggcatgatgctcaagtttggcggccatgcgatggcggcaggattgtcgctggaagaggataaattcgaactctttcagcaacgctttggcgaactggttaccgagtggttagatccttctttattgcaaggggaagtggtatcagacggcccattaagtgcggcagagatgaccatggaagtggcgcagctgttgcgtgatgctggcccgtgggggcagatgttcccggaaccgttgtttgacggtcatttccgtctgttgcaacagcggctggtgggcgagcgtcatttgaaggtgatggtcgaaccggtcggcggcggtccactgctggacgggattgcttttaatgtcgataccgccctctggccggataacggtgtgcgcgaagtgcaactggcttacaagctcgatatcaacgagtttcgcggcaaccgcagcctgcaaattatcatcgacaatatctggccaatttag

SEQ ID NO: 29254 - DNA, 711 bp, Escherichia coli; identical to SEQ ID NO: 2300

SEQ ID NO: 29255 - DNA, 897 bp, Escherichia coli; identical to SEQ ID NO: 2301

SEQ ID NO: 29256 - DNA, 522 bp, Escherichia coli; identical to SEQ ID NO: 2302

SEQ ID NO: 29257 - DNA, 408 bp, Escherichia coli; identical to SEQ ID NO: 2303

SEQ ID NO: 29258 - DNA, 267 bp, Escherichia coli; identical to SEQ ID NO: 2304

SEQ ID NO: 29259 - DNA, 981 bp, Escherichia coli
atggcttttacaccttttcctccccgtcagcctacggcttctgcccgtttgccactgacgctgatgacgcttgatgactgggcgcttgccactattactggcgcggacagcgaaaaatatatgcaaggccaggtgacagcagatgtcagccagatgactgaagatcagcacctgctcgccgcccattgcgacgccaaaggtaaaatgtggagcaatttacgtctgttccgcgacggcgatggctttgcatggattgaacggcgcagcgtgcgtgaaccgcagctgactgaactgaaaaaatatgcggtgttctctaaagtgaccatcgcgccagacgacgagcgtgtgctgcttggtgttgccggttttcaggcgcgcgccgcgttggcaaatctctttagtgaactaccttcgagagaaaaacaggtagtcaaagaaggcgcgaccacgttgctatggtttgaacacccggcagaacgtttcctgatcgtaaccgatgaagctactgccaatatgctgaccgataaactgcgcggtgaagcggaactgaacaatagccaacagtggctggcattaaacattgaagcgggttttccggtgattgatgccgccaacagcgggcagtttatcccccaggcgaccaacctccaggcgctgggcggtatcagctttaagaaaggctgctataccggacaagagatggtggcgcgagcaaaattccgtggtgccaacaaacgcgcgctctggttgctgaagggtagcgccagccgactgccggaagctggtgaagacttagagctgaaaatgggcgagaactggcgtcgtaccggtacggtgctggctgcggtcaaactggaagatggtcaggttgtggtgcaggttgtcatgaataacgatatggaaccggacagcatcttccgcgtgcgtgacgatgcgaatacattgcgtatcgagccactgccatattcgctggaagagtaa

SEQ ID NO: 29260 - DNA, 660 bp, Escherichia coli
atggttcagaagcccctcattaagcagggatattcgctggcagaggaaattgccaacagcgtcagtcacggcattgggctggtgtttggtatcgttgggttggtgttgctactggttcaggcggtggatctcaatgccagcgccacggcgataaccagttacagcctctatggcggcagtatgatcctgctgttcctcgcttcgacgctctatcacgccattccccatcaacgggcaaaaatgtggctgaagaaatttgaccactgtgccatttatctgttgattgccggaacctacacgccgtttttgctggtggggctggattctccgttagcgcgcgggttgatgattgttatctggagcctggcattgctgggtattctgtttaaactgaccatcgcgcaccgattcaaaattttatctctggtgacctatctggcgatgggctggctgtcgctggtggtaatttatgaaatggcagttaagctcgcggcgggcagcgttaccttactggcggtaggcggtgtggtttattcgctcggggtgattttctacgtctgcaagcgcattccatacaatcatgccatctggcacggctttgtgctcggcggtagtgtgtgccactttctggcgatctatttgtatattgggcaggcgtaa

SEQ ID NO: 29261 - DNA, 312 bp, Escherichia coli; identical to SEQ ID NO: 2307

SEQ ID NO: 29262 - DNA, 1434 bp, Escherichia coli
gtgaaaaaactcaccttaccgaaagatttcttatggggcggcgcagttgccgctcatcaggtcgaaggcggctggaacaaaggcggcaaagggccgagcatttgtgacgttttgaccggtggcgcacacggcgtgccgcgcgaaatcaccaaagaagttgtgcctggcaaatactatccaaaccatgaagccgttgatttttatggtcactacaaggaggacatcaagctatttgccgaaatgggcttcaaatgttttcgtacttccatcgcctggacgcgcatttttccaaaaggcgatgaagctcagccaaacgaagaagggctgaagttctacgatgatatgatcgatgaactgctgaaatacaacatcgaaccggtgatcaccctctcccactttgaaatgccgctgcatctggtgcagcaatatggtagctggaccaaccgtaaagtggttgatttctttgtccgtttcgcggaagtggtatttgaacgctataagcataaagtcaaatactggatgaccttcaacgaaattaacaaccagcgtaactggcgtgcaccgctgttcggttactgctgctccggcgtggtgtataccgagcatgaaaacccggaagagacgatgtatcaggtgctgcatcaccagtttgtcgccagcgccctggcggtgaaagccgcgcatcgcatcaacccggagatgaaagtcggttgtatgctggcgatggtgccgctctatccttactcctgtaacccggacgatgtgatgtttgcccaggagtcgatgcgcgaacgttacgtctttaccgatgtgcagttgcgtggctattacccgtcctatgtgttgaacgagtgggaacgccgcggatttaacatcaaaatggaagacggcgatctggatgtactgcgcgaaggcacctgcgattatctcggcttcagctattacatgaccaacgcggtgaaggccgaaggcggcaccggcgatgcgatctctggttttgaaggcagcgtaccgaacccgtatgttaaagcgtctgactggggctggcagattgatccggttggtctgcgttacgcgctttgcgagctgtatgagcgttaccagaagccgctgtttattgtcgaaaacggttttggcgcttacgacaaagtggaagatgatggcagcatcaatgacgattaccgcattgactacctgcgcgcccatattgaagagatgaaaaaagcggtgacttacgatggcgtggacctgatgggctacacgccgtggggctgcatcgactgtgtgtcgttcaccaccgggcagtacagcaaacgctacggctttatctatgtgaataaacatgacgacggtactggcgatatgtcgcgttcacgtaagaagagctttgactggtacaaagaggtgattgccagcaacggcgagaatctgtaa

SEQ ID NO: 29263 - DNA, 2874 bp, Escherichia coli
atgacacagacgttaagccagcttgaaaacagcggcgcttttattgaacgccatatcggaccggacgccgcgcaacagcaagaaatgctgaatgccgttggcgcacaatcgttaaacgcgctgaccggccagattgtgccgaaagatattcagcttgcgactccgccgcaggttggcgcaccggcgaccgaatacgccgcactggcagaactcaaggctattgccagtcgcaataaacgcttcacgtcttacatcggcatgggttacaccgccgtgcagctaccgccggttatcctgcgtaacatgctggaaaatccgggctggtataccgcgtatactccgtatcaacctgaagtctcccagggccgccttgaagcactgctcaacttccagcaggtaacgctggatttaaccgggctggatatggcctctgcttctcttcttgacgaagccaccgctgccgccgaagcaatggcgatggcgaaacgcgtcagcaaactgaaaaatgccaaccgcttctttgttgcttctgacgttcatccgcaaacgctggatgtggtccgtactcgtgccgaaacctttggttttgaagtgattgtcgatgacgcgcaaaaagtgctcgaccatcaggacgttttcggcgtgctgttacagcaggtcggcactactggtgaaattcacgactacaccgcgcttattagcgaactgaaatcacgcaaaattgtggtcagcgttgccgccgatattatggcgctggtgctgttaactgcgccaggtaaacagggcgcggatattgtttttggttcggcgcaacgctttggcgtaccgatgggctacggtggcccacacgcggcattctttgcggcgaaagacgaatacaaacgctcaatgccgggccgtattatcggtgtatcgaaagatgcagctggcaacaccgctctgcgcatggcgatgcagactcgcgagcaacatattcgtcgtgagaaagcgaactccaacatttgtacttcccaggtactgctggcaaacatcgccagcctgtatgccgtttatcacggcccggttggcctgaaacgtatcgctaaccgcatccaccgtctgaccgatatcctggcggcgggcctgcaacaaaaaggtctgaagctgcgccatgcgcactatttcgatactttgtgtgtggaagtggtcgacaaagcgggcgtgctggcgcgtgccgaagcagctgaaatcaacctgcgtagcgatattctgaacgcggttgggatcacccttgatgaaacaaccacgcgcgaaaacgtgatgcagcttttcagcgtgctgttgggcgataaccacgggctggacatcgacacactggacaaagacgtggctcacgacagtcgctctattcaggctgcgatgctgcgcgacgacgaaatcctcacccatccggtgtttaatcgctaccacagcgaaaccgaaatgatgcgctatatgcactcgctggagcgtaaagatctggcgctgaatcaggcgatgatcccgctgggttcctgcaccatgaaactgaacgccgccgccgagatgatcccgatcacctggccggaatttgccgaactgcacccgttctgcccgccggaacaggctgaaggttatcagcagatgatcgcgcagctggctgactggctggtgaaactgaccggttacgacgccgtttgtatgcagccgaactctggcgcacagggcgaatacgcgggcctgctggcgattcgtcattatcatgaaagccgcaacgaagggcatcgcgatatctgcctgatcccggcttctgcgcacggcactaacccggcttccgcgcatatggcaggaatgcaggtggtggttgtggcgtgtgataaaaacggcaacatcgatctgactgatctgcgcgcgaaagcggaacaggcgggcgataacctctcctgtatcatggtgacctatccttctacccacggcgtgtatgaagaaacgatccgtgaagtgtgtgaagtcgtgcatcagttcggcggtcaggtttaccttgatggcgcgaacatgaacgctcaggttggcatcacctcgccgggctttattggtgcggacgtttcccaccttaacctgcataaaactttctgcattccgcatggcggtggtggtccgggtatgggaccgatcggtgtgaaagcgcatctggctccgtttgtaccgggtcatagcgtggtgcaaatcgaaggcatgttaacccgtcagggcgcggtttctgcggcaccgttcggtagtgcctctatcctgccaatcagctggatgtacatccgcatgatgggcgcagaagggctgaaaaaagcaagccaggtggcaattcttaacgccaactatattgccagccgtctgcaggatgccttcccggtgctgtataccggtcgcgacggtcgcgtggcgcacgaatgtattctcgatattcgcccgctgaaagaagaaaccggcatcagcgagctggatattgccaagcgcctgatcgactacggtttccacgcgccgaccatgtcgttcccggtggcgggtacgctgatggttgaaccgactgaatctgaaagcaaagtggaactggatcgctttatcgatgcgatgctggctatccgcgcagaaattgatcaggtgaaagccggtgtctggccgctggaagataacccgctggtgaacgcgccgcacattcagagcgaactggtcgccgagtgggcgcatccgtacagccgtgaagttgcagtattcccggcaggtgtggcagacaaatactggccgaccgtgaaacgtctggatgatgtttacggcgaccgtaacctgttctgctcctgcgtaccgattagcgaataccagtaa

SEQ ID NO: 29264 - DNA, 390 bp, Escherichia coli; identical to SEQ ID NO: 2310

SEQ ID NO: 29265 - DNA, 1095 bp, Escherichia coli
atggcacaacagactcctttgtacgaacaacacacgctttgcggcgctcgcatggtggatttccacggctggatgatgccgctgcattacggttcgcaaatcgacgaacatcatgcggtacgtaccgatgccggaatgtttgatgtgtcacatatgaccatcgtcgatcttcgcggcagccgcacccgggagtttctacgttatctgctggcgaacgatgtggcgaagctcaccaaaagcggcaaagccctttactcggggatgttgaatgcctctggcggtgtgatagatgatctcatcgtctactactttactgaagatttcttccgcctcgttgttaactccgctacccgcgaaaaagacctctcctggattacccaacacgctgaacctttcggcatcgaaattactgttcgtgatgacctttccatgatcgccgtacaagggccgaatgcgcaggcaaaagctgccacactgtttaatgacgcccagcgtcaggcggtggaagggatgaaaccgttctttggcgtgcaggcgggcgatctgtttattgccaccaccggttacaccggtgaagcgggctacgaaattgcgctgcccaatgaaaaagcggccgatttctggcgcgcgctggtggaagctggcgttaagccatgtggcctgggcgcgcgtgacacgctgcgtctggaagcgggcatgaatttgtatagccaggagatggacgaaactatttctcctttagccgccaatatgggctggactatcgcctgggaaccggcagatcgtgactttatcggtcgtgaagctctggaagcgcagcgtgaacatggcacagaaaaactggttggtctggtgatgaccgaaaaaggcgtgctgcgtaatgaactgccggtacgttttactgatgcgcagggcaaccagcatgaaggcattatcaccagcggtactttctccccaacgctgggttatagcattgcgctggcgcgcgtgccggaaggtattggtgaaacggcgattgtgcaaattcgcaaccgtgaaatgccggttaaagtgacgaaacctgtttttgtgcgtaacggcaaagccgtcgcgtga

SEQ ID NO: 29266 - DNA, 1203 bp, Escherichia coli
atgcaaagtgttgatgtagccattgttggcggcggcatggtcgggctggcggttgcctgcggattacagggtagcggcttacgcgttgccgtactggagcagcgcgtaccggaacctctggcggcggatgcaccaccacaactgcgcgtttcggctatcaatgccgccagcgaaaaattactcacccgtcttggcgtctggcaggacattctctctcgtagggcctgttgctatcacggtatggaagtgtgggataaagacagttttggtcacatctcgtttgacgatcaaagcatgggctatagccatcttgggcatatcgttgaaaactcagtgattcactacgcgctgtggaacaaagcgcagcagtcgtcagatatcactctgttggcccccgcagaattacagcaggtcgcctggggagaaaatgaaaccttcctgacgttgaaagatggcagcatgttaacggcgcgtctggtgattggcgcagacggcgctaattcctggttgcgcaacaaagccgatattccgctgactttctgggattatcagcatcacgcgctggtggcgaccattcgcacggaagaaccgcatgatgcggtggcgcggcaggttttccatggcgaaggcattctggcctttttaccgcttagcgatccgcatctttgctcgattgtctggtcactgtcgccagaggaagcgcagtggatgcagcaggcaggcgaagacgaatttaatcgcgcgttaaatatcgcttttgataatcgcctgggcttatgcaaggtcgaaagtgagcgcctggtgttctcgctaacggggcgttatgcgcgccagtttgccgcacaccgtctggcgctggtgggcgacgccgcgcatactattcacccgctggcggggcagggggtaaatctcggctttatggatgctgcagagctgattgctgaactgaaacggttgcatcgtcagggtaaagacatcgggcagtacatttacctgcgtcgctatgagcgtagccgtaagcacagtgcggcgctgatgctggctggtatgcagggattccgcgatctgttttccggtaccaatccggcgaaaaaattgctgcgtgatattggtctgaaactggctgatacgcttcctggcgttaagccacaacttattcgtcaggcaatgggattaaacgatttgcctgaatggctgcgttaa

SEQ ID NO: 29267 - DNA, 1179 bp, Escherichia coli
atgagcgtaatcatcgtcggtggcggcatggcgggcgcgacgctggcgctggctatttcccggttaagtcacggggcgctgccagtacatttgattgaagcgaccgcgccagagtcacatgctcatccgggctttgatggacgagctattgcgctggcggcgggtacctgtcagcaactggcgcgcatcggcgtctggcaatctctggctgattgcgcaactgccatcaccaccgtgcatgtcagcgatcgtggtcacgctggatttgtcaccctcgccgcagaagattaccaactggcggcgctggggcaggttgtcgaattgcacaatgtcgggcaacggctgtttgcattgctgcgcaaagcacctggcgtaacgctgcattgccctgatcgcgtggctaacgttgcccgtactcagagccacgttgaagtgacgctggagagtggtgagacgctgacgggccgcgtgctggtagccgctgatggcacccattcagcgttagccaccgtgtgcggcgttgactggcagcaggatccttacgaacaactggctgtgattgcgaacgttgcgacttccgttgcgcatgaagggcgcgcttttgaacgctttacgcaacatggcccgctggcgatgttgccgatgtctgacggacgctgttcgctggtctggtgtcatccactggagcggcgcgaagaggtgctgtcgtggagcgacgagaagttttgccgtgaactccagtcggcctttggctggcgacttgggaaaattactcacgccggtaaacgcagtgcttatccgctggcgttaacccgcgccgccaaacctattacccatcgtaccgtgctggtggggaatgcggcgcaaactctgcaccccatcgccgggcaaggatttaacctcggtatgcgtgatgtcatgagccttgcagaaaccctgactcaggcgcaggagcgcggagaagacatgggtgattacggcgtattgtgccgttatcagcagcgtcgacagagcgatcgcgaagcaaccatcggcgtcacggacagccttgtacatctttttgccaaccgttggacgccgctggttgtcgggcgcaacatcgggctgatgacgatggaattatttaccccagcacgcgatgtgctggcgcagcgcactcttggttgggtggcgcgttga

SEQ ID NO: 29268 - DNA, 1326 bp, Escherichia coli
atgagtgagatatcccggcaagagtttcagcgtcgccgtcaggccctggtagagcaaatgcaacccggcagcgccgcgctgatttttgctgcaccagaagtaacacgtagcgccgacagcgaatacccctatcgtcagaacagtgacttctggtacttcaccggctttaacgaaccggaagcggtgctggtgctgattaaaagcgatgacactcataaccacagcgttttgtttaaccgcgttcgcgacctgacggcagagatctggtttggtcgtcgcttaggccaggatgccgcgccagagaaactgggcgttgaccgcgcactggcattcagcgaaatcaatcagcaactttatcaactacttaatggtctggatgtggtttaccacgctcagggcgaacatgcatatgctgatgaaatcgtgaacagcgcgcttgagaaactgcgtaaaggttcgcggcaaaatctcaccgcaccggcaacgatgatcgactggcgtcctgttgttcatgaaatgcgcctgttcaaatcaccagaagagattgccgtacttcgccgcgcgggtgaaatcaccgcactggcgcatacacgggcgatggaaaaatgccgtccggggatgttcgagtaccatctggaaggcgaaattcaccacgaatttaaccgccacggtgcgcgttacccttcctataacaccattgttggcagcggtgaaaacggctgcattttgcactacaccgaaaacgagtgtgaactgcgtgacggtgacctggtgttgattgacgcgggttgtgaatacaaaggttacgctggcgacattacccgcaccttcccggtcaacggcaaattcactcaggctcagcgtgaaatctatgacattgtgctggagtctcttgaaaccagcctgcgcctgtatcgtccgggaacttccattcaggaagtcactggtgaagtggtgcgcatcatggttagcggtctggtaaaactcggcatcctgaaaggtgatgttgatgaactgatcgctcagaacgcccatcgtcctttctttatgcatggccttagccactggttaggactggatgttcatgacgttggtgtttatggtcaggatcgctcgcgtattctggaaccgggtatggtactgaccgtagaaccagggctgtatattgcgccggatgcagaagtgccagaacagtatcgcggtatcggcattcgtattgaagacgatattgtgattaccgaaaccggtaatgaaaacctcaccgccagcgtggtgaaaaagccggaagaaatcgaagcgttgatggcagctgcgagaaagcaatga

SEQ ID NO: 29269 - DNA, 579 bp, Escherichia coli
atgtctatacagaacgaaatgcctggttacaacgaaatgaaccagtatctgaaccaacaagggacgggtctgacccctgctgagatgcatggtttaatcagtgggatgatatgtggcggtaacgatgatagctcatggctgccgctacttcacgacctgacgaacgaaggcatggctttcggtcatgagctggcacaggcactgcgtaaaatgcactctgccaccagcgatgccctgcaggatgacggcttcctttttcagctttatctgcctgatggcgatgatgtcagcgttttcgatcgggctgatgcgctggcaggttgggtcaatcacttcctgcttggtcttggcgttacgcaaccgaagctggacaaagtgaccggagaaaccggtgaagccatcgacgatctgcgtaacatcgcgcagttgggttacgacgaagacgaagatcaggaagagcttgaaatgtcgcttgaagagatcatcgaatacgttcgtgttgccgcgctgttatgccacgacacctttactcatccgcaaccgaccgcgccagaagtacaaaaaccgactctacactaa

SEQ ID NO: 29270 - DNA, 330 bp, Escherichia coli
atgtctgcacaacccgtcgatatccaaatttttggccgttcactgcgtgtgaactgcccgcctgaccaaagggatgcgttgaatcaggcagcggacgatctgaaccaacggttgcaagatctgaaagaacgcactagagtcacaaatactgaacagttggtcttcattgccgcattgaatatcagctatgagttagcgcaagaaaaagcgaagactcgtgactacgcggcaagtatggaacagcgtattcggatgctgcagcagaccatagaacaagcgttacttgaacaaggtcgcatcaccgaaaaaactaaccaaaactttgaatga

SEQ ID NO: 29271 - DNA, 603 bp, Escherichia coli; identical to SEQ ID NO: 2317

SEQ ID NO: 29272 - DNA, 1233 bp, Escherichia coli; identical to SEQ ID NO: 2318

SEQ ID NO: 29273 - DNA, 660 bp, Escherichia coli
atgacgcaggatgaattgaaaaaagcagtaggatgggcggcacttcagtatgttcagcccggcaccattgttggtgtaggtacaggttccaccgccgcacactttattgacgcactcggtacaatgaaaggccagattgaaggggccgtttccagttcagatgcttccactgaaaaactgaaaagcctcggcattcacgtttttgatctcaacgaagtcgacagccttggcatctacgttgatggcgcagatgaaatcaacggccacatgcaaatgatcaaaggcggcggcgcggcgctgacccgtgaaaaaatcattgcttcggttgcggaaaaatttatctgtattgcagacgcttccaagcaggttgatattctgggcaaattcccgctgccagtagaagttatcccgatggcacgtagtgcagtggcgcgccagctggtgaaactgggcggtcgtccggaataccgtcagggcgtagtgaccgataacggcaacgtgatcctcgacgtccacggcatggaaatccttgacccgatagcgatggaaaacgccataaatgcgattcctggtgtggtgactgttggtttgtttgctaaccgtggcgcggacgttgcgctgattggcacacctgacggtgtcaaaactattgtgaaatga

SEQ ID NO: 29274 - DNA, 231 bp, Escherichia coli; identical to SEQ ID NO: 2320

SEQ ID NO: 29275 - DNA, 894 bp, Escherichia coli; identical to SEQ ID NO: 2321

SEQ ID NO: 29276 - DNA, 282 bp, Escherichia coli
atgtctaacgtgcaggagtggcaacagcttgccaacaaggaattgagccgtcgggagaaaactgtcgactcgctggttcagcaaaccgcggaagggatcgctatcaagccgctgtataccgaagccgatctcgataatctggaggtgacgggtacccttcccggtttaccaccctacgttcgtggcccgcgtgccactatgtataccgcccaaccgtggaccatccgtcagtatgctggtttctcgacaacaaaaggagtccaacgctttttatcgccgtaa

SEQ ID NO: 29277 - DNA, 825 bp, Escherichia coli; identical to SEQ ID NO: 13604

SEQ ID NO: 29278 - DNA, 891 bp, Escherichia coli
atggacatttttatttcgaaaaagatgcgcaatttcattttattagcgcaaaccaataatattgcccgggcggcagaaaaaatccatatgacggcttcgcgatttggcaaaagcattgccgcgctggaagaacaaattggctatacgctatttacccgcaaagataataatatcagcctcaataaagccggacaggaactgtatcaaaaactgttcccggtttatcaacgactttctgcgattgataatgaaatccataactcaggacgtcgttcacgagaaattgtgataggcatagataatacttatccgaccattatttttgatcagttgattagtctcggagataagtacgaaggcgtgaccgcccagccagttgagttcagcgaaaatggcgttatcgataatctttttgaccgtcagttagattttaatatctccccacagcatgtatctgcacgagttcaggaactggaaaacctgactatcagtgaactaccgccgctgcgattgggctttctcgtttctcgccgttatgaagagcgacaagagctgcttcaggagctgccctggctacaaatgcgctttcagaatcgggccaatttcgaagcaatgattgatgcgaatatgcgtccttgtgggatcaatccaaccattatttatcgtccctacagttttatggccaaaatcagcgccgtggagcgggaacattttctgacggtgatcccgcattttgcctggcgactggtgaatccggcaacgctgaaatattttgatgcgccgcacagaccgatgtatatgcaggaatatctttattcaatcagaaatcatcgttataccgccacgatgcttcagcatattgctgaagatcgtgacggaacaaaccattaa

SEQ ID NO: 29279 - DNA, 741 bp, Escherichia coli
gtgaagttcaaagttatcgccctggcggcattaatgggtattagcgggatggcagcgcaggctaacgaattgccggatggaccgcatattgtcacctccggtacggcaagcgtggatgcggtgccagacattgccactcttgcgattgaagttaacgtggccgcgaaggatgccgctactgccaagaaacaggcagatgagcgcgtcgcacaatacatttccttccttgagctcaatcagatcgcgaaaaaagatatcagctcagcgaacttacgcactcagccagattatgattatcaggatggtaaaagtatcctgaaaggctaccgcgcagtgagaacggtggaagtcacgctccgtcagttagacaaactgaattccttgctggacggcgcgctaaaggcgggtcttaacgaaattcgttctgtgtcgctgggcgtggcgcagccggatgcctataaagacaaagcgcgtaaggcagcgattgataacgcgattcatcaggcgcaggaactggcgaatggctttaatcgcaaactggggccggtatatagcgtgcgttatcatgtttccaactatcagcccagcccaatggtgcggatgatgaaagctgatgctgcaccggtgtccgcacaggaaacttacgagcaggccgctattcagtttgatgatcaggtcgatgtagtcttccagttagaacctgtggatcaaccccccgctaaaacacctgctgcacattaa

SEQ ID NO: 29280 - DNA, 636 bp, Escherichia coli; identical to SEQ ID NO: 2326

SEQ ID NO: 29281 - DNA, 861 bp, Escherichia coli; identical to SEQ ID NO: 2327

SEQ ID NO: 29282 - DNA, 1080 bp, Escherichia coli
atgtctaagatttttgatttcgtaaaacctggcgtaattactggtgatgacgtacagaaagttttccaggtagcaaaagaaaacaacttcgcactgccagcagtaaactgcgtcggtactgactccatcaacgccgtactggaaaccgcagctaaagttaaagcgccggttatcgttcagttctccaacggtggtgcttcttttatcgctggtaaaggcgtgaaatctgacgttccgcagggcgctgctatcctgggtgcgatctctggtgcgcatcacgttcaccagatggctgaacattatggtgttccggttatcctgcacaccgaccactgcgcgaagaaactgctgccgtggatcgacggtctgctggacgcgggtgaaaaacacttcgctgctaccggtaagccgctgttctcttctcacatgattgacctgtctgaagaatctctgcaagagaacattgaaatctgctctaaatacctggagcgcatgtccaaaatcggcatgactctggaaatcgaactgggttgcaccggtggtgaagaagacggcgtggacaacagccacatggacgcttctgcactgtacacccagccggaagacgttgattacgcatacaccgagctgagcaaaatcagcccgcgtttcaccatcgctgcgtccttcggtaacgtacacggtgtttacaagccgggtaacgttgttctgactccgaccatcctgcgcgactctcaggaatatgtttctaagaaacacaacctgccgcacaacagcctgaacttcgtcttccacggtggttccggttctactgctcaggaaatcaaagactccgtaagctacggcgtagtgaaaatgaacatcgataccgatacccaatgggcaacctgggaaggtgttctgaactactacaaagaaaacgaagcttacctgcaaggccagctgggcaacccgaaaggcgaagatcagccgaacaagaaatactacgatccgcgcgtatggctgcgtgccggtcagacttcgatgatcgctcgtctggaaaaagcattccaggaactgaacgcgatcgacgttctgtaa

SEQ ID NO: 29283 - DNA, 1164 bp, Escherichia coli
atgtctgtaattaagatgaccgatctggatcttgctgggaaacgtgtatttatccgtgcggatctgaacgtaccagtaaaagacgggaaagtaaccagcgacgcgcgtatccgtgcttctctgccgaccatcgaactggccctgaaacaaggcgcaaaagtgatggtaacttcccacctgggtcgtcctaccgaaggcgagtacaacgaagaattctctctgctgccggttgttaactacctgaaagacaaactgtctaacccggttcgtctggttaaagattacctcgacggcgttgacgttgctgaaggtgaactggttgttctggaaaacgttcgcttcaacaaaggcgagaagaaagatgacgaaactctgtccaaaaaatacgctgcactgtgtgacgtgttcgtaatggacgcattcggtactgctcaccgcgcgcaggcttctactcacggtatcggtaaattcgctgacgttgcgtgcgcaggcccgctgctggcagctgaactggacgcgctgggtaaagcactgaaagaacctgctcgcccgatggtggctatcgttggtggttctaaagtatctaccaaactgaccgttctggactccctgtctaaaatcgctgaccagctgatcgttggcggtggtatcgctaacacctttatcgcggcacaaggccacgatgtgggtaaatccctgtacgaagctgacctggttgacgaagctaaacgtctgctgaccacctgcaacatcccggttccgtctgatgttcgcgtagcaaccgagttctctgaaactgcaccggctaccctgaaatctgttaacgatgtgaaagctgacgagcagatcctggatatcggtgatgcttccgctcaggaactggctgaaatcctgaagaatgcgaaaaccattctgtggaacggtccggttggcgtgttcgaattcccgaacttccgcaaaggtactgaaatcgtggctaacgctatcgcagacagcgaagcgttctccatcgctggcggcggcgacactctggcagcaatcgacctgttcggcattgctgacaaaatctcctacatctccactggcggcggcgcattcctcgaattcgtggaaggtaaagtactgcctgcagtagcgatgctcgaagagcgcgctaagaagtaa

SEQ ID NO: 29284 - DNA, 1020 bp, Escherichia coli; identical to SEQ ID NO: 2330

SEQ ID NO: 29285 - DNA, 429 bp, Escherichia coli
atgatgacattgccctacccatattcttcctccgcacgtttttacgcgctgcgcctgctccccgggcaggaagttctctcccaattacgcgccttcgcgcaacaacaacaactccacgccgcgtggattgcaggttgtaccggcagtctgactgacgtcgccttacgctatgccgggcaagaaaacactgccctgctaagcggtaagttcgaagtcatcgcattgaacggcacgctggaacagagtggtgaacatcttcatctctgcgtttccgatccacacggcacgatgcttggcggtcatatgatgcccggctgtaccgtgcggaccacgcttgaactggtgatcggctgccttgaggaactggcgtttagccgccagtcttgcgcgctttctggttacgacgagttgcatatttccccccgttaa

SEQ ID NO: 29286 - DNA, 579 bp, Escherichia coli; identical to SEQ ID NO: 2332

SEQ ID NO: 29287 - DNA, 708 bp, Escherichia coli; identical to SEQ ID NO: 2333

SEQ ID NO: 29288 - DNA, 678 bp, Escherichia coli; identical to SEQ ID NO: 2334

SEQ ID NO: 29289 - DNA, 678 bp, Escherichia coli
atgttaacgttaaatcagatatcttatcgctggcctggcgcggcaacggattgtctttgcgacatttctctgcaactcaaacaaggtgaatggttggcgctgaccggcgacaatggcgcgggaaaatcgacgctgttacgagtaatggcaggtcttcttacgcccacagccggtacggttatgctgcaacaacaagcgatgaaaaacctgaaaaaccgccagcgcgcggcaaagattggcgtactgtttcaggacgcggaaaaccagctttttcacagcactgttgctgacgagatcgcatttggtttgaaactgcaaaaatgcccggcggatgaaatcactcaacgtaccaatgctgccctgcaatgctgccagttagcagacactgccagcgcgcatccgttagatctgcatagtgcgcagcgacggatggtcgccgtcgccagcctggaagcactctctccacccctattgctactggacgagccgagtcgggattttgacgaaaattggttgagcgtgtttgaaagctggctggaaaagtgccgccagcgaggcacgagcgtcgtagcaatcagtcatgacgccgcatttacccggcgtcatttctctcgtgtggtgcgactggaagatggtgtaatcaggaacgttaatccatcagacgatattcacccgtag

SEQ ID NO: 29290 - DNA, 714 bp, Escherichia coli; identical to SEQ ID NO: 2336

SEQ ID NO: 29291 - DNA, 510 bp, Escherichia coli; identical to SEQ ID NO: 2337

SEQ ID NO: 29292 - DNA, 189 bp, Escherichia coli; identical to SEQ ID NO: 2338

SEQ ID NO: 29293 - DNA, 1278 bp, Escherichia coli; identical to SEQ ID NO: 2339

SEQ ID NO: 29294 - DNA, 1389 bp, Escherichia coli
atggaaaacaagtctgctcgtgcaaaggtccaggcttttgggggatttttgactgcaatggtcatccccaatatcggtgcttttattgcctggggatttataacggcattatttattcccaccggctggctgccgaatgaacatttcgccaaaattgttggtccgatgattacctatttattgcccgtgatgattggttctaccggtggtcatctggtcggcggtaaacgcggggcggtcatgggcggaataggtactattggtgtgatcgtcggcgcagagatcccgatgttccttggctcaatgatcatgggaccgttaggtgggctggtcataaaatatgtcgataaggcactggaaaaacgcatacctgccggttttgagatggttatcaataacttctcattaggtatcgcggggatgctcctttgtctgctgggttttgaagttatcggcccggcggtgttaattgctaatactttcgtcaaagagtgtattgaggcgctggtacatgcgggttatctacctttgctgtcagtcatcaatgaaccggcgaaagtgcttttccttaataatgcgatcgatcagggcgtctattatccgctgggaatgcaacaggcttcggttaacggtaaatccatcttcttcatggtggcctccaatccaggtcctggtctggggctgctgctggcgtttaccttgtttggtaaagggatgagtaaacgttctgcgcccggggcgatgattattcacttcctcggtgggatccacgaactgtatttcccgtatgtgctgatgaagccgctgaccattattgccatgattgcgggcggtatgtctggcacctggatgtttaacttactggacggtggtctggtggctggcccaagtccggggtctatctttgcttacctggcactgacgccgaaaggctcgttcctggcgacaattgccggtgttacggtaggtaccctggtgtcctttgctattacttcgctgatactgaagatggaaaaaacggtggaaacgaagagcgaagatgagtttgctcagtcagccaatgcggttaaggcgatgaaacaagaaggtgcattctcgttaagccgtgttaagcgtattgcctttgtttgcgatgcagggatgggctccagtgcgatgggcgcaaccaccttccgtaaacgcctggaaaaagcggggctggcaatagaagtaaaacattacgccatagaaaacgtgcctgcggatgcggatatcgtcgttactcacgccagtctggaagggcgcgtgaaacgtgtgacggataaaccactgatattgattaataactatattggcgatccaaaactcgacactttatttaatcaattaaccgctgaacataaacactga

SEQ ID NO: 29295 - DNA, 909 bp, Escherichia coli
atgaaagcacctgtttcattaacctcatttcgcccacaaaaatctcttgctatcgccattggcgtgcttgccgtggttgtgctgccatttctctcgtattacaccgttaatgaaggtgaacgcggcattttgctgcgctacggaaaaatcgtaaaagttgccgagccggggctgggttttaagatcccttttatggaaagcgtagagaaaatttccacgcgtaatcaggctgtggtctatcagggattacaggcctacagccgcgaccagcaaccggcacaaatgacagtatcagtcagcttccacattaaaccttcagaagcaggcgcggtttataccacctacaacaccattgaagcattaaaagatcgtctgattgtccgtcagttgccaactcaactggagaacgttttcggacaatataccgccatcagcgccgtacaggatcgcacaaaactggttcaggatctgcaaaatgccatgcgcaaagccgttgttgggccagtggtaattgacggggtccagattgaaaatattgatttttctgacgcttatgaaaagtcgattgaagaccgaatgaaagcagaagtcgccattgccacgcgtaagcaaaatctggaaacggagaaaatccaggcgcaaatagcggtaactcaggcccaggcggaagcagacagtaaactagcggcagccaaagcagaagcggaaactattcgcgtaagaggcgcggcagaggctgaaactattcgtttaaaaagtgcggctgaagcagaagctatccgcctgcgcggtgaagctctgcgggagaatcccggacttgttgccctcaccactgctgagcgttgggacggtaaactgcccgataccatgatccccggcagcacagttccgtttatctctactaagtaa

SEQ ID NO: 29296 - DNA, 1992 bp, Escherichia coli; identical to SEQ ID NO: 2343

SEQ ID NO: 29297 - DNA, 759 bp, Escherichia coli
atgaaaattcgcgccttattggtagcaatgagcgtggctacggtgctgaccggttgccagaatatggactccagtggactgctctcatcaggagcggaagcttttcaggcttacagtttgagtgatgcgcaggtgaaaaaactgagcgatcaggcatgccaggagatggacagcaaagcgacgattgcgccagccaatagcgaatacgctaaacgtctgacaactattgccaatgcgctaggcaacaatatcaacggtcagccggtgaattacaaagtgtatatggcgaaggatgtgaacgcctttgcaatggctaacggctgtatccgcgtctatagcgggctgatggatatgatgacagataacgaagtcgaagcggtgctcggtcacgaaatggggcacgtggcattaggccatgtgaagaaaggaatgcaggtagcacttggtacaaacgcaattcgcgttgcggcggcctctgcaggcggaattgtcggcagtttgtcacaatcacaactgggagacctgggcgaaaagctagtcaattcgcaatttacccaacgtcaggaatcagaggccgatgattactcctacgacttgctgcgccaacgcggtatcagcccggcaggtcttgccaccagctttgaaaaactggcgaaactggaagaaggccgccaaagctcaatgtttgacgaccatcctgcatccgccgaacgcgcccagcatattcacgatcgtatgagcgcggatggagttaagtaa

SEQ ID NO: 29298 - DNA, 921 bp, Escherichia coli
atgagcaccttaggtcatcaatacgataactcactggtttccaacgcctttggttttttacgcctgccgatgaacttccagccgtatgacagcgatgctgactgggtgattactggcgtgccgttcgatatggccacttctggtcgtgccggtggacgccacggtccggcagctatccgtcaggtttcgacgaatctggcctgggaacacaaccgcttcccgtggaatttcgacatgcgtgagcgcctgaacgtcgtggactgcggtgatctggtatatgccttcggcgatgcccgtgagatgagcgagaagctgcaggcgcacgccgagaagctgctggctgccggtaagcgtatgctctccttcggtggtgaccactttgttacgctgccgctgctgcgcgctcatgcgaagcatttcggcaaaatggcgttggtacactttgatgcccacaccgatacctacgctaacggttgtgaatttgaccacggcaccatgttctataccgcgccgaaagaaggtctgatcgacccgaatcattccgtgcagattggtattcgtaccgagtttgataaagacaacggctttaccgtgctggacgcctgccaggtgaacgatcgcagcgtggatgacattatcgcccaggtgaaacagattgtgggtgatatgccggtttacctgacctttgatatcgactgcctggatcctgcttttgcaccaggcaccggtacgccggtaattggcggcctgacctccgatcgcgccattaaactggtacgcggcttgaaagatctcaacatcgttgggatggacgtagtggaagtggctccggcatacgatcagtcggaaatcaccgctctggctgcggcgacgctggcgctggagatgctgtatattcaggcggcgaaaaagggcgagtaa

SEQ ID NO: 29299 - DNA, 732 bp, Escherichia coli
atgaaaaaatggaaagtacgtagcgcgttgatagcattagccgtgctgctggccggttgttccagtaatgcgcagtataatagcagtgcatcaggcaatgtcggcaccgcctggggtggggatgtgcactcaacggttcagggcgtatctgctgaacgagcctggcgcgatccggcagagatgatcgttattagttattcgactaatgttccttccggctacgaccgcgtttatagcattcgtattaacgaactggaatatgctattcgcgatggtaattttaattctctacctattacgcgggtttatgattcatccaataatgaaccacgctatattgtccatgccagagtcggaatgaattatcaattatatgtccgtaattacagtcgtaacaccaactacgagatcgttgctacggttgatggcctggatgtgctgaacggcaagcaaggttcgctgaataacaacggttatattgtgaatgccggagattcgttagcgattaaaggattccgcaaagataaacataccgaagcggcttttcagttcgccaacgttgctgattcctacgcagccaattcggcgcaaggcgatgtgcgtaataccggtgtaatcggctttgccgcctttgaattacaaggcccggcgcaaaacgcgctgccgccgtgctctggacaagcgtttccggcagataacaatggctatgcgccgccaccgtgtcggaaatag

SEQ ID NO: 29300 - DNA, 1977 bp, Escherichia coli
atgtctgacgacatgtctatgggtttgccttcgtcagcgggcgaacacggtgtactacgctccatgcaggaggttgcaatgagctcccaggaagccagcaagatgctgcgtacttacaatattgcctggtggggcaataactactatgacgttaacgagctgggccacatcagcgtgtgcccggacccggacgtcccggaagctcgcgtcgatctcgcgcagttagtgaaaactcgcgaagcacagggtcagcgtctgcctgcactgttctgtttcccacagatcctgcagcaccgtttgcgttccattaacgccgcgttcaaacgagcgcgggaatcctacggctataacggcgattacttcctcgtttatccgatcaaagttaaccagcaccgccgcgtgattgagtccctgattcattcgggcgaaccgctgggcctggaagccggttccaaagctgagttgatggcggtgctggcacatgctggcatgacccgtagcgtcatcgtctgcaacggttataaggaccgcgaatatatccgcctggcattaattggcgagaagatgggccacaaggtctatctggtcattgagaagatgtcagaaattgccattgtgctggatgaagcagaacgtctgaatgtcgttcctcgtctgggcgtgcgtgcacgtctggcgtcgcaaggctcgggtaaatggcagtcctccggcggggaaaaatcgaagtttggcctggcggcgactcaagtactgcaactggttgaaacgctgcgtgaagccgggcgtctcgacagcctgcaactgctgcacttccacctcggttcgcagatggcgaatattcgcgatatcgcgacaggcgttcgtgaatccgcgcgtttctatgtggaactgcacaagctgggcgtcaatattcagtgcttcgacgtcggcggcggtctgggcgtggactatgaaggcacccgttctcagtctgactgctccgtaaactacggcctcaatgaatacgccaacaacatcatctgggcgattggtgatgcgtgtgaagaaaatggtctgccacatccgacggtaatcaccgaatcgggtcgtgcggtgactgcgcatcacaccgtgctggtgtcgaatatcatcggcgtggaacgtaacgaatacacggtgccgaccgcgcctgcagaagacgcaccgcgcgccctgcaaagcatgtgggaaacctggcaggaaatgcacgaaccgggaactcgccgttctctgcgtgaatggttacacgacagccagatggatctgcacgacattcatatcggctactcttccggcacctttagcctgcaagaacgcgcatgggctgagcagctttatttgagcatgtgccatgaagtgcaaaagcagctggatccgcaaaaccgtgctcatcgtccgattatcgacgagctgcaggaacgtatggcggacaaaatgtacgtcaacttctcgctgttccagtcgatgccggatgcgtgggggatcgaccagttgttcccggttctgccgctggaagggctggatcaagtgccggaacgccgcgctgtgctgctggatattacctgtgactcagacggtgctatcgaccactatattgatggtgacggtattgccacgacaatgcctatgccggagtacgatccggagaatccgccgatgctcggtttcttcatggtcggcgcatatcaggagatcctcggcaacatgcacaacctgttcggtgataccgaagcggttgacgtgttcgtcttccctgacggcagcgtagaagtagaactgtctgacgaaggcgataccgtggcggatatgctgcaatatgtacagctcgatcctaaaacgttgttaacccagttccgtgatcaagtgaagaaaaccgatcttgatgctgaactgcaacaacagttccttgaagagttcgaggcaggtttgtacggttatacctatcttgaagatgaataa

SEQ ID NO: 29301 - DNA, 252 bp, Escherichia coli; identical to SEQ ID NO: 2348

SEQ ID NO: 29302 - DNA, 1155 bp, Escherichia coli
atggcaaaacacctttttacgtccgagtccgtctctgaagggcatcctgacaaaattgctgaccaaatctctgatgccgttttagacgcgatcctcgaacaggatccgaaagcacgcgttgcttgcgaaacctacgtaaaaaccggcatggttttagttggcggcgaaatcaccaccagcgcctgggtagacatcgaagagatcacccgtaataccgttcgcgaaattggctatgtgcattccgacatgggctttgacgctaactcctgtgcggttctgagcgccatcggtaaacagtctcctgacatcaaccagggcgttgaccgtgccgatccgctggaacagggcgcgggcgaccagggtctgatgtttggctacgcaactaatgaaaccgacgtgctgatgccagcacctatcacttatgcacaccgtctggtacagcgtcaggctgaagtgcgtaaaaacggcactctgccgtggctgcgcccggacgcgaaaagccaggtgactttccagtatgacgacggcaaaatcgttggcattgatgctgtcgtgctttccactcagcactctgaagagatcgaccagaaatcgctgcaagaagcggtaatggaagagatcatcaagccgattctgcccgctgaatggctgacttctgccaccaaattcttcatcaacccgaccggtcgtttcgttatcggtggcccgatgggtgactgcggtctgactggtcgtaaaatcatcgttgatacctacggcggcatggcgcgtcatggtggcggtgcattctccggtaaagatccatcaaaagtggaccgttccgcagcctacgcagcacgttatgtcgcgaaaaacattgttgctgctggcctggccgatcgttgtgaaattcaggtttcctacgcaatcggcgtggctgaaccgacttccatcatggtagaaactttcggtactgagaaagtgccttctgaacaactgactctgctggtacgtgaattcttcgacctgcgcccatacggtctgattcagatgctggatctgctgcacccgatctacaaagaaaccgcagcatacggtcactttggtcgtgaacatttcccgtgggaaaaaaccgacaaagcgcagctgctgcgtgatgctgccggtctgaagtaa

SEQ ID NO: 29303 - DNA, 1395 bp, Escherichia coli
atgcctgacgctaaaaaacaggggcggtcaaacaaggcaatgacgtttttcgtctgcttccttgccgctctggcgggattactctttggcctggatatcggtgtaattgctggcgcactgccgtttattgcagatgaattccagattacttcgcacacgcaagaatgggtcgtaagctccatgatgttcggtgcggcagtcggtgcggtgggcagcggctggctctcctttaaactcgggcgcaaaaagagcctgatgatcggcgcaatcttgtttgttgccggttcactgttctctgctgctgcgccaaacgttgaagtactgattctttcccgcgttttgctggggctggcagtgggtgtggcctcttataccgcaccgctgtacctctctgaaattgcgccggaaaaaattcgcggcagtatgatctcgatgtatcagttgatgatcactatcgggatcctcggcgcttatctttctgataccgccttcagctacaccggtgcatggcgctggatgctgggtgtgattatcatcccggcaattttgctgctgattggtgtcttcttcctgccagacagcccacgttggtttgccgccaaacgccgttttgttgatgccgaacgcgtgctgctacgcctgcgtgacaccagcgcggaagcgaaacgcgaactggatgaaatccgtgaaagtttgcaggttaaacagagtggctgggcgctgtttaaagagaatagcaacttccgccgcgcggtgttccttggcgtactattgcaggtaatgcagcaattcaccgggatgaacgtcatcatgtattacgcgccgaaaatcttcgaactggcgggttataccaacaccaccgagcaaatgtgggggacagtgattgtcggcctgaccaacgtacttgccacctttatcgcaatcggccttgttgaccgctggggacgtaaaccaacgctaacgctgggcttcctggtgatggctgctggtatgggcgtactcggtacaatgatgcatatcggtatccactctccgtcggcgcagtatttcgccatcgccatgctgctgatgtttattgtcggttttgccatgagtgccggtccgctgatttgggtactgtgctccgaaattcagccgctgaaaggccgcgattttggcatcaccagctccactgccaccaactggattgccaacatgatcgttggcgcaacgttcctgaccatgctcaacacgctgggtaacgccaacaccttctgggtgtatgctgctctgaacgtactgtttatcctgctgacattgtggctggtaccggaaaccaaacacgtttcgctggaacatattgaacgtaatctgatgaaaggtcgtaaactgcgcgaaatcggcgctcacgattaa

SEQ ID NO: 29304 - DNA, 552 bp, Escherichia coli
atggaggaagccacctcttgcagtcatcttttcttcgctctatcctctgccgctatgaaaacatcccgtctccctatcgccatccaacaggccgttatgcgtcgcctgcgggaaaaactcgcccaggccaacctgaagctagggcgtaactacccggagccaaaactctcttacacccagcgcggaacctctgccggaacagcctggctggaaagctatgaaattcgtctcaatcccgttttgctgttggaaaacagtgaagcctttattgaagaagtggtgccgcacgaactggcacatttgctggtatggaaacatttcggccgcgtagcgccacatggcaaagagtggaagtggatgatggaaagcgtgctgggcgttcccgcccgccgtacgcatcagttcgaactgcaatccgtgcgccgcaacaccttcccctaccgctgcaagtgccaggagcatcagcttaccgtacgccgtcataatcgcgtagttcgtggcgaagccgtctatcgctgtgttcactgcggcgaacagctggttgcgaaataa

SEQ ID NO: 29305 - DNA, 708 bp, Escherichia coli
atgtaccgttatttgtctattgctgcggtggtactgagcgcagcattttccggcccggcattggccgaaggtatcaatagtttttctcaagcgaaagccgcggcggtaaaagtccacgctgacgcgcccggtacgttttattgcggatgtaaaattaactggcagggcaaaaaaggcgttgttgatctgcaatcgtgcggctatcaggtgcgaaaaaatgaaaaccgtgccagccgcgtagagtgggaacacgtcgttcctgcctggcaattcggtcaccagcgccagtgctggcaggacggtggacgtaaaaattgcgccaaagatccggtctatcgcaagatggaaagcgatatgcataacctgcagccgtcagtcggtgaggtgaatggcgatcgcggcaactttatgtacagccagtggaatggcggtgaaggccagtacggtcaatgcgccatgaaggtcgatttcaaagaaaaagttgccgagccaccagcgcgtgcacgcggtgccattgcgcgcacctacttctatatgcgtgaccaatacaacctgacactctctcgtcagcaaacgcagctgttcaacgcatgggacaagatgtatccagttaccgactgggagtgcgagcgtgatgaacgcatcgcgaaggtgcagggcaatcataacccgtatgtgcaacgcgcttgccaggcgcgaaagagctaa

SEQ ID NO: 29306 - DNA, 732 bp, Escherichia coli
atgcgtatcccccgcatttatcatcctgaaccactgaccagccattctcacatcgcgctttgcgaagatgccgccaaccatatcgggcgcgtactgcgtatggggccgggacaggcgctgcaattgtttgacggcagcaaccaggtctttgacgccgaaattaccagcgccagcaaaaaaagcgtggaagtgaaggtgctggaaggccagatcgacgatcgcgaatctccgctgcatattcacctcggtcaggtgatgtcgcgtggtgaaaaaatggaatttactatccagaaatcgatcgaactcggtgtaagcctcattacgccacttttttctgagcgctgcggcgttaaactggatagtgaacgtctgaacaagaagctccagcagtggcagaagattgcaattgctgcctgtgagcagtgtggccgtaaccgggtgccggaaatccgtccagcgatggatctggaagcctggtgtgcagagcaggatgaaggactgaaactgaatcttcacccgcgcgccagtaacagcatcaatacgttgccgttaccggtcgaacgcgtccgcctgctgattggcccggaaggcggtttatcggcagatgaaattgccatgactgcccgctatcaatttactgatatcctgttgggacctcgcgttttgcgtactgagacaactgcgctcaccgccattaccgcgctacaagtgcgttttggcgatttgggctaa

SEQ ID NO: 29307 - DNA, 951 bp, Escherichia coli
atgatcaagctcggcatcgtgatggaccccatcgcaaacatcaacatcaagaaagattccagtttcgctatgttgctggaagcacagcgtcgtggttacgaacttcactatatggagatggccgatctctatttgatcaatggtgaggctcgcgctcgtacccatactttgagcgtcgaacagaactacgataaatggtacgagttcacgggtgagcaggatctgccgctggccgatctcgatgtgatcctgatgcgtaaagacccgccgtttgataccgagtttatctacgcgacctatattctggaacgtgccgaagataaagggacgctgatcgttaacaagccgcagagcctgcgcgattgtaacgaaaaactgttcactgcctggttctctgacttaacaccagaaacgctggtcacacgcaataaagcgcagctaaaagctttctgggaaaaacacagcgacatcattcttaagccgctggacggtatgggcggcgcgtcgattttccgcgtgaaagaaggtgatccaaacctcggcgtgattgccgaaaccctgactgagcatggcactcgctactgcatggcgcaaaattacctgccagccattaaagatggcgacaaacgcgtgctggtagtggatggcgagccggtgccgtattgcctggcgcgtattccgcaggggggcgaaacccgtggcaatctggctgccggtggtcgcggtgaacctcgtccgctgacggaaagtgactggaaaatcgcccgtcagattgggccgacgctgaaagaaaaagggctgatttttgttggtctggatatcatcggcgaccgtctgactgaaattaacgtcaccagcccaacctgtattcgtgagattgaagcagagtttccggtgtcgattaccggaatgttaatggatgccatcgaagcacgtttacagcagcagtaa

SEQ ID NO: 29308 - DNA, 636 bp, Escherichia coli
gtgacagcgcccttctttccacgcatactgggcgctgttgcttttttgaaccaggaaacagaacctctgacaatgaatttacagcatcactttcttattgccatgcctgctctccaggatccgattttccgtcgttccgtggtctacatttgcgaacataataccaatggtgcaatggggatcatcgtcaacaagccgctggaaaatctcaaaattgaagggattctggaaaaactgaagatcacgccggagccgcgtgatgaatcaatccgtctggataaaccggttatgctcggcggtccgctggctgaagatcgcgggtttattttgcatactccgccctccaattttgcttccagcattcgcatttcagacaacacagtgatgaccacttcccgcgatgtgctggaaacgctcggcaccgataaacaaccgtctgacgtattggtggctctgggttatgcctcctgggagaaaggtcaactggaacaagaaattctcgataacgcgtggctaacggccccggcagatctgaatattctgttcaaaacgccgattgcggaccgctggcgcgaggcggcaaaactgattggtgtggatattctcaccatgcctggtgtggcaggacacgcctga

SEQ ID NO: 29309 - DNA, 417 bp, Escherichia coli
atgagtggaaccttactcgccttcgacttcggcaccaaaagcattggcgtagcggtcggtcaacgcattaccggcaccgctcgccctttgcctgcaattaaagcgcaggacggtacgccggactggaacattatcgagcgtttactgaaagagtggcagccggacgaaatcatcgtcggtttgccgctgaatatggacggcaccgaacagccgttaaccgccagagcgcgtaaatttgccaaccgtattcatggtcgtttcggtgttgaagtaaagctccatgacgagcgtcttagcaccgtggaggcacgttccggtctgtttgaacagggcggctatcgggcgctcaacaaaagcaaagtcgactctgcctctgcggttattattctcgaaagctatttcgagcagggatattaa

SEQ ID NO: 29310 - DNA, 981 bp, Escherichia coli
atgaatatggaagaaattgtggcccttagtgtaaagcataacgtctcggatctacacctgtgcagcgcctggcccgcacgatggcgtattcgcgggagaatggaagctgcgccgtttgacgcgccggacgtcgaagagctactgcgggagtggctggatgacgatcagcgggcaatattgctggagaatggtcagctggattttgctgtgtcgctggcggaaaaccagcgattgcgcggcagtgcgttcgcacaacggcaaggtatttctctggcgttacggctgttaccttcgcactgcccgcagctcgaacagcttggcgcaccaccggtattgccggaattactcaagagcgagaatggcctgattctggtgacgggggcgacggggagcggcaaatctaccacgctggcggcgatggttggctatctcaatcaacatgccgatgcgcatattctgacgctggaagatcctgtggaatatctctataccagtcagcgatgtttgatccagcagcgggagattggtttgcactgtatgactttcgcatcgggattgcgggctgcattgcgggaagatcctgatgtgattttgctcggagagctgcgtgatagcgagacaatccgtctggcgctgacggcggcagaaaccgggcatctggtgctggcgacattacacacgcgcggcgcagcgcaggcagttgagcgactggtggattcatttcctgcgcaggaaaaagatcccgtgcgtaatcaactggcaggtagtttacgggcagtgttgtcacaaaaactggaagtggataaacaggaaggacgcgtggcgctgtttgaattactgattaacacacccgcggtggggaatttgattcgtgaagggaaaacccaccagttaccgcatgttattcaaaccgggcagcaggtggggatgataacgtttcagcagagttatcagcagcgggtgaaagaagggcgcttgtga

SEQ ID NO: 29311 - DNA, 705 bp, Escherichia coli
atgaacgatattgcgcataacctggcacaggtccgggacaaaatctcagcggctgcaacgcgttgcggccgttctccagaagaaattacgctgcttgcagtcagtaaaacaaaacctgcgagcgccatcgcagaagccattgatgccgggcagcgtcaatttggtgaaaactacgttcaggaaggggtagataaaattcgctactttcaggaactgggcgtaacaggattagaatggcattttattggcccgttgcagtctaataaaagccgcctggtggcagagcatttcgactggtgtcataccatcgaccgtttgcgcatcgctacccgtctgaacgaccagcgcccggcagaacttccccctcttaacgtactgattcaaattaacattagtgatgaaaacagtaagtccgggattcaactggctgaactggacgagctggcagctgcggtcgctgaactaccgcgtttacgtctgcgcgggctgatggcaatccctgcgcctgagtcagaatatgtaaggcagtttgaagttgcacgccaaatggctgtagcatttgccggactgaaaacgcgctacccgcatatcgacacgctctctctgggaatgtcggacgatatggaagccgccattgcggcaggtagcacgatggttcgtatcggcactgcaatttttggtgcgcgtgattactctaaaaaataa

SEQ ID NO: 29312 - DNA, 567 bp, Escherichia coli
atgaatacgttgactttcctgctttcaacggtcattgagctgtataccatggtgctgttattacgcatctggatgcagtgggctcattgtgatttttacaaccccttctcacagtttgtagtgaaggtaacgcagccgattatcgggccactgcgccgcgttattccggcaatgggccccattgatagcgcctcgctgctggttgcctatattctcagtttcgttaaagccatcgtgctgtttaaagtggtgaccttcctgccaatcatttggattgccggtttattgattctgctgaaaaccatcggcctgctgatattctgggtcctgctggtgatggcgattatgagctgggtaagccagggtcgtagcccgattgaatacgtgctgattcagctggccgatccgctgctgcgcccgattcgccgcttgctaccggcaatgggtgggattgatttctcgccgatgatcctcgttctgctgctgtatgtcatcaatatgggtgtcgcagaagtcttgcaggcgaccggaaatatgctgctgccggggctgtggatggcgttatga

SEQ ID NO: 29313 - DNA, 291 bp, Escherichia coli
atgagtgccgtaacagttaatgatgacggtctggttttacggctctatattcagccgaaagccagccgtgattctattgtcggtttacatggcgacgaggtaaaagtcgccattaccgcgccgccggttgacggccaggccaacagccatctggtgaagtttctcggtaagcaattccgggttgccaaaagccaggtggtgattgaaaaaggcgaacttggccgccacaaacaaattaaaatcattaatccgcaacaaatcccgccagaaatcgcggcgttaattaattag

SEQ ID NO: 29314 - DNA, 594 bp, Escherichia coli
atgcaaaaagttgtcctcgcaaccggcaatgccggcaaagtgcgtgagctggcgtcgctgcttagcgacttcggtcttgatatcgttgcccaaacagacctcggcgtagattccgctgaagaaaccggcctgacctttatcgaaaacgcgattctgaaagcgcgccatgcggcaaaagtgaccggtttaccggcaattgccgacgactccggtctggcggtagatgcgctgggtggcgcgccgggtatttactccgcgcgttattccggtgaagacgcgaccgatcaaaagaatctgcaaaaactgctggaaacaatgaaagacgtaccggacgaccaacgtcaggcgcgtttccactgcgtgctggtatatctgcgtcacgcggaagatcccactccgctggtgtgccacggtagctggccgggcgtgattactcgtgaaccagcgggcactggtggctttggttatgatccaatcttcttcgtaccttccgaagggaaaactgctgccgaactgacccgcgaagaaaagagcgccatttcccaccgtggtcaggcgttgaaactgctgctggacgctttacgtaatggttaa

SEQ ID NO: 29315 - DNA, 1137 bp, Escherichia coli
atggttaaattaccgccgctgagtctctacattcacatcccgtggtgcgtgcagaaatgcccgtactgcgatttcaactctcacgcgttgaaaggagaagtgccgcacgacgattatgttcagcatctgcttaacgatctgaacaacgatgtggcttacgctcagggccgtgaagtaaagacaatctttattggcggtggtacgccgagcctgctttccggcccggcgatgcaaacgctgctggacggcgtacgtgcgcgtttgccgctggcagcggatgcagaaattacgatggaagcgaatcctggtacggttgaagccgatcgctttgttgattatcagcgtgctggtgtgaaccgcatctccattggcgtacagagttttagcgaagaaaagctgaaacgacttgggcgcattcatggcccgcaagaagcgaaacgagctgcgaatctggcaagcgggctggggctgcgtagttttaaccttgatttgatgcatgggctgccggatcaatcactggaagaggcgcttggcgatctgcgccaggccattgaactgaatccgccgcatctttcctggtatcaactgaccatcgaacctaatacgctgtttggctcgcgccctcctgtactgccggacgatgacgcgctgtgggatattttcgaacaggggcatcagttattaaccgcagcgggttatcagcaatatgaaacttccgcttacgccaaacccggttatcagtgccagcacaatctcaactactggcgctttggtgactacatcggtattggctgcggcgcgcatggcaaagtgaccttcccggatgggcgcattctgcgtaccaccaaaacgcgtcatccacgtggttttatgcaggggcggtatctggaaagccagcgagatgtcgaagccgcagataaaccatttgagttctttatgaatcgcttccgtctgctggaacctgcgccgcgcgtggagtttagccagtatacaggcctttctgaagcagttattcgttctcagttagacgaggctatcgctcagggttatctcacagaatgtgcggattactggcagataacggaacatgggaagttgtttttaaattcgctgctggagctttttctggctgagtaa

SEQ ID NO: 29316 - DNA, 1047 bp, Escherichia coli
atggagtttttcaaaaagacggcacttgccgcactggttatgggttttagtggtgcagcattggcattacccaatatcaccattttagcaaccggcgggaccattgccggtggtggtgactccgcaaccaaatctaactacacagcgggtaaagttggcgtagaaaatctggttaatgcggtgccgcaactgaaggacattgcgaacgttaaaggcgagcaggtagtgaatattggctcccaggacatgaacgatgatgtctggctgacactggcgaaaaaaattaacaccgactgcgataaaactgacggcttcgtcattacccacggtaccgacacgatggaagaaaccgcttacttcctcgacctgacggtgaaatgcgacaaaccggtggtgatggtcggtgcaatgcgcccgtccacgtctatgagcgcagacggtccattcaacctgtataacgcggtagtgaccgcagctgataaagcctccgctaatcgtggcgtactggtagtgatgaacgacaccgtacttgatggccgtgatgtcaccaaaaccaacaccaccgacgtagcgaccttcaagtctgttaactacggtcctctgggttacattcacaacggtaagattgactaccaacgtaccccggcacgtaagcacaccagcgacacgccgttcgatgtctctaagctgaatgaactgccgaaagtcggcattgtttataactacgctaacgcatccgatcttccggctaaagcactggtagatgcgggctatgatggcatcgttagcgctggcgtgggtaacggcaacctgtataaaaccgtatttgacacccttgcaaccgctgcgaaaaacggcactgcagtagtgcgttcttcccgcgtaccgacgggcgctaccactcaggatgccgaagtggatgatgcgaaatacggcttcgtcgcctctggcacgttgaacccgcaaaaagcgcgcgttctgctgcaactggctctgacgcaaactaaagatccgcagcagatccagcagatcttcaatcagtactaa

SEQ ID NO: 29317 - DNA, 720 bp, Escherichia coli
atgatgcgcaaaatgctgctggcggcagcactttcagtgacggcaatgaccgctcacgccgactaccagtgcagcgtcacgccgcgtgacgatgtgattgtcagcccgcaaaccgtgcaggtgaagggcgaaaacggcaatctggtgatcacgccagacggcaacgtgatgtataacggtaagcaatattccctgaatgccgcccagcgcgagcaggcgaaggattatcaggctgaactccgtagcaccctgccgtggattgatgaaggcgcgaaaagccgcgtcgaaaaagcccgtattgcgctggataaaattatcgttcaggagatgggcgaaagcagcaaaatgcgcagccgtctgaccaaacttgatgcgcagctgaaagagcagatgaaccgcattatcgaaacgcgcagcgatggcctgacgttccactataaagccattgatcaggttcgcgccgaaggccagcaattagtgaatcaggcaatgggcggaattttacaggacagcattaatgaaatgggcgcgaaagcggtgctgaaaagcggcggtaacccattacagaacgtgctgggaagcctgggcggtctgcaatcctcaatccaaaccgagtggaaaaagcaggaaaaagatttccagcagtttggcaaagatgtttgtagccgcgttgtgactctggaagatagccgcaaagccctggtcgggaatttaaaataa

SEQ ID NO: 29318 - DNA, 327 bp, Escherichia coli
atggcaaagaaccgtagccgtcgtctgcgtaaaaaaatgcacatcgacgaattccaggaattaggattttcggtggcatggcgattcccggaaggtacatcggaagaacagattgataaaaccgttgatgactttattaacgaggttatcgaaccgaacaaactggcctttgacggcagcggttatctggcctgggaaggtctgatctgcatgcaggaaatcggcaaatgcaccgaagaacatcaggcgattgtgcgtaagtggctggaagaacgcaaaatggaagaggtacgcaccagcgaacttttcgacgtttggtgggactaa

SEQ ID NO: 29319 - DNA, 720 bp, Escherichia coli; identical to SEQ ID NO: 2367

SEQ ID NO: 29320 - DNA, 1053 bp, Escherichia coli
atgcaagcgtcgcaattttcagcccaggttctggactggtacgataaatacgggcggaaaacgctgccctggcaaattgacaagacgccctacaaagtatggctctcagaagtgatgttgcaacaaactcaggttgcgaccgttatcccctattttgaacgctttatggtgcgcttcccaacggtgaccgatctcgccaatgcgccgctcgacgaagttctccacttgtggaccgggcttggctattacgcccgagcgcgcaatctgcataaagcggcacaacaagtggcggccttacacggcggtaaattcccggaaacctttgaggaagttgcagtactgccgggcgtcgggcgttccaccgcaggcgcgattctctcgctttctctgggtaagcactttccgattctcgacggtaacgtcaaacgcgtgctggcgcgctgctatgctgtaagcggctggcccgggaaaaaagaggtcgagaataaactatggagtttgagcgagcaggtgacgcccgcggttggcgtggaacggtttaaccaggcgatgatggatttgggcgcgatgatttgtacgcgctctaagccgaaatgttcgctctgtccgctacaaaacggatgtattgccgccgccaacaatagctggtcgctttatccgggcaaaaaaccgaaacagacgctgccagagcgcaccggctactttttgctgttacagcacgaagatgaagtattgctggcgcagcgtccgccgagcggattgtggggcggtttatactgtttcccgcagtttgccgatgaagaaagtttgcggcagtggctggcgcaacgacagatttctgccgataacctgacgcagctgaccgcgtttcggcataccttcagccatttccacttagatattgtgcctatgtggcttcccgtgtcgtcattcaccggctgcatggatgaagacaatgcgctctggtataacttagcgcaaccgccgtcagttggcctggcggctcccgtggagcgtttgttacagcagttacgcactggcgcgccggtttag

SEQ ID NO: 29321 - DNA, 276 bp, Escherichia coli; identical to SEQ ID NO: 2369

SEQ ID NO: 29322 - DNA, 1080 bp, Escherichia coli
atgaaaaaatatctcgcgctggctttgattgcgccgttgctcatctcctgttcgacgaccaaaaaaggcgatacctataacgaagcctgggtcaaagataccaacggttttgatattctgatggggcaatttgcccacaatattgagaacatctggggcttcaaagaggtggtgatcgccggtcctaaggactacgtgaaatacaccgatcaatatcagacccgcagccacatcaacttcgatgacggtacgattactatcgaaaccatcgccgggacagaacctgccgcgcatttgcgccgggcaataatcaaaacgttgctgatgggggacgatccgagttcggtcgatctctattccgacgttgatgatattacgatttcgaaagaacctttcctttacggtcaggtggtggacaacaccgggcagccgattcgctgggaaggtcgcgcgagcaacttcgcggattatctgctgaaaaaccgtctgaagagccgcagcaacgggctgcgtatcatctacagcgtcaccattaacatggtgccgaaccaccttgataaacgtgcgcacaaatatctcggtatggtccgccaggcgtcacgcaaatatggcgttgatgagtcgctgattctggcaattatgcagactgaatcttcctttaacccgtatgcggtcagccgttccgatgcgctgggattaatgcaggtggtacaacataccgccgggaaagatgtgttccgctcgcaggggaaatccggcacgccgagccgcagtttcttgtttgatcctgccagcaatattgataccggcaccgcgtatctggcgatgctgaacaacgtttatctcggcggaattgataacccaacatcgcggcgttatgccgtcatcaccgcctataacggcggcgcaggcagcgtgctacgagtcttttcgaatgataagattcaggctgccaatattattaacaccatgacgccgggcgatgtttatcagacgctgacgacccgccatccctctgcggaatctcgccgttatctttataaagtgaataccgcgcaaaaatcttaccgccgccgataa

SEQ ID NO: 29323 - DNA, 1257 bp, Escherichia coli
atgaatcttaagctgcagctgaaaatcctctcttttctgcagttctgtctgtggggaagttggctgacgaccctcggctcctatatgtttgttaccctgaagtttgacggtgcttctatcggcgcagtttatagctcactgggtatcgccgcggtctttatgcctgcgctgctggggattgtggccgacaaatggttaagtgcgaaatgggtctatgccatttgccacaccattggcgctatcacgctgttcatggcggcagaggtcactacgccggaggcgatgttccttgtgatattgattaactcgtttgcttatatgccaacgcttgggttaatcaacaccatctcttactatcgcctgcaaaatgccgggatggatatcgttactgacttcccgccaatccgtatctggggcaccatcggctttatcatggcaatgtgggtggtgagcctgtccggcttcgaattaagccacatgcagctgtatattggcgcagctctttccgccgttctggttctgtttaccctgactctgccgcatattccggttgctaaacagcaagcgaatcagagctggacaaccctgctgggcctcgatgcattcgcgctgtttaaaaacaagcgtatggcaatcttcttcatcttctcaatgctgctgggcgcggaactgcagattaccaacatgttcggtaataccttcctgcacagcttcgacaaagatccgatgtttgccagcagcttcatcgtgcagcatgcgtcaatcatcatgtcgatttcgcagatctctgaaaccctgttcattctgaccatcccgttcttcttaagccgctacggtattaagaacgtaatgatgatcagtattgtagcgtggatcctgcgttttgctctgtttgcttacggcgacccgactccgttcggtactgtactgctggtactgtcgatgatcgtttacggttgcgcattcgacttcttcaacatctctggttcggtgtttgtcgaaaaagaagttagtccggcaattcgcgccagcgcgcaggggatgttcctgatgatgaccaacggcttcggctgtatcctcggcggcatcgtgagcggtaaagtggttgagatgtacacccaaaacggcattaccgactggcagaccgtatggctgattttcgcaggttactccgtggttctggccttcgcgttcatggcgatgttcaaatataaacacgttcgtgtcccgacaggtacacagacggttagccactaa

SEQ ID NO: 29324 - DNA, 2136 bp, Escherichia coli
atgaaatcaatgaatattgccgccagtagtgaactggtatcccgactttctactcatcgccgcgtggtggcgttggcagatactgattttacggacgtcgcggcagtcgtcattaccgctgcggatagtcgcagtggcattcttgcgttgcttaagcgcaccggttttcatctaccggtgtttttgtattccgaacatgttgttgaattacctgcgggcgttacggcggtaatcaacggcaacgagcagcagtggctggagctggaatccgcagcctgtcagtatgaagagaatttgctgccaccgttttatgacacgctgacgcagtacgttgagatgggtaatagcacctttgcttgccctggacatcaacatggtgcgttctttaaaaagcatcctgccggacgccatttttacgatttctttggcgagaacatctttcgcgccgatatgtgtaacgctgacgtaaaattgggcgatctgctgattcatgaaggatcggcgaaagatgcgcagaaattcgcagccaaagtctttcatgccgataaaacctattttgtgctgaacggcacatcggcagcgaataaagtggtgacgaatgcgctgttaacgcgtggcgatttggtgctcttcgaccgtaacaaccataagtcgaatcatcacggcgcgttgattcaggcgggggcgacgccggtctatctggaagcttcacgtaacccgtttggtttcattggcggtattgatgcgcactgttttaatgaagagtatctgcgccagcaaattcgcgacgttgcgccagaaaaagccgacctgccgcgcccgtttcgcctggcgattattcagctgggaacctatgacggcactgtctataacgcccgtcaggtgatcgataccgttgggcatctgtgtgattacattctgtttgattccgcgtgggtcggttacgaacagtttatcccgatgatggcggatagctcgccgctgctgttagaacttaacgaaaacgatccggggatctttgtgacccagtcggtgcacaaacagcaggcgggattctcacagacgtcgcagatccataaaaaagataaccatatccgtggacaggcgcgtttttgcccgcataagcggttgaataatgcctttatgctccatgcttctaccagcccgttctatccgctgttcgccgcgctggacgttaacgccaaaattcatgaaggggagagtgggcgtcggctgtgggcggagtgcgttgcgttggggattgaagcccggaaggcgattcttgcgcgctgtaagctgttccgcccgtttatcccgcccgttgttgatggcaaattgtggcaggattatccgacgtcagtgttagccagcgaccgccgttttttcagttttgagccgggggcgaagtggcacggctttgaaggatatgccgcggatcagtattttgttgatccgtgcaagctgttactcaccacgccgggtatcgatgccgaaaccggcgaatatagcgattttggcgttccagcgacgattctggcgcactacctgcgtgagaacggcattgtgccggagaagtgcgatctcaactccattctgttcttattaactccggcggaaagccacgagaagctggcacaactggtggcgatgctggcgcagtttgaacagcatattgaggatgactcgccgctggctgaggtgttgccgagcgtttataacaaatatccggtgcgctatcgcgactacaccctgcgtcagttgtgtcaggagatgcacgatctgtatgtcagtttcgacgtcaaagacctacaaaaagcgatgttccgccagcagagtttcccgtcagtggtgatgaatccccaggatgcgcatagcgcttatattcgcggtgaagtggagttggtgcggattcgtgatgccgaagggcgaattgcggcagaaggggcgttgccttatccacctggcgtgctttgcgtggtacccggggaagtctggggtggggcggttcaacgttatttccttgcgctggaagaaggcgtgaatttgttgccgggattttcgccggagttgcaaggtgtctatagcgaaaccgatgcgaatggcatgaaacggttgtacggttatgtgttgaagtaa

SEQ ID NO: 29325 - DNA, 708 bp, Escherichia coli
gtggtcatcggcccttttatcaacgctagtgcagtcttactgggtggcgttctcggcgcactgctcagccaacgcttaccggaacgtatccgcgtctccatgacatcaatttttggtctggcatcgctggggattggtattttactggtggtgaaatgcgccaaccttccggcgatggttttagcaaccttactcggtgcattaatcggcgaaatttgtctgctggaaaaaggcgtcaataccgcggtcaccaaagcacaaaatctgtttcgccactcacgtaagaagccagcgcatgaatcttttattcagaattatgtcgcgattattgtcctgttttgcgccagcggcaccgggatcttcggggcgatgaacgaagggatgaccggcgatccgagtattttaatcgccaagtcatttcttgatttctttacggcgatgatcttcgcctgctcgctgggtattgcggtatcggtgattagtatcccattactgatcatccagttaacgctggcgtgggctgccgcgctgatattaccgctgaccacaccgtcgatgatggcagacttcagcgccgtaggcggtttattgctgctggcaaccggattacgcatctgtggcattaaaatgttcccggtggtcaacatgcttccagcactccttctggcaatgcccctttccgccgcctggaccgcctggtttgcctga

SEQ ID NO: 29326 - DNA, 1179 bp, Escherichia coli; identical to SEQ ID NO: 6810

SEQ ID NO: 29327 - DNA, 246 bp, Escherichia coli; identical to SEQ ID NO: 6811

SEQ ID NO: 29328 - DNA, 381 bp, Escherichia coli
atgctgacacctgataacgtctggctggccgtgaaacccgtcgatatgcgtgccggtatcgacaccctgacccagtacgttcagaacgaacttaacgcagcatggcatgacggagctgcttttgtctttaccaacaaagcccgctcccggataaaagttctccggtgggacaaacatggtgtatggctgtgtacccgacgactgcaccggggaagcttccgctggccccggaaaggtgatgccacatggcatctcacaccggatgagtttcactggctcgtctgtggcgttgactggccacaggtgaaagggcatgacctggcaaaatgggtataccgggaaccgcctccggatgcgcagcatatcacagtaaccacatga

SEQ ID NO: 29329 - DNA, 336 bp, Escherichia coli; identical to SEQ ID NO: 11360

SEQ ID NO: 29330 - DNA, 483 bp, Escherichia coli
atgaaaaaattagcgatcatggccgcgaccagcactatcctcgcgatgagctcctcgcatgcagcgttcacaggaagtggtagcaccggtacgacaaaactaaccgttaccgaacagtgccaagtgctggtcaccggatctgacgccaccaaaacgcgcggagaactcaccgacggggcccgtgtgggggtcctgtccgtaaccgcaaaaggctgtaacaccgagcatgcagcgttgcgtgcacagccagacaactaccaccagggcaagatcgtactgctccgcgatgaccagcaggcacggataaatgtccgcttgcagtccttcgacgggagtgcgtggaataccaacggcgacaccgtataccgcgccgatgctgggaactggggtggcaacttgctcgtagtcgtggacggggacaacgtggacaaaccggccgggtcctacatactgaacctggacgggggctactgggtgagttga

SEQ ID NO: 29331 - DNA, 1296 bp, Escherichia coli
gtgacggatatttcaccgacagggcggcaggtgtttccgctgacggcagggcgcaatgtgtttctggccggtctggaatggaaaacactgccctcacagtaccggcatgcccgcgactttgcccgggcacagaaagccgaccttttcctggcctgtcagtatctcagtaatgaagatgccgatacccacaccatggtagccactgtcagtcgccgcatactgcccggaaaaccccgtcagtgcttctccctcgccctgctgatcctgccactacttgaacatggcggctatgccatcacggaactgacgttacccggagaaacaccgcactatagctttgtttccgttgtcgacggtgttctcgtcagtgacctggtgggaagcggggaagaggttcgggaagcccgggatacctttctttccatcaacaccgaaccgactcagggctggatacactatgaaccagcggcattttcagcaggcgctcagaatcagcacctgccgctggcctccctgactggctctggtaaacatccggctgccgcacgcctgaatccggtatcccggggaccgcagttcatcactgtctctctgatcatcgcccttctcggcactgcatggtacggctggcagtattatgaacgctggcagacagaaaaagccgcgcaggcagcggttgcccgacaggccacagaggaacgaatcactcccccctggcccggactccctgaaacagacgcgttcatccggagatgtgctgatatatggacttcactgccactgtctgctgccggatggcgttattcgctggcagaatgttcgactgacggtggcagcggcaatcttcgcgcatcgtacaccaatactgcgggcgcgacagtgactgacttcatccggcgcatcagtgatatgacagacagccgaccgtttattgtgatgccggaaggaaagaccggcggcattggcctgccggtcaccttccggctgtctgaaaacgccgtcacagttgatgcactaccggaaaccgctgtcctgcaggaacgactgacctcgctggctcagtcaatgcaactgaaactggactggcaggaagttaataacagcgtcactgatgagaacggacagatcattcagcccccatggaaagagtatgaccttcagatacagaccacactccctgcacaccatctggctgaacgcctgaaagagccttctgtccgttttatctctgtcacacggcaactggagaacggtcgtttccactatcaatttacaggtaaatattatgcccgataa

SEQ ID NO: 29332 - DNA, 453 bp, Escherichia coli
atgcccgataaagccaaaacccttctgttttcagtcctgctgttaccggccacggcaatggccacaaccggaaatgcagagcaacagaacacacagcaaataaggattgaacagatacaggaagagacagccctgtatgaagccatgctggcaagagagaagatccgccatgaactgcgaacacttgagcagggggggcccgcagaggccggacgtcagcaggaaagcatttccgcagtcacaacaaatacacaggcatcactatccccccgcctgacagcaatattcggtgttcagcctcagctgactgcccggatagaacttccggggggaagcatctccgatgtgaaggcgggccagaacatccccggaaccacttatcacgtggaaaaaatcacgccggacagtgtggtgctggaacagtctggcaccagaaaaaccctgcgaccatga

SEQ ID NO: 29333 - DNA, 1101 bp, Escherichia coli
atgaaatttctggaaaaactcaacagtactgaactggatctgtctgccctgaacagctggacagccagaaaaaccttcggtcttaagcgtgccgagttctatgagtccctcggcggaatgatacgtgacggaacgccgtcactgcgcgccctggagtttatctgtaatgtcgaaactgactttggcacccggaaaggaacatccggcatgtactttctggccagagaatgtattgcctccctgaaagccagcggtatgctgtcgggggccctgcccacatgggttcccccggaagaagcggcactgatcaggaacggtgaagaacgcggaaacatcgccgaagccctgttccaggtcgcaaaaaccgtgaaagcacggcgggaaatggtgagcagtctcatcacactctgtctttatccccttctgctgctttcactctgtgtggtgaatatgtacaacgcacatacccgcatcattcccattgtcagcgcttttgcaccggaggagaaatggtcattccagatgaaagtccttgcagccatgtcagagctggtcatcggctacggtctgtggctcagtggtgccatcatcacgcttgccatcatcatccgcttctcactcagtcgctataccggcccgggacgcagacttcttgacagactgccaccatggtcgctctatcagacttttcatggtgtgaattatctgttcagcatatcgtcaatgctgcagataaatattccgctttcacaggcgctgctcagaattgaaaaaagtgcggagcataataaatggttaaaggagagaattcaggcaataagaaaaaatgtattatccggtcagaatctggccaccgccatgcgcaattctgactatgattttccttcaaaaatatgcatcaataaacttctcttaaattctgaaagggaagacagcgtatctgcaatgaatacctatgccggacagtggctggaagatgcaaaaaagagcgtcagaaaaagtggattaattatcaccggtatttcaggaggttttgtattcttttttattcttaacatgattagcgcgatatacagtatcagcgatatgctcaagcaataa

SEQ ID NO: 29334 - DNA, 537 bp, Escherichia coli
atgaacttcagagcacgtctgtcttcttatttttctttaaaaaaagataaagaagaagataaaggtttaacattattagaaattgccggcgcaatgattatcatcgcaatagttgtcgcgctcgcgatgagccagatgtccagcacaatggcctccagtgataaccagcgcgaactgaaaaacctgcagacaattgcgaccaaaatgaagcaatacaagttccagggaagatataccggaacggattatatcaaaaccctgacggaaagcggtgcattgcctgctgatatgattgcaggaggcaacaaagccaaaaacgcatggggtggtgatgtcacgattgctgccacagcagacaaatatggctacattatcaccagtaataatgttcctaaaacaaactgtgttgagctgattaacagcctgcgcagttcgtccatatttaccaaaattatgaacacagccccgaacatggtggatcccgttaccgtctgcagtagcgataaaaacaatatcaagctggaaaccaacagctaa

SEQ ID NO: 29335 - DNA, 474 bp, Escherichia coli
atgaaatggttttatctctcatctcttttcttattctgtctcccggcgactgccgccgtaaacagtaacacactggatagctgctttattcaggcaggaaaacgttactccatcgatcccggactactgaaagtaattgcccgtaaagaaagcagcctgaatccccgggccatcaatcataacagaaatgccagcggaaaaattatcagcacagattatggcctgatgcagattaattccacacatattcccggactgaaaagaatgggaattatccgaagtgaaaatgaactgctcagtaatgtttgcctgaatatacagacaggtgcatggatccttgcccggcattttcagcagtgtggtgtgaactgggagtgtctcggtagctacaacgccggatttaataaaaataacactcaccgcagaatgaaatatgcccggctgatttatgccgcatatatgcagggacgttaa

SEQ ID NO: 29336 - DNA, 636 bp, Escherichia coli
atgttcctcatcatcttactcgtgatctccgctacgctgaccatacagttacttgccatcagactggccggacattatctcatgcaggtgcataccctccggcgtccacgtcacctctccctgctctgtgctgttctggcactcaccgccaccattacgcacatcatacgggggacagacattgccggactttgctttctgttgctgatggccggctgcatgacactgatgacactgactgatgcagcctcctgccgtcttccccgtcccttcaccctcacattcctgatgctgggtgtggcgtttcgtttatggcagggcgatgctgctattgcgcttgcctgtgctctgttctggtttctcctgttatctctcctgaggcgctacacctcataccgcaagggagtggagacgctgggactgggggacgtgtttctgattgcaggtgtggccatgtggtcatctgccaacagcactccgtggatcatcggtattgccgccgccagcacaatgatctgtatgtcgctgttcccgcgcagtaatactggggccgctattccgttcggtccgtttatctgtgcatcactctacattttcactttttttcctggtgccatttttcacaccggagggtaa

SEQ ID NO: 29337 - DNA, 291 bp, Escherichia coli
atgaaacacttatcctcccgtgcagccactgcggataataatcgtatcgttacaattgaagacgtttacacaatcgcattctcgcaaccaattcacaccgaatcagcgttggggcaaaggtggatgttgatccatactggtgaatatgaaagtgccagcgatgcaaaacgcttccttgatacgctcgtcaccgggcactgtgcttgcatggtaacaccatcacctgttctggatcatgacacctggctgcgtatccgcctgctgatgggcgagataagggatgccaaataa

SEQ ID NO: 29338 - DNA, 321 bp, Escherichia coli
atgaaaattaaacagcataaagaaaaactggagattataagggatattattcgagagacgctgttgggtaatgctgctcttattgttctggcagccatggttccggttgtactggtgaaaccatgggattcgatgacatttatttttatgggggccgtgtgtgtttcttttgcagtcattctgttctggctggtttatatagtttgtttgtatataggaacgcttgtaaagaatatttttataaggatttttgctttttctatttgggccctttctgctgagggggcaattatttataacatgataaagatattatcatag

SEQ ID NO: 29339 - DNA, 822 bp, Escherichia coli
atgaaacccaacagcacaggcattgctgcccgcatgatgctctccattgacagggcccggattagcgaagctctgctcaataaccgccagttgcagtccactcccctgcagatccgttatccgcagggcgtcagagaagcactcggaataatgagcgagcaactctccctttctgtatccgacctgacgcgtatcctggtcgaagatgcattaactgaaatgtttctcccggctgaaaacatcgttcaccgtcttatctgccggacagaacacatcatgcaggcacatgatgtctgcgtaacaacgatgacaacgttactggctccctggaatatccgtcctgccgttttccgtgacccggacaaactcacagattatctgacaggagagattctgactgctctggctgactggttttatctcaacccggaatggctgaacggcagggttcgttatcctttaagccgtgccggtgagtggccagccacacaggatgcgttctgccagcttatttcagccagcgataatgtggatattattatctggcacagttttccttttgccggtgttcattcacaggaatattgcggtgtactgttccgcaagaaaaaagaaattaataaagccatcatttatcctgtactttctttatcacctgtaagaatgaataaggaaaaagaaaactggtttcacactgcccgcaatttatatgcaaagacatccgtccggaccgtaacgcttcgtccggcacaggcagaatatctgatgacaggaaaaatattacctgctgagttattcagtataccgttattaccctggtaa

SEQ ID NO: 29340 - DNA, 171 bp, Escherichia coli
atgtttaacaaaaataaaacgcatatcgaaaacaaagcctttatggtggaaccgttccgggatccgacagctaacgaatgtaatgtcgtgatagcaaacgatatttgtatccgggtagcactgtcaccctctgaggtgctccagccattcagcaaaaacacgaaccagtaa

SEQ ID NO: 29341 - DNA, 453 bp, Escherichia coli
atgaaccgtatgatacctgcgggatgtctcgccgtactctgcctgaacggctgccatctccccccggataatacagcgccgaccagaaagtatggtgctgcctctgatgtcgccgtcgcccggcatgcgcagtatcagctatgggggcagggaatttactctgcagcccttccggagcgtcagtccggcggcagtctgaaggctcacagcgaccgtgtttcctttgactgggaaggcgatgccctggaattgctcaacgaactggcccgtctgcgcggccagcagttcagctacagcggcgtccgtctccccttacccgtctcactgcacgtccgcgacatgacctttgctgatgtccttcgtctcactgaagcccagactgcctggcgggcaacactctcgcagtcagccgggcgtttacatctgtcttttatgacgccggagaaaaaatga

SEQ ID NO: 29342 - DNA, 210 bp, Escherichia coli
atgagtatgtctcctgcgatagctaatactttcttgtttgaaatgatgaaggataaatcgaaagacgttacacttgctgtgatctatgcattaggtgaaggtcgatgccaggcagataacataaagagggaattacgtagattaagtgaaagtgatgatatggagattaaagttgcagctatcaaggctcttgggcgactttatcgataa

SEQ ID NO: 29343 - DNA, 162 bp, Escherichia coli
atgccatctgcaacacaaactgcccgactggaagcaaggagcagcgcagaactgcatgctgtgctgaaacgcgctgcagaaatccaggtaaaaaagggcgcattgaggtttgctttcacaacaatccggcggcagatttcctgccgccgtgttgcccgttaa

SEQ ID NO: 29344 - DNA, 312 bp, Escherichia coli
atgacatccccggaccttatacaagctgatctgcaccgaatgtcctggtctcagctggcaaaagccgcggaagagtcgacagtacatcatgattatgcccgggcgttaatattgtggcggcatgcatatcatgccgccacgctgactattaataaaaacctggcaaccgctaaaatcaacttctgtgctaagcgcattctgatgcgtaatcaaatgagcaaaataatcagacatacagacacagacgaaagactcttccgtctgagtaaacaccatcatttatatgagaaaaagaaaacaaaagagggatga

SEQ ID NO: 29345 - DNA, 243 bp, Escherichia coli
atgaaacattcatttgaagtaaaacttgccgctgtaaatcattacctggctggtcatgcaggcatcatttctacggcaaaactctttcaactttctcacaccagcctctcacactggattaatctttttcttcttcacggtcctcggcactggattgcagacacaagcgtagctattctcctgaagataaactttgcgtggttctttatgctctcgggcattctgagtctctaccccgggtag

SEQ ID NO: 29346 - DNA, 525 bp, Escherichia coli
atgcaattatgctctctggaaatcacgcgcaggagtttaagatatcattctcatatagataatgtgtccttaaaacaaggaactttacttttagatgcatataattttgtctatctatgcatacaaccattatgtgatagcgtcagattgcatgaaaaagccgattttttattcctcaggggaacactggacgataataattacaatttgttaatcgaagatgaatatggcggtttttataaaattaaaatgccggcaaaagcttctaatattatttcattttcatttggagtcgaaaatggaaacggtgtcatcatagggaaaaagaacaatctagttaatactgactatatctcattcgttcctttactcgttgaaaaaatatctactccaaaagtattgaaatggatcggggaaataaaaacaacgtacgcgcaaaaaataacaactgatattgttgctaatctgtcaagaataggtttagatcaacatgagtggttacgaataaaatcaaaagatatataa

SEQ ID NO: 29347 - DNA, 675 bp, Escherichia coli
  misc_feature (660)..(669): n is a, c, g, or t
gtgttaccttggactgtaagttatattatgtgtagctattgcgattggcagcctctgacattgccagactcgttttctcttcattctggttggcttctgattcgggggcgcgtgttgacgactcaaactcgaggtgaaactcgtctgcgctggcaatgcggacaaggaatatggcatgaacagaagttgccggtcactcgtcgaggcacgttgctggagctggtttatctaccctcgggagctagtcatttgtctttgctggcaagtaataagggcgctgagtgtaatgttgaaattactcagctttgttgtgtatcccgtgccgagagtctctggcgtcgattgcgccgggttgtacctttttaccgacgcttaacgaagtccagacgcaaaaggttaggcctttcatggcatttgtggctcacggacttgcagcaagcttaccaacttgtcagcagagttcgcgatgataaaccactcaatagctatgatgagtggctagcagacttcgacacccttgaacccgccgaatacaagctgattaagcgccagctggctcgctggggcacattaccacgtttctgtttgcatcttgttggcgttggggatgaacagagccgccacaagaccctggagagtattcaggcactctgttatccnnnnnnnnnnatataa

SEQ ID NO: 29348 - DNA, 297 bp, Escherichia coli; identical to SEQ ID NO: 9073

SEQ ID NO: 29349 - DNA, 312 bp, Escherichia coli
atgagagttgagcagaatgatttcagggacatgttctccgtttatctctccggcccgccgcagacgcagcatgtgtttggtgtattcccggcggtccgggtcacgtacgcgggtctggcaggcgaagaatggctgaaagccttcccgctgcaggctttccagtacggtgatggtggggatgtacgtatagcgttcactgcgggaggtatgccggtcttcaccgaaaatacccggtacatggtgcatcagttcttcgtgtgtcagcggacggtcacggcgtatctggttcgcataaccaaaacgactggctag

SEQ ID NO: 29350 - DNA, 435 bp, Escherichia coli
atgtacggaacatgcgaaacgctatgccgggagctggcagcaaagtatccgggagacacgccgttgatgctggttatctggtccccggaagagattcaggccctcgctgacggaatggatatttccctgtccgatcatgaaatcaggaccgtcctggcgcgcctggaggacatcccggaagaccagcggactgagtccggtatttcttccggcgtggcgatggagattatcagcaacgtgagcgaaaaccgccaggtgaccgtcccggctgaactgctggcgtccctgattcagaccgccgaacaggcactgtggaaacgtgaatgggccgcccgtgattacggcctcgccgtcccggaatgcgtcacccgccgtcaggcggtggttaatcaggcccgcatcctgctgaaaaacaacacacacgaaaacgactga

SEQ ID NO: 29351 - DNA, 528 bp, Escherichia coli; identical to SEQ ID NO: 8015

SEQ ID NO: 29352 - DNA, 474 bp, Escherichia coli
gtgtctttcccgtatgccggcgaatggctgactgaagacgaaatcagggctgtacttgcggcggtgcgcgatgcaatacgaagcatctgttaccaggtggcagaagatacgcggcgtatccgggcggcgctgaccaccaccggtcagacgttgctgacccgccagacgcgccgctttcgtctggttgtgaaggaaagcgatcacccctgctggctcgatgaagatgacgaaaacctgcccgtggtgctcgatgccatcgtgaaccggggagcacgtttttcgtcggtggaaatgtacctggtcagcgattgtattgagcatatcctgtccagtgggctggcctgcgatgtgctgcgtataccggatgaaccgccccgccgctggtttgaccgtggtgttctgcgggaggtggtccggaaagcccgggccgaaatccgcagcatggcggatgccctggcaaaaatccggaaatga

SEQ ID NO: 29353 - DNA, 474 bp, Escherichia coli
gtgtttttcccgtatgccggtgaatggctgacggaggaagaaatcagggcagttcttgatgcggtgcgcaatgcagtacgaagcatctgttaccaggtggcagacgatgcgcggcgtatccgggcggcgctgaccaccaccggtcagacgttgctgacccggcagacgcgccgctttcgtctggtcgtgaaggaaagcgattacccctgctggcttgatgaagatgacgaaaatctgcccgtggtgctcgatgccattctgaaccgtggcgcccgtttttcctctgtggaaatgtacctggtctgtgagtgtgtggagcatatcctggccagtggtctggtctgtgatgtgctgcgtataccggatgaaccgtcccgtcgctggtttgacagggatattctgcgggaggttgttctggaggcacgggatgaaatccgcagcatggcggatgcactggcgaaaatcaggggctga

SEQ ID NO: 29354 - DNA, 222 bp, Escherichia coli
atgagcactgactcgcaaacaaccgatattcaggtcaaatgcctgcattgtggagcatggtttccttcagctatatggattggggatcgtgagtcccttcagtctggagttttgtttgggaacaagcaacaatgcccgaaatgtcataaaatgactgattgtaataaagaaaatttcaaagctagatttaaggatggcggatttataggtacgaaagtctaa

SEQ ID NO: 29355 - DNA, 297 bp, Escherichia coli
atgtctaaagaaactgtagtaacaaataagtctacacagctgttccttgatcttgctataagatcgttagaggcaagctggaaactttttcaggagataaatggagatggagacgctaatgattatcttgatgatcctgactttatgagtccattcataatgcacgttattgaccatattcagaataactttgagaagtttacgacccaagaaggagattacggtgatattaaggaagttaactttgagcagattgctgctctgttagtgtggcattcagaacgattcagaaaataa

SEQ ID NO: 29356 - DNA, 498 bp, Escherichia coli
ttgccctgcaaccaccatatcaacttcttcccggcatgccggcgctggtatccaggccgggtttcgaagcgaagcgttcctgacggactcattgacatccgggccggatgtagtcatgcagcatggaacgtctacccgtatacactgacggcgtccggccgtgtacatctcttccgcggttcagggagcgctgtcgccatgtacttattgtcaccaggagaggcatgtaccgcagcatgccagctcagcagtgacaggatgcccttaagacatccgtcatggctcagtatgacgacgcccccgctctgcaggtgtgcatgcggggccgggagcagcattcccgtattttgccgcaccttccggaagcaaccggcatcagttacggttatcgtcaaccgttgtgcggtatgccaggagcacgtactgatccatcagatccgccagtgctgcgttctgcttctgacggtcgatgatccattcccccagctctttttctga

SEQ ID NO: 29357 - DNA, 435 bp, Escherichia coli; identical to SEQ ID NO: 13693

SEQ ID NO: 29358 - DNA, 849 bp, Escherichia coli
atgaattctatctattgggtgattttcatgggactgctgataaacataccatcactggttcctgtgttgtttctccgtaagattcaaaagaacgtgaagatatctattgcgatcagactgtttctacttaacgctttcttggtgctgtcccttgtgacgctatcgcagaatatcacgcaagaatacgggttatttccgatatggctgctgtcaactgcaatggtgctgtttgcggtcacgctagtaccaacgataaaatttgtgcgtaagtatttaactgtcgggaaaagcagagctgttatcctctcatcattcctgattgtctatgctgtcaggtttcatggtgtgttttcagatgtgaatggagttggatatgcgcttaacggatataacgccacatggacattcttcttcttgttttccagtctgttggcttatatcggttgctctgggagtaaaacatattctggttattctgcgtcgtcatctgcaccacaatcagattattttaaacgcttcacaactcttgtcatagattttttcaagcagaagtttgtatgggctaaagcaaacaaatcccaaaatgatcttatcagtgaggaacatgataaacgtattgctgaaaactacgtctttgacgaggtattaggccgtcatatctctcgcactgaatatgagaaaaaagccaagtttaaccaagatgactataaaccaacacctgatgagattcgacgtttcccaagccgtcctgagaaagaacagccggaaagtgatcatcgcatggatctcataccacatgccagaaaagataaagccccacgtatgaggccaccgggatatagaaaataa

SEQ ID NO: 29359 - DNA, 312 bp, Escherichia coli; identical to SEQ ID NO: 15045

SEQ ID NO: 29360 - DNA, 147 bp, Escherichia coli
atgaagcgtgaaggcctgcattatgtcgtgattgagcggaatgaaaagtacatggcgaattttgacgagatggtgccggagttcatcgaaaaaatggacgtggcactggctgaaattggttttgtatttggggagcaatggcgatga

SEQ ID NO: 29361 - DNA, 153 bp, Escherichia coli; identical to SEQ ID NO: 14351

SEQ ID NO: 29362 - DNA, 1023 bp, Escherichia coli
atgggaagagatataacgctgtaccctaaaaaagcaactagaaacgaacttaaaaattaccttgaaaatttaggttttaaaaggtgtaaacatttgtgggaatggccccaaggaacgttgaattactcttggtttgatgatacagacttcaaatctacagatggagtttcggctgatatatatcctgtttcaaatgacgaattacacatatctggtaataaatgggcattgcatgtgcgtaatttatatagcgctagttggcatgatgtaaaaatgcttaatgatgttctaaaaggcgcaaggagtctttttggtggaacacttataggtgattatgggaaaaataggtacgctcctctatggaaggattctagtagtccgatcagtcgtggcatttcttcaatatttaatcatgtccatcatgagatttccgctgttaaacatgccttacctgaaccttctattaaattaaacctaccggaagatggcggcttatccgaatactttgattacatgcaatgtatggatcccagtagagttatatataatggattagtaccttttgcggttgctatgtttgaatactttttctctagagcttttcaaatacttataaagtacgatcctttcgcaatagcaaaaagaacatcgtataagcaaaaagttgattttgatattctgcttgagatagagaaaggaaatatttcaatagaaagtgttattgcaagaaattacacttttcaaaacttaacccacctaaacaaagcatataaagagtggctggatatagatgtgagagcgattctttataagaaaaaaagaattggaaaatcagttgattttcttgagaatcgaatttctgaaatcatacaatatagacatgggatagttcatcactttgagttggataggaccttaaatcgggatggatatattcatatattagatgcgatagaaaaaagcataattgaatttatccattacatagaaggcaaatacaaatttaaattaaatgcgtattaa

SEQ ID NO: 29363 - DNA, 459 bp, Escherichia coli
atgagtaatcaggaaccggctactatcctgctgatcgacgatcacccgatgttgcgaactggcgtaaaacagcttatcagtatggcaccagatatcaccgtggttggcgaagcgagtaatggcgaacagggtattgaactggcggagtctcttgatcccgatctgatcctgttagatctcaatatgcccggcatgaacggtctggaaacgctggataaactgcgcgaaaagtccctctccgggcgcattgtggtattcagcgtctctaaccatgaagaagatgtggtcaccgcactgaaacgcggcgcggatggctatctgttaaaagatatggaaccggaagatctgctgaaagcgttacatcaggcagctgctggcgaaatggtattaagcgaagcattatggccgccagcttgcgcgctaaccgtgccactactgagcgcgatgttaaccagttaa

SEQ ID NO: 29364 - DNA, 930 bp, Escherichia coli
atggaacgactaaaacgcatgtcggtgtttgccaaagtagttgaatttggctcttttaccgccgccgccagacagctacagatgagcgtttcgtccatcagtcagacggtgtcaaaactggaagatgagttacaggtaaagctgttaaaccgtagtacacgcagcattggcctgactgaagccggcagaatttactaccagggctgccgtcggatgctccatgaagtgcaggatgttcatgagcaactgtatgccttcaataacacccccatcgggacgctgcgcattggctgttcttcaactatggcacaaaatgttctcgccgggctgacggcaaaaatgctgaaagaatacccaggtttgagtgtcaatctggttaccggaattcctgcccccgacctgattgccgacggtctggatgtggtgatccgcgtcggcgcgttgcaagattccagcctgttttcccgccgtctgggcgcgatgccaatggtggtgtgcgccgcaaaaagctatctcacacaatacggcataccagaaaaacccgccgatttaagtagtcattcatggcttgaatacagcgtgcgacccgacaatgaatttgaactgatcgcaccggaagggatctcgactcgcctgatcccgcaagggagatttgtgactaatgatccgatgacgctggtgcgctggctgactgcaggcgctgggatcgcctacgtgccgttgatgtgggtgatcaacgagatcaatcgcggggaactggagatcctgctgccacgttaccagtcagacccacgcccggtttatgcgttatataccgaaaaagataagctgccgctgaaggtacaagtcgtgatcaactcgctaacggattattttgttgaggtcggtaaattgtttcaggagatgcacgggcgcgggaaagagaagtaa

SEQ ID NO: 29365 - DNA, 1032 bp, Escherichia coli
atggaaaaaacacgtaagcgccgtggtaccggacgggtgacgctgcaggaggtcgctaactttgcaggtgtcggaaccatgaccgtttcccgtgcgctgagaacaccggaacaggtatctgacaagctgagggaaaagatagaacaggccgtagaagagttgggttatattcccaacagaactgctggcgcccttgcatctggtcacagtgatacagtcgccgtactggttccttccctgacagataaagccagctcccgctttatgcagtcgttgcagcaggtgcttaataaaaatgaattccagctactgcttgggtgtcatgagtataatcagctcaaagaagctgaaattctgatgacgcttcttcaaggcaacccggcggcgttagttatttttggttctcagttggctgataaaactcaccagatactcgagaaaacaaatatacctaccattaacgttgtcggttcccctttcagtccggctcaaattaccatcgaaacagcattttttgaagcatcacataaactgaccgaacatctgctggaacagggttataagaatatcggatttatcggtgcgcatatggacaaccgcctgcaacgtcagcaactgaacggctggcataaagcaatgttgagccattaccagaactctgatcttgttatcaccatgccggatgccgcaagtctgcaattggggcgttacgcattaaacgagatattactgcgacaaccagagctggatgctgtgatttgcagccacgaagagattgcgctgggtatcatgtttgagtgtcagcggcgtttgttaaaaatccctggaaatatcgctgtagcttgtcttgacggttcagacagttgcgatcaaacacacccaaccttgacatccatccgtattgactacaaaaaaatggggatagagacgggtaagttactgattggactattgaataataatcatgatgaatcagaagagtcgcgtatcgtgcaattcaactaccagatagaattacgtcagagtacatga

SEQ ID NO: 29366 - DNA, 444 bp, Escherichia coli; identical to SEQ ID NO: 21226

SEQ ID NO: 29367 - DNA, 288 bp, Escherichia coli
atgaaaattacagtggtttgcggtaacggcttaggcaccagcctgatgatggaaatgagcattaaaagcattttgaaggatttgtccgtcagcgctgatgttgatcacgtcgacctgggctccgcgaaagggacgccgagtgatatctatgtcggcaccaaagacattgccgagcagttagtcgcgcagtctgtcgcaggcaaaatcgtcgcactggaaaatatgattgataagaaagccatgagagaacgtttatccgtggtattaaacgaattaggcgcactgtaa

SEQ ID NO: 29368 - DNA, 1257 bp, Escherichia coli
atggatttctttcgttttttgatgagcgatgtactttccgaacccgcagtgctggtcggtttaatcgccctgattggcctgattgcacagaaaaaaccggtaaccgaatgcattaaaggtaccgtcaagaccattatggggtttgtgattttaggcgcaggggcgggtttagttgtgtcgtcactgggtgatttcgcaaacattttccagcatgcctttggtattcagggtgtagtgccgaacaatgaagccattgtttccgtagcgcagaaaagcttcgggaaagaaatggcgatgattatgttctttgcgatggttatcaacattatgattgcccgtttcacaccgtggaaatttatcttcctgaccggtcatcacacgttgtttatgtcgatgatggtagcggtaattctggcaacagcaggcatgaccggcattacgcttatagccgttggctctttggttgttggcgtggcaatggtctttttcccggctattgcgcatccgtacatgaagaaagtgaccggttctgatgacgttgccatcggccacttctcaacattatcttatgtattggccggtttcatcggcagcaagtttggtaataaagagcactcgactgaagacatgaatgtgccgaaaagtctgctgttcttgcgcgacacgccggttgctatctcttttaccatgagcataattttcctggtgacgtgcctgtttgcgggtgcagatgcggtgaaagagcttagcggtggtaaaaactggttcatgttctctatcatgcaatccattaccttcgcagctggcgtgtacatcattctgcagggtgtgcgcatggtgattgcggagattgtcccggcattcaaaggtatttcagacaagctggttccgaatgccagacctgctctcgattgcccggtcgtcttcccttacgcacctaacgctgtactggttggtttcctgagtagctttgctgcaggtttaatcggtatgttcacgttgtatctgctgaacatgatcgtgattattcctggtgtggtgccgcacttcttcgtaggtgcagctgcaggggtattcggtaatgcaacgggtggacgtcgtggtgcgattttgggtgccttcgctcaaggcttgcttattaccttcctgccagtattcttattgccggtgctgggtgatattggttttgctaacaccaccttcagtgatgctgactttggcgcactgggtattttgttagggattatcgttcgctaa

SEQ ID NO: 29369 - DNA, 255 bp, Escherichia coli; identical to SEQ ID NO: 21229

SEQ ID NO: 29370 - DNA, 1014 bp, Escherichia coli
atgagtacgcgtattaatttgtggcgggcgctttttggcgagaaacctcgtatcttgctggaaaatagtgattttactgtcacgtcttttcgctatgacagcggtgtcgaggggcttaaaattgcaaacagtcgtggacatttgattattcttccctggatggggcagatgatttgggatgcgcaatttgatggacacggcctcaccatgtgcaatatgtttcgccagcctaaaccggcgacagaggtgatagagacctatggctgttttgcttttcattcaggtttgctggctaatggctgcccatctgcggaagatactcatctgctacacggtgaaatggcctgtgccgcgatggatgaagcatggctggaattagacggagatatgttacgccttaacgggcgttacgagtatgtaatgggtttcggtcatcattatctggctcaaccaacagtggtccttcacaaatcctctacactgttcgatattaagatggccgtaaccaatctggcttctgtagatatgccactacaatatatgtgccacatgaattatgcatatataccaaatgctacattcagccagaatatcccggacgaaatattaagattgcgtgaatcagtgccttcgcatgttaatcccaccgctcagtggctggcgtttaatcaacggattatgcagggagaagcctctctgtcgacgctgagtcaaccggaattttatgatccagaaattgtcttctttgcagacaaactggacgcttatacagatcagccagagtttcgcatgatctctcccgatggcactacgtttgttactcgtttctacagtgctgaactaaattatgtgacacgctggatcctttataacggagagcaacaggtagccgcctttgcattacctgcaacctgtcggcctgaggggtatcttgccgcgcaacgtaatggcacgctgattcaggttgcaccgcagcaaacgcgcacttttacagtcaccacaggaattgaataa

SEQ ID NO: 29371 - DNA, 1317 bp, Escherichia coli
atgaacgataaaaacatcattcagatgcctgatgggtatctgaataagactcccttgttccagtttattttgttatcgtgtttattcccgctatggggatgcgcagctgcattaaatgacatattaatcactcaattcaaaagtgtattttcgctaagtaactttgcttcagcattggtgcagagcgcattttatggaggttattttttaattgcaataccagcatcccttgtgattaaaaagaccagttataaggtggcaattttaattggcctgacgctgtatattggtggttgtacactttttttccctgcctcgcatatggcaacctacactatgttccttgcagctatttttgcgattgcgattggcctgagtttccttgaaactgcagcgaacacatacagttcaatgatcggtccaaaagcctatgccacattgcggctcaatatcagccagaccttttatccgattggtgctgcgtctggtattttattgggcaaatatctggttttctccgagggggaaagccttgagaagcagatgtccggaatgaacgccgggcaaattcacaactttaaggtgctgatgttagagaacacccttgaaccgtataagtatatgattatgattctggttgtggtcatggtgttgttccttttaacccgcttcccaacctgtaaagtggcacagacaagtcaccataaacgcccgtcagcaatggatacgctgcgctatctggctagaaatccgcgctttcgtcgcggtattgtggcgcagttcctttatgtgggtatgcaggtcgcagtatggtcatttaccattcgtctggcgctggagttgggcgatatcaacgaacgtgatgcttcaaacttcatggtctatagctttgcctgcttctttattggcaagtttatagccaacatccttatgacgcgttttaatccggaaaaagtattgattctctattccgttataggggcgctgttcctggcatatgttgcactggctccaagtttcagcgcggtctatgtcgccgtcctggtaagtgttttgtttggcccttgctgggcgacgatctatgcaggaacactggatacagttgataacgaacatacagaaatggcaggagcagtcattgttatggctattgtcggtgccgcggtggttccggcaattcagggatatattgcagatatgttccactcactacagctttcattcctggtttctatgctctgctttgtctatgtcggagtctacttctggcgtgaaagcaaagtacgtaccgcactggctgaagtcacagcgtcctga

SEQ ID NO: 29372 - DNA, 921 bp, Escherichia coli; identical to SEQ ID NO: 7656

SEQ ID NO: 29373 - DNA, 312 bp, Escherichia coli
atgagagttgagcagaataatttcagggacatgttctccgtttatctctccggcccgccgcagacgcagcatgtgttttgtgtatccccggcggcccgggtcgcgcacacgggtctggcaggcgaagaatggctgaaagccttcccgctgcaggctttccagtacggtgatggtgggaatgtacgtatagttctggcttcgggacgtgtgtttatcttccccgaaaatccccggcacatagtgcatcagttcttcgtgtgtcagcggacggtcacggcgtatctggttcgtataaccaaaacgactggctag

SEQ ID NO: 29374 - DNA, 519 bp, Escherichia coli
atgccgcgtggcctggaattactgattgcacaaaccattttgcaaggtttcgacgctcagtatggtcgattcctcgaagtgacttccggggcgcagcagcgtttcgagcaagccgactggcatgctgtccagcaggcgatgaaaaaccgtattcatctttacgatcatcacgtgggtctggtcgtggagcaactgcgctgcattactaatggccaaagcacggacgcggcatttttactgcgcgttaaagagcattacacccggctgttgccagattacccgcgcttcgagattgcggagagctttttcaactccgtgtactgtcggttatttgaccaccgctcgcttactcccgagcggctttttatctttagctcccagccagagctcccagccagagcgccgctttcgtaccattccacgcccactggcgaaagactttcaccccgatcacggctgggaatctctgctgatgcgcgttatcagcgatctgccgctgcgtctgcgttggcagaataa

SEQ ID NO: 29375 - DNA, 1266 bp, Escherichia coli
atgcgcgttatcagcgatctgccgctgcgtctgcgttggcagaataaaagccgtgacattcattacatcgttcgccatctgacggaaacgctggggacagacaacctcgcggaaagtcatttacaggtggcgaacgaactgttttaccgcaataaggcagcctggctggtgggcaaactgatcacgccttccggcacgttgccatttttattgccgatccaccagacggacgacggcgagttatttattgatacctgcctgacgacgaccgccgaagcgagcattgtttttggctttgcgcgttcttattttatggtttatgcaccgctgcccgcagcgctggtcgagtggctacgggaaattctgccaggtaaaaccaccgctgaattgtatatggctatcggctgccagaagcacgccaaaaccgaaagctaccgcgaatatctcgtttatctacagggctgtaatgagcagttcattgaagcgccgggtattcgtggaatggtgatgttggtgtttacgttgccgggttttgatcgagtattcaaagtcatcaaagacaggttcgcgccgcagaaagagatgtctgccgctcacgttcgtgcctgctaccaactggtgaaagagcatgatcgcgtgggccgaatggcggacacccaggagtttgaaaactttgtgctggagaagcggcatatttccccggcattaatggaattactgctccaggaagcagcggaaaaaatcaccgatctcggcgaacaaattgtgattcgccatctctatatcgaacgacggatggtgccgcttaatatctggcttgagcaagttgaggggcagcaattgcgtgatgccattgaagagtacggcaacgccattcgccagcttgccgctgccaacatcttccctggggatatgttatttaaaaactttggcgtcacccgtcacgggcgcgtggtgttttatgattacgacgaaatttgctacatgacggaagtgaatttccgcgacatcccgctgccgcgctacccggaagacgaacttgccagcgaaccgtggtacagcgtctcgccgggcgatgttttcccggaagagttccgtcactggttatgtgccgacccgcgtattggtccgctatttgaagagatgcacgccgacttgttccgcgctgattactggcgcgcactacaaaaccgcatacgtgaagggcatgtggaagatgtttatgcgtatcggcgcaggcagcggtttagcgtccgattcgtataa

SEQ ID NO: 29376 - DNA, 492 bp, Escherichia coli
gtggcccgaaaccagaagtgggcgggtgacatcacgtacttgcgtaccgatgagggctggttgtatctcgcagtagtcatcgacctgaggtcacgcgccgtcattggctggtcgatgtcaccgcgaatgacagcacaactggcctgtgatgcactgcaaatggcgttgtggcggagaagacgcccggaaagcgtcattgttcatacggaccgtggtggtcaatactgttcaggggattatcaggcgctgctgaagcgacacaacctgcgtggcagtatgagtgcgaaaggctactgttatgacaatgcctgtgtggaaagcttctttcattcgctgaaggtggaatgtatccacggggaacgctttagcagccaggaaataatgcgggcaacggtgtttaattatatcgagagtgattacaatcgctggcgtcgtcacagtgcctgtggcggtctcagcccggaacaatttgaaaaccataatcttgcttag

SEQ ID NO: 29377 - DNA, 801 bp, Escherichia coli
atggctaagtcactgttcagggcgctggtcgccctgtcttttctcgcgccgctgtggctcaatgccgcgccgcgcgtcatcacgctttctcccgccaacactgaacttgcctttgccgccgggatcacgccggttggggtcagcagctattccgactatcctctacaagcgcaaaagattgagcaggtttccacctggcaggggatgaatctggaacgcattgtcgcgctgaaacccgatctggtgattgcctggcgtggaggtaatgccgagcggcaggttgaccagctggcttcgctgggaataaaagtgatgtgggtcgatgcgacaagcattgaacaaattgccaatgcgttacgtcaactggccccctggagtccgcaaccggataaggccgaacaagccgcgcaatccctgctggatcagtacgcgcaattgaaagcgcaatatgctgataaacctaaaaaacgtgtttttctgcaattcggcattaatccgccatttaccagtggaaaagagtcgattcagaaccaggtactcgaagtttgtggcggagaaaacatctttaaagacagccgggttccctggccgcaagttagccgcgaacaggtgttagcacgctcgccacaggcgattgtcattacaggcggaccggaccaaattcctaaaatcaaacaatactggggtgaacagctcaaaattcccgttattcctctcacgagtgactggtttgaacgtgcaagcccacgtattatcctcgctgcacaacagctctgtaatgcgctttcacaggtagattag

SEQ ID NO: 29378 - DNA, 375 bp, Escherichia coli
atgctcatagatttggttttaccttacccgccgacggtgaacacttactggcgacgccgtggcagcacatattttatctcggaggagggaaagcgttatcgccgggctgtggcgcttattgttcgccagcagcggctgaaattaagcctgtccggaaggctggcgataaaggtgattgcagagccacgggataagcgtcgtcgcgacctggacaatatccttaaagcaccgctggatgcgctgacgcatgcgggagtgttaatggacgatgagcagtttgatgaaatcaatatcgttcgtggtcagccagtatctggtggacgtctgggggtgaagatttaccccataatgcatgaagagcaggtcaaaaaatga

SEQ ID NO: 29379 - DNA, 1512 bp, Escherichia coli
atgacatctccatcttcgacagccggaaagccttgtgtggaatgcggcatacctgatccatgtatttttgatgttattagtgattttccagaggccggcgagaaacatttctggtcaaaagaaggaatggcgcgttttaagctactggacgatggttttggatgtgatggtataattaccattacctaccagtgcgacaacagtgggacacatgaggcatggttagaggaagaatcagaaaacagtcgtaagatactgcaaccttttggaaaacccaataatgttacattatattatgaaggtttcaagggtggaatgaatatcattgatgcgtttcattctccgtgggagtatctgagttcaattaccatgccacatgatgttctttatgaaccagcacattacacagtcagaattgatagctgttacgagcacaactcctatgtcgagattaaggtttatccttcattagaaattcggtttaccacagggcttagttatgagatttcgtcatcacaacagacacgagcggtaaaagatcgacgtgatgaacggagaaaagctcgggaggcgatggaagatacaaaacctaaagataaaaataaactacgaagcggatggacaaatacaaccgctgagtttgagttgtttcacaagacatctcttaccgttgaactgggattaaaagtcgctaatgttgaatatacacacaagtatgtagaggaaataaaaaaactcagacaaataaaacaactggagcagatgagtagaatagatgcgctgattaaaagcattaacaaatactttgcgccagatcctgacaacaaagatggtacgcgtaaatatgcgttattcagtgcaaaaatagaacctgtcacactggggatttcttatgcttatcaatacactgatattaaagatggtccgtgccatttttatggtctatatggtgctccatttttcaaagcatcattccgatttgatatcatctcatttatatgtgcatactgcaaaatggaagatctggtaaaccgatgccgtgaatatctccgcaagcatggaaccagtgttgaatgctatatcgaaatttcaccggaagttaatctcgatcttggggctgtatattctcaaaaagataaagcatgggaatttaacactaaagaaagcaatattaaacttggtttgaaaggtgaggttagtgcaacatttgagacgaatgtttttgtcgtgaaattgaaatctgaggttggtgcttctatagaagcaaaagctgggtttggatttgataaacgagatgatggaatggatcttgttctatttcatgatggagtgacgggcgcgtttaaagttaaggttgacatatctcgcggtgataaagatagaaaagagaatagtgagaaacccgaaaaagaaaatgaacttaagtggcaactatgtaaacctttggaagtagatgactcaccattacggattaatttgtatggtaaggaaaatactgtggaaaaaaagtaa

SEQ ID NO: 29380 - DNA, 1086 bp, Escherichia coli
gtgattaaaaagaccagttataaggtggcaattttaattggcctgacgctgtatattggtggttgtacactttttttccctgcctcgcatatggcaacctacactatgttccttgcagctatttttgcgattgcgattggcctgagtttccttgaaactgcagcgaacacatacagttcaatgatcggtccaaaagcctatgccacattgcggctcaatatcagccagaccttttatccgattggtgctgcgtctggtattttattgggcaaatatctggttttctccgagggggaaagccttgagaagcagatgtccggaatgaacgccgagcaaattcacaactttaaggtgctaatgttagagaacacccttgaaccgtataagtatatgattatgattctggttgtggtcatggtgttgttccttttaacccgcttcccaacctgtaaagtggcacagacaagtcactataaacgcccgtcagcaatggatacgctgcgctatctggctagaaatccgcgctttcgtcgcggtattgtggcgcagttcctttatgtgggtatgcaggtcgcagtatggtcatttaccatccgtctggcgctggagttgggcgatatcaacgaacgtgatgcttcaaacttcatggtctatagctttgcctgcttctttattggcaagtttatagccaacatccttatgacgcgttttaatccggaaaaagtattgattctctattccgttataggggcgctgttcctggcatatgttgcactggctccaagtttcagcgcggtctatgtcgccgtcctggtaagtgttttgtttggcccttgctgggcgacgatctatgcaggaacactggatacagttgataacgaacatacagaaatggcaggagcagtcattgttatggctattgtcggtgccgcggtggttccggcaattcagggatatattgcagatatgttccactcactacagctttcattcctggtttctatgctctgctttgtctatgtcggagtctacttctggcgtgaaagcaaagtacgtaccgcactggctgaagtcacagcgtcctga

SEQ ID NO: 29381 - DNA, 237 bp, Escherichia coli
atgacggcgggaacactttatataacagcgcagcagttttttagttccgctaccccggcgttaaggggaaatgaggtcaacatggatatgctcaatcttggcaacaacgaatctctggtgtacggcgtgtttcccaaccaggacggcacgttcaccgcgatgacgtataccaaaagcaaaacgtttaaaaccgaaaatggtgcccgtcgctggctggaaagaaactcaggtgagtga

SEQ ID NO: 29382 - DNA, 1380 bp, Escherichia coli
ttggcgctcggccttggcctgaatctgggtgtatttggtgcaacatcgtttgatgttactcaggctaacagttcgcttgtggatgggagcaaacatcaagggcaatcttatcgttttctttattccaaatcgttagttcagacaggaacagcattccatattattggctatcgttattcaacccagggcttttacactttaagtgatacgacataccaacaaatgtcagggactgttgttgatccaaaaacgttagatgataaagattacgtttataactggaatgatttttataacttgcgttatagcaaacgtggaaaatttcaggctagtgtatcgcaacctttcggtaactacgggtctatgtatttatcggctagtcagcaaacatactggaatactgataaaaaagattctttataccaagttggttataacaccagtattaagggtatctatctaaatgttgcgtggaattacagtaaatcaccagggacaaatgcggataaaattgtctcgctaaatgtctcattacctataagtaattggttatcttccacgaatgatgggcgctcatcatcgaatgccatgactgcaacgtatggttatagtcaggataaccacggacaggtaaaccaatatacgggggtatctggttctctgttggagcagcataatctcagttataacatacaacatggttttgctaatcaggataatagcagtagtggttctgttggtgttaattatcgtggggcatatggttccttgaattccgcctacagttacgataatgaaggtaatcaacaaataaactatggcatcagtggtgctcttgttgtacatgaaaatggtcttacgttgagtcaaccattaggtgaaactaatgttttgataaaagcgcctggagcgaataatgtggatgttcagcgggggacaggaatatccactgactggcgtggatatgcagttgttccttatgcaacagaatatagacgtaataatatttcattagatcctatgtcaatgaatatgcatactgaactggatatcacttccactgaagttattccgggaaaaggtgcgttagttcgtgcagagtttgctgctcatatcggtattcgtggtttgttcacagttcgttatcgtaataaatcagtcccattcggtgctacagccagcgctcagattaaaaacagtagtcaaattaccgggattgtcggcgataatggacaactttatctctcaggattgcctttagaaggtgttattaatatccagtggggagacggtgttcagcaaaaatgtcaggctaattacaagctccctgaaacagaactggataatcctgttagctatgcaactctggagtgccgctaa

SEQ ID NO: 29383 - DNA, 387 bp, Escherichia coli
atgctgattgctgccagtgttctccttgtgctgatgcgcagtgccttccatttcctccagatcatttttctgaacttcaggctgattctctccatcgaatatttcctggtatgttgcgtcacccatcaccgcaccacaatcagggcagttgccgccaccgctctgaccgcaggcggtgcagatcttttccggttcctgttgcactactggttcaggttgtttcgtttctggctcgttttgttgcgtatttgggctgttttgttccgctttctggtcgttctgttccgtttcttgctggttctggttcacagaatcgcgggtctggatccccttaatccatttcggatcattcgggtcgctaatcccttcaacaaattcaccacgtga

SEQ ID NO: 29384 - DNA, 960 bp, Escherichia coli
atgaatcaagtcacatttaaagatctgctgaacgcatattttaaattcaggatgctgcgcccggctacagtatggagttacagaaaaacggtggcgtcgttacgtaagtttacgggggataatattctgcctgaacagattaatcagaatctggttgtggactggcgtgaacatattatttacggtgaattgcagagtaaagtgacctggaataataaagtcacccatatgcgtgcactgtttaattttgcgtatgacaggaaaattctcccgcgtgaaaaaaatcctttcaatggtgtcagtgtccgcccggataagaagaagaaaaaaacgctgacgaaagaacaggtcagacaaatttatctacaaatggaggcactggaatccgaggagaaagatattccactttccgcccgtcgtaatgcgttacgtcctgcctggttctggctgacggtgattgatgcactcaagtgcaccgggatgcgtcagaaccagctgctgcatatccggctctgtgacgtgaattttacccatagctggatcagtcttcgcccggaaggctccaagaaccacaaggagcacagggtacccatcacgaagggattgcgacctcgccttgaaaggttgtacagacgtagtcttgagcgcggtgcaggaatggaggacagactgtttcgggtgacccgttttgtcgggggcaaaaaaacagaagttagtccgaactatgatcatccgccactgagagcgtttttccgccggctgtcacgcgactgtggctttaagatcagcccgcatcggttccgtcataccattgcgacgaacctgatgcgcaagcctgaccggaacattaaaatcgtgcaggatttactgggacattcgacggttacggtcacgatggaatatattgaggcggatctgaaagaggtgaagaatgtgcttgaggaacttgaggcggcctag

SEQ ID NO: 29385 - DNA, 1545 bp, Escherichia coli
atggcggtcataaagcggggactgaaatggttaaccggacgcggcagtgggtctgtaaacagttctgtgcctgttccgggacggaaagaagataaaccgtccccgcagtaccggccggtcattcccggagctgaactgatggcgacagccgggcggcaaaagcagatccgcatgttgcgtgagaacagcccgctgtccggacaggttatcagtgcctggtggataacgccgctggaacagctggcggagcgggttcaggatgtacctgcctgctgggagggtgcttattcggaacccggaggcttcattgacctgagccttgaggtggccgtccggtctgtcagactgacgcggggcatgatgctgccgcccggagccactccggaggcacagtcggagcaggcgccgggctgggtgtgtgccgtgtactgggcggcgctgttccatcatctcgactggctggccggagtggaagggggtatggagaacggccgggtctggtatccgggactgagtgcaccggcagtcccctggcgtatccggccgcgaactggtgacgcggcaaccggttttaatgcgatgtacattgccagtaacctgctgccggcttccggcgtgctgtggttacagcgctggcctgcattagcacaggctctttttacttacctgagtggtgcgaaagcgcagtccggtatcctgcacagcatcatcagtgatgcgcgagccagttgtggacctgatgtctccggtacacctgtcgtactggcacccccggttcccgctccggtgccggaagaaagccggacggagtcccccaggttatctggtgatgactctaacttattgtcaagtaaggataatattcctgtagctcctgctccgattacatccgcagaaacccactatgatgcctctcagacagcaggcgtaccggctgcagtgcctgccccgcctgcgctgatttcagcttttggcagcagcgaagaagatacaggggataagagcggggaggcgctagaaggtgaagatgatcagatttccactgcggccctgttgtctgtcctggacagagtcacgtccggcaacccggcagatagtgcggggcagcagccgacagaggaaattgcgggagagtccgatttaccggtgcaaagtggagaggtaaaagctgccggacacggggagttattttttggctggttaaaacaatcgattaacaacggaacgttgagtgttaatgaacagggcagtgcgatccatattatggccagctttgtattcgttatttctccggactgtttttaccggtatatctccgctgctgatgaccctgaactgaacaaaaatatcattcagcgtggttttgaagagctgaatattcattatgaacgaaatggtaagggtttataccattaccataaatacgaaacgcccgacaggaaagggcgttataccaaagtgtccggatatatgatcccgtccggcattcttttcagtgaagtaaaatgccctgagagcagtacatggttatcaccacggacataa

SEQ ID NO: 29386 - DNA, 558 bp, Escherichia coli
atgcaaaaactgatgataccggcagtggtactggcctggacgggattgtgctggctcgcctgtctggcggtcacccgcaaccatcaggctgaatttttgtggtgcatgtggcttgccacctgcctgtctcccttcctgctgaacccccttgcgctgcttatgcgccggttcagccggcaggcctgcgtctgtatcagaaaaaaacaccgggtacatatccacctcaatccctggctgcccaccggcaacctctctcctgcccgcgtggcctggttctggcagggactgattcagtccatgacatccgccgttcaggagccgggagccacggtcattatcacttcccacctgctgacgccgcaccgcatccacctgttgcgtaagtcactgccggcagacctgtgccactgccatgtgttgcccggacgcagcagcatgagcgccacactggcactgcagctggacaccctgctgaaacagtggcgctggataagtccgtcgcagccgcataaccccgtactggttgttcgcagaaaatcttttccggcgaaaaaataa

SEQ ID NO: 29387 - DNA, 1026 bp, Escherichia coli
atgcacccattaaacatcacctccattctggccagaatcacgctggcacaggatgacaatatgaaacagctggtcacgcaactttcggacgggaagaagacggccggaagccctgtttccatccgtttccggcctgccgtgagggagttcgtcatgcaggcgtccggccagctgggaatatcctccgctgaactggtcaatatcgtgatggaaggcgtcatgcgtgaaaccctgacacccggacaggcaacagtgtcacgtatcccggagcgcttctggctgctgatggacgagcacggcctgtccccctcttctgtcgtgacgctgctgtccggctggaatatcgggctgagcattctggcaaaccgggaacgaaccatggattatctgactaccccggtcctcgaccagctggctgaatggtttggtgtcaaccgtgaatggcttgaaggcgcagcggtgccgccgacagtcgtgcccgggttcagggactggtatcaggctgctgaactgctgagggacaggcttgccgtcgcaggacatacaggtaaaccggcaaatacagaaatcatttttcttcgcgacaaaatatctcctgataatgaaagtaatgatattcatgggaatacgcgtgtcggcatctgtctggcacaatataaattaatgaacgggcttcctgttaaaatcgtagaatatctgggacaacagcttatttccgacacacataaaaatccgttcacgggatttatgagtctctgtggccttcttgtggaaagaaacagactgacagacatcccgacatttacaacaccgccgcacttactggagttgttatattacggttcagcgttaccggtttccgtgctcagtaaaatacgcagactgcaccttaattcgcatgaccagaattataagcaattctggacggccagagagcgacgccctctgattgcgccacaggaatatattactgacgaatgggagttcattgcaggagaaattactgatatcacacagccgaaataa

SEQ ID NO: 29388 - DNA, 1203 bp, Escherichia coli
atgaatacaaaaatctccactattacccgcagcatcgccctggtcttatccggctctgttatttcattaagtgccactgcggccaccacctattatgaagcccgtaatgatgccatgggcggcaccggtgtggcctcatcccactacagcgctgccgcgctggccaacccggccctgctgacaaaagccagggcaaatgatgacttcgccctcatcctgccgtccgtcggcgctcaggtttctgatccggataatcttgaagacggtgccgatagtgtcagggatgcctgggaccgtttcgacgacagcctgaataccggcgattcctctgcacaggccgctgagctgaaacgccagttgagcaagttcaaagatactcatgcaaatgcgcaggccggtgtctctgccgtggccacgctgccgaacgacaccctgccggccgccctgttcgtgaaggcgtggggaacggcgaccgtcgacggcaaagtctctcagcacgaccttgattacctcgaccaggtcgctgccggcgcaacggccgacaaggacaacctcacctcaaaagcctgcggacgtgccgcagtcatcaccgacgtcggtatcgccctggcgcgtgagtttgaatccttcggtcacacctggtccgtgggctttacgccgaaataccagcgcgttgacctcttcaactacaacgttgccgtgaaggactacgacagcagcgacttcgatggtgaccagtaccgcaacaccaaaaacggcttcaacgccgacctggggctggccgctgatctgacggaaaactggaacgtgggcctggttgcgcagaaccttattcctcgcagcatcgacagtaaggaagtgaacggcgaaaaagccaccttaaaagtgcgtccgcaggtcactgccggtacgtcatggaccaacggcttctttaccggtgcggtcgacgtggatctgaccgaggccagcggcttcactgacgacaaaaaacgtcagttcgccagcatcggcggtgaaatcaatgcctggagctgggcacagctgcgcgccggttaccgccagaacatggcctcctctgacggcagcgccttcacggccggtatcggcatctccccgttcgatgtggttcacctggatctgaccggcattgccggtaccgaccgtacatacggtgccgtggcacaactctctttcacattctga

SEQ ID NO: 29389 - DNA, 243 bp, Escherichia coli
atgacaacttcccaattaaccagtgtcatttatatgacaagaaaaagagcactcacgactacgtatatcccatcaacggttgaaattcaggaacgggaagtcattaaacggacagagaaaggctatcggctgaaacgaaataataccgatacgaaaggctcaatatatcgggatgaacattacaattttttaaaaattacgaagccgcgctggcatttattgcagaagaagcgaaaaaaatag

SEQ ID NO: 29390 - DNA, 315 bp, Escherichia coli
atgatatatccgaactcacgcctggcatccctgatgctgatcattgcactcacgggctgcagcagcgcagaactgagcgaatttcggaagcagctcagcggcctgaacactgccatggggccggtataccaccaggcagccctccccgctgatcgtgaaaaggtcagcaatgaagccaccgtacctgtcgacgtcgatacggcagcagcacggctgaagcgctattaccgtttcacctccaaccaggaaatcagcgcattacgcaataagggcacacgggaagtgggttgccacggccatggcacagaactctga

SEQ ID NO: 29391 - DNA, 222 bp, Escherichia coli
atggcacagaactctgactggtcatcgcaacccggtgcgtactaccgtatggggcgtgtctggggggacgaggattacctcaccattgaggtgatgaaaaacagtgccaaaagcgacatcaccaccacgttcggttccgcaataccggagcatctggacgacaaatacctcgctaaactccgtgagcagattgtcgacgtcgctctcggaacccgcaaataa

SEQ ID NO: 29392 - DNA, 660 bp, Escherichia coli
atgacccgtgaaccatcacaactgacagccatccttcagcgcatcgccgaagcgcaaaaggtgataacccgccgtaaacgttccgtacagcgtgctgagcataatctcgaagaagccgaatacctgctggcagcgctggaagatgaacgggatgaacatctcattgccggctggggcgacgcccccaactggcatgccattttcagtgcatacgagcccacacccgcactgcaggcataccgggacaaatgggtgagcaccgtacccgggcttcgtacaaccggatacaacaatattgagacccggcaggccgtattcgcgatttgttttgaaaccagcacgcaggcagaactcatgcagactgtccgcatggtggaatttgtcatgccatacctgcatgcagacagtcgtggtgagaaaaccatgatgatctacaacgtgctggcacaagactgttcacacagtttcgtgttcaacacccgtaccggccagtacggtattggcacggaccgctatatgcaccgcgacgaaacacagtcgttcccgtcactggaggccgccctgcgtcacctgcagagcatgtcggacacggatatcgtgccagaacatcagcatgagttaatcggttacacggacaggaactctggaggggcggaatga

SEQ ID NO: 29393 - DNA, 258 bp, Escherichia coli
atgataaagccaccccagcgcctgtgcgactggaacggcgcgaccgtgaagctgatacacgaaaccagaaatagtctggcaacattaccggcagggaccacagggaaaattcgtgtgggatacaaaagccgtaatggtctgaccttcatcagcaatccgtgtgaatgctgcggcgttcagctgcacataacccgtatgcgtccggaggatttcgaattacttgagcttgtacagcgtaatgcaggagaagagcaatga

SEQ ID NO: 29394 - DNA, 480 bp, Escherichia coli
atgaaagctatttctgttcgccagccgtgggcctggctcatcgtcaacgggtacaaggatattgagaaccgaagtcgcgagacgtactatcgaggcccggtgctgattcatgcttctgctcaccgtcccacacaggctgaaatccacgaagcccggctgattctggaaaaaacacacagcgcggtagtcgcgcttcgtttgccccgtacggcagagcacttccatctggggggcattaccggcatggcgaccatcacaggaaccagccgtaacagtgactccccctggttctctggcccggttggctggatgcttcaggacgcagagctcgtcactttccggcctctcaggggaagactgtcgttcttcgagaccggatatcgtaaacacaggcttttcgggtttacggttcctgataattacactgatgccacagaggcctctatggccggggtcataacaggtgcaccgcaacggtag

SEQ ID NO: 29395 - DNA, 402 bp, Escherichia coli
atgtcgctgactcacagtgaactttgtatgctggcctgtaagtttctccggaacaatggctttaaagtcgcgtttcatgatcgattcagggcatggacaccctgtggtgaacaggccgatgccatcggttctcgaaatggcgcatcatgcctgattgaggcaaaatgttcccggacggatttaatggctgacaaaaagaaactgtttcgcatcatgccggaaaaaggaatgggcgactggcgtttttttctttctgaacccggtatcgtggaaataaatgatttgcccgaaggctggggattactccacgtcgttaacggccggataaaaaaggttcacggttggcccggtaacggtcagtgggtcaacgaagcatgtaagcccttccgggccaacaagtag

SEQ ID NO: 29396 - DNA, 216 bp, Escherichia coli
atggaagaaacattcagcaaaatggcgttcgtcagaaagctaagaaaaataagtgatgaaaacctgctggaaagagccatcgaacacatggaggacaagctgtcgggcaacgcaagagaaattctgtacgcagcggccgatcatcgtcgtgccgagctggccatgaaccagtactttgacaaggtaccgaaggaagcctggaaatatgtccggtaa

SEQ ID NO: 29397 - DNA, 1641 bp, Escherichia coli
atgatcatcatcctgatcatattctctgtactatggggcggtgtttcagccttcgccctccactccctgaaacaactgaccaccgagctgtcactgacggacatacagcaggaaaatgccgatattatcaatggtgccaacggcctgtattaccaggtcggaaaaacgctcgatcacacacttgatgcgataaggaaaaacgacatcgcaacgacctctgaggagctcgaatctgccgccgccgatataagcaaacgccgggctggcctggaaaagttcaaaacggtcgatcatggcagtatcgataaagcgacggcagatgttatctacaacagctcatatcagctgtttacacgggccatcatccccatgtatgacgcgcttaaagctggtcgggatgatgaatatgttcagttgtcaaaccacaccgggcgtgagttgcgcagaaacttcaccgctgcaattgaacagtacaatactgaacttgataaactggcgcgggacgcaaaacagcgaattacctggtgggttgatacgtgccgtaatgtcctgatcgccgcgcttgttatcggtttactcatcgtgttcctgaccgaccgttacctcgtccggtaccttgttaaaccgctggagcgtattcaggctcacctgcagatacttgccgacggtaaactgcagacccggataatggatatgggtaacaattgtgtcggtaaactggtgccgtttatccaggatatgcaggacaactgggtaagaaccgtctcggatatccgcagcagcgcagatgaaatctaccgtagcgccggagaaatcgccgtcggcaacagcgacctgtcctcccgtacggaagagcaggcttcagcactggaacagaccgccgccagcatggaagagctgagtgccgtcgtgaagcaaaatgcggataacgccagccaggcaagccagctggcccagaccgcctctcaggccgccaataaaggcggtgaaattgtcggtcatgttgtcagtaccatgaacaacatcagcacaagctcacaaaaaatcgtggatatcatcggcgtcattaacagtatcgcgttccagaccaacattctggcactgaatgctgccgttgaagcagcccgggccggagagcagggacgcggttttgccgttgtcgccagcgaagtacgtaatctggcgcagcggagcgcccagtccgccaaagaaatcgagggactgattgctgcgtctgcagacagcgtgaagacaggctctgagcaggtagcccttgccggagaagcaatggctaagatcgtcatggacgtcaccaacgtgacggatattatgggtgaaatcgcctctgcttctgccgaacagagcaaagggatcacccaggtcggtcaggcagtcgtggaaatggacagcgtgacccagcagaacgcggccctggtcgaacagtccagtgccgcttccgcctcactggaagagcaggcccgccgcctgactgaggtcgtgagcatttttcagttagccaccgcgaacgaacagttgtcagttcagtcatcacaggcacaggtgcagcagaaaaaagatccccccgtggacgtgaacaaagcgcctgcacgcgtctctgcgaataactgggaaaccttctga

SEQ ID NO: 29398 - DNA, 354 bp, Escherichia coli
atgagtgaaataaatccccgccaggccagatatgcagacatatatgcggaactgatcgaccagatgcagtctgtccgggttatccttgagcagatggaaggacacgagtacgccgcaatcagcacctacatgaataacatggaggcgattgcccgcttttacgaagaggcagagggaaatctcagtgagccaggcttcctgaactacctgaaacaaaacgaccttaacctgtttattgaaattctcgctgtaggacgcgccatttcactgatgaaaaaccttctggtgaatataagacagttgttccttggaacagacaacggaccgggtcaccagggtgccattcaggagtaa

SEQ ID NO: 29399 - DNA, 669 bp, Escherichia coli
atgaaaaatcgagatgtaggtgagatattaagtctgtttagctccagtagcagcataacaatatcaacactgacaccagtagagtacagtaacaacgaatccgacttcatgacgaattcaaacaagctcattgttaataatgaaatggctcttgatataataatgctattacaactaacaggaaaagatgtccagctaattaaatttgtgaagtcaggtgaacattcgaaaatagccattttaacttgtaatgccataaatttaaaatgcatacaatcaacaatagataagaaaggattttatttttccggaaaacgccaatggagcaaactgaaaaactggataaaagaaacattaaatgaaacgagtattatctgttttcacgtcccgcttgtttatggaactaagaagaatgaatatcatattcattaccggaaaaatactggcgaagaccttaggatttttactgagaatttaaatgagtgcgcaagaaatattctgaagttaaaaaacctgacaaaccacatgatatgtgttgaagagaatggcgaaaggatcctgcgctgggacaaagagatcacatttgattcaaataaatggaaatcctgccctcctgatgaggtagagattattggcaagatacctttaatcagaaaactaaaaatttaa

SEQ ID NO: 29400 - DNA, 1785 bp, Escherichia coli
atggagcagatgataattaaaaagattaatcaaaccggtcgcctgtcttccctgaatctccctgagaatactgaatgggttgtctggtgttatggagcacttgttaagaataaaaggtatggggaacaacccagagttgaggtttgtttcagggcgcttaatagtgacaagaccatttctgaagcatacaggatacaaacttgtcccttaaccgatcttgctttgctgagagttggtagcatatgggaaaacagtgtatgcacatcgcaaatcgtttttgaagaaaagttatatgatgtcgatttttcatataaaaatgaaggttggattatatcttcttttaacctgaatggacagagtgaaatttattctgcccacgacttcccctcggacagaatagacaaagatagctggcagcttgagttctctcttaaaggaggtggcaaactcatcataccgtcccttgagtttttttatcgtacttacgggcgttctgatgaattaaaaaggacgctgttaacgtactcatgggaagacatttgtaatagacttttctcatcggcaaaagataacggcaggaaagaattatatgtgaagctcagaaagagaatgtatgacagggatgctccttttgtagcattttgtgcactggatccgtttacgcaggaagttattaagagaataaagtcacaaatgttaattgatggccgtaaggtctatattaagatcgctccctggttcagagggcaggcgcagttgagagtgaaaggcgtcagttttgatcaagggcgttcttttttaggtctcattgttacaggttactcattacctgatggatttaaaatcgtgcatgaccgggataacactaaccgggttaacgaaaaagcagacgatgacaataaaaaagcatgggataatatgtctggaagaagattaaccaacgaaggtgacgatttttccattgataactctttcggaccagatggtggttcctccagccttgaaattccagctgaaacgctggaaatacttgggcatggctgtaccgtcgtcccccttaaaaaagaaaaagcagacagtgtttcagggagtaaatcagaaagtgttgagcattcttcctattctgttaatgataaagataattctgaaaatgatgtgggttatctggctggaaatactgatggaaaaacaacagtcctgatgatggaatcgaaaggcgttgtcagggacatgtggaatgccatgcgttatttcatcgatgaaaatcagagcataatcaggtcactggaatggtatacccctgaaacctcatactcaacacatcccgagccgcgtcttgttgccatacctgagtttctcaaccaggagattgcagacgaaaaaatttccagaactatccttaactggccctatcttgatttattgcttaaacaggaaatcagagggtttcttgtggcaagaatgaaatttgacatggaaagcatccattttatagaaatacaacgcagaatctcacatgataatacaaatagctctgtgtcagaagatgaaaaattccggggcatggttttcagactgaacaatgatgatgatatccatgactgggtttcacttttggctcatgaattaagacatgtgaaaggagtggtgcaaaaaatggtagtaaaatgtccgggtgtggctatggtttacaaacactctacagcaaaaaatgaacccgtccctggctatagtgcattaatcaatgctcttgaaaaaatcggaattaaatttttagttttctga

SEQ ID NO: 29401 - DNA, 306 bp, Escherichia coli
atgcagcctgataccaacgtggctcgtcttgcccgcgaacacggtattaatgacaatctgctgtttaactggcgccaccagtataaacagggaaaactgaatcgcagggataacctgcctgtcgaactgctaccggtaagtatcgtgccgcccccagtcgatccagctcctctgacggtaccatcgcctgctgatgtaccctgttgcgaagtggagctaccaggtggaacgataaaactacacggaactatgactccggctctgctgcgagtattacttggcgagttgaaaggtggctcccgatga

SEQ ID NO: 29402 - DNA, 423 bp, Escherichia coli
atgaaaggtgccataaaccacgaaaaggcttttatttcgctttttaaccagacagcgcgataccaccatcgccatcaggtctttgaggactttgtcagttgcagtgtgattgcgctgcagaacggcctgcagttctgcgaaaaacgggagcaaaagtacatgcgcatagtgagccggtatgagaaaccggatgtcagccacatggcacagctgctggcgcatgttgttaacggactggaagaggaacgcagtgatttcctcggccgcgtgtttatgcagctcgaactgggtgacaggtaccgtggccagtttttcaccccatggccaatcggcaggatgatggccagtctgcaactgggggatatcagagaggcgttttgcgggaaaccgtttataaccctccgtgaacctgcatgtgggtaa

SEQ ID NO: 29403 - DNA, 948 bp, Escherichia coli
atgttttcatggtgcaataaccgcctggatattaccggcaaatcggtctgtctcgatgtcatgcagtcctggatatcgggtacagaaacaccgctctaccgtcacgccatccggcaggcaataaggctgtttcttgcaggctgtgccgggttactcaaaccggttaaggcaacggaatatgctccgtatccgcaactggtctccgtgggaaccggttcgtcggttgcgcccaaccaggctttccagcactttcttgagttgctggaaaaggatgcctggcttgacggcaccacggtttcccggatggaaaagatatacctccagtcggggctcagtgcagtcaaatgggataatctcccgtttaccgcacgccagataatgacgcacctgatggcgctgcattacgctgactggttcggtatggcaggtgccggtagcgcgttcgacccgcaggagcactgggaatggctcggtgaaaggcctgagacgacatgcccgtgcgacatgctgatggtgatgccatcacggctggccacggagctgaacggtaccagcggactgttccggggagtgaacgaaacaccggagctgtatatgcagctctttggtaccgaatacccggccgggcagaatgttgagtggttccgcgacggaataaacacactgtcgctgacgttcacctcaccgtggtatccgccgtcaggtgaagtcatgggagagatgtcgcagttctttgacggcgaaatccgccattactggaaatcaccggatgtgcgtatatccggatacaactgctttgacaggggcgaccatgtcgacagcggggcatatccggaggaagtggtaccggtgtctgcgggtgaaggcgccaggatgtatctggtgagtccggacacaccgccagcgctttcggctccggcgtcacattacgcagggctccgttcctga

SEQ ID NO: 29404 - DNA, 984 bp, Escherichia coli
gtgaaaaaattcacattccgcaaaacaactaaaccatcagcggccagggcagacctgtaccagcaggtcactgacaaaatcattgccgcattcgaaaaaggtgttgcgccgtggcgccgcccgtggcgttctgcacagaacgtacatggcaacgcattaccggtcaacgccactaccggccgttactacagcgggatcaatattccgcttttatggatgtcggcagaggagagaggatatccctccgatcgctggctgacgtaccagcaggcgaaagccgtgggaggccaggtgagaaagggtgaaaccagctcgatggccatcatctacaaaccgtttgaaaagcaggcgagggatgatcaggacaacaagttgttcgatgacgccggtaacccggtcatggagcagttgtccatgcttaagaccctgcagctttttaacgtggcccagtgtgacgggcttccggacgcggttgccggcataccgccagcggctcaggaagaaaggccgtcggtgctccgtgagcatcagacgtggcaggtcctgaccatactgaacgccaccggcgtgacgtgcacgtcgtaccgtcagaaccgggcgtactaccagccggcaacggaccggatagtgatgccgaccacctcacagtttgtgtcggaggcggattactggtccacgctgttgcacgaactggtgcatgccaccggccactctgaacggcttaaccgtgagggtatcacttcgtcgtcccgtaaattcggcgacccggtgtatgccttcgaggaattagtggccgaaaccgggagtgcatttctttgcgcagagctgggcatttacggtgatgtgcagcacgaaagctatctggccggctggctgaaagcacttcgtgacgacaaaaaagcatttttccgcgcctgccggtttgcccgggaagcgacagaataccttctgcagccgctgaacggtcagtccgcagcggggtaa

SEQ ID NO: 29405 - DNA, 291 bp, Escherichia coli
atgcacaataaaaacgtccgtcacgttgaaatcgatccggatgtgtaccgcgaactggagtacatgaccgaactgctcagtaagcatggttccgccgcaacggtaagaagcgtcagcgaactggttgcttatgtactgtcgtccgttgctgatggttccctgcgtcctggctcatgggaaaggcaactgctgaatatgatgggactggtcgcaaacagccctgaacatcatgtttaccgcgccacatatggccgtccggatgagggatttgttcttcgcggacagccgtaa

SEQ ID NO: 29406 - DNA, 612 bp, Escherichia coli
atgatccgttttacttccacacaacttcgtcccgttttatcgcagccaggcggtgcgagccggccgctcatccttgagaagaacctggggatatacatccgtgtaccggatgataaaaaaccgggggaatggctcagggcctgggcggagggctgcaatccgtggaatgacgataactggtctgcgaatgctgatgccctgatcccggaggcagaatattcatttctgaccttcatggagcagagcaaattcgatgctgttcttaacgggcaccacgatttgtttatggagcctgtggcggcccggtcaggtgctgccatgacggttcgttcagaaacccgtccgccggaaaaggtgtatgtccgtgtcggtgagtaccgggacaggatccgctggctgtatgaccagtcactgaagcatttccacgcatgcgtggataatgctgaacggctgagctggcgtgcgcaggcattgtctgtccttgaccgggttatccgtcttgactgtaagcgggcaaagcctgctgaccgggagatgtttgacagtgcggtccacagcgtacgcgaccggatcaatcaggtcagacccgatggttcgttacgtacttactga

SEQ ID NO: 29407 - DNA, 309 bp, Escherichia coli
atgaacagtatacttctttcactgatcgtccatgctacagccggactgaaccgtctttatacggccatgagctcacgtcagtctgagtggttcaccaaccgcagcggccacagtagtttccggccggaggtggttccggataatggcggttttaaagcggtgatttcgcggcgtacgggctacagtccgcgcgactggcagtaccagcagtgtgcgactgccggcagattcacctcagcacgaatggccatgaaggcaggacgtgaaatggcgcagcagctggctggcctccgctaccgtttcgactga

SEQ ID NO: 29408 - DNA, 360 bp, Escherichia coli
atgtccatttacgatatcagtgttgaacgcattcacgcctgcacgctttccacgacggcattcatcatgatgatttcagacattgagggcgcgttacaggtcatcaatgcactgaatcactgtggtgtgccggatcatattgatgaggatggctggccggatcgaacgatgcagattttgtcgattgcgcaaatgctcggtcatgccagtgaagctcagttgatcccggaccgtttattcgaaaggtatgtggctgacctgattgtccttggacaccagacagacgcatatgcctggaattacggcttcagggcgggagtgacccgtgcgatcgagcttcgttacgaggaacagatgtga

SEQ ID NO: 29409 - DNA, 390 bp, Escherichia coli
atgatctttcttcatttcatttactgtctggctgttctggcggatcgtgttgtgtgcttcattgcgccaaaaacgctgtttgctgaatggtttttctggttcaccggtgatgcgaagtcgttacttcttgtcgtccgtgagctggagcttgcacgttcatatcagaaggacgaaaccccggaaatgctggccgagttttcagtctaccatgccgcctttttcttcggagaacgcgagtattacggactgaaggtgcgatggccacgcaggtatattcgtcatctttatcttaccggtatgcagctcgatgccacacagtggcaggaaggctgtcagaacggattcagcgaagctgcagaacgggaagccgaagcggatgctcattgctga

SEQ ID NO: 29410 - DNA, 339 bp, Escherichia coli
atgagtaaaaaagtttttgtttttgccgaccatttggttattggccgtgtgtttttggattatacctatgagggagatgttggtatgcctgactactttggtcttactactgatatatcttcagccacagtattagacgctgactggcgtaagttttcagtacgtattaccgaagactttattcgcaaaattgatttttataatggttcatttatgagaaatattcttggcagtagtggcatttctgctgaggacttcatcacctgggcttaccatacaagctgggaagatctttgtgttgacactcttgccggagatgcgggaattgtgtacgcttaa

SEQ ID NO: 29411 - DNA, 891 bp, Escherichia coli
atggcaaaactgaataagaatttaataacgcttgccagacaggctggcggaagttttaaaactgtttctgaccgtatgaaaattgcggacaggtttgctgaacgtttattaaaacttaacgtccagattagagatataaagaacatcaaaacagggcatattgaactgtatatgaaaagtcgtctttccgaggagatttctaaacgtacacttcagaatgaaatgtcggctatccgggctttgctacgggttgcgggtaaaacatttctggctaatccggctcacgaaaaactgagtaaccaggctctgggtatttcagaaaccagccgggacggaacaaaggttgccattccagatacttatttccggcaggtactgacgagtgtggaaaaaaaagatgaaggtgttgcatatgcattgaggctatcccggttacttggtttacgaacggaagaaacagtacagtctgcaaaatcattacgaacctggcaaaaagccttactcaatggtgatgaaaaaatacgtgttgtattcgggacgaaaggaggtcgtcccagagatacgactgtattggatcgtgaggcaacgctttccgcaatcaatgctgcgctgaatcatctgaaaggaaataacgggaagttaatcgacaagccttcattacacacggctattgaacgttatcgcaatgtggttcgtgaagctggtttaacagggaaatatgcaccacatagtttgcgttatgcctattctgttgatgttatgaatcttcatatgaaaaatggtttcagtaaagaagaggcgcaggctctcgcatcgatggatttggggcatggggatggtcgggggcattatgtggcccgtgtttataataaggttgagagtaatgagtaa

SEQ ID NO: 29412 - DNA, 1317 bp, Escherichia coli
atgaaattaagcgctgaagattttaataaaatcagaagggataatgattacccccaaatttatgctctttttatgagtaaactccctcattttgaagagtggatggcggagcagggtataaccagagagctgatgtttgaacacgggcttgcccggtttattatttctgatgctctgctctggcattgtgtacaacaggataaaaattatctctgggatgatggcgtaatggactttcgggagagaaagaaatctggctggataaaagagtataaatctcttatgccttactttctctggctgaggaaaagaattgataacaacgagtaccgaaaaataagaaacagtttccggattgattctttcaggcagaatcaccattactttatgaatgaagttcctttgcgaaatattggtggcagtatggttgtacaccaggctttgctcgcagggaaattgcttgattttatatcgatggatcaacttactctggttaaccctcataataaccaacatctttatctttattgttcctctgctgttaatctccgtattgtaggcggcatcccatttgtaaaattccgggagtgcaaattgtcagaaatacaaaccaataataatggactggttctggagaacgggagttatcaggaattatccttcagccgttgcgatgtggatttaagactaagttctgccaatatgatgcatatgaaagttcataactgcaatttcaatgcagtctgtgatttcgctcgttttgacagtcagtgtaaatttacttatgacaggaatgataaattttcatatcagtctgaaagcgatttttataaagaggtgacaaatctctttgctgactccaatgactatacgctggcaggggaatattactacagaaagagaaaagcgttgatgctcgaatcaatattttcatggaagcatttcagtaatgaaaagttcaggctgaataaaaaggaaaaaaggatttttaatgttaagaccttttttaaaggtattgctgatgtgtttaacttcctttgctggggatttggagaaaaaccatccagggcattagtgatatcctttgttgtgattttattgtcttcctgtgtttattactttaatgaaaggtcatccacccaaacgcttaccgaatcgttgtatttcagtatcgtttctttcaccacgcttggcttcggcgatatcacacaaaaaacaggtttcctgcgtcttttttcggcactggaatcactttcaggcctggtcctgatgggattattccttgccggatatgcgtccaaaacaaaacgctattaa

SEQ ID NO: 29413 - DNA, 342 bp, Escherichia coli
atgaagaataaaatggtctggtttctgggtggaatacttattgccgctggcaacaatgctctggcgggaagagctgataccgcgggagggcggcaggctcagcaaatgctttcttctgatatggagcgtcatacaaccgctcttcaacagaaatcacaggcgactgcaaggggagtgatcgcggatgtcagtagtacacaagctaggcagcagcagaagctggcattacaaatgcagatagaccagttgcgcagtgaattaggcgggacaacggactcaacccgacagcagactcttacccaacagctcagaaaactggaaaaggaacgggctgggttatag

SEQ ID NO: 29414 - DNA, 336 bp, Escherichia coli
atgaacattgagcatgagtttcatgaattatgtgatgctttgaaagggcgtaatttacaggttgtttggtgggcaactgaatcgttctaccataccttcagtgaacgtaaagaatgtttttttctgatactgagcaggcttcttaatgaaaaaaaaatatatcttgcgaagcatgggattttgctgaacggaacggttgacgaacagattgcaagattcagacaggtatttccaaaatcagaggatgaaatggaggatggattctggttcttcgatgaaggctgcccagggggagccgtgtggttacttgaagatggttctctagaatggacttag

SEQ ID NO: 29415 - DNA, 1692 bp, Escherichia coli
atgttgaatgcattaaaaaaaggatctgcagtacaccacgggctgttggtattcatcgcctgtcttttctcgtccgcggcatctgccgctcccctgtctccggccgaccgcaacaccattcagcagcaacaacagcaactgctcgacgaaaaccagcgccagcgtgaagagcttgagcgtagcgtggtgctgccccgtgttactgagcctgaaacaccgcctgccacccggggcccctgttttgtcatttcccgcattgagattgacggggcgccccgcctctcccgcaccgccgccgacaggcttaccgccccgtggctgaatcagtgcctggacatggcgcgcctgacacagctgacccgccgtatcactgactggtacatcagccggggattcattaccagccgggcctttctgacagagcaggacctgtcttccggcgtgctgcatattgccatgctcgaaggcagactgcaggcaatccggcttgaaggcgtcccggaccggacgctgaacatgaccttcccggggctggaaggcaacattcttaacctgcgtgatatcgagcaggggatggaacaactgaaccgggtgcgtcagacgccggtggagattgaaatcctccccggtgaccgacagggatactcggtggtgaatctgaccgccacgccggagtttcctctctccgggtccgtgagctttgacaacagcgggcagaaaagcaccggcaccgggcaaatgagcagcgctatgtacggcaacaacctgctcggcctggccgataaatggtttgtcaccggcgggcgcagcagcgatttttccgacagtcacgatgcgcagaatttcgcagccggcgtcagtatcccttacggctacggcctgcttgattacagctacagctggaataactacctcagtaccattgataacaacggttaccagtggcgctccaccggcgatacggaagcccaccgtctgaacggctcatgggtggtattccgtaacggtgatatcaaaaccagtgcctttgccggcatcactcaccgcattaaccacaaccggcttaacggtgcgctgctggaaaccagcagtcgcaaactctccagtttttcgctgggggttaaccatacgcaaaaaatgttctccggcgtggccacgctgaacccggtgttcacgcagggtgcgccgtggttcggtgcagaggatgataacgacaaacacggcgacgtgccgaaggcggagttccgcaaatggaacgtcagcgccagtttccagcggccactggccgacaatctgtggtggctttccggcgcgtattttcagtggtcccctgaccggctgtacggcagcgaacgtctgtccattggtggcgagacctcggtgcgcggatttaaggagcagtacatctccggtgataacggcggttactggcgaaacgaactgaattattcattcctgacgctgccggtgctgggacaaatcagcgcaatggcggcgtttgacggcgggtggctgaaaaaggatggttttgacagccaggcagccggaacgctatggggggctgcgctggggctgaccagtgcaggcaggtggttttccagccagtttactgtgggaacgccggttaattatccggactggctggcgccggaccatctgaacatttattaccgggtggcggtggcattttaa

SEQ ID NO: 29416 - DNA, 1020 bp, Escherichia coli
gtgcaaaaaacaaaacgcgttaccatcagtgatatcgccgcactggcgggggtgtcaaaagcgaccgccagcctggtgcttaatggccggggtaaagagttgcgggtggcacagaagacccgggaacgtgtacaggccatcgcaaggcagcaatgttaccggccgagtattcacgcccgactgctgcgcgaaaaccgcagccatacgctgggtcttgttgtgccggaaatcaccaactacggtttcgctgttttttctcacgaactggaaaacctctgtcgtgaggcggggttgcaactgcttatctcctgtactgatgaaaacgccagtcaggaaactgtggtggtgaataacctcgtggcgcgtcaggttgatggcctgatagtcgcctccagtatgcaaagcgatgctgattatgtaaagctgagtgagcaactgccggtggtgctgtttgaccgccatatcaatgacacgaaacttcccctggtgatcactgattcgctgacgcccacagccgatctggtcgggcgtctggcgcgtgaaaatcctgatgaaatctatttccttggtggtcagccgcgtttatcccccactaaagatcgtctttccggttttatgcaggggctggagcgcgcgggtgtaacgccgcgcccggagtggattattcacggtaattaccacccgagcagtggttatgagatgtttgccgccctgtgtgcacgcctgggtcgcccaccgaaagcgctgttcgttgctgcctgtggcctgctggaaggagtgcttcgctatatgagtcagtatgatcttctcgaaagcgatatccatatcgccagctttgacgatcactatctctatgattcgctgtcagttcgtatagacacagttgtgcaggatataccgcttctggcacagaactgttttaatataattacgaaaatgattgacggggatgctgttgcggaactacagcgctttcttccggccacaattcactggcgttcggcatttaatccagaataa

SEQ ID NO: 29417 - DNA, 1410 bp, Escherichia coli
atggcgtcacactctctgttgcccgccgtactacaggcggtcatgaaagggcagccaaaagcgctgaatgacccccattaccccgcctggcacctggcgccggttacgggtttgctcaatgatccgaacggttttatccattttgccgggcgctaccacctgttctatcagtggaatgcgctcgacacccggcatttgcataaatgctggggacactggagttctgacgatttagtgcactggcagcatgaaccgatcgcgctgatgcccgatgaagagtatgaccgcagcggctgctactccggtagcgccgtggataacagcggcttgctgacgctttgttataccggcaatgtcaaattcgatgacggttcgcgtacatcctggcagtgcctggcggaacagaacagcgacggcggttttgacaaacttggcccggtgcttccgttaccccatggctacactggtcatgtgcgtgacccgaaagtgtggcgacacggcgaattctggtacatggtactcggtgcgcaggatctgcagttgcaggggaaggtgctgttgctgcgttctgaaaacctgtggaactggcaaaatctcggtgaaatcgccggcagcgggcttaacggcctgggcgaagcaggctatatgtgggagtgcccggatatgttcacgctgggtgacaacacgtttcttatctgctgtccacaagggattgtgcgggaagaaaagcgctggctcaacacgcatccgggggcgtacctctctggtactctggactatactaacatgcgttttcagcacggcgcgtttcatgaactggatgccggatttgaattttacgcaccgcagaccacacagacggaagacgggcgtcgcctgctggtaggctggatggggataccggacggcgaagagatgcgtcagccaaccgttgccaacggctggctccaccagatgacctgcctgcgggaattaacgtcccgtaacggaaagctatgtcaacaaccggtagccgagttgcaggctttgcgcggtgaagagcggttttatcagggcccggcgcagcagatgcccgcgctggatgcacagcgtctggagttgatggtggaaagctcgggtgaggtgacgctcagtttctctgagacactgatccttgagtggaataaagatgaactgtgtctggcccgtcgcagcctcgaaaacggtgaatggctctatcgttactggcagggcgaagcgcagaagttacagattctttgcgaccattcaagtattgagatctttatcaacgatggagaaggggtaatgagcagccgctactttccggtgcatccggcccgcttaactctgacgggggatgctgaacttcgggttcactactggtcgttacatccctgcatggtagaataa

SEQ ID NO: 29418 - DNA, 1371 bp, Escherichia coli
atggattttgtacaaatctcccgctcgctactgccgttactgggaggcaaagagaacattgtcagcgccgcgcactgtgctacacgcctgcgtctggtgctgacagacgacgccaaagccgataccacagcgatcggcaaaattgacggtgtgaaaggctgttttcgtaacgccgggcagttacagattattttcggcaccggcgtggtgaacaaagtttacgccgcatttatcgccgaagccgggatcaacgaatcgagtaagtcagaagctgccgatattgccgcacgtaagctcaacccgttccagcgcattgcccgactgctgtcgaacattttcgtgccgattatcccggcgattgtggcttccggtctgctgatggggctactgggaatggtgaaaacctacggctgggttaacccggataacgccctgtacatcatgctcgacatgttcagttcggcggcgtttatcatcctgccgatcctgattggctttaccgccgcccgcgagtttggcggcaacccctatcttggcgcaacgctgggcggcattctgacgcacccggcgctgactaacgcctggggcgtcgcggccggtttccacaccatgaatttctttggcattgaagtggcgatgattggctaccagggcacggtgttcccggtgctgctggcagtgtggtttatgagcctgctggaaaaacaactgcgccgggttatcccggatgcgctcgatctgatcctgaccccgttcctgacggtcattatctctggctttatcgccatgctggtcatcgggcctgcggggcgtgcgctcggcgacggtatctcctttgtactcagtacgttgattgcccacgcgggctggttggccgggttgttgttcggcggtttttactcagtgattgtcattaccggcgtgcaccacagcttccacgcgattgaagcggggctactgggtaacccgtctattggcgtcaacttcctgctgcccatctgggcgatggccaacattgcccaggggggggcgtgcctggccgtgtggtttaaaaccagagatgcgaagatcaaagcgattacgctgccctcggcgttctcggccatgctgggtattaccgaagcggcgatttttggtatcaatctgcgctttataaagccatttatttccgggcttattggtggcgcagcgggcggcgcgtgggtggtctccgtgcatgtgtatatgaccgctgttggactgaccgggctgccgggcatggcgattgtacaggcaagctcgctgctgaactacattattggtatggcgatcgcctttagcgtcgcgtttgtggtctcatacctgctgaaatacaaaacggaggcggaataa

SEQ ID NO: 29419 - DNA, 1548 bp, Escherichia coli
atgatggctcttcctcagggatacaataaaatgaaaaaaagcacacttgccgtagctcttggattgatcttaagttctggtgcggcccatgccgccgacccgaatttaagcagtattgaagcacgccttgcggctatggagcagcgtttacaggccgcagaacaacgtgccgttgcggcagaaagccgcgcgcaggtcgccgaaaaacaggcgcagcaactggctgctgcccagcagaaaaccgaaattacagccacgcaggtggaacagcgcaccgccaggctggagcaaaaagccagcgatgaaggcggcttcgagttccacggttatgcccgttctggcctgctgatgaacaactctgccagcaaaacccagggcgggccgacggtgacgcccgccggggaaaccggcggttatgtcggccgtctgggcaacgagccggatacctatgtcgaaatgaacctcgaacataagcagactctggcgaatggtgccaccacccgcttcaaagtgatgctcgctgacggccagcgtacctataacgactggacggcgtccagcagcgatctcaacctgcgtcaggccttcacggagatcggttacctgccgagctttactggtgcgtttaaagattccaccgtctgggccggtaaacgcttcgatcgtgataacttcgacatccactggattgactccgatgtggtgttcctcgccggaaccggggccgggatctacgacatgacgtggggcgacgaaggccgcagcaacgtgtccctttacggccgcacctttggcgatatcgagaacagtgaaaacacagcgcagaactacattttgtcgctgaataactactatggcccactgcaagtgatggtcagcggcatgcgcgctaaagataacgacgatcgcgtcgatctcgacggcaataaagtgaagggcgacgccgcgaataccggcgtacatgcgcttctcggcctgcataacgacagcttctatgggctgcgggaaggctctgcgaaaactgccctgctctacggccacgggctgggtgcagaggtgaaatcgattggttccgacggtgcgctgctgccggaagccagcacctggcgcctggcaagctacggtatcacgccgctgggcggcggctggcatattgctccggccatactggcgcaaagcagtaaagatcgctacgtcaaaggcgacagctaccagtgggccaccgccaacgtgcgcctgattcagggcttcaccgaaaacttcgaaatgcagtacgaaggcagctaccagtacatggatctgcgcccggaaggctacaacagccgtaacgcggtgagcggtagcttctataaactgaccgtcgctccgacgctgaaagccagcgatgttggcgaattcctcaaacgcccggaaatccgcctgttcgccacctggatggactgggaacaccgcctggataactacgccagcgatgatgcctttggcagcagcggttttgcctccggcggtgagtggaactttggcgtacaaatggaaacctggttctga

SEQ ID NO: 29420 - DNA, 927 bp, Escherichia coli
atggatcctagagtctggtgtctgggtgacgccgtcgtggacttactgccgcatggggtcgcgtgcctgatgcagtgcccgggcggtgcgccggcgaatgttgctgttggcgtggcgcgccttgaaggaaacagcggttttattggccgtgttggtgacgatccgtttggccgctttatgcgccagacgctggctgaagaaaaggtcgagaccgcgtttatgtcagccgatctcaggtatcgcacctcaactgtggtggttgcgctggatgatgacggcgagcgctcattcacgtttatggtgcgtccgagcgcagacctgtttcttgaagagagcgacctccctgatttcagggcctttgaatggctgcatttttgttcaattgccctggcggcagagccatcgcgtaccacctcgtttaccgccatggaacggatacacagcgctggtgggtttgtcagtttcgatccaaatattcgccacgagctgtgggataatgaggttcagcttcgccattgcctggcccgtgcactgatgcaggctgatgtggtaaaactctcggaagaagagctggcgtttattaccgattccttgccagaaaatgccggaatagtcgagctggctgcgcaatacaatattcctctggtgctggtcacacagggtaaatccggtgtgaaagcctgccttcatggttcaatttatcactacccgacgcttccggtggtgagcgtcgataccaccggagcaggcgatgcctttgtcgctggtttgttgtgggggctggcgcaacatggtcttccggacagcgaaacagagcttgccgcacgtcttgcctgcgcacaaatctgcggtgctctggcgacaacagccaaaggggccatgacggccctgccttaccttcatcagcttaaggagcaacttgtctga

SEQ ID NO: 29421 - DNA, 963 bp, Escherichia coli
atgttattgagtgatcttttttatgtgaaaaatggcatcattacatcggggcttaatattaaaaattttccaagtttaaattctataccttttcttcgaccggcaagtactcaggaaagaactattgctggctggattgataaaaatgacgttggggaaaagaacatttaccctgcaggaactctctttgtatcaacaaatggtgaggggagtcatagttattcatatgtttcttcttttgagttttcatgcaatagtgatgtatctgtccttataccgaagaaagatatgagcgtgccagagaaaatattttacgcccgttgtataacaatgaatagatatcttttttcttatgggagaaagcccaaaggttcacgattgaaatcaattgattttccaaccattctaccagaatggttggattcattttcgctagacaaaaataatatattactcaggcttaacgagttggtagtggatgatggtttcaagggcttttgtgatagaaaagaaacattttcgttggttccgctgtcggatgtttttgatgtgaattatggtgtaaaccttgagttgaatcgtctggaaaaagatccctatggagtaaattttgtgtcaaggacgtcaaaaaataatggtgtgtcagcaaaggttaaaattatagatggtattgaacctttgccttcaggtgtattaactgtagcgggtggtggttctgtactggaaacgtttgtacaggattcgcagttttacagtggtagagacctttattggttgaatccaaaggtaaatttaacgatggatgaaaaactttattattgttcttgtatcaggaaaaacaggaatagatatagttatggaaggcaggcaaacaggacattgaaatctttgttagttccatccgttagttccatccctgaatgggtatatggagcaatgtccagagtgatagataaactttaa

SEQ ID NO: 29422 - DNA, 1890 bp, Escherichia coli
atggctaatgaaagaataacagaaggtatcgtacgcgatatcttacgtgagtatcggtattactccccagaaaatggtatttccattgaagaacaaaagtcagaaattcaatctgttaaagcattattggcaaaggcaggaaaagctgccaaggggggagctggttaccctgagttcatcatatcgacccaaaaagatactcagtttctgatcattttcgagtgtaaagcagatgtaagaaaacatgccagtagtgggctgaatcggcctgtggaattttcggtggatggtgtattgcattacgccagacatttgtctaaaaaatacacaacacttgcggtggctgttagcggttcaacaagagatgaactgaaggtatccacatacttgttagctgcaggttcaggtacagagaaggttcttgttacagaatcaggtatgcctgtaactgatattcttccatttgatgattactatcgacttgcttcttttgacccagaggttgcacgtaaacgtcatgatgatttgttggcattttcacgaattttacatgagctgatatggactaaggcaaaaatatcggaagaagaaaaaccattacttgttagtggaacgttgatcgcactaatgaatgtcacttttatgaagacttttagtgcattacctgctcaggagttacaggaagcgtggttaggatcaattaagaaggaactggataaagctgatataccacaggcaaaaaaagatacaatgctacagccttatacgtatatcgctgtacatccaaatctcggaaaacctgacaccaaaacagccagggaatatcctgatggtgtattcaagaaaattatagaagatatttgtgagcaggtatggccatatattaatgtatatcatgattttgatgtggttggccagttttatggcgaattccttaaatatacagcgggtgataaaaaagctctggggattgtgttgactccacgacatattgcagaattattttcactactggcaaacgtaaatcctgaatcacgggttctggatatttgtgctggtactggcggatttcttatttctgccatgcagcatatgttaaaaaaagcagtgacggatgagcagcgtcaggatattcgacgcaaccggcttataggtgttgagaatagtcctaaaatgtttgcgctcgctgcttccaatatgatattgcgcggtgatggaaaagctaatctacatcaagccagttgttttgatgaagcaataaccagctccataaagaaaatgaaacctaatgttgggatgctgaatcctccttatgctcagtcaaaaagtgatgctgaactgcatgagttgtattttgtgaagcaaatgcttacttgtctggagcctggttctataggaattgcgatagtgccaatgtcctgtgccatttcacctaaccccgtaagggaagagcttttgaagtatcatacattggacgcagtgatgtctatgccagcagaacttttttacccagttggagtagttacttgcattatggtctggatttctggtgttcctcatgcagtatcagatcgaaaaacttggtttggttattggcgcgatgatgggtttgtaaaaacaaagcataaagggcgaatagatttaaatgagaaatggcctgcgattcgcgatagatgggttgatatgtatcgtaacagagaaattattccgggggaaagtgcagcacataaggttacaataaacgatgaatggtgtgccgaagcctggattgaaactgattattcaatgttgacccgtgatatttttgaaaaagacattaaaagatattttctgtataagttgatgttggatgtaaatagtgcgctggaggacgatgatgttattgagtga

SEQ ID NO: 29423 - DNA, 924 bp, Escherichia coli
atgacagagcaatttactgaacgtgagaggcggaaagtcgctgacattgttcaggaacatttatatgaggcctgtaacgggaagacgttgtccccggaggataaaaaaacgcttgttgcaggtcttgtttcacgggctaaaagggcgaccggcaaaaaaatgaaaaaagaacaactctacgtatgctgggaggagttttaccctgagccacatgacgttctgatggagaggaagatgctccgcaggtacgatcccggaaccggagttcatcgcgataaatttgacggcaggaatataagagattttttagcggaaaaccatgtcatacgggcgcttaagcgttacaacctgttcggcttttttttataccctgatgaagcattacctccggggactcaggtactggtacctgaatccaccgatattcctgctgaagtttacaacctgtggactgacctagtgaataactccggtgaaactgaagcccgggcggcgaaatacacagcagtggaatatcagcgatacacgggatttcgtccggccgattttaacgggttgaacgcgccggtcaccatcacgtttacggctccggactggcgggcgctcgccaggatagagataccagtcattgatgccattcccgatgatattccactgaagcatattcattacatcgttaaggaatttcaccgactgatttcttatttgcccgcgttgcctggttacggtgaggaaaatgcttcatccgtgtgggttttacccagccagaaccaacgaacggggattatgatgaatctgatgtatttcgaacagcttccagttacctgcctgatatttagcctcttgctgaagagggcaatggaaaatgtcctctctggaaaggtcactaacggtagggggcagagccgagcggttgatggataa

SEQ ID NO: 29424 - DNA, 420 bp, Escherichia coli
atgcagaatcattctgatccgcaggatgctgaattccagttactacttaaatcgttatcaggcgatgatacaggtgccctgctacaggccatcagcccgtttctcaggcggggagacctcaatacagcagaacagtgtattctggcgtacctgcaggaaaaaccatataagaagcaatactgcgaagcgcacctgccggcaaccatctgtaatgcctgctatatgccgacgatcaacaatgactccgatgcctggtacgcctgggagaaaacacggggctggcatgatgaactggtaaaagcgctacgcaatcatactcttgccaccgtcatcagacagcagcaagtggcgttgaaacatttctacctgagcacccgcggcgattccacatcgggtcagtccgacgacaaagcgaagtga

SEQ ID NO: 29425 - DNA, 381 bp, Escherichia coli
atggtaaacaacggtttcgacccgaaagacatcgaagacttctgcgatcgccagaagcgtaagcgtgcatccgctcagacagccagaattgattttgttgcgcgcgataaagaaagagtggccagtgcacccgatatccgtgcatcagagatgaataacctgccgccggccaaagttgatcgcggctttctgtggagcattgcggaaggtgctgcgtctgtatttgatgccgtggtaaaatccgccgctgcaggcgctgtggattcgttaaccagagatactaaaccgcggaaaatgtctgcaactgaatctaaaaataagtttctcagggaaaacccctacctatggcagccatgggaaaaagaagatgattttagataa

SEQ ID NO: 29426 - DNA, 1566 bp, Escherichia coli
atgacagcgaacagttttctggaatatatcctcgtggtgctgggctggctgctgaacaacgcccagtggaccatcctgacctcaaccgggctgtttgccctgcccattgtgtttaaggtcgcgggtatctggatcaaagtgagggaagagggcgcggatgaagggaaccaggggctgctggcgatgccgcgtatcgagcatgcgatttacctgacctactgtgtcatcctcttctgctgtatcccgctcattccggtggatctcactgccatcaaatatgacagttcgcgggcgaaacagtgcggattcagtgtgccggcaccgcagcagtcgggctataaggcgctgattaatgattttgacggccggacagcagaggtgccggtgtggtggtacctggtacacatgatatcgaagggcaccacccaggcaatgatatcgtcaattccctgcggcaaggagctgcgccagctgcggtttgacgtacagaacacgaagctgcgcgacccgattctgctccaggaggttcaggagttcgcggatcaatgttattcccgggcgtattaccggctcaagagcaccaacagccagctcagtgacgcaaccattaactccgtgggctggattggcagcgactatttcctgaacacgccgggatattacgattactacatgtcaatgacaccccgggcccagtggccgtatgacagcaagcgtgatgacgggtatccggataccggacgaggcggcttcccgacgtgcaggacctggtggtcagacggtacggacggcctgcggagcagggtgctgggtaccttcagtgatgagacccgcaagtccatgcagcgttctttcccggggaaacagtgggaggagatggcgctgcgctggctggtcagtccgagaaacgccgggttatccggcggcggtaacacctatgctgttggcagcgctgacaccacatcaggcatgagtaatattacccgggcgctgtccacgctgggtgtgggaatgaaacaggcggaagcactgccgggctttgatgcgctccgccaggcgctgccaatggtgcaggcactgctggaaatgatgatgattattgctattccggtactgatgatgttcagtgcctatgaaccgaagacggcgataacgatctcattttcaatgttcgccctgattttcgtatcgttctggtgggaactgggaggctggctggatgaccggcttatcaccatcctgtatgacacgatggcggcacagggcgcgggtgactcttcaattccttttgccgggttcttcagctcgacgtcggatggctggatcatgaatctggtgctgggctccatgtatcttattttcccggccttctggattgggatgctgagctgggcgggggcgcgaattggggcaatggccaaccatttaggcgaaggagctagattacctcagaatgcaggagccgagggtggccagcaggcgcaaggccttgctgttaatgctgcgacgggcgctgtaaaaggagttgcaggtgggctgaagtcatacggtaaaggtagtaaataa

SEQ ID NO: 29427 - DNA, 369 bp, Escherichia coli
atgaaccagcagcgtctgaatttttccgttctgcgcggccgtgccggccgcgttctgctgacaatcctgtatgtgctgttgttcactgcactgatgctggcgtttgcggccgcgatgttcgaatacgatccggacgggcgacagctgaggggggggctccgtgaaagccgcccctggctgtttgtctggcgtatggtgctgtacggctccgtggcactcttctggtaccggaaggtgcgtccgaagctgctgaaacgctggccggaagtgacagggagactaccgcggacggaactgattgtggggctgtattttgtcggctgcgagctgctgtttgcctggtctgcgatgcgtgaggggggcttatga

SEQ ID NO: 29428 - DNA, 1425 bp, Escherichia coli
atgacacagcaaaaacgtttcttttatttccttctggccggagccgtcatggcactgtccacagcgccggtcgcttatgccatcgatacgagcctttcctcatccggggcgtcggtcagcggcggggcactcaacgacaacctgttctattccattggcggcggctctgtgatttcgcccccgccggggcgcaacaacatggcgcgtattggtctggacggcggctggagcagtgacctgatgtgcggcaatttcgacctgagtaccactgtcggtaaccagctgaacggcatcaccagtggttttaaggacctgcagggccgggtgatacagggcgccacgggtgccgtgatgagcatgccggcgatggccatccagcgcgccaacccggggctttatgagatgctgacaaacggtatcgttcaggctggtttaagttttgataaagccctgctgaactgtcagaacatgtcgaaaaagctggccgactacacgatgggcaataaatggcagcaggccgcggtggccgaggagtacaaaaacattgtggccaccagtggcggggatgcgacggccagtgaccagaagctacagcaggccaccggtgaggagggtgtcaactggattggcggggaaaaacggggcggtaagggacagccggcgatacagcccacgcatgacctggcaaaagccggctacaacatgatgaacggccagccggtgaacagtaacagtcccgtcagtaacgctagctgcaatggcacgctctgcgagcggtacaaaaccccggaagaggctgccgcagcagtggtcaaggtggtgggcgatggtgccatccgtacctgccgggataccggcaactgtgccagtggtggcacggaaaaccagcccggtaccgccattgccggcaccggtttttctcccgtccttgaggaggccacgaaggaaaatctggagcagctgagcaaactggcctccggccagctcccgccgacggcagagaacctggcgaagctgaaagccggtaacctgccggtcacccggggcgtgattcaggcgctgagggacgatccggacaggaatgcgctggtacagcgtctggccagcgagctggcgatggcggacaccgtcgagatggcgctggggatgcgccggatgctggttaccgggcagtctgagccaaatgcggcccagcagccgctggcgctggaagagggggaccgccggattgaggcgattgaccgggagctgaatgccctgaagaccgagatggaggtgcgtaaggctatcaccagcaacggcatgctgacggcgctggagcgccagaatatgcgcaaccaggataaccagctgcagcaacgtaccggcagccaggacaaagggtttggtcagatggatcagtcagcggagggcggcgcaaaatga

SEQ ID NO: 29429 - DNA, 972 bp, Escherichia coli
gtgaagctgactctcccccgtccacgccgtctggctgtggcgatgctgatgacctgcagtggtgcaatggccagcgtgaataccgcgagcctgattgccagtgcagccagccccgactgcctggaatggcgcgtcagtggtatctgctactggctcctgtgtactccgtttggctgctcagtcaaaacctcagtaaaggtcacccactacattccggaagcggtggtctcggcctatcagaatcccggggataatccgtggccggagatgaacgccgtcagcacggtcacgggtggcgcggaaagctcactgattgcgggggctgccggcatcgatgtcggtggcgggcgacaggaaatgaaggcgcccgggcagcgcaagcagaacctgcatttctactacggcgatgcatacggtcatccggccacccgtatggtgggtggcatggtgccaggttattcctgtgattccgccgcaaccccctttatgccgtatttcagcagcgcccttgatgcgctggtctggcgcaccggcgtgccggaaatcctctatccggaagcgctggttcccggcgagcgggaactgggcagcacgacgtccggcaacatgtggggcaatgtttacccgcgcagtggcttcgtcacccagaccgatggctacaaatctgccgctgtggtggtgcagcgtgtggcggacatcatcacccgcagcggccagcttcatgtctataccccgctgaccggccagacgtcaccgggctactggccaccggagccggtcagggaaaacaccggtacgaagaatcacaaatggcagcgtctttctccgcagctttcgcagacctgcgcggtattccccgacaccggtggccagcaggcgcaggacggtaattacgcgtggtccctgtggcagccgtacagctgctgcaagcgacgcggccagaccttcctgtacagcaccgatttctcctga

SEQ ID NO: 29430 - DNA, 402 bp, Escherichia coli
atgaataaattccttctgtgctgcccggcagcattacttttttcagccagtgtgactgccggtgcagtggtgtacaccgataccgcacatccagtgccgggagggcagaatgagccggttgttgtgctggatgcgcttgaccatattttctctcagcaccatcagctgccggctgacccggtgcaggcggaacgcatggcgcgcgaaattctggcgtcagcagcattcaggcagatgcagcctcagctcgttaaggcggctgaggggctgaaaaatgcctgggcgcttggactggaaaagtatccggcggtggtgtttgacgacaaatatgtggtgtacgggacaaccgatgtcgcggtggccacgcagcgcctgaatgcctggcgggaggaacgcccgtga

SEQ ID NO: 29431 - DNA, 291 bp, Escherichia coli
atgacagagccaaccaatgaagtaaatgccgctgattttgaccgactggccagagcgctggatgccgtcgccatggcgtcaacaaaaaaaatggcagagcccgacctgttactgattaacagtctggctgctggcatgaagcgtaatctcgatggctatgttgcagagcaactggaagcggcgatcaaccaggcaaaagaagcgtccgggaaaataaaagacaaacagcggtactacgatcacttccggacatacctttacaaatttgaaaatggcatcactctggtctga

SEQ ID NO: 29432 - DNA, 183 bp, Escherichia coli
atgaaacacccacgtgatagccgtacttctgaagtacagatcagaacatctgaggcattcgctcgtatgggggttgcgatggagaacctgctggcagcagctccgaaatttctgagcgatacatcaattgatggctctaaagaatgtcatggcaaacgaaaagttgccaaaaaggcagcctga

SEQ ID NO: 29433 - DNA, 519 bp, Escherichia coli
atgaatctggagcaggttgccaataccgttatatctaacttgcaactcattctggacgggcaaggctggcctctggctgtcgggcctcttactgagggggattaccaggcgctctccacgatgtttgcagaacttaactgggattatgcgttttctgcgtttggtaatcgggaagataagttcgagtttacggtgaagttgcttccccacagtggagggcttcccgcaggagccgcaatgtgcgtctataatgttgaaacgaacagttttgacatacagtttgtggagagcttcgtaaggaatgtacctgaccatccgcttcatggaaagatgatgaaaataacggtactcgccgcgtatttgttttgttcgatggttgattgccccacagttcatgtgatagaacctgatactcaggaactgatggaaatttacaaaaccttcggttttgaaggtgattcagtgctgatgagcgcatctatcgcaacaatagaagcgttgatcatgagctatacttga

SEQ ID NO: 29434 - DNA, 2388 bp, Escherichia coli
atgcgattaccttttgagctcgatccacagattatccatcacatcatttacagccaggccgggtcgatcggcaaagccattatcgaactcatcatgaacagcgtggatgccggtgccggtgcggtgatgattgacatctcgccggaaggtttttcctgccgtgatgacgggcagggctttgcctcccgggatgacgtcatccgctattttggccgtttcgggacgccgcaccaggaaggggatgcaacctatggccgtttccggctggggcgcgggcagattatggcgcatgcccgtactgtctggcgttcccgcgaatggcagatgacggtggatacccgcgagatgggatacagttacgggcttgatgcgctgccggagccgcagacaggctgttttatcaccggcgaatggtatgagccgctgagtggccaggagcgtatgtcgtgcattcaggaaatccgggacctggtgcgttacacccctgttaccgtgcaactgaacggtactcttatcagccgccggccggaaaacgagaagtgggatgcggaagatgagtttgcgtggtaccgcctgcgcgatgaaggggcggtatccatctacaaccagggcgtgctggtccgccatgaccccgggcataactggggtgtcggcgggctgattctcagtaagcagccggttgccctgaacgtctcccgcacagaaatcctgcgcaagacctgtccggtctggaaggccattgccgcgaaatttggccagctggcggcgacgttttccggtacgcagggaaatcaccgcaaaacggagtcccgccgggaaaaaagcgcccgggcactgctggccggggaaggggatttactgaagctgttccattccgaagagatcatcacgctgctgccgggcaagcaacacgtcaccctggagcatttttttcgtaaatgccgctatggcaggcataccgtggaggacggggcatttacggttgcccggtatccgcgggatgtcccgaaaggggaaatgcttgcccgtgccggtattaccacggtcattcatcccgttaccctgatgcgttttggctgctttgagccggaagagtttatggaatgcctggcgcgggtgcaggataatctgacgtcataccacgaacagctcacgcaggatgagcgcgggtactggagtggaggctggcgtgcgtcccttagcctgattgacttcgccacactcagcgaggcgtttgttgagcgtacccggatggtcagcgagaaaatgcttgatacggaaacccgccgggcatggacggcgctgcggtggtgtctggccaactatgcggcgctgtgtgccggcggggaatggcgttaccgtaacgggcgggtcagcggcggtgtccgtttcagaattgtgctgggcgagtcgacgtcggccgacgcctggaccgatggcgaaacgtatatcgcgtacaacattgatatcgtgcgtcaactgaaaacggatgcgctgatgacagccagccggttgttcagcctgacggagcatgaagtggcgcatgagggcgacagtatggactgtgggcacgacgaggcgttctatcagcgcttccacgatatcagcacggagatggcgccggaacggcagcgatacatgcatatctggctgatgaaatacaccacaagtctcgagggggaggggaaacgagccagcggtaaacactggcgtgaacggtggctgacggaacgggccagtaccggccgccagaagaaaggccttcccggcgtgactgacgatactggtatggcgaaagcggtcagcgcaccggttgaacctgaagatgagcggttgctgaaccggctcaacctgctgctggccggtgccggtcatgcacaggttcccgaccccgactggactgccgtgattgccgaaggactgaaagagagccagcgacgtcaggctgaacgcgctgaggagatgcgccagatggctgatgatatcgccgcatggtatgcggaggagcataccgacgcggatgaggaggatagctatgtgctgtggatggaggagacacgaaaccggcttctggggacgctgccgggtgcgacagcggaaaacctgaccgattatattgtccagttcatgatgcatgaaacgtattcagcggaagaagagcaggaagcctggcgcctgcgcgcatgggaaaatccgggggcatgggaaggccagcgcacgcagaacgaagcagaggcggtcattgccggcatgccggcagactggttgcccctggtgaaggaaggcgagactcgctggatgattgagcgcaatgcagcagcagcgggttttttgtgtgaggaggattatctgctctggcgccgggataatgaagataatctcttctga

SEQ ID NO: 29435 - DNA, 213 bp, Escherichia coli
atggaactgaaagacaaacttgctgaagaactggaaaatcggggtcagtggtaccgtgccgcccgacgctggctggccgtcatggataacgccagtggcgaaagagaacgggaagcaatcgcccgcagacgggaacactgcatcagtatggcatcaaacataccgccgggcagagacgaagcgacgttacaaaacgcagagccggtacagtaa

SEQ ID NO: 29436 - DNA, 486 bp, Escherichia coli
atgcaggacacctggacagtaaaactcagggacgatcatcccgggtatacagaagtcaggcttaagcggagtttgcctggcaatgataaatacacggtgattactgtggatgccggcaagtttttagcctgttacagcaacgagattgagtcttacgttctgccaccagtacgtcaatggcccccggggaaagaagacgggatccgggaatttctcaacccttcagcgggcacggcagaaatgcctcgcgtgtcatttgttataaaaaagaaagtgacgcttcgaaaacgtctcctgggattacttaaacccgtcgtagaaagcgtcactgaagaaccagttctttcctttaccaatggtcgtcatcgtgccgtctacatggcttacgcaggcgcttttcgtttccccgtggaaatccatgtcagtgaagctgaacttttacgtcagtattgcggttcagcagataacgcatatttgacagtctaa

SEQ ID NO: 29437 - DNA, 405 bp, Escherichia coli
atgacaaaactgacgatgactccgccggcggtggttccggacagggcgctgatcgcctcggtgattttcacggtgccgccacagggaggggccacgattggcgaatcggacaaccgggcgctgacggcgctgcaggatgaaatccggacccggctggcacagccagtgctgcattccgtgtatccccaccgggtggggcgacgcagttgcctggccgttcacttaagcgacatgcacgggaaaagactcgatattctcattaccgtgacgggcaatacggtctggccgggagagggggattacagcagtagcgtgcggtggaatatctgcgtgcccgatgccaccgacatgctgtggctgctgagggggattgagcaggccaccagtagcagtctgtgccagtaa

SEQ ID NO: 29438 - DNA, 2832 bp, Escherichia coli
atggacgtgttcagtctgtttcgtaaaaagcctgagccggcatcacgccagctgaaaggcgacggcccttttgccatcaacgggtatgtgccccataaacggccgggcaaaatgacgaaggccgatgaggaaaagtttctttatccggtgtcgccgtcagttatcgatctgctcccgtgggcggaatatctgcagaatgaacgcgccattctgctcgatgacgggatctccgtcggggcggtatatgcgatcacgcctgcgcccacggaagggcggccggattcacggctggaagagatcatggatattgtggagaacgctttgcaggacagcctgccggagcgtgaggcaaaccagtgggtggtgcagtttttctgtcaggatgaacccgacctgacggcgtatatggacaccctgcgcggctatgtggtcccctgggccgagggcactgaatacacgaaagcctggctggccgagcaggaacgccacctgaagagtgtcgctgtggagccgggactgtttattgacagggaaatcaccggtgcggcctggcgggggcagacgcgccgcgtgcggatggtggtttaccgccgggtggagcagccgtaccgtgacatgctgtcgccggcggaggcgctgaaccaggtctgtgaccgcctgagcagctcgctttccgtggcgggcatcaaatgccggcgccagaacggcgagcaaatccatgactggctgctgcgctggtttaaccctgatccagagtgggtggaccgggagactctgtatcgctacgcccgccaccgtgatgatgtcccgggtgagctgccgctgctcaatgattttggtgaaagcctgtggtttaccacgccctggagcgatgcggagaacggggtgtggtggtttgaccatgtggcacacaaggcggtggcagtacaaaaaatacgccggccaccgacggtgggacaactgaccggtgaggtgcgccggggagaaaacatcaatgccatgatggatctgcttcctgcggggacggtggtttccatgacgctggtcatccaggcgcaggaccggctggaagaggattttgcgcggctgagccgcaattcgatgggggaaaacgtcgattccctgcgggcgcgtgaggatgcggcgatcgcccgtacttatctgggcaataaacacaagctgtaccgggctgccattaccttttttctgaaggcacctgacctggaaacgctggataaacactatcttcagatgagtacgcacctgctggccagtggccttgaacccatgctgccggagcatgatgtggcaccgctcagtacgtacatgcgggccctgccgatgaactttaatccggatacggacaggcgtaactggttcacgcggctgatgttcgcgcagcattttgcctgcctggcaccggtctacggacgggataccggtaccggcaatccgggattcagcctgtttaaccgggggggagaacccctgtcgttcgatccgttgctgaaggccgatcgcgaccagaacgcgcatctgctgatgttcgggccgaccggttcgggtaaatcggccacggtgacgtcgctgatggcccaggtcatggccgtacaccgtccccgtgtttttcttgttgaagcgggtaacagcttcgggttactgggggattactgtaaggcccatggactctcggtaaaccgggtatccattaagcccggccggggtatttcgctggcgccgttcagtgatgcgcacctgctgcagcttgaggatccggcgaaccttgtggtggaagaagacaaactccccgatttgaacgctgtcttcgacgcggaggaagatgaagatgatgaaaaacgtgatgtgctcggggaaatggaaattgccgcccgtctgatgatcaccggtggcgaggacagggaggaagagcgtctgacccgtgccgatcgcgggatgatccgtgaggccattattctggcagagaagaaaacctttgctgagaaccgtcagatgctgccggaggatttaaaggacgcgctgctgaatattgcccgtgatgacagcctggatgagcaggggcggccaaaacgtacgccgcagcgccgtgcccgcgcagaggaaatggcggaagccatgcacatgttcacggaaggctttgaaggtgagctgtttaaccgtcccggtacgccctggccggaagtggatatcaccattgtcgatctcggtacgctggcgcgtgatggctacagtgcccagatggcggtcgcgctgattgcgctgtttaacaccatcaacaatattgctgaacgtgaccagttcggcgaacggcagattgtggtggggatcgacgaagcgcacctgatcaccaccaacccgctgctggcaccgtatctgaccaagatcgtcaagatgtggcgtaagttgggtgcctggctgtggcagttcacccagaacctgtcggattatcaggctatctcgaagaagatgctgaacatggcggagtggtggctgtgtctgaacctgccgaagggtgagattgaggaggtgggaaaattcaagacgctgaccagagaggaggaggccatgatggcttcaacccgcaaaacagggaattacactgagggcgtggtgctgtcagcgaaaatgaaggcgttattccgggttgtcccgccgagcctctatctggcgctggggcagactgaaaaacatgagaaggccaggcgccgtgagctgatggatacgtaccactgttctgagctggaggcggccatccggattgcgcgggaactggacaggaagcggggtatcagtacggagccggagaacgtatga

SEQ ID NO: 29439 - DNA, 405 bp, Escherichia coli
atgccggtgaataaatttgtgattgttgcttgtcttgctgcactggtgtgcggctgcagtacctcaaaagaggagatgctgccacccggtgacagcaccatgctggagttatggaatgacggggcatcagcctcgcatgccaccacggagagccgcgccaccctgcgccgtccggtgtcggacagcgagcggacgctgtcacagcagacccgtgagagctacagccgtacccaggaaaatgaaattcagcaggtatttccgcgtctgccgaatccggatctggtgatgtatgtcttcccgcatctggcaggcggtaataccccggtaccgggctacagcacggtgttccctttttacagccaggtgcagtatgcgctgcccggtgagcgtacgggagatctctga

SEQ ID NO: 29440 - DNA, 309 bp, Escherichia coli
atgacttcagtctggccggcaacggcacgggcatggattaacggggaatacacaatgcagaacaacaacctcaataagtatctggccgctgttttgctggcggctttgttgtccggctgctgcacacctcaacagaaaacacagcaaccagacagcattccgtcagttctgtacaacagcgacagaacggctgttgcagaaagcgatcaacaaacccgggaaaggctccggcagtcaaaggcggcgctggaggcgctgatacagaaccctgcctgggaggattgcaggagagaggaggtatgccggtga

SEQ ID NO: 29441 - DNA, 1536 bp, Escherichia coli
atgacaaaagccacatccaatattctggtcagggttgtcgtgccggtggttgtggtggtggcgatcctgatcaccgtgaaatcctgttcatccgggggtaacgccccggagcaggcgaagggcaccaccagtacggtcctgaaagacctgaccccggaagaactcaaggcgctgggcgtggagggcgatacggcgcaggacacgttacgcaccattgccggcaacttcaggacggtgcgcgaacggctggactcgctcgacggcgagaacaaaaagctccgggaggagaacaaacaactgcgccagaccggcagtaacgttgacggccagataagccaggcagtgaacacggtccgcaatgaagaggagcagaagcgcagccagttaactgccaggattacggacctcgacgcgcagctggccaggatgatggagcagatgcaggacagtggcgggacggcgaaacccggcaacgccgggcaaccggcaggcggagccgggagtgatatccccgtcgggttcggctatgacgacagtaatactgctggcagcagtaccgcacagcccggcgctgacggcatgctgtgggtggagccgcgtgacggtatcgccacggatgcaaacggtcgcccagtcggtggcagtaacaccaataacgccaccgggttttcctttgccacctcctttggtgaagcggccggcgacaccaaagccgcggcaaccgccgttgtacagaaagcgtcagaggcggttgatgagtctgccgagcccgtctacacgctgccggagaattccacgcttattggcagccgggcgatgaccgcactgctcggacgtgtgccgatcgacgggaaagttaccgacccgtatccgttcaaggtgcttatcgggaaggacaacctgacggccaacggcatcgagctgccggatgtgcagggggcgattatttccggtaccgcgactggtgactggacgctgtcctgcgtgcgcggctcactcaccagtgtcacctttgtgttcactgacggtacggtcagaacgctctcttctgccggtggccagcagcgcagccaggggaacggcgaaagtgccggtcagggcgggcagggcagccagaacggcagtattggctggatctccgatgagaacggtattccgtgcatctccggggatcgtaaatccaatgcctccacgtacctgccaaccattggcctgctggcggccgccagcgcggccggggatgcggtctccgaaaaccagaacacctcccagaccaacggctatggcggcgtgacctccacgctgaccggcgatgccgggcaggcggtgctgggcaaggcgctgtcgggcgggatgaaggagaccgttgactgggtgaaagcccgctacggccagacctttgatgccatctacgtgccgccgggtcagaagctggcggtacacatcacccgccagctggccatcgattatgaagaaaaaggccgcagggtgaaatatgacttcagtctggccggcaacggcacgggcatggattaa

SEQ ID NO: 29442 - DNA, 879 bp, Escherichia coli
atgaaaaagttcggtgtctttctgacggcgctcctgctgttgccgtccgtgaccgacgcggtggaactgatgaagtgggagcgtattccgctgcaaattcccctgacggtgggccacgagcgcattgtcttcgtggataaaaacgtgcgggtgggcttcccggattcactgaataacaaactgcgggtgcagagcagcggcggggcggtgtatctcgatgcgcgtgaggcgtttccggtgacccgcctgcaactgcaggacaaggagaacggggaaatcctgcttctcgatgtcagtgccacagaggggaaaacgtcccgtgaacccgtgaaggtggtgtatgacggtgaggtggcatcggccacgtcatccgctgagcagaaggtcagcggcagcaccggaaacagccagccggcggaggagaaaaaagcctcccacaaaccggcgaaactgaatgcgccgctgcccgtggtactgacccgttatgccgcccagagcctgtacggccccctgaggacggtggaagcggtgcccggcatcatcccggtatccctgaagctgccgtcgcgtatcaccaccctgctgtcatcagagcaggtggtggccacaccgctggccgcctggagcctgcagggcagcagcgtggtggccgtccaggtgcgtaaccgttccgctgacaaaattatcctggatccgcgtgcgctgcgtggcgactttctggccgcgacgttccagcaccgctggctgggcagggcgggaacgccggaagacaccacggtactgtatctggtgatgcaggggcgaccggaaggcgcgtttattgcagagcctgcgttgtcggtatccggcaaaacggcaggaaagagggcggcgaaatga

SEQ ID NO: 29443 - DNA, 660 bp, Escherichia coli
atgagccgctttcgtaatgccatgaccgcccgggatcaccatatctggtccctgcgactggtctgcatcatgctctttgtggggctggttatcaccagtgtcggctggatgcgggcgccggacaatctcaccatccataacccgccggatctgcgttccggcagcacccgtaagtggtgggaaatccccgaatccacggtctacagcttcgcgttctatatcttccagcaactgaactcctggccgaaggacggggaggcagactatccggcgaagattgcgcagatgagcccctatctgacgccgggttgccaggccttcctgaaccgtgacgcagaagtcagaaagaacaatgacgagctgcgtgaccgcgtgcgcgtggtctatgaagttccccgccgcggctacagcagtgccagcgtcaccaccgtctcgcaggatctgtggatcgcccgcctcgacctggtggcggatgagtattaccacaccgagccggtcaaacgggcgatggtgcgctatcccgtccgggtggtgcgctgggaaggcgatccggaacgtaacccgttcgggctggcgctggactgctatgagggcgtgccgcagcggctggaggccgtaccacaggcggagccggagaaaaagtcgggggtgttccagtaa

SEQ ID NO: 29444 - DNA, 375 bp, Escherichia coli
atggccgttattgattttctgcctgaccggctgaacaacccgccggtggtctggaaaggctacacgtccggtgaatttatcctgtcggctgcctgcgggatggtcgccgggatcccggtggcggtccccctgtcgttcgtctcctttatcggctggctggcattcccggcctgcatgctcctgatgccgctggtcttcctttttagtggcggtgtggtgatcagccgtttaaaacgcggtaagccggagaacttcatctggcagcggctggagcggtttctctgccggctccggttttcgtcatccctgcttcttgcctcccgtggatgggagatgagacgtacccggcaggtaaaaccgggagggggtgtatga

SEQ ID NO: 29445 - DNA, 375 bp, Escherichia coli
atgaaaaacacccttgctaacgtttaccgccagttgcttccccgtggcaggcaggcgctgctgcttctgtttctggcggcgctttactccgtaccggcactggcggatttgcccccggtcgagcctcctccgacaggtggaggtggcggcacctataacacctttatcggttatatcaaactgggggcactggcgcttggcatgctggtctgcgtggcggcattcctggcggtcgcgcataacgtcatcggctcctttatggatatcaagagcgggaaagggacctggcctaactttctggggtatctggtcgtgggggtggtggtgatcctgattgtgatttacctcgccaccaaagcgtcagaaatcctgtaa

SEQ ID NO: 29446 - DNA, 240 bp, Escherichia coli
atgaacggggcgcagcgtaacggctgggacgctggtaccggtggcttcctggagcccgggcaactgaacacccttatccttggcgcgctggggatcgtgattttcctcttctgcgcctgggcactggtgaccgcctaccggggactcgccacgcaggccgtcacgtggcggcagttcatggagatgattgtgcgcatcatcctgctcatcctgctgacactgttttttttcttccactga

SEQ ID NO: 29447 - DNA, 315 bp, Escherichia coli
atgcgccattcaatcatcctttctgctttgctgctggcatccctgccggccatacaggtccgggcgtccgaaaaggacgaacttgccctggtgatgcgccagctggatcaggtgcaggcctgccttgaccgcgcccgcgtggtggcaaaccagaaccaggaggcgcgcttttactttgactaccagcaggcctcccgggatatcgccaccatgaagcaggggatttccacctaccttgagccctcacgggcgcagccttccgtacccgttgccgtgaccggccagtaccgcgctgaagagccggactggcaatga

SEQ ID NO: 29448 - DNA, 261 bp, Escherichia coli
ttgctcttcatccgtaccactcaatacaaaatcgtaccgaagcgccagagcgctgacggtgtggctgttgacgttggtttttcagatggcaacaccacccttcagagccctgtcaattactgtacgcgggctcccacgacaggtgcagacggtctcgagcatgccgagaacgaagtggttgaggcggtgaattttgatgcactttcccggcaggaaaagagggaactggctcagcgacctagtaacaatgtgcgtttctaa

SEQ ID NO: 29449 - DNA, 594 bp, Escherichia coli
atgcaaaattacccattaccctggacatttcatccgcagttgacagaagagcgcttatctatcattgcggagacactccttaaagtgcaggaagacacgcatgagcttttgtcttcttcgcttgatgataattatacccgtgcaacatgtacatttggacgccagaagaatcgaatcgtcaaactgtgcatgtcaaaaaaatacgactggctgggactttctaatccgaataacgattacacaatcactattggcggtatcccgatccgttcatttagcgatgatccaactaatccgaaaaaagctaacttcttccgcaaaaatagcgttgaccagctattcgcatcagaagatacaatccctacgatttggcgcttcgttgtagagaaaccagagttcgaaggcgaaggtgggcgagtgcattttgcgggttataatgcactggaagaaatgctctctttgtggacgtatggtgaagaacgggtaacagtgctgcattctacagacgataccccgccagtgcctgttaagattgagctggatgatatcagcgcttctgttcctgaaaaggaaaagaaaagcgataacggataa

SEQ ID NO: 29450 - DNA, 1113 bp, Escherichia coli
gtgtttaacggttctaatttgcgattggctcgtctgtatcacgagctatcactggagcaagtagctgagcgggtcgataagacccgccagtacattcagcggctggaatccggctcggctgtacctactcctgagcttgcgaataaattagctgccgtgttactggtcacgcctgaatttttcgcagtgcaaaagcagtctccagtaaatgaagagctcgtccacttccgcaagcgtagttcaacacgcatggcaactaagtgggcgacgctcgctaaagctgaattgtatcgccgtcttattgaagtttttgatgaatacctgaatttaccatcagtaaaatttcctgaactgagagtaaatactcaagaggacatagaaaaagccgctgagaaatgccggactgattggggattaggttttgggccgatcgacaacatgactcgtcttgctgaaaagctgggagcatttgttacttctttcgattctgtctctgatgacgtggatgcgctttctgttcctttaagtcggccattcattgtaagaaatacggcgaagaaatcgccatgccgtcagcgttttgatattgctcatgaagttgcgcatttgattttgcatgaaggtatttcaacgggggatcgggtaactgaatcacaggctaaccgttttgcatcggcattgcttctaccccgttcggcgatggcaaaatatttccctcgcccaattggtggtcgtatcgactggcaggggctgagtcagtttaaattgacgtggaaagtgagcaaagcagccacaatttacagagcacatcagctttctctcttaaccgatgcccaatataaaacggcattcttcggtttaaagcgcaagggggaagccattgatgaaaaagaggattatttgattcctaatgaaaagcctgagctttttcataaggcaatgaagtttctcttaacggatctgtcagttgatgctgagtccttagccaggcgtttgtgtattactccggctatgttagcggaattagcaaacgataatacattagattttgccccggaaatcgctaccgaaaatgttgtttctttatctgcttatcgaatgaaaactgcataa

SEQ ID NO: 29451 - DNA, 246 bp, Escherichia coli
atgaacagagattacccactcagtcaaatcacactgaatctggcgcggtcagtagccggaatcaggccatcaccagatttgcaggagatgcactttgttctgcaggatagtagtcacactatgctgatgccgctggaaacgctcctgcgatgtctgcgcgaagctgagaaacagggtgaagtaccggttcttcctgtggagtggtgggctctgctgaactgtaaataccctgaaatcagtcagtga

SEQ ID NO: 29452 - DNA, 759 bp, Escherichia coli
atgtcacagcatgatactgaccaccgccgcagcgcttcgccccggcggacatcctccgggccgttctgcctgctgctgtgggacctgccggcggctgttctcggcatcctgctggggtcactgctggtcagcctgctgatcgaatatgcctgtattgcctttctctggccggatgagggggcggcacacagctaccgggtcatgcaggccgagagccgctggctttctgatggctatgcccggagcctgctgatgtcagccccggtggagacggtgagccactggatccacgttgcctggcagtggctgtttgttgacagcgggttcagtggctggctgcaggcattccggcagcggtcgtcacaggggacggggctgatcccggccatgaacggctttgccgccacgctggcagactggctgggtgaatacctgcaggcgacggtgtgggtgacgctgatattctttatccgggtgatgatcctgttcctgagcctgccgctgttcgggctagtcatgattacgggcgtggtggaggggctggtacggcgtgatttgcggcgttacggggcagggtatgaatcgagttttgtctatcaccatgcgaaacggtttatcaggccggcgctttacggtccctgcatgctgtatctggcgtggccgacggcggtatggccgaacctgctgttgctgccggcagcgctgctggtcggcacagttctgactattacggttgcgacatttaaaaaatatctttag

SEQ ID NO: 29453 - DNA, 2121 bp, Escherichia coli
atgagcgatcgctatgtgatggagtccctgctgcgcccgccggttgagctctactctgccacggtggccggcagcgcgacacttatctgcctgactgccccctgggcagtggcgctggcaccgtccgtcagttgggtgaccgccgccgggttcggcgtgctggctctgaggcgcacccggcagggactgaaaattctgcgttaccagcgtaatctccgccgcctttcccgctatgcgctgaccagcgcgcagatccccgtcagccggcgtcaccttttcctcggtaaaggcttccagtggacggcacggcacacgcagcgggtgctggaagcccggcgcccggaaaatgaaatctacgttcagccgtcagtgttgtaccgtctggcccgggacatggagcggaaactggaatacagcctgccctggctgtgccggctgacccgcagtgacacgcccctgaacccggtacggccgttgccgccagtgggcggcagccccgtgtatcacggggtggagccggatgaaaccacggtcagtttcgacctcggggaacgcgttggccatatgctggtcatcggcaccacccgtgtgggcaaaacccgcctggcggaactgatgatcacccaggatatccgtcggcgtaatgccgcaggcgaccatgaggtggtgatagtgttcgacccgaaaggggatgcagacctgttgcggcggatgtatgccgaagctcaccgtgccgggcggcaggataacttttatgtcttccatctgggctggccggaaatttctgcccgctataacgctgtagggcgtttcagccgtatctcggaggtcgcttcccgcgtggccgggcagttgtccggggaagggaactccgcagcgttccgcgagtttgcctggcgggtggtgaacatgatcacccgtgccctggtcgggctggggcagcgtcccgacttcaccctgatccagcgctatgtgatgaatatcggcgcgctgtatgaactctacgtggataacctgctgagtgagaaggccccgcagctgatgcaggtggtacatgccctgatgggcagcggcgttgaggaaaaggacatgccccgccatatccagggacgcaccaacagcctgaaaatctgggcggtcgagcaggtgctggcgagtgatgaagggcggcggcttcaggatccggtcatggaagccctgagcaatgccgtgcagtatgaccgcacgtactttgacaaaatcgtcgcctccctgctgcctctgctggagaaactgaccaccggtgagattgcggctctcctgtccccggattatgccgatctggatgacccgcggccgattctggactggcacaacattatcaagcagcgcgggattgtttatgtcggtctcgatgcattgtcggacgcggtggtggcgtccacggtggggaacagcatgtttgcggacctggtctctgaggccggccatatatacaagtttggtctcggggatgaggagggggagaccccgaaaaaagtcaccatcaacctgcactgcgatgagttcaacgagctgatgggggatgagtttattccgcttatcaacaagggcggtggcggtggcgttcaggtgacagcgtacacccagacgctgtccgacatcgaagcgcgtatcggcagcagtgcgaaggccaaccaggtggtgggtaacttcaacagcctggtgatgctgcgcgtcagggagaagagcaccgcgatgctgctgaccgaccagttgccggaggtggatgtctacaacaagacgctgacatcgggtgtcactgacgtcgcccgtcccggggaaggaacggactttaacagtaacgtccaggatcaggtcaacctggtgaaggcaccgatgatcacgccggcagacgtcatcaacctgccgaagggacaggcctttgctctgctggaagggggacggctgtggaaggtcaggatgccgttaccggtggatgatgacgatccgctgatgccggagagcatccagcggctggcccgccagatggagcaggattaccggaccggggaatcgtggtggtccggctcaaaagtcccgcttccagctgaaccgggagggccgtatgtcacagcatga

SEQ ID NO: 29454 - DNA, 765 bp, Escherichia coli
atgagcgattttctgacgagaacggatgccagcccgccgcactgggcgagtgagcagattgaagcctgggatgaccgcaaactgcgcctgcacggcagctttatccgccgccattactggaccgactgcggcagcctgaatgtgttctgtgtccgggggacggagcacccggattatcaggggctgacctggcatgagtttctccaccgcggtaagcgtatggaccgcaatatcccgctactggaaagtaatccggactattacctggggacagagcggaagtttccgtccatgtattataacagctacaacggtctggactggtttatcggtgcagacggtaaccaccgtaccggtcttgcccgttttctgtttcatgaacgtcagatggcgtacctgcacggcctctgcctgaaccattatgagtttgataacgcttttcttgaggcttatctcgtgctgtgtgaggaactgcgttttcatgcggcgcagggcttttatatggatcttgaggtgaccagggtgccggagtcccgtcgggatactgccggctggaaaacggatttgttcagtacggcactccgtttttcggctggcgccggcacccgggaggtactgcccgcgaatattccgcagtctgtaaccgtccgtgagcctgcggcggcgcgggaacttctcggggcgctacaggcatggcgggatgcccgccagcgtgcttcccggggcggcctgctgaaccgcctgttacggagggcttcccgatga

SEQ ID NO: 29455 - DNA, 375 bp, Escherichia coli
atgagcaaaaaatttgatgccatttccctgtttgtttctgagctgatcttctctccggcagcccggatggcccgggatgtcttgtgtaccctgatgcaatttgttctgaaaatattcatcctgcgcccgcttgtactgctctgcggaatggtgctggcggtgcttgtcaccattccggttatcgtttttatcaacccgtcgtttacccctgatgtgctgaccggcgggctcttacgggtacaggatctgctgcccgtggcatatacaccgctgttcctggccggcctgctttttgaactgctttatatggtgagccgtttaacagggttgccgtatttctggctgaatggcgcgggccagggaaagggaagataa

SEQ ID NO: 29456 - DNA, 666 bp, Escherichia coli
atgataccggatccccttctcgccgggctgctgagtccgtaccggggggcgttcgtgctggttgcggccggcgtgatggtactgctccttctgagattcagccgacgcaccgtcagtcagcggcgtcatcaccgttaccggaaaaaagccgtgcgggcgctgctccgtttgccgcaactgcgtggcgaagctgcccggatggtctggctgcgcaggatgaacccgtatgtttttgaggaaatgctgctgacggcactgtccaggcaggggttgcgtatccggcgtaatacccgatacagcggcgacggtggtgcagacggtcaggtctggattaacggccagcgctggctgattcaggccaaacgctacagcgcaaccatcaacgctgcgcatgtctgtgcgttcggacaactggctgagcgcgaagggtgcccggggctttttgtgcacaccgggcgtaccggagaggccagccgggaagtctttcgccgttatgacaacatcatgcttatcagcggccagcgactgctctggctgctgtccggcgaccggcgctggatggacggcccgggtggacagcccctgcacgcaataacccgaaaccgtccccgccattcaccatcacccgttactgaaaaggaaaactgccatgagcaaaaaatttga

SEQ ID NO: 29457 - DNA, 513 bp, Escherichia coli
atgataacaagatgcctgaatttcacactctgtgtcggtctgctggccttcgcctcctgttccccggcgtccctgacggtagtggctgacctgggcggtgactcaacggccggcttttttgacatgcttaatgcgcaggggcaaagcgctccggcttcacctgtgactccgcccgtcccgctgtccatcgcggacatgctgcctgtcagtacgccggagctgtcgccggggcaggtggtctcccggccgctgcagttgcccggcctgccgccggtgtttgtggtcggggacgatgatctgtcccgccggtggctgcagcagcgcgggccggaactgacgcgccttggcgcgacgggactggtggtgaatgtggccacagaggaggggctgcgtacgctgaaagcactgttaccggggacagaaatggcacccgtgcggggcagtgatctggcacagcgcctgaaactgactcattacccggttctgatcactgctgaggggatggcgcaatga

SEQ ID NO: 29458 - DNA, 609 bp, Escherichia coli
atggcaggtcgcagcattctgatggcagcactttgctgtggtctggcttttgccggcgcggcgaaaagtgctcccgtacggcagagtattccgcccgcgtaccgcctgattgcggagcaggaacgggtaccggcggagtcgctgtattcgctggccatggccgaaagcacccgtaaaaccgccgccggggcgaaaccctggccgtggaccctcaacgtggcggggaaggggtatcactatgagacgcgggaagaggcctggcaggcgctgctgggctttatgcgccgttatcccctgaaacgcatcgatgtcggtattgctcaggtgaatctcggctggaacggacagtattttccgtccttccgggatgcctttgatccgcacactaacctgcgggcagcggcccgtattctgagggggtgctatgacgcccgtcccggaagctggatcagggcggccggctgctatcaccatcctgccggggggaaaccggctgccagctacatggccacggtccggcgcaagctcagccagattaccccggaaacgccggagaacaagcctgttgtcctggcaagcaaccaactcacctggattgaaccgcaatga

SEQ ID NO: 29459 - DNA, 726 bp, Escherichia coli
atgaaaaaataccgttttgccggtctggcgcttctcccgctgtgggctgtgatggcctcagctgccactctgcctggcgctgccagccagagcagcgtgacaaacacccgggagcagcagagcagtcaggtgcagactcagcagcaggcacagcagtggggactgtccgacagggagtgggcgcagtaccagtcactgatgcagggggagcgcgggattatgtccccggggcttgaccccctgacggcgctgggcgtcgaaactgacagccaggcagaccgccgccgtctggcagagctgtgggtcaggcatgagtttaaacgtgccgaaaaggagctggccttccagcgggaaatcaacgccgcctggctgcggctctacccggaaacgctggccgtgaacatgggcagcaatatggccggtattgcgcatgacacgcagggccggctggcgctgttcgtgaaggaagactgcgcccgctgtgatgcccgcctggcggcggtactggccgataaccgcccggtggacatttacctggtcggcagcggtgataacgatgacaccgtccgccggtgggccacccgccataacatcccggtggagaaggtgcgcagccgtcagattaccctgaaccacgacagaggaatgtggctgcgttacgggcagggtcagatgccggtcattcttcagcagggggaaaagggatggcaggtcgcagcattctga

SEQ ID NO: 29460 - DNA, 885 bp, Escherichia coli
atgtcatccagtcttacatcgccagaagcactgctgaatgaggagccggaagcggtttctcaggatccgtcaccggcgtcatccgcgtcaccggcggctgtaccccggcggcctgttctgcccacgaaaaagctccttaaaaccgggggcctggttctgctcgtcctgtcactggcgggcagtgtggcagccattggcgtgatggcgagccagatgtcagccctgaccatccgggtcaacagccttgacgccgcctttcgcagcggccagatgagccagttgtcatccaccgtcgccggcctggaaaagagggcgcaggcgcaggagaaacagctcgcctcactgtcctcagacctggcatcagccagaaatgccgcggaacacctgtccgcctccctttcagaccgcgaccagaaaatccagcaacaggcggacgatatccgtcattaccgggacacggtcacacaactggaagggcgggtcactcagctcgaaaccggtcttcaggcatccgcggaacgcctggctgaaatggataaggtgcggcaggagaaaaagcctgccgcaccggccgtcagggcagaaaaagcggcgccgtccggcaagccagcgtctgtcacgccgtcaggtcagaccgcaaaaaagggtaaccggtcagtcaggcgcgctgcgacgccggctgcaccgttcgttctgaccgggattgagcgtcgcggtggaagcactttcgcagtcgtgatgccccgtggcgcggccgccgtctcgcagatgaagctcctgtcccccggcgaccgtaccggtgactgggtactgcgcgccgtgcacgggagcagtgaggcggtcttcaccatcagtggtgaagaggtccgtgtaccggttcagtaa

SEQ ID NO: 29461 - DNA, 1116 bp, Escherichia coli
gtgaaaaaacgtataaaaaaaatgcccttagggaaggccctggataagtattaccgcacggtttccgttaacaagcgcgggtacatgcaggagttctaccgcatcagcgtgattaaacgctccgcgctggcagataagtgcatggatgaaatcacctcggtggatattgcggaataccgggatgcacgccttggcgtggtcagcaagcgcacggggcgggctatcagcccgaatacggtgcggcttgaacttggccttctgtcggcgctctataatatcgcccgcattgaatgggggacctgcacgcataaccccgtggagtatgtccgcaagccaccgccatccccgggccgcaaccgtcgccttacctcaacggaagagcggcgaataacccgcgcactgcgaaaacgcaaccatcagcaactggccatcttccagctggcgctggagaccgccatgcgccagggtgaaatcctggcgctccgctgggagtatgttgacctccatctgggcgtggcgcacctcccggtgaccaaaaacggcactgcgcgcgacgttccgctctcttacaaagcccgccaggtgcttcgggagtttgcaggcccgctgtcggggccggtcttcacctatacctccaacggtttcaagagcgcctggcgcacgctgattgctgagctgggtatagaggatctgcattttcacgatttacgccatgaagccgtgagccgcctgttcgaactgggcacgctcaatatgatggaagtggcggccatctcgggccacaaaagtctgtccatgctcaaacgctacacccacctgcgcgccacccagcttgtcagtaaacttgatgcccgccgtcgtcaggcgcagaagtttgccgccctgtttgtgccctatccggcagagctggaggagagtgatgccggcatcaccgtgcgtttccctgacctcgaacacccggaatttaccgttgcgacgcgggaggacgcgctcagccgtgcgtcggtggatttgctgcggatacaggcaatggcggcaagagctggctcccggctgccgccgcccggacatgtttccgttaacgacagccggcgaatactggtgaacccgttatga

SEQ ID NO: 29462 - DNA, 1449 bp, Escherichia coli
atgactgaaatgacgcaggcaactgtgcgagccccggataagggacatgtgattgtcagtaccgctgcggggctgattatcctgttgctggttgtcctgtgggccggtgaccgctggatggattacgtgcagcgcaaggaatggcaggtatctgctgtacaggtgacccgctttgtgcaggcggtcagggcctatacgggacgttattacgacacgctgctgaaatccacgaccaccacgacaccactgaccgtgacggtggatatgctcaaaaataccggttttctggagccgggattcagcgggacgatatccggcggccagcagttacaggcggcactggtgcgtaacaccacgaacacggaacagctgcaggggctggtagtcagccaggggggaacggcactgccgtatatggcggtgcgcgatatctcggtgaatatcagtgccgggctgggggcgtatgtctgggacagtgccactgtcatcaccggtgcgatgggggcatgggaggcaccgatggcgtcatacggtatcaccacaacgggggggcatattggcgcgctgctgaccacggatgagctgaatgccgccagggaagacaatgaccgtctttaccgttttgcggtgacgggcaaaccggatctgaaccgcatgcataccagcattgatatgggcggtaatgacctgaacaacaccggcacggtgaatgcgaaaaccgggaaatttaccggggatgttgctgccgggggtaaagtcgatgccggcggaaatatgacggcgggcggcggcgtcacggcaaacggtgacatccgcagcaataacggttcccttgtcacccggggtaataacggctggcgtaatgaaacgttccagggtggattttatatgtcggattacgactgggtgcgggccattggtaataaggggatttacaccggtggccaggttcggggcggtacggtcaaatccgacggaagactaaccgtgggggaatattccttgcatacaaaaattgaggttgctggcacttcctgtcctcagaatggccttcaggccagcgatgcgtctggtggcgcacttttctgtcaatccggtgtgtggggtcgacagagtttttcgggcaaatatacgtatatgggggcttacatcggttcagccacaggtaaaaatactacggacacaacaatgtttttattcgtatcaggtggtcagtcaacagtaaaccgcggggtcgacggtggggacaattgcgtgaacacttttgacctaaagggctatgtatcaagtacacaggtagcaggccaggcatcagcaaattcagactggtctaaatcaggtttcatctcgtttgctgttcctcctggctctgaatggagcctgtcatcatcgcctcttccatcatacggttgttcacccgggcgatttacagtttttagctatcagtag

SEQ ID NO: 29463 - DNA, 651 bp, Escherichia coli
atgcctgtgtcgcccggttccctgatgctggcagggctggttttcgggctcagcgttctgctgttccagtgtgtgtcagtccgctggcgcggcgatctgtgtggcattgatccggcagaatgctggcaggcgggcagcgcagcgatggccgtaatggcgcacagtgccctggtgacgttctgctgcctggtaccgtcggaaggggatgtctaccggacagccggtgtggtgctgctgtccctgtttctgcttcgcctgacgctgacggacctgatgaccggcctgttgccccgggaaatgacggtcagttgcctgctggccgggctgctgtttgccaccggcagcggtgaactggccgggcatatcctcgccgcactggcgctgtggctgttgctggccacagcgcggagtatcgctggctggttttaccggacggaagcgctgggactgggggatgtgtggatgggcagtgcgctgggcgcctggctgggctttttcccggccgtaaccgccctgctgatggcatggagtggctgcctgctctggatgctgctcagcggcacacgaaagaccgcccttggtccgtggatgagttacagcgcgcaggcggtggtgttattaacgtttattgagcccttcgtggcgtggtga

SEQ ID NO: 29464 - DNA, 477 bp, Escherichia coli
atgtggcgtctggtctttctgttgctggctgtgctgtctttcccggcccgggccttctgttttgaggcggcgggggcgaagtaccgtgttgacccgctgctcatccgggcgattgccaccggtgaaagcagcctccggccccgggtcacgcacgacaaccgcagccgggagaccggtaaaattgtcagccgtgattacgggctgatgcaggtgaactcgacgcacgttcccgatcttatccggaagggaattatccgcagcgcggacgatctgctgacgcgcccgtgtcttaacgtgcaggtcggcacctggatcctggcgaaacattttcaggtctgcggtatttcctggaactgtctgggctcctacaacgccggcttccgtcaggaccggcacgagacgcgggaagcatatgcgaaccgcatctacgccatttatctggagctgctgagaaaagagcggggtatgtcgctgtga

SEQ ID NO: 29465 - DNA, 597 bp, Escherichia coli
atgtcattacagtcagtttcagcgcgcaggcgcacatccgcaaaaccggaccacggccacgttattgtgcagaatgcggcggggatcctctggaccattctcgggatggtggtggtgaccgtgatggtctggtctatctgggggatgtttaaccgttccattgagaccagcaacgtccagtccattgcctctgccgtgaagggcaacatgaagcagcagggcaaggggtataactttaccagcggaacctccatgaccgggaatatgattcagcgcggactggcaccgggcaacatgaccatcgtcggggataaaacctccggcagcgccacgctgtggaacacctggaacggccaggtggtgatagcccccgtggccatcaacggctacaacggcgggttctccatcacttacaacaaggtgccccaggaagactgcatcgatatgagccaaaaactggctcctgtgttcacctcgctcacggtgaacagcagcgtgcacaacggtgaggtgaccggggagagcgccggcaaggagtgcatcaaagacagcggtggtgacggtaccaacaaactggtcttcacctacaacgggtga

SEQ ID NO: 29466 - DNA, 1113 bp, Escherichia coli
atgtctgatgtgcgtttccggccgtcacggcccatgaatctgtggcagcgctgcctttaccagggcagtcgcctgacgtttaccgccggttaccgccagccgttctgggagacgctgcggtttctgctggataacggcagaccgatgaaagaggccctgcggatgatcagtgatatccatacggatttcggccgtcgctggcatccccttgatgaactgatccaggactgcctgcagtcgctgggtgaaaacaccgaagggcatcagttgccggacgtgctggcccgctgggtgccggaagatgaagcggcgctgattggtgccgggctcaaaagcgggcaggtgtctgccgcgctggcgcaggccggcaaaatgattgatgcccggctgcagatcctggcgcaggtgctccaggccgccatttaccctctggccctgctggcgattttcgccgcgatgctggcgctgaacagcctgcaactggtgccccagctcagcaaactctccgatccggattcatggcagggggcgctgggcgtcctgaaaacactggctgacgtcacgtcggcctggggcgtgtgggcggcggtggctggcgtggtgctgattgccctggtgttctggtcgctgccccgctggcgtggccgcctgcgccgggtggcagacatgctgatgccctggtcgctgtatgccgatctgcagggggcggtgttcatgatgaacgtggccgccctgctggaagccggggtgccggagattgagatcctccggacgctgcggcggttcagttcgccgtggctgcgcgagcgtatcgatgcggccattgccggtgtcaaccggggtaactcgctggggatggccctgcgtaacagcgggtatcacttcccggataaagaatcggttaactatctggccctgctgggcaggggcgatggcgcgggcgtgcttatagcgaaatacgcggagcggtcactggagaagacccttgcccgtgtggcccggcgtgccgccacggccaggatggtgtccatcctgcttatttttgccttcttcgccctgatggggctcgttgcgatggatatccaggcgatgtcctggtcttccatgcattaa

SEQ ID NO: 29467 - DNA, 1542 bp, Escherichia coli
atgaatatgcaggtgagtcctgacattgatgagtttgtgttcgccgaacagcgtgacggtcgcgtgctgctggttatcgacaagaaccggcgggcggatgcggggatccagcgctgggtgatggaccagaagaaaaaatggccgcaggcgaccaccgagtttgtgtcgctgggtgagctgaaaacccgccgggagcagggacaggcacataccggcgagctggcccctgtcaccggggaacataccgcgctgtggagcgacacccagaagaaggcaatcgcgtatctggcgctggcccggcgcatgtcagcttcggatattcatatcaccgtcatgcgcgccgccgggattgcggtcattgagatgcgtatccacggcgagctggaggtgattgatgagctgaccgaccgggaaggggatgcgctggtctccaccctgttcagctccatgtgtgacgtgcggatcccaccgctctttaatgacggtgacatgcaggccgggcgtatctcggcagagtttgcccgggcggccgggctgttcggtgcccgataccagcatatgccgacggtggacggggtgtatgtcgtgctgcgaaccatcgtggatgacagtgaccgggtgccgacactggagcagcagggatttctgcctgagcagattaccgtcattcatcagatgctgcgccgggcgcagggactggttctgctgaccggtccgaccggctcgggaaaaagcaccacgctgcgcgtgttcagcagcctgtggctggcccgcacgcgctaccgcaaacggatgctgacggtggagaatccgccggaagggcggattgccggcgccatccagacgccggtgattgacgggaactgggaccggagtaacgccgcggtgctgcgcgccgatccggatgccatcctgctgggtgagatgcaggagattaatgccctgatggcggccgttcatgcggccaacaccgggcatatcgtgtttgacaccctgcacagcaacagcgccaccggctctctgccccgtatggaggtgatgggcgcggacaggcggctgattgccgatgcggagctggttattggtcttatcagccagcgtctggtgccggaactgtgtccgcactgcagtattccctgggcgcagaaagcaccacagctgccggcggaagaacgggcatacctggagaaatactgcacggtaccgggtgtctgctccccggaaaacctgcgcttccataacccggaagggtgtgagcactgctgccggacgctggagctgaccgggcgtgtcgtcagccggggcgtcaccgggcgtaccgcgattgccgaggtgatccgccccgatgcgcgttttatggcgctgtggctcgatcacgggacggccgccgcccgtcagcactggctcaacactggcggcgtcagccggtgtactcacctgctgcaccggctgaatgccggacgggttgacccgctcattgccgatgaaatcgtgccgctggatgaggatgaactgctggcgcgggaggttccgcatgtctga

SEQ ID NO: 29468 - DNA, 555 bp, Escherichia coli
atgtacagaaataagacctgccggtggctgctgtgtggtctgactatggtactggccgggcaggcgtgtgcggcgcaggacagtaccacggcgcctgccgctgatgtgacggctgcgcagggccacactgccgcaccggcaacggatgcgtccgctgcggcggacagcctgaccatccttcagtttgaggacgtgatacaggacaaccttctgctggagcagcaggtgcagcgtgccagactgcagcgccagctacaggagaacagtggtgcgtctgaacctgccgtgacagcggcaccggtttacggcacggcgcccggtatgccgggtcagcccgttgtacaggagagcaaacccgcaccggccgtaccggcccgtccgcgcctgcaggatatctgggggcgccccggtgatctgcgcgcgcgcgtcaggctgcctcacggcgggatagtggaggtccgtaagggcgatcgtcttcccggtgaaaaacagaccgtgtccgccatcaccccggatgtggtccggctgagtgacggcagcgaactgacattctga

SEQ ID NO: 29469 - DNA, 1317 bp, Escherichia coli
atgatgaaacgtcttaaacctgttctttttcgtcccacttcccggcgggagcgcacgccggggtacctgctggccgacggtaagaccggctgggtggcggggatccgctgggtacagggcggtgtcgcgaccggactgacccgctaccgccaggcagacagcttttgtattgccgccggcaaaggcaccgggcaggtgtccggtctggtcagtccgcaggacgtgcgccgggggatgacgctgtattcgctggcgatggccttcctgctggcgatcggcggcagcagttacgggatttaccgtctcgacggtgatcgctgggtgtttctcgccaccgtgcgcggacgcctgtcagtgatgggcgacatcaccggctcactgaatgatgtgctgatggcgcgtaaccagtttctggagtttaacgagccggatgatgcgggctggcactgtgccgcagagccggagcaggctgtcagctggcaggcgctggtccgcgatttaccccgggtacacctgagacaggcccggctgcgctcaacatcaccggcccggcttctgcaggtggccgccggggtggtggtgctggggctgctggcgttatggctgcaggatgcgtcctcccggcgggcccggcaggccgcggctgaagccgcctggcgggcgcagcaggcggtggaggcaccgcagccggaaacgcaggctcaactgccgcatccctgggccgaccggatgacggtgccggcgctgctgagtcagtgccgggtatcccgcgcgccgctgcggatggcggtggagggctggccgctgacggcatgggaatgtaccgcttccccggccggtctgcgcctgaattatgccgccacgccgggggtcacggtggaagcctttgcccggcaagtgcgggtgctgtacggccgtcccgccgccttcaacctgaaggacggggcgcaggggggcgaggtgttctttccctttgagacgacagcgccggccgcgtggctgcgggatgagcttccggggccggcagatacgcggctgatgacgctgctgtcggacctgcagcgccgggatatccgccattccccggtgtcattttcagaggtcacgccgccggagacagcgccgggaacgaaatctgacgtgccggtacagacgtggcgcgaatacaccttctccgtgaccacgccgttacgtccggagctgctgctcgcgggtgtggatgacaccgggcttcgcctgagcagcatcggtttcacccggagtacgcaggggcagtccacttacaccattaaggggagtttatatgtacagaaataa

SEQ ID NO: 29470 - DNA, 1689 bp, Escherichia coli
atgacctccctgttccgtaagtttacacacgcgtccctggcgttctccctcgtcctgctttccgggtgtacgctccaggaaatcgacaaaatgggcgctcaggcccgccgtgacggtgataccgcgcagcgtattctgcagagccgcgccggccacagccagccggtggtgacctggacggataaaccctgggttaacctgacgccgataccgacggctgatatgtccgtgactgacggctataccgtgccggactgcccggtggtgatcaacagtggcgggagcagtatcaccctgacagaaatcggtcagcgtattactgccacctgtggcctgcgtgtgtccgtcacgccggatgccatgcagtacctggggacgactgttgccgcgggcagcacgcagcagataagcgggacgctgccggcaccggacgacaacgggcgggttcccctggcgactatcggtaacaccccggccccgcagcaggctgccccggtactctccgggagcgggtcgctgaccggctttaaatgggacggcaacctgcgtggcctgctggatacgctttccagccgcctggggctgtcggtccgtacagagaacggtgcggtcgtgttttaccgctacgacacccggacctatcagctggctatcctgaataccatcagtaatgcgtccgccagaattgattcaggaacggggtcgcagctgggctcgaccgggacttccgcatcgtcttccggagacgcctcatcagcccagaaaaccggctttgacctgaacagcaacctgtacgacgacctcaaaaagaccgtcgagaacatgcttaccccacaggtggggcgttactggctgtcgtcttcaagcggtacgctgaccgtcaccgacacgccggaggtgctgggccgggtggggcgttttgttgagtacgaaaacaaagtgctcaaccgccagatccagcttgatgtcaaaatcatgagcgtcacgcagacacgtaatgaagagctggggcttgactgggatctggtgtacagctcgctgcgtaattatggcgtgagtgtgaagggctccttcaacaatgcgtcttccggagcggcatcgggcgcgtattccattctggatacggcgaccggcagcgcccggcattttgccggcagcaacctgattatgaaggcgctgtctgagcagggggacgtcagtgtggtcaccagccagtcgcgcgccaccaccaacctgacgccggtcccttaccagctgtcaaaccagcaggggatcctggtcagctcaagctccacaccgacggcaaatgtgggtgtgacatcgaccatgagcacttccatgctgaccacagggctgtttatgacggcggtgccctatatcgaggagaacggcaacgtccagctgcagtttgccttcagctatgacagcccgccgaagatagagtcctttttcagcgccgacggcaacacccgtaatgacacgccgaactattcccgtgaggcgttcacgcagaaggtcaatatgaaggccggacagacgctgatgctgacgggctccgatcagctgtcggtatccgctgacaggcagggaacaggctcggcagataacttcctgtttggtggcgggcgtaagggcacgaacaagcgcacgacgctgattatcctgattacaccgatcctgatgaactga

SEQ ID NO: 29471 - DNA, 444 bp, Escherichia coli
atgggatatggcgcacttattgtcgccctcgccatgctgttcatggtgatgacggagaacctgaccgctgccccctccctccgcacggacacgcgggatgtggcggcagaggcggaaagtcttgcccgtgacatactgcgcaccgccagtgccgtgaacgactggcgctattcccgcccgctgtctgacggcagcctgaacctgaacctgctcgggctgtcgccgtccccggacgcacgtatccgggccgtcatcagtggcggccgcctgtgggtctggacagcggacagggaaggtctgcgtccggcgctgacccgactgtcttccggctcggcgctggctctctccgtgaccggcggtcatctgctgatggcggatggcaccgacatgaatttactcctgccgtccggtgtggcggaagggaatgtggtttacctcaactga

SEQ ID NO: 29472 - DNA, 1317 bp, Escherichia coli
atgatggttaatttccactggcagacggtacagcggctcagcgcgatgacgctctgcctgattgctgccggctgtgcagatcagcactcacgcactgaacctttcagtcgtgtgcagggaacttcccgggttcaggatgtttaccagaaccgttcaccggaagtggtgcgttacgatcgttacacactcgccagcacccgcccggcagatgctcagcgcgatccgctgaatcagattatcgatatccgcatgccggtacaggtggtgaacaccatcggggaaggcctgcgttacgttcttctgggctcagggtattcactgtgcgcgggcgaaccgggtgtgtattcggctctgttcatcaagccactccctgccgtccagcgctccgtcgggccggtgaaactgagtgaagccctgcagatcctggcgggccccgcctggcgcctgcgggtcgatgacctgaaccgcgaaatctgttttgtcctgcgggatgaataccgtcatctggcacctgccgcatcgcaagctacggtggtgaaaggcaacgccggggcggcgtcttctgccggttcccttttgaccaggaacacgcctccggccgtttcaggcggaagcagcagtttcccgctgccaccggcacgccctgactcagccggcacaccgtcagcatcagtccccgcggctgcgcctgccgttcaggcgtcaactgcggcagttgtcgcggcgaaagccccgcgtaacccgttctccggtggacagtccgcacccgcgcaaccgtcaacggtgccgtcctcttctgctccggcaaaaccgtccactgcactgccgcccgcaccggcaccgtcctcgctgtcagccacatccgcgccgctgaacaaagccgcactgggtgtgccaccggccggtgtgaagacggcttcagcggctgttcctgccagtgcaccaccggcgaaaccttctgcaccgacgacagtagcgcctgtattcaccccgggcacaccggtgatgaccccctcagaagggcaggcatggcgtgccgtgacgggtatcaccctgaaagaaacgctgaaaacgtgggcttccggcgtacgctgcgaaagcggcagcagcccttactggacggttatctggccgaccccggtcaattaccgcatcgatgcgccgctggtcctgaccgggaattttgagtccgtggttgtacaactgtttgaactgtacaaagcggcgcaaaaaccgctgtatgccacggcgaaccgctaccagtgcctggtgtacgtcagtgacacgccaccggcaccacagcagggcatgcgctga

SEQ ID NO: 29473 - DNA, 210 bp, Escherichia coli
atgggaacccggataacggcagatgaactctatgacgaaatgtgcagggtcatcggcgacatcgtgatgacatttcatgattacaatatcgagcccaaacatattgtcattgccgacgcgctgagaacggcgatggcatcggaccatggcgaaggaagcgaattaacactgaaggccatggcgctcgcgatcaaaaccctggaaacctga

SEQ ID NO: 29474 - DNA, 234 bp, Escherichia coli
gtgaacgtgatgattaaacaggtctggattgccgatgccatgctgtgggtggagctgaaggactgccgggtactgggaacgccattaacccggtttccgcgattattgcaggcgaatgagcgtgagcgtctgcagtatgaaatattcagtgaaggtgtccgctggccggtgtccggggaagagatattcctgaccgacctgttttccctggcggccgcgtcagcaggcagctaa

SEQ ID NO: 29475 - DNA, 183 bp, Escherichia coli
atgcaacgtatgaagatttttccgctgctcttcctgggcccggcgtttctgctggtcagcgccagccagtttgtgagcttacagccggggcaaagcctgcttctgtcacacctccctgatgacgatacgcaacaggtggtgattattaccccacagattgatcgcagcagtcttccgttatag

SEQ ID NO: 29476 - DNA, 432 bp, Escherichia coli
atgaatacacgatatgaagctgatgtagtggcctgggcgcaggagcaggcagctttactgcgtgcaggtcggttctctgagcttgatattgccaatatcgcagaggagattgaagacgtgggcaaaagtgaaaagcgtgagcttgccagtcgtatggcggttctgcttgctcatcttctcaaatggaaattccagccgggtcgacgtggttccagctggcagcgaactataaaagagcaacgaaaggctctggggctgcatatcaaggcgactcccagccttaaagttgcgttgtctgatcccgactggattgcggctgtatgggccgatgctgtttcatctgctgctcaggaaacacagcttgatgtgttccctgaggagtgcatctgggatatgacgcagattctgtcggcggagttttaccctgagtaa

SEQ ID NO: 29477 - DNA, 540 bp, Escherichia coli
atggcaagtcgcggaattaataaagttattctcgttggtcatctcggccaggaccctgaagtgcgttatatgccaaacagcacagctgtgaccggcttaagtctggccacttctgaatcctggcgtgataaacaaaccggtgaaatgaaagaaaacaccgaatggcaccgtgtcgttctgttcggcaaactggcagaagttgccggtgaatatctgcgtaagggttcgcaggtctatattgaaggccagttgcgtacgcgcaagtggacggataatgccggtgttgatcgctggacaacggaagtggttgtcggcatcaacggtacgatgcagatgctgggtggccgtaacggtggtggtcagcaacaaccacaatccggtgccggtcaggcgcagggtggctggggacaaccacaacagccgcaacagtccgcaccacgaaatccatcgaatgaacccccgatggattttgacgatgacataccgtttctggggcatggttatggcgtatgccgcaaggcaatctacgcgatttcatga

SEQ ID NO: 29478 - DNA, 204 bp, Escherichia coli
atgggaaatccatttggtttattagctgcagaagccggggttgagttacacatccaggttctgtccagtcagcgtggtttttatatcggtaccgcgaacgaaatggggcccgtgtcccgtgagtcagtcgaatattacaaaaccagtcagcaggccgacattgctcttgaaaaagaggaatggacgcagcgcgaatatgattag

SEQ ID NO: 29479 - DNA, 498 bp, Escherichia coli
atgactgcaaacaattctgttgcttcaaacaacgcttcttctgcccagaacggccagaaaaaagagtatttcaacctcaataccagcggtatcggctatctgagtaatatccgccgtgtcagctcaccgaacggtgaatttacctgctgcgtaatcaatgccctgtccggtccgaccgataacgccagttacacgcgttttgacgtcaccatcgcaggagcagaagccaccagactcattaaccgctgccagaaggcatgcgatgaagaggaaaaagttctgctcggttttgtgctgagtgggctgaaagcggatgtgttcaccctgcaatcgggcgaacatgccggcgaagcccgtccttcactgaaagcccgcctgattaaggtggagttcatcaagaaagggcaggaactggtctacaaggctgaaaatacctccacgcctccgtctcagggaaccgccgcggctccgaaagagtacgcacaagattctttctga

SEQ ID NO: 29480 - DNA, 459 bp, Escherichia coli
atgtggcattggcatgcgatcacccgaaggcgtccctctcagatcaccgggacattggcagttgtcggaagacaacgattagcctgttcatcatttatgcaaccggagtggaagtcaacaacgagggacgggaaaaatggtcaccaccggaaaaataaaaaagcggcaccttccggcaccgctttcggagatctgcaccagcgatctcatggtcaacctgctttcgcagtggctccgcgggtgagttcaggacccggcacggttttcacggagttttgtgccttgctgacccctgctcaggtgtgggcagtgtcagccggactgtttcacgacagcacatgcattagatgctgccgtaagccgcagccacggggtgcgccattcagaggcggggtcacaatatcagagctgccggatccccgcaatgggattacaccggattattctgttaacttttga

SEQ ID NO: 29481 - DNA, 2016 bp, Escherichia coli
atgcggctttttatctgcgaaaaaccttcccagggacgggatctggccggggttctgggggcaacccgacggggcgacggatacctgtccgggcagggtgtggtcgtcacctgggctgtggggcacctgctggaaaccgctccgccggaggcctacgggcagcagtatgccggtcagtggaccatcaatagtttgccgatcctgccctcaccctggcaggtggtggtcaagaaggagacccgcgatcagtttaaggtcattgagaagctgctgaagcaggtggacgacgtggtcattgccaccgatgcggatcgcgagggtgaagtgattgcccgtgagttgctggactactgcggctggaacggtccggtgcagcggctgtggctgtcagccctggatgagactagtattcgtgctgcgctgtcagatctgcgtcccggtgctgaaacgctggggatgtattacgccgggctggggcgtgcccgcgcggactggcttgtcgggatgaacctgacccgcctctatacattactggcggcagacaccgggtatcacggtatggtctctgtcggtcgggtacagacgccgacgctggcactggtggttcgtcgggaccgtgagattgcggcgtttgtgccccgcccgtactggcaggtgaaagccatgctcagtgccggcggggtgacgttcccggcgcagtgggtaccggcaaaagtctataccgatgaggaaaagcgctgcgttcataagaacattgcgcagcaggtcgcgcagctctgtcgccaggccggagcgtctcgggtgacggaatgcgaaacaaaacgggaaaaggcctctgcaccgctggcgtactcgctggggacgctgcagcaggactgcggcaggctgtggaatatgtcaccccagcaggtgctggataccgcgcagagcctgtatgaaaaacacaaggcgaccacctatcccagaacggactgcggctatttgccggaatcaatgcgggaagacattccggcagtgctgggtgccatacgcaaaacggaccccgacatttcttctttactatcacagctcgataccggctttgtgtccgttatctggaacgataaaaaaattaccgctcaccatggtatcatccccacccgtaacgcggtgcagctgtctgccatgaccgaaacggagcggcaggtatacctgctgatacgccgcaactatctggcacagttcctgccgctgcatgagtcggatatgacgcgtctctctctggatattggtggccagctgttcagaacgtccggccgtgtggaagtggtaaagggctggaaggtgctgtttgagaaagaacaggacgagcagaaagagggcgatgatgaggcgactgttccgctgccggtgctgagaaaggatgatacatgtgctgttaccggggcggaggtggtacagctgatgacccggccgccggcgcattatacctttgccacgctgattaaggcgatgatgaatgccgcgtcgtatgtcaccgatctgacgcttcgcaaggtgctgaaggacaatgccggactcggaacggaagcgacacgtgcgggaattattgacctactgcttaaacgcgagttcatcgtgcgtaagggcagccagttacgggcaacggaactggcgtgtgacattattgatgcgctgccggtgcagctgaccgaccccggaatgaccgcgctctgggagcaggcgctggatgaggtggcggcaggacgaatgcaactggatgacttcctgcaacgtcagatgagctggacgcgccagctggtctccgcgggaagtcagcagaaggtgaacctgcgggttccgccttcgccgccctgtccggtgtgtggtggaaaaatgcggcagcgtaaaggagaccggggggcattctggggatgtctgcgctacccggaatgtaagggcgttatcggtcataccggtgcaaaatccggtgccagacgccagagtcgtgggcgggctaagtcagtcaaaagttaa

SEQ ID NO: 29482 - DNA, 729 bp, Escherichia coli
atggcagaaaatactgagaagaaaacccgggcaggtgccctgcagtcggagctgcgtattgagctccatactaattacgcgattgggttgtggaacgggcgtccaagggaaattcgggaagacgggcaaaaaggaaagcagccgattatggggatgcctcagttcctggcaagggcatcactgatcaaccgggattcattaaagaatgagccctgggcagatatggccatgcttgaactggaagagaagattgaacatgcaggacaaaagctgagggagcttatcgccacgctggattctgatatggcttttcttcccccgggggtgaccatttcggacgcgcacgctgctgagacgcttgatctgtccgtttacagtggtacgccactgggataccgctgtgtgtttctgctgatggggtttgatcagttcgccaaaaaggtgctgcaggccgcgcactatggtgtgatttcccacaaccggcgtttccggttactcggggatggcagtcgtctgctgcgtgagatttatggttgtgttaatcgttaccgatctgctggcgccacacgaattgatgctgctgaaaataatgaagtctggcgtcaggcatgtacggaatatggtgagccagaccgggacgtgctgctgggagacaaacgttcggcgttctcacccccggtgaatgaagcgagtgtgaaccttttgcggctgcgttacagcgcggactaa

SEQ ID NO: 29483 - DNA, 1224 bp, Escherichia coli
atgggattaccacctgacagtattgttgccctgacgctgtcccgtatgcaacagaaccttgagctgcggggcggctccggcgatgtcagccaggagcgcagtggcctcctttatatggggaatgtgcatgacgcctttccccgtcgtctgtttctggacacccggctgtcccccctggacaagacggcctgggtgatgatccgtcttcatgcacagcagaatgacggtgccgtgtttccgacatatgacgaactgcagcagcagctcgcggctgcacattccgacaaggcgtcacgggaaaccatcagccggacgctgctgatgctccgtctgacgggctggctcagcctgtgtaaacgggtccgtgatgagcacgggcgtgtgcgggggaatatctacgctcagcatgatgaaccgctgggactccgtgacgcagagacattcgatccgggctggctggagctggttgcttcctgctgtgcccataaaaacaaaagcatacgtatgacggccattggtgtgctgaatgacatcctccgggatccgggcatgcgccaccgtcacagcaggctggcgctggttgaggagcgtctgggcgcaccgtcaacgccatcacagatggctgcgcagcggatacaacagcgacagtcagtctcaccgggttcgaaaaccgaactgagtgaaaaaatcataaaaaacagccacattttacagagttcgaaaatcgaacccggtactttaccggaggataaatcacagagttcggaatccgaactcagcctgaaatcaggcacttacaccggagttcgaaaatcgaaccgtaacgtacgtaatatcacacacagtgtgaataaaaaaacgtacgtaccggacacgcgtctgccggagaacttcctggaaagcctgagccctgatgactgccggatgctggtcacgcagttctcctcgctgcctgacgcagttgcggacacgctggccggaatgctgcgtgagcagctggcgcagaaccggcttgccaacccgacgggctggatgtttgcgatgctccggcgtgcccgcagtggcgaactggttctgccggaacccggcaggggcaccgcgggtacagggggcagagaacctgtttcgcgtacggcagaacctgtgccgccgcttccggtgaaacgtgcgtctccggatcggatccgtgaagtgattgcggcgatcagggcgcgccagcactga

SEQ ID NO: 29484 - DNA, 237 bp, Escherichia coli
atgcagctgtctgatttcagtaaacgccagcaggttccgcctgcggttcgccggcgtgcggcccgtctgttcagccggctctgcagcggaaagaaaatcttccgccagctgagcctgaaaggcaacggttatctcaaggtaaatgtcggtcccttctggcgcctgctgagcaaggatggcggccggcagtggtggctgatggatcatgaaacctataaccgggaaattcgcaggtaa

SEQ ID NO: 29485 - DNA, 600 bp, Escherichia coli
atgagccagcataacctgtccggcgccaccgtcacgatcctgtcctccctgctgatggatctgaaggccggtaacgtccgccgctgccagtcactggggatgtcccttgaagaaatcagggcgctcagccagatgagcctggacgaactccattacctgagccagtcccatgtctcggtgctggatgtcagtatcaaccatgacaacttctggctgatgctgaatcaggcgcgtaacgagcagaagaacctgctgatgattgaccgggcgctggagctcggcgggtcaatggatctgatggcgaaatatttcgggttatcccccacggaagtcagcgcccggcgccggctgatgggcattgaaagccggcaggggcggaccctgtcaccgagcgaggaggaggatgcggcactgtgggagcactggaagaactccggcatgacctcgccggactccctccctgcgctggaggtcatgatgctggccgcggagcagaacgaggtctccctgacggcggtgtgggcccgcgtgtgccagtggtgccgggaagcccggcatgtgacgcgtcttccacaccaggcggaaaggaaggaggcctga

SEQ ID NO: 29486 - DNA, 747 bp, Escherichia coli
atgtctgacagggaacgtctgctctcccgtatccggcgcctgatggcgctgggctcccgtaacagtaacccccatgaggcggcccgggcgctggggcttgcccagaagctgatgctccgccacaacatcgcgccggatgacctgtcgctgaaggatatccgggagtctgtctgccatcaccccgggacggatgcgcagaccattcccgcctggctgaatgcgctggccacggtggtctgcatggcgacgggctgccgctgctggttcggctggcatgtccataccggcctgaaagggacgcggcgtatccgccgctccctgcatttttatggcctgcacgagcgtccggaggtggcggcgtatgtctttacggtgctggcgcgccagcttcgggccagtacgaaggcgcatatgacgaaaaaaggccgccccggccgcgtccgcctgcagacccggcgtaaccgtgcagaccagttccgggaaggctgggtcaccggtgtctggcaggtgctgaaggacttttccccgacgtctgatgaggggcagctgctgcagcgctggctcactcagcgcctgaaaagcgatgcgctgaacgctgttgccgtgcgtgaagccagaacatgccgtggagaccgggaggcccggcttgccggatggcatgccggccaggacgccagactgcaccggggcctgtccggtgcgttttcgccagacctgctgacaaacggaggagagacccgtgactga

SEQ ID NO: 29487 - DNA, 213 bp, Escherichia coli
atgtttattcagcagggtgtcaatgccgtacgcagccggcttcgtagcggaaaaccatcactggaattctgcgactgttgcggtgcgccgatcccggaagcccgtcgccttgccattcccggtgtggagctgtgtaccggctgccaggacgtcagtgagaagcgggagaaacaccattctccggtttcaggcgggaggacgcgctatgtctga

SEQ ID NO: 29488 - DNA, 1719 bp, Escherichia coli
atgaataatgtccgtcatatcagcagcctgggcgatgccatgctgcagcgcggcagaacaccgtcggtgcctgcagataatgcgcaggccattcagcccgtcagtgaaatggcgatggtgctgacgctggatcaactgcgccctaaccctgacaacccgcgtaccagccgtaacccccgctatgaggagatcaaggcatccatcagggcgcgtggcctggattccatacccaaagtgacccgggatcctgacggtgacgatgtctatatcttcagcgatggcggtaacacccgctatcagatcctgacggagctctggcaggagacgggggaggagcgcttctaccgcatccataccatcttcaagccctggccggggcggctgaaatgtgtcatcgggcatctcgcggagaatgaggtccgtggtgatctgacctttatagaaaaagcgtttggcgtgcacaaggcccgggcaatccaggaggaactgctggggcgcagcgtgacactgcgtgaactgtctgacctgctgaatcaggaagggtatccgattgactattccagtatcagccggatggaagatactatccggtatttatggccctgtctgccaacgttgcttgggagtggacttgccagactccaggtactgccattgctgaaggttcgttctcaggcctgcagagtctggactcagttttccgctgatgcactaccagcagattcctttgatgcggtctttcatcggtcctgcgagccttttgacgatcccgacagttattcatatgaaatcttccgggacgagtttattggtcagttactgaaagcgctgcctcaccccagcctgaactacgatcgctggctgattgaacttgacccgaaagagcagcgacgccgggagcagtttggtgatccgccgcccacacctgccctcacgcctgttccggagcggacaccttcccgttcacgttctgaaccacaggtactgaaactgccgcctgacgatacccgggaaaccgccatcacagggctgcgctcaggcacgctgacgacgcaggggcgtccggagccagcccccgggttgcccccggaactgcccggcagcgatctggtcagtgacaacagcccgtcgcgccaggaaatccagatggatttgtatggcggtgcgccggtgctttccggtgagcgtgacggttcagacacctccgcggcagcctccccgattgcgttttccggcggggcgctggcatccgccttccgggaagacacttcagaagacgcgctaccggtcagttctgtggctttcgcggccaccgggctggagccggtgagcgatatctggcatatcccggcgctgctggatgatgtggagcacctgcaggacatggcctaccgtctggcctttgaggtggcggaagccatggggtgcgaagacagtattcaggaggacagagcccctgattcagccggtttttccgcatcagagaacggtaatgaatttgtgctcttcctggcaggtctgtccggcaggctgccgaataaacagtgcaatatgttcatgttctgtctcaacttttttggctcacagtcagccggggattcgcccgttttcgctgatatccatgtggtgaaaatgatgcgtcttatccgcgttatccgccgcctgcgtgagttgcagcgccaggccgctaaaggaggggaaaatgtcgcaggatcttaa

SEQ ID NO: 29489 - DNA, 1353 bp, Escherichia coli
atgtctgaacttaaaaaaggccttgaaggcctggcctctctcgatgccgagcagtgtgtactcggtggcctgatgctggataatgatcgctgggatgaagtcgccatgcttatcagtgcggaggatttttattcccgcccgcaccgcgtcatctacaaggagatggcgcgtctggttaacgcgggacgtccactggatctgatcaccgtcagcgaaagcatcgaaagtcagggcaatctggatcagcttggtggctttgcctatctggctgaaatttccaaaaacatccccagcgccgccaacatcatggcgtactgtgaaatcgtggcgcgttacagccgggccagacagttggccagaatcggggctgatatcactcatgaagttcgtcagcccggcagcgatatcactcacatcatggagaaagcggagagggatatcacccgtctggcagagagcgctgaaccggagcaggccatcacactgtttgacggaatggagaaactgctcactgaactggaacgccgctgcggttcgccgggtggtattaccggtacgccctgcgggttcagtgagcttgatgccatgaccagtggcctgcaggcaggcgatctgatcctggttgcggcccgtccttccatggggaagaccgcgtttctgataagcctcatcctcaactcgctcatgaagacggttgataccgtggcacagttctacagcctggagcagccggcggagcaaatccttatgcgtatggtgtctgcgctgggcggtgtggagctgcagcggatgaaaagcgggctgatggatgacgaggactgggcgcgtatcactcctgcactgcagatcctgatggaagacctgccgcagcggctgattattgatgattccagcggcctgacgcctggcatgctgcgtatccgtgcccgtcgcaatgcccgtaaatacggcaaaccttcccttattggcctggattacctgcaactgatgcgcagccctgaacaggagaaccgcacccaggagatagcggagatttcccgttccctgaaggcgctggccaaagagatggagtgcccggtggtggcgctgtcccagcttaaccgcagtctggaaagccgggcggacaaacgcccgaacaacggcgacctgcgtgattccggtgcgctggagcaggatgcggatgtgatcatcttcatctatcgcgatgaggtctatcacgaaaacagctcggataaggggacggctgaggcgattatcagcaagcagcggcaggggcctaccggcgttgtccgcctgaaattcgagggtaaatttacccgtttctctgaactgtctgtggaggggcgctactga

SEQ ID NO: 29490 - DNA, 978 bp, Escherichia coli
atgcattcaaaaaatgacgttgcatcattgggtctcatcaaaggtggtgagggtaaatctgtaccttcttctttctccggacagcctgctgttccggtctccagacccaggatccttcctgttgtatccacaaaaggtggcgagggcaaatcaacccagtctgctaaccttgccggtttcctggctgacgccggactccgggttctgctcatcgatggcgatcacgcccagccaacagcaaccagtatcttcccgctggagtacgaagctccctgtggcctgtacgaattgctgatgcagacggtagatctgtccaaccctgacaatatcatttcccgctcttcgatcaagaaccttgatgtcattatctcgaacgatccccgtaatctgctgccaacggcaatgcagaacgcggctgatggccggatacgccttcgtaacgcgctttctcatccgctgttctgtacatatgacgtcattattatcgactcacagggctcccgctctgtcatgtcggagctgattatccttgcttcgacgggggagatgatcggtgtggcgaaacccattctgcccgatgtacgtgaattcctgcgcggaacggtacgtctgatggaggagctgttgccctacagcgcgtttggtatccgcatccccgatacccggcttctcattaactgcatggactatgacagcctgtcggttcagtcgctggctgagattaaaaaaattattgaagatcggcgttacagccagcatgcggacaaaatcagtatcgatctgctgtccaccctcatttatgacctgacggtctatgttcagggacacgtaaaaggcgttcctgttcatcgtcttgagaagaaaacaacgcgcgtcagtgattccgcgttttcctccatgtacctgcttgcctgtgaactcttccctgaatggaaagaaaagtttgatgcgctggcggaggaaggggagggcgcgtaa

SEQ ID NO: 29491 - DNA, 144 bp, Escherichia coli
atgtttaacaataaaacaaaaaatactattattaaaaataaatccgattggttaaccatacctgaagctgtatacctagccaaccagaaaaaaacagagaaacaattaaccgacagcgacgtttatcgccatgcgctatcttga

SEQ ID NO: 29492 - DNA, 387 bp, Escherichia coli
atgagaattcaggagctggcacagggaattcataatctgattcgcaagcataatctgccggagttaatgttccgggctttcgatgtcctgccagaaatggtaatgaaacctcagcaggctttccaggcagaacttcgtggtgaaacggaggaatgtttcattgaagacttggtagggaaaattaatgctaatatgattcttccgtatccaccaggagtacctttagttcttcccggagaaatgattacagagagcaatcgtccggttctggagtttttgttaatgctttgtgaaattggtaaccactatcctggttttgaaaccgatattcatggtctgtatcgaaaggcggataacaggtatactgcaaaagtcattaaaaaataa

SEQ ID NO: 29493 - DNA, 288 bp, Escherichia coli
atgcacgacttgatcagtgggtactttgaccagattccgctgactgactactacagtgacgtggatgtgcgcaaatggtgcgatggatacgtgtggttactcaagtacgagcctaccaccaagggctttgatgaacgctacgtgagcatcagtgcccacgagcgtaacgaagtcttccgtctgccgatctaccagtacaacttcctggctcgagcgatcaaagtgatgctggacgacaagatcgacatcaccaatgccatcgtcattgaccacctgcccatcgattaa

SEQ ID NO: 29494 - DNA, 132 bp, Escherichia coli
atgaccgcttatatggtgataaaggtaattacccgcttcggttgcttttgtgccatcaatggtcagataaccggtgtctgttttatcataataaacaacatcatgtcctttacctgcgtagatattggctga

SEQ ID NO: 29495 - DNA, 135 bp, Escherichia coli
atgagcacttccaacaacgtttcgaaagccaagatcgttatcatccgtgccagcgtcttcactctgaagtgcactgctgctgctctgatcggtatcgccgtaggcaccgctgtcaacgcaatccgcaacaagtaa

SEQ ID NO: 29496 - DNA, 201 bp, Escherichia coli
atgaacgtttcgctggtggatattatcgacaagttgcagccaggccgacgcgtgccagctcgccgcagtgcctggcatcttccgtacatcgtctttctcgaacggcgcggaaacgatttgattgcgttgaatcccgtcacagaggatagcgttacgctatctcctgagagtctactagccacagactgggagtactgctaa

SEQ ID NO: 29497 - DNA, 285 bp, Escherichia coli
atgagtatgattcacgacagtaaagcggaagatctggagtctaaaggcctgtaccggagagcggcggcccggtgggctgaggtcatgcaacaggtgaacaccgataaggagcgcgaacaggcagtaaaacgtcgcgcggaatgtatccacaaggcagcacgttcgcccgtcatactggataatttcgggggcttgagagaggcagcaaaccgcacacaggcggatatggggatagaaatcgcaaaatctgtctggcggaactaccagacagacaaggttttatag

SEQ ID NO: 29498 - DNA, 534 bp, Escherichia coli
atgactacactgactattagcagaaaaccgaaaggtatttacggcataccaaagaaaaagacacagacgacacagcaggataaaaccacatcagcgcataaagtgatacccggcaatcagaacgcaccgcagagccgccaacagaagcccacaggggcgacaccatggcggcatatgaccaaacgccagggcaaaaaccgcaggcgcgctaaccgtcttattgaactatggcctgaattattcagcctggaatcaccgaagccgcttaaggtagggatatttgaagacctgatacaggatattgccgtcagggcgcaggcttttgggtcaggggcattacgtgcagcgctagcatcttatgctcattctccgcgttattaccgtgccttaatggctggtggcgtgcgttacgatctgaatagccagccatgcggcgaggtgacacaacaggaacagcagaacgcggaagcacgactgatggcactgaaagagaagcgcaaacgtaagtcgaacaaagagcaagctggcgtatga

SEQ ID NO: 29499 - DNA, 426 bp, Escherichia coli
atgacggcacaaatatcagcttacgggcggctggtagctgacccgcagttaaagaccaccagcaaggaaacaccaatggcgctggtgagtatggctgttcccattccgtgcaatcaggcagatgacggacaggcgacgatgtggttatccgtcctggcatttggcagacaggccgacgcactggcaaaacaccacaaaggcgaactggtgagcgtggcgggtaacatgcagataagccagtggacagaccagaacggggaaatgcggcaaggctggcaggtcatcgcagacagcgtaatcagtgcgcgaaccgtgcgaccaggaggcaggaaaggacagcaagggcaggctactgacgcactgaacagggcaaagcagcatacgggccagcaagatgacccgtatgaggacgaaataccattttaa

SEQ ID NO: 29500 - DNA, 2136 bp, Escherichia coli
atgaaacgtgcaccgaatttaaagcatcagccagccgacaaaatgacggaggttatcatttttgcgggtagtgatgcctgggcacatgcgaagcagtggcaggagatggacgggcgacttgctggcgataacgtgcctcctgtctggcttggagatcagcaactggcagaactggaaaatctgaacatcattgacgacgggcgctattgtgtccggctgtacaaggcagggcacatcaagccatcaaacatcaataccattgcgcaaaagctggcggcggcaggcatacgggatgcgaattattaccccgacgggatgcacagccagaagcgggagaactggcgcgaatatctggaacgtgagcgccaaaacatcgatgacgggctggctatccggcttccgacaaaagaaaacgccaccggaagtcatggcgatgatgaattaaagccccgcgttgaaagccgcgcagatggtgttttctgggtaacacccaaagtggacaagcagacaggcgagataatcagacctgaaacgtggttatgttccccgcttgaactactgggaacggggacgatcggcagggagcatcaccgcgtgatgcgctggaaaaaaacggcaaatcatgaagtcatcacgatggcggttccgtgcggtggcattggcgaccgtgacggctggcggttgttgaaagaccacggccttaacgtgacaaccaacggcaaatacagagcaatactggctgactggatgcagttaagcggaaaccatgaggaatggcagttaagcacaacaacggggtggcattttggcgcgtacatcatgccggacggttcagtcattggtgagtctgaaaaaccgatcctgtttaccggaaaaacggctgccgttaatggttattccgtagcaggaacgacggagggctggcgcgatacagtggcgcggttggctggtggcaatccgtccatgatgctgggggtggcggtatcgttatcagcgccattaatcgggctggtgggcgctgacggtttcggtgtgcatcttttcgaacaatcatcggcaggtaagaccaccacgcagaacatcgcatccagtttgtggggagagccggacgcacaacggctgacctggtacggaacggcgttaggtatcgccaacgaggccgaagcacacaatgacgggctgttacccctggatgaaataggccaagccggaaacgcacgggaggtgtccacgtcggcttatacgctgtttaacggttcgggaaaattacagggggcgaaggacggcggcaacagggagataaaacactggcgaacagtggcaatcagtaccggagaaatggacgttgaaacattcctcaaaagtgaggggataaaagtcaaagcggggcagcttgtccggttgcttaacgtgccgatggagaagtccacgcagtttcacgaatacagcacaggaaaggcgcacgcagacgcgttaaaggatgcctggacagcaaatcacggggcggcaggtcgtgagtggattaaatggctagcagcccaccagcagaaggctaaggacacggtaagggcatgccgtgaacggtggcgcaacctgataccggagagctacggcgaacaggttcaccgtgtaggggaacgattcgccatactggaggccgcgcttgtgctgtcaggcaatgttacgggctgggatgttcaggcgtgccgtgatgccattcagcataactttaatgcctgggtgaaggagttcggcacgggtaacaaggaacacaggcagattattgaacaggcagaggcgtttcttgctgcctacggcatgagcaggtttgcgcctgtcaattatgaccctgcaagcctgccgatttcagaactgtacggctacagggaaagcgacgggcgttacggtgagtctgttttgttttacgtcctgccggagccatttaaatcgcatgtggcgaagggatttaacaaggatgccgtagcaagagtccttcacgaagctggaatgctgaaaaagccagccagcggggaaggatggcaaatcagaacaccacgccttaaacacatgaagggggcacgactaagggtgtacggccttttacttgcacaggatcatgatgatgaaggaggttaa

SEQ ID NO: 29501 - DNA, 300 bp, Escherichia coli
atgaaagtaaaaaattctggctttactgccagcggccccgttcggcctgaaatccacaccggcgatattttcttcgataaatacggctggatggtaaaggtgataagcgtggaggaacggcgcatcacctgccgtcgtgaaggatataactacgactgtgtaacgcctgtatatcagttccggcgtgatttctccctgatgaaggccgcgccccgcagtaaacctactagcagggaaaaagagcggggaaatatccagaaaatgaaaagcatgattaacacattcaggggcaagaaatga

SEQ ID NO: 29502 - DNA, 186 bp, Escherichia coli
atgcttaagcgattccagataaccgcacgcgctgtaaatcatcaaggccacgttattgatattcggcaaaacgtgaacgccaccagcgttaattcagctatagcaatattgaaagaagagttaatcggctgtgggttcacgcaggtgatgatccgtgccgtagttgaagtgtcgactgttcattaa

SEQ ID NO: 29503 - DNA, 189 bp, Escherichia coli
atggctactatccctgccctcgcacatactcagaacgcctttatctggcgctttatcatcgttaatccgagtgattaccgcgtcgttcacgtcgtggcgtcaaccgaacgagaagcgcgtaactattgcccgtccggttgtgttgccgtattcgctgcccgtattcgtcagggggtaagtcatgcttaa

SEQ ID NO: 29504 - DNA, 192 bp, Escherichia coli
atgagggctattcttttacgaccagaggtaaaggctttgctacgcattaaatctgattcgaccctaacgaagatggttaacaaaggcgggttccccaaaggattccgtgtcgggctgcgtcgcattggctggtatgaagatgaggtactcgcctggttgaaagaacgtgagagggaaagtcgtgaagcgtaa

SEQ ID NO: 29505 - DNA, 225 bp, Escherichia coli
gtgagcgcgatcattacgctcaccccactgtttacgctgtttttttcagatcttttatcactggcctggcccgatttcttcgccagaccgatgttaaaccttttaggttatctcggtgcgtttgtcgtggttgcgggcgcgatgtattccgccattggtcatcgtatttggggcggattacgtaagcatacaacggtggtatcgcaaccccgcgcaggcgaatga

SEQ ID NO: 29506 - DNA, 1242 bp, Escherichia coli
atggcaagaaaggcaaccccactcaccaccacacagatcaaagcagctaaaccagcagaaaaagaatacaccttacaggatggcggcgggctttttctcgttattaagccgtctggttcgaaactatggcgattcaactactatcgaccttcgaacaaaaaacgaacactcattagtttgggatcgcttgatgaagtctcccttgctgatgccagaaaacgccgtagcgagtacaggacgttaattgcggcaggaaccgacccgcaggaatacgaacggcaaaaacgcgaagcagaggctcgacgacagggcaacacgttcgaaaatgtggccgcattgtggtacgaaatgaaaaaaaaccagaatctcgcccacaatacgatcaaggacatctggcgctcgctagagaaatatgtattcccgtatatcggaaacacaccgatagatactctcaccgctcgccgctttgttgagatactcacgcccatcaaggcacgtggcaacctggaaacactgaaacgcgttttacagcgcatcaatgaagtgatggattttgctgccaacagtggaatgattgacatcaacaccgccgcgaacgttcgcaagacattcccttctcccaccaaaaagcacatgccaaccatccggccggaacaactaccgcagctaatgcacgatttatcgatcgccagcatagaacggcaaaccagattactgattgagtggcagttgttaaccgcaacccgcccagccgaagcctctgccgcacggtgggaagaaatcaaccttgaggcggcaacctggacgataccagccggacgcatgaagatgcgccgtgatcatgtgatccccctttgcgctcaggcgatggcagtgcttgaagccatgaagccgattagcgcacgaagggagcatgttttcccaagtcttaaaaatccagtgcaaccaatgagcagccagacagcaaacgcagcattacggcgaatgggttacactggtgtgctggtatctcacggactacgcgccatattcagcacagcggcgaacgaagaaggatttgagccggacgtaatcgaggccgcactcgcacacgtggacacgaacgaagttagacgggcatacaaccgaagcaactacctggaaaaacgtaaagtgttaatgtgctggtggggtgattttgtggaagcagccgcaaccggaacaaccatcgccagcgggcacagaggattacgcggaaggtaa

SEQ ID NO: 29507 - DNA, 1137 bp, Escherichia coli; identical to SEQ ID NO: 28875

SEQ ID NO: 29508 - DNA, 1392 bp, Escherichia coli; identical to SEQ ID NO: 28873

SEQ ID NO: 29509 - DNA, 1845 bp, Escherichia coli; identical to SEQ ID NO: 28872

SEQ ID NO: 29510 - DNA, 1152 bp, Escherichia coli; identical to SEQ ID NO: 28871

SEQ ID NO: 29511 - DNA, 1539 bp, Escherichia coli; identical to SEQ ID NO: 28870

SEQ ID NO: 29512 - DNA, 324 bp, Escherichia coli; identical to SEQ ID NO: 28869

SEQ ID NO: 29513 - DNA, 1137 bp, Escherichia coli; identical to SEQ ID NO: 28868

SEQ ID NO: 29514 - DNA, 975 bp, Escherichia coli; identical to SEQ ID NO: 28867

SEQ ID NO: 29515 - DNA, 741 bp, Escherichia coli; identical to SEQ ID NO: 28866

SEQ ID NO: 29516 - DNA, 1401 bp, Escherichia coli; identical to SEQ ID NO: 28864

SEQ ID NO: 29517 - DNA, 816 bp, Escherichia coli; identical to SEQ ID NO: 28863

SEQ ID NO: 29518 - DNA, 696 bp, Escherichia coli; identical to SEQ ID NO: 28862

SEQ ID NO: 29519 - DNA, 861 bp, Escherichia coli; identical to SEQ ID NO: 28861

SEQ ID NO: 29520 - DNA, 663 bp, Escherichia coli; identical to SEQ ID NO: 28860

SEQ ID NO: 29521 - DNA, 1497 bp, Escherichia coli; identical to SEQ ID NO: 28859

SEQ ID NO: 29522 - DNA, 987 bp, Escherichia coli; identical to SEQ ID NO: 28858

SEQ ID NO: 29523 - DNA, 1278 bp, Escherichia coli; identical to SEQ ID NO: 28857

SEQ ID NO: 29524 - DNA, 474 bp, Escherichia coli; identical to SEQ ID NO: 28856

SEQ ID NO: 29525 - DNA, 468 bp, Escherichia coli; identical to SEQ ID NO: 28855

SEQ ID NO: 29526 - DNA, 999 bp, Escherichia coli; identical to SEQ ID NO: 28854

SEQ ID NO: 29527 - DNA, 849 bp, Escherichia coli; identical to SEQ ID NO: 28853

SEQ ID NO: 29528 - DNA, 474 bp, Escherichia coli; identical to SEQ ID NO: 28852

SEQ ID NO: 29529 - DNA, 1254 bp, Escherichia coli; identical to SEQ ID NO: 28851

SEQ ID NO: 29530 - DNA, 2031 bp, Escherichia coli; identical to SEQ ID NO: 28850

SEQ ID NO: 29531 - DNA, 825 bp, Escherichia coli; identical to SEQ ID NO: 28849

SEQ ID NO: 29532 - DNA, 1179 bp, Escherichia coli; identical to SEQ ID NO: 28848

SEQ ID NO: 29533 - DNA, 1182 bp, Escherichia coli; identical to SEQ ID NO: 28847

SEQ ID NO: 29534 - DNA, 1542 bp, Escherichia coli
atgccttatctacttgaaatgaagaacattaccaaaaccttcggcagtgtgaaggcgattgataacgtcagcttgcggttgaatgctggcgaaatcgtctcactctgtggggaaaatgggtctggtaaatcaacgctgatgaaagtgctgtgtggtatttatccccatggctcctacgaaggcgaaattatttttgcgggagaagagattcaggcgagtcacatccgcgataccgaacgcaaaggtatcgccatcattcaccaggaattggccctggtgaaagaattgactgtgctggaaaatatcttcctgggtaacgaaataacccacaatggcattatggattatgacctgatgacactacgctgtcagaagctgctcgtacaggtcagtttatctatttcaccagatacccgcgttggcgatttagggcttgggcaacaacaactggttgaaattgccaaggcacttaataaacaggtgcgtttgttaattctcgatgagccgacagcctcattaactgagcaggaaacgtcggttttactggatattattcgcgatctacaacagcacggtatcgcctgtatttatatttcgcataaactcaacgaagtcaaagcgatttccgatacgatttgcgttattcgcgacggtcagcacattggtacgcgtgatgctgccggaatgagtgaagacgatattatcaccatgatggtcgggcgagagttaaccgcgctttacccaaatgaaccacataccaccggagatgaaatattacgtattgaacatctgacggcatggcatccggttaatcgtcatattaaacgagttaatgatgtctcgttttccctgaaacgtggcgaaatactgggtattgccggactcgttggtgccggacgtaccgagaccattcagtgcctgtttggcgtgtggcccggacaatgggaaggaaaaatttatattgatggcaaacaggtagatattcgtaactgtcagcaagccatcgcccaggggattgcgatggtacccgaagacagaaagcgcgacggcatcgttccggtaatggcggttggtaaaaatattactctcgccgcactcaataaatttaccggtggcattagccagcttgatgacgctgcagagcaaaaatgtattctggaatcaatccagcaactcaaagttaaaacgtcgtcccccgaccttgctattggacgtttgagcggcggcaatcagcaaaaagcgatcctcgctcgctgtctgttacttaacccgcgcatcctcattcttgatgaacctaccaggggtatcgatattggcgcgaaatacgagatctacaaattaattaaccaactcgtccagcagggtattgccgttattgtcatctcttccgaattacctgaagtgctcggccttagcgatcgtgtactggtgatgcatgaagggaaactaaaagccaacctgataaatcataacctgactcaggagcaggtgatggaagccgcattgaggagcgaacatcatgtcgaaaagcaatccgtctga

SEQ ID NO: 29535 - DNA, 993 bp, Escherichia coli; identical to SEQ ID NO: 28846

SEQ ID NO: 29536 - DNA, 1323 bp, Escherichia coli; identical to SEQ ID NO: 28845

SEQ ID NO: 29537 - DNA, 1455 bp, Escherichia coli; identical to SEQ ID NO: 28844

SEQ ID NO: 29538 - DNA, 342 bp, Escherichia coli; identical to SEQ ID NO: 28843

SEQ ID NO: 29539 - DNA, 438 bp, Escherichia coli; identical to SEQ ID NO: 28842

SEQ ID NO: 29540 - DNA, 996 bp, Escherichia coli; identical to SEQ ID NO: 28841

SEQ ID NO: 29541 - DNA, 309 bp, Escherichia coli
atgatgatgaactctttctttccggcaatggcgcttatggtgcttatggcgctagtgggttgttctacaccgccacccgtgcagaaagcacaacgggtaaaggttgatcctctgcgttcgttgaatatggaagggctatgcaaagatcaggcggcaaaacgctataatacaggtgcgcaaaaaatcgacgtcaccgcatttgaacagttccaggggagctacgaaatgcgcggttataccttccgtaaagagcagtttgtctgttcttttgacgcagatggccattttttgcatctttccatgcgttaa

SEQ ID NO: 29542 - DNA, 912 bp, Escherichia coli; identical to SEQ ID NO: 28839

SEQ ID NO: 29543 - DNA, 2070 bp, Escherichia coli; identical to SEQ ID NO: 28838

SEQ ID NO: 29544 - DNA, 1491 bp, Escherichia coli
atgataaccacatttgtgtttatcccgattttcgcgatcgcagccggagtggcgcaatccctgcaatacttaaatcggtatcatgtgatacgcgagcctccggagcatattttgaacaggttaccttcgagcgcatcggctttagcgtgcagcgcccacgccctgaatctcattgagaagcgaacactagatcatgaggagatgaaagcacttaaccgggaggtgattgaatacttcaaagagcatgtcaatccggggtttttagagtatcgcaaatctgttaccgccggcggggattacggagccgtagagtggcaagcgggaggtttaaatacgcttgtcgacacccagggacaggagtttatcgactgccttggaggttttggaattttcaacgtggggcaccgtaatccagttgtggtttccgccgtacagaatcaacttgcgaaacaaccgctgcacagccaggagctgctcgatccgttacgggcgatgctggcgaaaacccttgcggcgctaacgcccggtaaactgaaatacagcttcttctgtaatagcggcaccgagtccgttgaagcagcgctgaagctggcgaaggcttatcagtcaccgcgcggcaagtttacttttattgccaccagcggcgcgttccacggtaaatcacttggcgcgctgtcggccacggcgaaatcgaccttccgcaaaccatttatgccgctgctgccagggttccgtcatgtaccgtttggcaatatcgaagccatgcgcacggcccttagcgagtgcaaaaaaaccggtgatgatgtggctgcagtgatcctcgaaccgattcagggtgaaggtggcgtaattctgccgccgccgggctatctcaccgccgtgcgtaagctgtgcgatgagttcggcgcactgatgatcctcgatgaagtacaaaccggtatggggcgcacgggcaagatgttcgcctgcgaacatgagaacgtacagccggacatcctgtgcctggcaaaagccctcggcggcggcgtgatgccgattggcgcaaccatcgctactgaagaggtgttctcagtcctgttcgacaacccgttcctgcataccaccacctttggcggcaacccgctggcctgtgcggcggcgctggcgaccatcaatgtgttgctggaacaaaacttaccggctcaggctgaacaaaaaggcgatatgttgctggacggtttccgtcaactggcgcgggaatatcccgatctggtacaggaagcgcgtggtaaagggatgttaatggcgattgagtttgttgataacgaaatcggctataactttgccagcgagatgttccgccagcgcgttctggtggccggaacgctcaataacgccaaaacgatccgcattgaaccgccactgacactgaccattgaacagtgtgaactggtgatcaaagcggcgcgtaaggcgctggcggccatgcgagtaagtgtcgaagaagcgtaa

SEQ ID NO: 29545 - DNA, 366 bp, Escherichia coli
atgatgatgattgacgtcctctcaggcgtcttactcggcttaccgttcgggcgacaggttagttcgatgtatgacgatttacacgccgggcgtaatttggggcaattacatatcgttattaatccgaactttttctcctccagcgaactattccgtcaacatcttagccagaccatgcgcgaattaaatgccataacccccgcgcccggttttaaccaggtttattatcccggacaggatcaggatattaaacaacgcaaagccgccgtcgaaggcatcgaaattgttgatgatatttaccagtatttaatttccgacgcgctttataacacgtcatacgaaacgaaaaatccctttgcgcaataa

SEQ ID NO: 29546 - DNA, 699 bp, Escherichia coli
atgcaggatattcacgaagaaagtctgaacgagtcggttaagtcagagcagtcaccgcgggtggtactctgggaaatcgacctgacggtgcagggcggtgagcggtattttttctgcaatgagctgaatgaaaaaggggagccggtgacctggcaggggcgtgaatatcaggcgtacccgattgaggggagtggctttgagatgagcgggaagggcagcagtgccagaccgtcgctgacggtgtccaatctgttcggtctggtcaccgggatggcggaagacctgcagagtctggtgggggccacggtggtccgccgccgggtgtatgcccgttttctggatgcggtgaatttcgttgcgggcaatccggaggccgacccggagcaggagctgacggaccggtgggtggtggagcagatgtcagcgctgacagccatgacggcctcgtttgtgctggccacaccgaccgagacggacggggcgctgtttcccggtcgtatcatgctggcgaacacctgtatgtggacctaccgctctgatgagtgtggttacacgggcggggctgtggcggatgagttcgataaacccaccacggatatccgtaaggacagatgcagcaagtgcatgcgcgggtgtgaactgcgcaggaatgtcggcaattttggcggtttcctttccattaataaactttcgcagtaa

SEQ ID NO: 29547 - DNA, 276 bp, Escherichia coli
atgaacaaagaaaatgtgattaccctggacaatccggtcaagcgtggtgagcaggttatcgaacaggtcacgctgatgaaacctaatgccgggacgctgcgcggtgtcagtctggctgcggtcgcgaactccgaagtcgatgcactgattaaggtgctgccgcgcatgacggcaccgatgctgaccgagcaggaagtcgccgcgctggaactgcctgaccttgtggcgctggccggtaaggtggtcggttttttgtcgccgaactcggagcagtaa

SEQ ID NO: 29548 - DNA, 462 bp, Escherichia coli
gtgacgctcaatacttctcaggtcagttactatatgactcagcgtaagaaaggtataactcagcatatctcggccatgaaggctggtatctcagtccgttctggtcgtcggatcgaaaaaggagagtgggcaaaaaacagtgttcggcactggcgcacacgcaaagatcctctggaagctgtgtgggacagcatgcttgttcctctgttgaaagagaggccggctctgacaccaacaactctgctggagatgctacaggataaatatcccggccagtatcccaacagccttcgaagaacaatgaaccgccccgggtttcctagagagtgttttatctgtgaactcaggctgccagatcatcgtttccgatggaagcataataagctttttctgcttctgccggaggagtatggcccagcctttccagcaatcgtcgattgttataccagtccacccacgtga

SEQ ID NO: 29549 - DNA, 537 bp, Escherichia coli
atgccacttgcccgttatctctgcattttcataaacgttggtttgggagaaggctctgcattacctgttggtgtccctgttccgtggccttcagccacaccgccaacaggctggctgaaatgcaatggtgccgctttttctgctgaagaatacccggaactgacaaaggcttatccgacaaataaattgcctgatttacgtggtgagtttattcgtggctgggatgacgggcgggggattgatacaggtcgctctattttaagtattcaggggtatgcaacggaggatcatgctcatggattaccgtcaagatccacgattgtgactgatgcaacgattaatttctattttgatgaaaactgggtaaatagtggcactgacattatcaaaagaggaaacacaaacgatgccggattaccagcaccggattatggaacctttaaaacatataaacaatcagtggctggtttaggtaccgcagcctcagaaacgcgtccgcgtaatattgcatttaactatatcgtgagggcagcctga

SEQ ID NO: 29550 - DNA, 570 bp, Escherichia coli
atgattaagtcggttattgccggtgcggtagctatggcagtggtgtcttttggtgtaaatgctgctctaactactccacaggggcagggtagagtaacctttaacggaactgttgttgatgctccatgcagcatttctcagaaatcagctgatcagtctattgattttggacagctttcaaaaagcttccttcaagcaggaggcgtatccaaaccaatgaatttagatattgaattggttaattgtgatatcacttcatttaagggggggggaggagtctcggcagcaaaaaaagggactgtgaagctggcttttagtggtccaagggtttctggtcataatgaggagttagataccagcggggggacaggtactgcgattgtagttcaggctgcaggtaaaaacgtttctttcgatggcacagaaggtgatgctaataccctgaaagatggtgataatgtgctgcattatactgcgattgttaagaagtcgtcagccaataatgcccaagtcactgagggtgctttttctgcagtcgcaaccggtgatgctgccaacttactgatttag

SEQ ID NO: 29551 - DNA, 897 bp, Escherichia coli
atgaataaaagtaaagcaatctcaagaatagagagagtgttgagaagattaaaggatgggagtttcactgatagtgatattgatgttctttttgttacggcccgtgagttgccgagtgcgcccaagtgtatttttgaaattgggagttttgttgcccataatcatcggagagatcaaggcgagataaaggatatcatgctgaggaatcatttgttattaagtttaaaatttggacgcgacaagtatgctgttaaaccagagttaaatgaatacccgaaatacttacctacattaatcagactgcaattaagaatgttcagtgatgagtttttaaaggagaagttaaacttaaaggggggacaggtaattacagcgaggaagaagcttaataacaaaaaatcgtatattgttaatgatggtgtttgtaagttaacatcagaaattggttccaatgaagggcgaatgattaatgaagctttgtcgttactcaattgttctgacgcaattaagttcgactctttatttaatgagctgaaaatattgcttcggaaggcgattccaggggtggacttgatgccgcttgataataacaggagagcaatagcaggcatcttactgtgtttgttgaataatattgatttttctctgatgcctgaagtcaaagcaaaaacagtccttagtcttaatgatgcagatgaatctgcaaatgtttatggtcaatattatataacacatgaaaaagagccattcaccgacgtggctatcatgagcccagtgtttcagtcggggtatgatgttagtgacctttttgatgagcatgtgacaaatgaaaatatcgtaaatggggatgtcgaatttagttttgatttggggaaaatagttgtgtcgaaatcatag

SEQ ID NO: 29552 - DNA, 453 bp, Escherichia coli
atgaatgagtttaagcgttttgaagaccggctgaccgggctgattgaatcactgtcaccatcagggcgtcggcgactgagcaccgaactggcgaaacatctgcggcagagtcagcagcgccgggtgatggcacagaaagccccggacggcacaccctacgcaccacgccagcagcagagcgccagaaaaaagaccggtcgtgttaagcgaaaaatgtttgcgaaacttatcaccagtcgttttttgcatatccgcgccagcccggaacaggcatcaatggagttttacggcggaaagtcaccgaaaatcgccagtgtgcatcagttcggtctgtcggaagaaacccgaaaagacggtaagaaaattgattatccggcgcgtcctctgctcggctttaccggtgaggatgtgcagatgattgaagagattatcctggctcaccttgagcgttag

SEQ ID NO: 29553 - DNA, 486 bp, Escherichia coli; identical to SEQ ID NO: 27263

SEQ ID NO: 29554 - DNA, 492 bp, Escherichia coli
atgccatcaatactgaacttaccgctggcattggtcccctcaacagtggcaccactgtctgctatcagggcaccaccggatgtcatggtgacatctgttgccttaccaccggcagacactgccagggtaccgccgtcatccaccagtgttttccaggctgaatggccctccagtacatccaggcgaccaccggactccagaacaacaccgtcagcattaccgttttccactgtgaaattgcccagacggttgctgccggtgacggttgccgccgtactggtgaccagtgcgcctccctgcttcagggtgacattcgtggctgtaccaccggcgttcacctgcagtttgcctttctggttaacgatggtgaaatccgccagaccaccttccttgacaatctgccagccgtcactgttcacaacagtgccagacgctgtaccgccgttgtgcacatactggttaccgccgttcagtgtggtatccagcgcgtag

SEQ ID NO: 29555 - DNA, 567 bp, Escherichia coli
atgctgccacagcagttcccccgtctccgggttctccaccgtctggcgctccccggtcagacggcccttatcgtcatagccatagtggacggcaacacggtggccttcgctcaggtggctgatttctctcagccagccgtggccatcataccgccactgttctgccggttcgccgttcaccgtgcggtgagtgatacggtccgattcgtcgtagtgccagagggtgacaagcccctcatcttcactctgcgtgagttttccggtcaggtcatagtggtaacgttgcgtccgcccgtcaaagccgcgctgctgtaccagccggtccagcgcatcgtagctgaagtcgctgtgactgccgttctcgttggtcaggctgatgacacgtcctgccgcgtcatactccatactgcgcgtcagcccgccctgtgtggtgctgaccgcctttccccacgcatcgtactgtgtctcgctccggttgccgtccggggtgataacggcagtcaggtcgcctgcggcgttgtattcataccgcgtttcacggccctgtgcgtctttcaccgaggttaa

SEQ ID NO: 29556 - DNA, 246 bp, Escherichia coli
atgcagtgcgccgtccacctcactgaccagcgtgcgctcggtcagcatcaggctgatgctgatatcaaagctgctgtcattgttgatgtccgcataaaacgtgaagccctttttctggccttcgtcggtggtcatgatgtcgggctgattttcccgcagccacgccagcaccggcacgatgagcaggtcaaaatcaccggtaaagtcggtcacaatgacattgagcgtgtaacgcttttcaaatga

SEQ ID NO: 29557 - DNA, 312 bp, Escherichia coli
gtgtaccagattcaggtatccgcccagactgccggcatcatcccggaccgtgccggcgcgggaaccgtcatcatccttaacatcaacggaagaatggcctgcggcaccatacacccctgtcgtcagagacataccggcaacctctgttctcagcaggtccccctccagacggacgaagccatagctgccactgctttccggcgtggctccacgggcaataccgccgttgttatcgtgaccgagatgaccgccctgaatgctgagacggacgctgttattttcaccgtttacaccggtctgatggctgcgtga

SEQ ID NO: 29558 - DNA, 327 bp, Escherichia coli
atggttacagtgactgtactgatccccgccgtctggctggtggcagagatctccaccgtgccgtccggccctgtgatgacagtcggagtgaccgttgcgccgttacctgccatcacgctgaccgtctgtccattcagcgcattcccgaacgcatcggtgaccttcacctgcagcgtattcgccgtcgcgccgtctgccactgagccgtccttaataaccaccaggtccgctatcttcgccgtcctgacatcggcgacaaacgtcacgttctggctcaggctgctgttgttgatgctggcagtgactgtactggttccggcggtctga

SEQ ID NO: 29559 - DNA, 396 bp, Escherichia coli
atgatgacagaaaacaaaaagaatcaggaattcaaaatcagaaaaattaaacggaatattgagcgcagttgtgataacgccataaaatacttcgagctttttgtggttttctttgttgccggattgcttttatggcacggtatgcatgcttttttcagcgccggtattgattcgtggaaagctgacccggaattaaataatttgatttatatgtggaacatcctgatgtatgccattccgtatacgttatatgcgcttgcagccgggtttcttgttacatcttttctgtccccaatgtacgaattaatattcggaaatatcatgatattcctgctgaaacgccgtatgcgccgggagaacacattaagggagggcagcaataatgcttcgcattaa

SEQ ID NO: 29560 - DNA, 414 bp, Escherichia coli; identical to SEQ ID NO: 10776

SEQ ID NO: 29561 - DNA, 231 bp, Escherichia coli; identical to SEQ ID NO: 7663

SEQ ID NO: 29562 - DNA, 837 bp, Escherichia coli
atgggtaaccaatggcaacaaaaatatcttcttgagtacaatgagttggtatcaaatttcccttcacctgaaagagttgtcagcgattacattaagaattgttttaaaactgacttgccgtggtttagtcggattgatcctgataatgcttatttcatctgcttttctcaaaaccggagtaatagcagatcttatactggatgggatcatcttgggaaatataaaacagaagtactgacactcactcaagccgctcttattaatattggttatcgttttgatgtttttgatgatgcaaattcaagcacaggaatttataaaacaaagagtgcagatgtgtttaacgaagaaaatgaagaaaaaatgctcccgtcggaatacctgcattttttacaaaagtgtgattttgcaggtgtttatggaaaaactctgtcagattactggtcgaaatactatgataaatttaagcttttactaaaaaattattatatttcttctgctttgtatctttataaaaatggagagcttgatgagcgtgaatataatttctccatgaacgccttaaatcgcagtgataatatatcactattcttctttgatatttatggatattactcatctgatatttttgtagccaaaaataatgataaggtaatgcttttcattcctggtgcaaaaaaaccttttttattcaagaagaatatcgctgatttgcggcttacccttaaagaacttattaaggatagtgacaacaaacaaatactttcccaacatttttcattatatagtcgtcaagatggagtttcctatgcagtagtaaattctgtattccaataa

SEQ ID NO: 29563 - DNA, 288 bp, Escherichia coli
atggcaccgtctatttttctgctatgtttttacttgatgttatggacagcaagtgattgttttatacaatcacgaagcgctgctgattttttagtaaatatacaattgtttttcctctacgttatagcggctacgccgcaattctttatggataaatccatcattaacagggatgaaccctgttccagcaatgtgattggtttgaacaatcatctcgcgctgcgttatttaatctggaataaaaagtattcaaccttctgcctatggtttgaccttttccttttttaa

SEQ ID NO: 29564 - DNA, 426 bp, Escherichia coli
  misc_feature (405)..(414): n is a, c, g, or t
atggaaggtaaattaattttttgttccgatgcaatactgcggtttcagtccgattacgatgaaacctcggcggttccattgctatccatccagaacacgatagccaataccgatcccttctttcttcttcgcttcttccaccatactgttctgattgaagaaggaacatcgctggcaagtatctttctggcaatagaactgtggaaggcactgttagcagcttatctggacagagatgttggtgcttatatagatgaggtaagaaaaccgtccgggccaacgacatgggatattgaatggattgggattgaccgtcgtagctcggtttatcgcgcttacaagcgtcaggatatggaagaaggggaagatttttcgacctattttaatcgtgagcggttcccgacnnnnnnnnnngttcccgactga

SEQ ID NO: 29565 - DNA, 426 bp, Escherichia coli; identical to SEQ ID NO: 10436

SEQ ID NO: 29566 - DNA, 1137 bp, Escherichia coli
atggaacttaaaaaattgatggagcatatttctattatccccgattacagacaagcctggaaagtggaacataaattatcggatattctactgttgactatttgtgccgttatttcgggtgcggaaggttgggaagatatagaggattttggggaaacacatctcgattttttaaaacaatacggtgattttgaaaatggtattcctgttcacgataccatcgccagagttgtatcctgtatcagtcctgcaaaatttcacgagtgctttattaactggatgcgagattgccatacttcagatgataaagacgtcatcgcaattgatggaaaaacactccggcattcttatgacaagagtcgccgcaagggagcgattcatgtcattagtgcgttctcaacaatgcacagtctggtcatcggacagatcaggacggatgagaaatccaatgagattacagctatcccagaacttcttaacatgctggatattaaaggaaaaatcatcacaactgatgcgatgggttgccagaaagatattgcagagaagatacaaaaacagggaggtgattatttattcgctgtaaaaggaaaccaggggcggctaaataaagccttcgaggaaaaatttccgctgaaagaattaaataatccagagcatgacagttacgcaatgagtgaaaagagtcacggcagagaagaaatccgtcttcacattgtttgcgatgtccctgatgaacttattgatttcacgtttgaatggaaaggtctgaagaaattatgcgtggcagtctcctttcggtcaataatagcagaacaaaagaaagagccagaaatgacggtcagatattatattagttctgctgatttaaccgcagagaagttcgccacagcaatccgaaaccactggcacgtggagaataagctgcactggcgtctggacgtggtaatgaatgaagacgactgcaaaataagaagaggaaatgcagcagaattattttcagggatacggcacatcgctattaatattttgacgaatgataaggtattcaaggcagggttaagacgtaagatgcgaaaagcagccatggacagaaactatctggcgtcagtccttgcggggagcgggctttcgtaa

SEQ ID NO: 29567 - DNA, 516 bp, Escherichia coli
atgaaatttaaaaaatgtcttctgcctgtggcaatgttagcgtcattcactctggcaggatgccagtcaaatgctgatgatcatgccgccgatgtttatcaaaccgatcaactgaataccaaacaagaaactaaaaccgttaatattatttccattcttcccgcaaaagttgccgtagacaactcccaaaataaacggaacgcacaagccttcggcgcgcttattggtgcagtcgctggcggtgtaatcggccacaacgtggggtctggcagcaattccggaacgacggcaggtgcagttggcggcggagctgttggcgcggcagcgggttctatggtgaatgataaaaccttagtggaaggtgtttctctaacgtataaggaaggcaccaaagtgtatacctctacccaggtgggtaaagagtgccagtttacgacaggtttagccgttgttattaccacgacgtataacgaaacgcgtattcagccaaatacgaaatgtcctgaaaagagctaa

SEQ ID NO: 29568 - DNA, 342 bp, Escherichia coli
atgaagctgattatttttattcttattgttctgattattgcagcgttacttatccggattatcctcagaagtgtaaatcagcattctcctttgctgatgcaattgcatgcggcaggtatacggaccggtgatgcagagcgaatactggcaacgtcagaagacgcttctgacagaaagggaagtcagttttatgaaaggactgttcagaattgtggatatgaaacggtggtatctgtgtccgcaggtacgggtcgcggatatcgtccagctgaacgggaatatccggccacgatcacgccagtggtggcagttattcaggatggtgtctcagtggcatgttga

SEQ ID NO: 29569 - DNA, 195 bp, Escherichia coli
atggaacttaaaaaattgatggaacatatttctattacttccgattacagacatgccaggaaagtggaacataaattgtcggatattctactgttgactatttgtgccgttatttcttgtgcagacggttgggaagatatagaggattttggggaaacacatctcgattttttaaaacaatatggtgatttttaa

SEQ ID NO: 29570 - DNA, 1524 bp, Escherichia coli; identical to SEQ ID NO: 9949

SEQ ID NO: 29571 - DNA, 354 bp, Escherichia coli
gtggctgatttcgataacctgttcgatgctgccattgcccgcgccgatgaaacgatacgcgggtacatgggaacatcagccaccatgacatccggtgagcagtccggcgcagtaatacgtggtgtttttgatgaccctgaaaatatcagctatgccggacagggcgtgcgcgttgaaggctccagcccgtccctgtttgtccggactgatgatgtgcggcaactgcggcgtggagacacgctgatcatcggtgaggaaaacttctgggtagatcgggttacgccggatgatggcggaagctgtcatctctggcttgggcggggcgtaccgcctgccgttaaccgtcgccgctga

SEQ ID NO: 29572 - DNA, 549 bp, Escherichia coli
ttgattgatacgaaatatggtcgctatgtttttaaagtctttgctccgaaaacgaaaaggaatgaacgtttttttaaatcttttgtaaaaggtgactactatcagaatttgatcgttgaaaccgatcgtgtcagaagtgcaggtcttacttttcctaatgatttttattttctggctgagcgtaaatttttcaactatgccagtgtttttatcatgcttatcgagtatgtcgagggcgtagagctcaatgatatgccgattattccagaaaatgttaaagcagaaattaaggcttcaatggaaaaattgcatgccttaaatatgctatcgggcgacccacaccggggtaactttatcgttagtaaagatggtgtcaggataattgacctatccggtaaaagctgtacggcagagcgtaaagctcgtgatcgtctggccatggaacgtcacctgggtattgccaacgaaataaaagattatggctactattcagtaatctacagaaccaaactacgcaaatttattaaaaaattaaaaggcaaagcgtaa

SEQ ID NO: 29573 - DNA, 1029 bp, Escherichia coli
atggatttattagctgagagtattactgaagtcactgtctctgggaaaattactaacaccgatcgtgtgttaaatatcgcttacggtattgaccgcaactttttatttggtgcggcagtatctatgcaatcagttattatgcataacccggaccttgcggttaagtttcatctctttaccgactacattgatgaagattatctacaacgtgttaacgcttttaccagcaaaaatgctaacgttgaagtaagaatttataaagtctccagtgcctttattgatatcttccccagcctgaaacagtggtcttatgcaacattcttccgtttagttgcgttccagtatctgagtgaagttattgaaaatctgttatatatcgatgctgatgtcatctgtaaaggctcattagctggattgcttgatattaattttgatggcgataagttcgcagctgttattaaagatgtgccttttatgcaggaaaaaccagcgaagcgtctggctatagagggacttccaggtaattatttcaacgccggtgtagtatatctgcagcttgaagcatgggcgaaaaatgattttatgaataaagccattgctatgctggcaagtgacccgcagcatacgaagtataaatgccttgatcaggatattttaaatattctgttctttggtcattgtatttttattagcggcgattatgattgcttttatggcattgactatgagttaaaaaataaaagcgatgaagattataaaaagaccattaccgatgatactaagctgattcattatgttggcgtaacgaagccctggaacgactggacgaattatccctgccagaagtattttaatgaggcttatcaggcttcttgctggaatgatgtggcgtttattccagccacgaatgaaaagcagtatcaagtgaaatccagacatttgaaaagaaatggtaatattgcatcttcattttactatttcatgctctattatagtaagaaaatagcgcgtaagcatttttccaaataa

SEQ ID NO: 29574 - DNA, 510 bp, Escherichia coli; identical to SEQ ID NO: 9981

SEQ ID NO: 29575 - DNA, 369 bp, Escherichia coli
atggccggtaagttaatgagagccactgtagtattttgtctgggggttgtcctcagtctgtttggttttgagtcaggcattcatcatcaaccagccagtgcagtaaatgcaattaatggcgtcatgatatttggtgtggctggtatggcgttaataggtatctatttctctgtaaaaatgaaattagataaagcatctcatgccgaaataactaaagaattagagcgtctgaaaaaaggtggcagaaaagaagatgctacaccggaaattcgtaagcttgttaagcaactgactggttatgaatatgaccagtgcttcggtaataacaatgttggctttaaatttgaaaacaaagcaggggcattctag

SEQ ID NO: 29576 - DNA, 249 bp, Escherichia coli
atgaactcattaagcagtatttgtcagttcttctctacagcattctttatgatgtggtgtgccaaacgaggatttaaacgcccatttatcattgctatcttaattgttgtatcttcagtgattggttatgttggtgtgtactatcttaatattccccatatgacctggctcattattggcatcactatctggtttggtctggggacggggggggtatattacatctggtgcaatggttatggccggtaa

SEQ ID NO: 29577 - DNA, 408 bp, Escherichia coli
atgagtacaaaagagagattgcgtgaagtgatggatgctaatggcatgacaataaaggcattatctgacttatcaaaaattccatatcgctcacttcaaaactatttgcgtggagagagagaaccaaacgcagaggctcttgttgcgctaagtacccatttgggtgtatcaatcgattggctacttaccggtaaagaacatattccatctaaagaaattgttgctgtaccaacacaacatcaattcagcccgtcagaccttaaaatgcttgaacttctaaaccagttagatcctgaggttcggcgagatctcatgcgaggcgctgaagaaaaacagcgtgtgattgagatggaaaaacaactgaaggaattatccgcaacgattgagcggttaaaaaatgtgggttaa

SEQ ID NO: 29578 - DNA, 1008 bp, Escherichia coli
atgtctgagcagaccattgaagttaaacacgttgtagttcacattttagacaaacaacaaaatggagacgcttctgagagattgagtcctgaagaaggtctagttactgaagcctctcagcgccttataaacgatatttgtgcaaaatatgcaggacgcacaggtaaaggttatggctattttgaaggcgatacggataactatcctatggaacgaatggctggggactttctcgaaggtgttgatgatttctaccaaagttcctgccgaatgatgcatcacctgacggaacgttctcagcgagaaaacatggctactggtggttatgttctttttgcaaatatcgtgataggacacaatgaacacctgttgatagctattgtaagcgctaccattgggtccactgtcacagatgattttaacatccaagatagtacctatcttgatattgctaagctgcgtatggctgggcgcattgacttaaccgcgtgggaaagtggcgcagagcgctatatcagttttcttaaggggcaaggtaatgtttcaaactattttaaacagttcctaggctgtaatgatgtcttaatcgccaaacgagagtctgaaaagttacgtgacgttttaaaagcatttgcggcagagaaaggacttgacggcgctgaaaaagatgcatttcttaagagtgcgtttgaacacttacatgcactaagtaaggctggtgaaccacttagtcttgaaacccttgttaatgccatttggccccaggctcccgaggagttatctggtaaacttgctgctgaagagttggagttatcggatggcttcgttcctgatggtcgagtcattcgggctctggtatcttttaaaggcaagtctaaatattgggaacttaagtttgaccgggaagggaaaactgaaggctatattgattatgatccggaaacaaatattatcaccctacgtaatgtacctgaagaatttagggaaatgtggatgactgaggtttaa

SEQ ID NO: 29579 - DNA, 1206 bp, Escherichia coli
gtggcgatttcatttgagatgctgacagctctgtatcgtcgtatggaattccaagaggggtttcgtgtcggttcgctgttgctcttagatcagtccgattgtgatctggttgatactttgcttgatgatcctcgtgaatatggtctttctattgatacaggcactatcgctccaggtaacacgatcatcctacgtgtgacgtcaccacggagtggactgggacttgtgttttccacccatgaaaaattgctaaatgctccaaagcatcagtgccttgagccagctaattacttcatcctagaaacaaaatttcgtaatgatgatgaagatatccccgttttcatcagcaactaccggaagattctcgagttcgttaacctgctaaaagaggccgcggcctactttgataactcaacttgtcagttagtttttctgaaaaaagaagttatcaagctattaccgcacttcgctgcagaaaatgtacaaaatttgcaaagggagtatcttgataaccttatagcttgtttcaatgatgatacccataaggatcagaagctagatattctgattgaaagtattcaagcagttagtgatggaattgattcacctctagtattcgcttatttactggacaatattcagcgtctgcatgaaaagtttctgaaagggtatcgtatctactcttctggattctcttatgacaaagtaatggatcaactgcgtgctgcaaaagtcgaagaaatgggtaaaatccacaaagcgttttcagatatccagaaccatatacttggcattcctgttgcctctgttatcgtagctacccaattcaaagtggctacgaaatggtcaggccaagggataacaaacacaataattcttctgggatgcatttttgctgcaacgttaatctggctggcactttcgaaccagatgcaatctataaaggccttaggcgaagaaattgaatacaaagaaaaacagattaataaggaatattccttcattaaagatgacgtggctggtgtatttagcagtatttctgcgcgactagacacgcagaaacgtacgttctggattatacgtggtgttctagttatgggaattattaccgctatcactgtttatttttggtacacaaaaccagcccttgacttcatgcagtacttgattcactgcatgaagtcttactattcggtcaaaagttga

SEQ ID NO: 29580 - DNA, 1110 bp, Escherichia coli
atgaatgcacttctagggaaaattgcaggagcagtagcaaccttctttgttgctcttattttgaataaatttttttcaacatttcgtattagacaactttacttagcatatgaacatatattagagcacacaacacaaagcataactggatatacagtcatgttcacagttacgaacaaaggaaaagagaaagaaaaaaacgtaaccattacaataccaaaaagcaagtcgatatctcttatctcagctaataatgttagcattgaatgtaaagataacaaaataatcattgaccgcatcctgccaaaggaaaatattactttgattgttttggttaaaaatggtggcgttctatcgaagtctaacttaccaatattgaaatctgaagatgctaatggaaagtgttatgacagcataaagaaaataccacctagccttggccctgctttcttcagcttttcattgtttattgcatttttagtattaatgggaggagccatatacaaaggttacgatccctttgaagtaacatatacgcaatatttcaaaatgagattcactcctttctatgatagaggttttgaaaataattcattccaaaataactcccttacaaaacaatatgatacatcaaaatcagacttcccgattgatctaaagagtcttaatgtgaaggatgggaaaatcgagtatgttttcattattgataataaaaccaactataaccttagtgcggacatgaaatttatagttagagatgaaaaccaatattatgatgagttgggaaaagtattgaacattaggaatgacgctgatagacgtcaagctttacacgaactaagagataaatatcatgttgctgaagatactacaggtgctacatattcaataagtgaatggattgataagggacaaagaaaagaaataaaaatgactcgccagttgtcgaaaggcatcgattataaggatctcggtgttgatataaggataaggaatgatgcaaatgatgataattattacggcgactatcaatttaaaccggaacgctcagcaatagctaaaaataaattggatgcagcaattgctactcaacgttttccgttgaaatag

SEQ ID NO: 29581 - DNA, 258 bp, Escherichia coli
atgagcagctcacttcctgacgatatcaatgcactgaaacgtctccttgccgaacaggaggcgctgaaccgtgccctgctggaaaagctgaacgagcgtgaacgcgaaatagaccatctgcaggcgcagctggataaactccgccggatgaacttcggcagtcgttccgaaaaagtctcccgccgtatcgcacaaatggaagccgatctgaaccggcttcagaaagagagcgatagagagcgatacgctgactggtag

SEQ ID NO: 29582 - DNA, 759 bp, Escherichia coli; identical to SEQ ID NO: 6176

SEQ ID NO: 29583 - DNA, 552 bp, Escherichia coli
atggggatcgccttttttcacatgcgtggctgctgccgaaagttcagcacgccatccggcagaaactcctccatgaccaacaggtatacttatgtcactgatgagtgtgtcaggattgccggagcccagccattccctgctgctggcatccatactttccgtgcggttataagaaagcatccagtcaaaataatcagactggtaatttccctgcatatcccatccccagatacgggcccgggatacattataagaataagaacgcatccgtttcatatccacgcgcgtggcaatatagtttctggcatccgttccgaaatatccgcctttcaactgcagccgatcattgcctgtaagcaggccgtccagttgaatacctgcgccaatctcacgggtaatgttattttctggtttcagattaaggttaggtacccagtaattgggtttacccttgcggtaaaaatgtacatcatccctgtacatttctgccattgtgggggcacggaatgcagaggatatggagccgtacatcatcagccagtctgtcggtga

SEQ ID NO: 29584 - DNA, 288 bp, Escherichia coli
atgtaccatcttactatggcgatttacagtaatatgcaaaccagtacagtaaccattctaatggccacctacaatggcgaggccttcatcaaaaatcagattttgtcactacaacaacaaacattttctaactggcggttatttattcaggatgatgggtctacagacaatactatatctataataaaaaacttccaaaaatctgactccagaattcggctagttgatgataatttgaaaggtcaaggtgcaggaaaaaattttttaattgatcagcatgattgttag

SEQ ID NO: 29585 - DNA, 447 bp, Escherichia coli
  misc_feature (391)..(400): n is a, c, g, or t
atgatgaactataacgacgaagtaacccgcacacttcccctttctcatatgatttatcgggacagtgagatcgaccaggagaaagctgaaaagctgattgtgtaccattatccattaagcaaaagttatcgctggaagcagtgggaaaaccatcttgatagcgaattaggcaatcgataccatccttatctgatgcgttcctataaagagcagtttggattatttgttgctgttgattcagatcaggatactcctcccgttattaaaaattccgatggaataatcattacaccagaaaggataaagtacgagccatcgcttaatcccatatggattcgtcttatcatgcgtaaaatctctgcatttggttctcattgcaagggtagccacnnnnnnnnnncactcgttaggccgaccactactacagacggatgcctggaaaagtaa

SEQ ID NO: 29586 - DNA, 525 bp, Escherichia coli
atgaacgaacggtgtgaacttgatttgaagttgaagctacaacgccgatatttccaagctattaaagactctcaagaagcaatgagaagtgtttacgagaaaattcagtccaagcttgaagacgaaattgacgaaatggctattttgatggagcttcaaaccaatccttatgcttatttctctcgactagaccgtgacggttgggggtatgaccctgtagagattggtaaagtgattgcagatttaccagaaggtcaaagagttgttcgtacagaaagagccattagagcgccacatcgactgtctctaattgttgctgataaatcacaagctgagcttgaagaaattgccaaagagaaactgatgaaagcaagagaaaatgagattaatttgctgaaatcaagactggctaagctgattagtgaccatcaagcgctggctaaggagtaccgtcaagagttggcacagattatcagcttcaatgattttctgagtgttccacgagaatttagcaaggctgtttga

SEQ ID NO: 29587 - DNA, 174 bp, Escherichia coli
atgcctgaggaaacatttggcattcaggagtttaagattttctcttatcttgaatgctacattggagataagaaacaagcattatattatagaagtcgcaacagtgccgtagccacattcaaattaaagggtctggaatccccggtaaacacggctaagctcatatcaaaataa

SEQ ID NO: 29588 - DNA, 255 bp, Escherichia coli
atggcgggtatggcttacagccgtgtgtcgactttctccggggattatctccgcgtaactgacaacaaggggaaaacgcacgacgtgctgaccggaagtgatgacggtcgccacagcaacacgtctctggcgtggggagctggcgtgcagtttaacccgaccgaatccgtggccattgatattgcttatgaaggctccggcagtggcgactggcgcactgacggtttcatcgtgggtgtcggttataagttctga

SEQ ID NO: 29589 - DNA, 255 bp, Escherichia coli
atggcgggtatggcttacagccgtgtgtcgaccttctccggggattatctccgcgtaactgacaacaaggggaaaacgcacgatgtgctgaccggaagtgatgacggtcgccacagcaacacgtctctggcgtggggggctggcgtgcagtttaacccgaccgaatccgtggccattgaccttgcttatgaaggttccggcagtggtgactggcgcactgacggtttcatcgtgggtgtcggttataaattctga

SEQ ID NO: 29590 - DNA, 159 bp, Escherichia coli
atgggtgtgcctgtaggagacacgacagggtactatcttgtcgaaatcaataagctttatgaagaaatgcttagtttcatcttgtatatttgttattatataataattaccatatattatacgttgttcttgaccttacgttcagggaacggaaaataa

SEQ ID NO: 29591 - DNA, 183 bp, Escherichia coli
atgcataacggacagtactacgacgctccacgcgagccaaaaatgcagggcaccggcaaagtcagcctgtgcgccagcgtcggcgagggtcgcggggacgtcaaaccagccaaaaacgctgatcggtttaccatcggcagtttagatcagatagccgctgatgccgatggcgaacagcaatag

SEQ ID NO: 29592 - DNA, 342 bp, Escherichia coli
atggggcaacaaaagcagcgtaaccgccgttgggttctggcctcgcgtccgcatggcgcaccggttccggagaatttccgtcttgaagaagatgatgtcgccacaccgggtgaaggacaggtgttactgcgcacagtttatttgtccctggacccgtatatgcgtggacgtatgagcgatgagccatcttattcaccgccggttgatattggcggcgtgatggtcggcggtacggtgagccgtgtcgtggagtcgaatcatcctgattaccagcctggcgactgggtgctgggctacagtggatggcaggactatgacaatccagtggtgatgaactggtga

SEQ ID NO: 29593 - DNA, 162 bp, Escherichia coli
atggatgacaaaccattgcaggctctggctaatgaactcaaaacaccggctcaagaaagtcagcgtaatggtttcttccgactgcaacaggtgaagaaaaaccagccccgcattacctgtatccccgtcaaccatcaggggcccctgcctgacatcgcctga

SEQ ID NO: 29594 - DNA, 159 bp, Escherichia coli
gtggttaatgggggagttgcagatctgcaactcgaccatgaaactacggaaactacccgtagtttgggtggtaagagtaacacccagattttggggcttactcgtgatacccaaatttggggtatcggtggcaaccataacgactttcgttacggttga

SEQ ID NO: 29595 - DNA, 879 bp, Escherichia coli
atgacagctcgctacatcgcaattgactggggatcgaccaatctgcgcgcctggctttatcagggcgaccactgcctggagagcaggcaatcagaagcaggcgtcacgcgcctgaacggaaaatctccggctgcggtgttagcagaagtcacgaccgactggcgtgaagagaatacgtcagtggtgatggcaggaatggtcggcagcaatgtcggctggaaagttgcaccgtatttatctgttcctgcccgtttttcatctattggcgaacaattaacgtctgttggcgacaatatctggattattcccggattatgcgtttctcatgatgataaccacaatgtgatgcgcggcgaagaaacacaattgatcggcgcgcgtgctttggctccttcctctctttatgtcatgcccggtacgcattgcaaatgggtacaggccgatagccagcaaatcaacgattttcgcaccgtgatgaccggtgaattacatcatttactgttaaatcattcattgattggcgcaggtttaccaccgcaggaaaactctgccgatgccttcgcggctggccttgagcgtggtctcaatgcgcccgccatattgccgcagctttttgaagttcgcgcctcgcatgtgctgggaacacttccccgcgaacaggtcagcgaatttctctctggattgttgattggcgcagaggttgccagtatgcgcgactatgtgacccatcaacacgccatcacccttgtcgccggaacatcgctgaccgcgcgctaccagcaagcctttcaggcgatgggttgcgacgtggcggcggtggcgggcgacacggcatttcaggctggtataaggagcatcgctcatgcagtggcaaactaa

SEQ ID NO: 29596 - DNA, 615 bp, Escherichia coli
gtgttcaatgcagggaatacttatagcggtaaaacgctggtcaatgacggcctcctgactattgcgtcacatacggcagatggggtaacaggcatgggttcgagtgaagtcaccattgcaagccccggtacgctcgacattctcgcatcaacgaacagcgcaggagattacacgctgaccaatgcgctcaaaggcgatggcttgatgcgagtgcagctgtcatcctccgacaagatatttggctttacccatgcaacagggactgaattcgccggtgttgcccaactgaaagacagtaccttcactctggaacgcgacaacaccgctgcgcttactcacgcgatgttgcagtctgacagtgaaaataccacatcggtaaaagtgggagagcaatccattggtggactggccatgaatggcggtacgctcattttcgatacggatattcctgctgcgacgcttgcagagggatatatcagcgtcgatacgctggttgtcggcgcgggtgactacacctggaaaggccgtaactatcaggtaaacgggacgggcgacgtgcttatcgacgtgcctaaatttgatggggtccagcgaggcgctgaaagatcgttatga

SEQ ID NO: 29597 - DNA, 141 bp, Escherichia coli
atgaaaaaaaaggttctggcaatagctctggtaacggtgtttaccggtacaggtgtggcgcaggctgctgacgtaacagctcaggctgtagcgacctggtcagcaacagccaaaaaagacacaccagtaagctggttgtga

SEQ ID NO: 29598 - DNA, 279 bp, Escherichia coli
atgaacggcattgaacgcgttgtgttccctgcgggttgtggccataaaaaatcttttctttacaatagcatgatggacaaaaatgccctgtttctatggcacacgcagtcatgtgaactgacaaccagtcacgaaattgttgttcatcaaacaaaggggggtaacttccgcatgcctggcagtgcagtgccggaaaacccagtttatagtctggccaactgtaatcttccgatgaggccaatcccaaatttcgacaaccgaacgttttacagacattaa

SEQ ID NO: 29599 - DNA, 183 bp, Escherichia coli
atgagcgagcaaatattcagagagattaagccacggttttatcgcaaggtaagggtagtttatcaggacgaaaacaagacctgtgcatacgccattcataatggtcggtggtcagtgttcgacaccaaaaacttcgagaagaacttcgagaggattaagggtgatgaggaaactaacatttga

SEQ ID NO: 29600 - DNA, 216 bp, Escherichia coli; identical to SEQ ID NO: 22385

SEQ ID NO: 29601 - DNA, 372 bp, Escherichia coli; identical to SEQ ID NO: 11381

SEQ ID NO: 29602 - DNA, 984 bp, Escherichia coli; identical to SEQ ID NO: 17571

SEQ ID NO: 29603 - DNA, 645 bp, Escherichia coli
atgcaggcggtgaatgccgtgctgtatggcaaatacaccatggaaggggatcagtttgatactgtcgaggtggatttcgggcgctctgaaggaaataacattgagcaggctgacggtaaaaaatggtctgagcaggaccgtgatacgtttgatccgacgcatgatattgacctctactgcgatcaggccagcggccttgtgaatatcgccattatggacggtacggtctggcgtctgctgaatggctttaagctgttccgcgaaaaactggatacccgtcgcggctcaaattcacaactcgaaacggcagtgaaagacctgggggcggtggtgtccttcaaggggtattacggcgatctggccattgtggtggcgaaaacgtcttatgtggcagaggacggtaccgaaaaacgttatctgccggagggcacactggtcctggggaatacggcagcagagggcattcgttgctatggtgccattcaggatgcgcaggcgttgtccgaaggtgtggtggcctcttcccgttatccgaaacactggctgaccgtgggcgatccggcccgtgaattcaccatgacgcagtccgcaccgctgatggtgctgccggatccggatgagtttgtggtggtacaggtgaaataa

SEQ ID NO: 29604 - DNA, 1410 bp, Escherichia coli
  misc_feature (1374)..(1383): n is a, c, g, or t
atgttgcctccgacattagccagttttgcgcctatcattcatggcgttgctaataccaacgccaaagtcactattacgcaaggtggctataagatttatgaaacgacggtgccaccaggcgctttcgtcattgatgatctgagtccatcaggttacggcagcgatcttattgttaccatcgaagaatccgatggctcaaagcggacattctcgcaacctttctcatcagttgttcaaatgttacgcccaggcgttggacgttgggatattagcggcggtcagattttaaaagatgatattcaggatgagcctaatttatttcaggccagctactactatggtttgaataactacctgacgggttataccggtattcagcttaccgataataattataccgccgggttgttaggtcttggtctgaatacttcagtcggtgcattttctttcgatgtgactcactcaaatgttcgtatcccggatgataaaacatacgaggggcaaagttatcgtgtttcctggaacaaattattcgaagaaacaagtacttcactgaatatcgcagcctatcgctattcgacacagaattatcttggtcttaatgatgcactaactctgattgatgaagtgaaacatcccgaacaagatcttgaaccgaaatccatgcgtaattactcacgcatgaaaaatcaggttacggtcagtattaaccaaccgttgaagtttgagaaaaaagattacggttctttttatctttctggtagttggtccgattactgggcttccgggcaaaatcgtagcaattactccattggctatagtaacagtgcatcctggggcagctacagcattagtgcacagcgttcatggaatgaggacggcgacactgatgatagcgtttatctcagtttcaccattcctattgaaaaattacttggcactgaacagcgtacttcaggtttccagagtattgacacgcaactaagcagtgactttaaaggcaataaccaactcaacgtcagtagcagtggctatagcgataatgcgcgcgtcagttatagcgtgaatactggttatacgatgaataaatccagtgaagatttaagttatgtcggtggctatgccagctatgaatcaccgtggggaactctggcaggttcagtttctgcaaacagcgataacagtcgtcaagtttctctcagcaccgacggtggttttgtattgcatagcggcggcctgaccttcagtaatgacagttttagcgactccgatacactggcggtagttcaggctccaggtgctcaaggagcgcgaataaattatggcaacagtactatcgatcgatggggttatggtgtcaccagcgctctttcnnnnnnnnnntatcgcgctggatatcaacgatcttga

SEQ ID NO: 29605 - DNA, 315 bp, Escherichia coli
  misc_feature (23)..(32): n is a, c, g, or t
atggtgtcaccagcgctctttcnnnnnnnnnntatcgcgctggatatcaacgatcttgagaacgatgttgaattaaaaagtaccagtgcagtagctgtaccgcgtcagggttcagtcgtctttgctgattttgaaaccgtgcaagggcaatcagccattatgaacatcacacgaagtgatggtaaaaatattccatttgctgcagatatttatgatgagcaaggcaatgtcattggtaatgttggacagggtggacaagcatttgttcgtggtattgagcagcagggaaatatcagcattaaatggctcgaataa

SEQ ID NO: 29606 - DNA, 342 bp, Escherichia coli
atgagtttaagatactatataaaaaatattttgtttggcctatactgcgcacttatatatatataccttataacaaaaaacaacgaagggtattatttcctagcgtcagataagatgctatacgcaatagtgataagcactattctatgcccatattcaaaatatgctattgaacacatattttttaagttcataaagaaagattttttcagaaaaagaaaaaacctaaataatgcccccgtggcaaaattaaacctatttatgctatacaatctactttgtttggtcctagcaatcccatttggattgctaggactgtttatatcaataaagaataattaa

SEQ ID NO: 29607 - DNA, 2274 bp, Escherichia coli; identical to SEQ ID NO: 17657

SEQ ID NO: 29608 - DNA, 1098 bp, Escherichia coli
atggttctggggggcgctattgcaattaattgcaataacgcaatggcagatgtcatattgtcaccagactggcgtccgggtacgaataactcgggtgttggggctgcaacagtaagtggtaaaaccgaatacatcactggtccaaatgtcgtccagtctggtgggtcaggtcttatctggatgactgtagaacaggcaattttaaatggttacaccactggagataatttatccggattgatttacgtcaataccggagaaaaaacaaaaaccattacagtgaaggatgaggttactggcgcttatcaaacacttcaagtgtttgatactgactctttctcacaacgcgatgcggggactggaggaaatgaaaccattcctggttttagtggcactgcagattttttcaatgcgacacgttttgtaacagccaataatggcggtacagctattttggatgtgggttcaccagcaatcggtaatttttttaaaaatacacagcttgctgtagctgatggagaaggttcctctgttgtatggaactcggtcaatgatttttattttcagcctggtgcaaccatgcaggggggcggcgttactcaaaaaatcattgactcaatgaaatatgctggaacaattactgattgggcgggaaaagtacaccatattaactctcttgatgatttaaagcaatataatcaatatttgataaagtcactagaggacaaaacgctttcttataagcagtatgatgctgaatttaataaggcccttattgtcaccaagcataattacaatgtggatatgaccgctgggggacgtatagactcaactccttacaaagaaaatgtagggctgcttgctgttctccatgcaaccaataacgcacgagcaatattaggtaaaacgggtaaattaactggagttcttcctgcctatgggaatggaggagggatcgttgcaactaatggtgggaccggtgttaatgaaggggtcattgatgccattggtactgaaatgattgcctatcaagacagtaccattgttaacgatggtacactttttgtttgggataataatgataaatatgctctctag

SEQ ID NO: 29609 - DNA, 690 bp, Escherichia coli
ttgcggtgcacatgggatcgtgcgatatgccggatggtgaaaggttggagggaacggcaacaactcacccctcccagtgaagggacgggtagtttgccgctctcgatatgccggacggagccaaggccatcgatcacggggcgcgtcagtggaagaacccgcgcctgcgtgacgtatgcgtcttcgccgcaccatctcacccgtcacgccaccacataccgggaactgccgccaaggtctaactcaaccaatctagccgcgctacatacggtttttgtggcaactcatcaggtgtccgctgtcgatgaaactctctgcgccggtagcggaactctcacgcgtgcggtcgccgtcgtcacagctcccccaaccgcaaacgattctcgcaaatacgcaagtatctgcaaaaacaggtttttttcggggttcctgggagactgtgctgttgaaaaattcttgaagaatacagaaggctcatgcaaactgaatgaactggtttctgttgtggatctcaacagtttccacaggaacattgaggaggtcagagacctcaatgaacccgaaacagctcgccttcctggcgagctgttttcgttctacgcccgccgacgaaagatcgcaagtgcaataacgagatttttcacgtctttacgctcaaaaagtaaaaaaaccatgttttcccctggctga

SEQ ID NO: 29610 - DNA, 576 bp, Escherichia coli
atgaccggcatagctgacatggctcatcatcacgccaatggagccgatacgggatgtctgggtaaccagccgtcgggagcaggccgacgccagcagcatggctgcagaacaggccgtgtcattacacagtgcccagaccggcttctgctgccggaggcggtaaatcatgtcagcgcagtcaaacgcgccggcggcctgcccgcccggactgtcaatgtccagcagtatgccccgcacctggctatctgccattgcctgctgaagacaggcgacaatgccgtcatagcctgtcattccggaaaatggccgcataccccccagccggtgcaccagcgtgccggtcaccggcagtacagcaataccgttcaccacccggtaaacacgggccggtcgtttacctccggccatgtactcgtccgtttcagccagcatcccgggagcatcaagctgtacctgctgttgcggtaccgaaagacttgctgcccccatctcgcgcccgagcgcgcaaaagaaaacccgcgcataggcgggctccagaagcagcggttcattgaatgctgcggcaataatgtgtga

SEQ ID NO: 29611 - DNA, 270 bp, Escherichia coli
atgaagactatacgaggcgttggactaattaccctgatgtgtggtgtcagtacattaattccccagtatctggtggctgttaatcttggcgcggaactcccggctttcgcgggtagtcttgtcagtctgatagtaatagtctttatggcgaaaaaccgtaaagaaaaaaccgcccctgaattggggatgcggacgatttcctggactgctttattatgccagcccacattgttggcggtacatttcagggctgactgcacccagcgataa

SEQ ID NO: 29612 - DNA, 372 bp, Escherichia coli
gtgctggatgcgctggagcaggcgttatgggcccgtcgaccgtccggcacggtccatcacagtgataaaggttctcagtatgtatcgctggcctacacacagcggcttaaggaagccggattactggcatcaacaggaagtacaggcgactcgtatgacaacgcgatggcggagagcatcaatggtctttacaaagcggaggtaatacaccgtaagagctggaaaaaccgtgcagaagtggaactggccacactcacgtgggtggactggtataacaatcgacgattgctggaaaggctgggccatactcctccggcagaagcagaaaaagcttattatgcttccatcggaaacgatgatctggcagcctga

SEQ ID NO: 29613 - DNA, 807 bp, Escherichia coli
atgcgctaccggaatagccgtcaggtcacgggagttgtgaaaaatgtcactgtcagccagtcctgcggtaagtggtacatcagtattcagacagaaagtgaagtatccactccggttcacccttcagcatcaatggtcgggctggatgctggcgtggctaaactcgccacgctgtcagatggcacagtctttgagcctgtaaacagttttcagaaaaaacagaagacgctggcgagacttcagcgacagttaagccgcaaggtcgaattcagcaataactggcagaagcagaaacgcaaaatacagcgactgcattcccgtatcgcaaatatccgcagggactaccttcacaaagtcacaacgaccgtcagcaaaaaccacgcaatgatagtcattgaggatttgaaggtcagcaacatgtcaaagtcagcagcgggtacggtcagccagccgggacgcaatgtccgggcaaaatcaggtttaaaccgttcggtactggatcagggctggtatgaaatgcgccgccagcttgagtacaagcagctctggcgtggcggtcaggtgcttgctgttccgccagcgtacacaagccagcgttgcgcgtgctgtggtcatacagcgaaagaaaatcgcctgtcacaaagtaaattcagatgccagatatgtggatatacagcgaacgccgatgtaaacggcgctcgtaacattttagcggcggggcacgccgttcttgcctgtggagagatggtgcagtcaggccgtccgttgaagcaggaacccaccgaaatgattcaggcgacagcctga

SEQ ID NO: 29614 - DNA, 1224 bp, Escherichia coli; identical to SEQ ID NO: 17659

SEQ ID NO: 29615 - DNA, 546 bp, Escherichia coli
atggaagtcaacaaaaagcagctggctgacattttcggtgcgagtatccgtaccattcagaactggcaggaacagggaatgcccgttctgcgaggcggtggcaagggtaatgaggtgctttatgactctgccgccgttataaaatggtatgccgaaagggatgctgaaattgagaacgaaaagctgcgccgggaagttgaagaactgcggcaggccagcgagacagatctccagccagggactattgagtacgaacgccatcgacttacgcgtgcgcaggccgacgcacaggagctgaaaaatgccagagactccgctgaagtggtggaaaccgcattctgtactttcgtgctgtcgcggatcgcaggtgaaattgccagtattctcgacgggatccccctgtcggtgcagcggcgttttccggaactggaaaaccgacatgttgatttcctgaaacgggatatcatcaaagccatgaacaaagcagccgcgctggatgaactgataccggggttgctgagtgaatatatcgaacagtcaggttaa

SEQ ID NO: 29616 - DNA, 405 bp, Escherichia coli; identical to SEQ ID NO: 20458

SEQ ID NO: 29617 - DNA, 216 bp, Escherichia coli; identical to SEQ ID NO: 10053

SEQ ID NO: 29618 - DNA, 354 bp, Escherichia coli; identical to SEQ ID NO: 24141

SEQ ID NO: 29619 - DNA, 354 bp, Escherichia coli
atgcgtgattttcagaatgcctttgatgctgccctcgccggggtggacagtacgatcgttgaagtgatggggatccgtgcgcagttcacctccggagcacaacgtggcggcgaagttcagggggtttttgacgatccggagtcgctgggttttgccggtggcggggtccgtattgaaggaagcagcccgtcattatttgtgcggacggatacggtgcgtgccgtgcggcgtggtgacacgctgaccattaacggcgagatgttctgggtggatcgtgtttctccggatgacgggggaagctgttatctctggctcaaccgtgggcaaccacccgctgttaaccggcgacgataa

SEQ ID NO: 29620 - DNA, 372 bp, Escherichia coli; identical to SEQ ID NO: 11173

SEQ ID NO: 29621 - DNA, 141 bp, Escherichia coli
atgaccgtaactattttcttgttgcaggtagtccaggacttctggctgagaacgcgtatcgtcccgcagccagtagtaattatcgatgcgcgtatcgccatgaagcgtcatggcgtggggaatgcgggcggcttttggtag

SEQ ID NO: 29622 - DNA, 297 bp, Escherichia coli
atgttcccaaaaataatgaatgatgaaaactttttcaaaaaagcggcggcgcacggggaggaacctcctttaactcctcaaaacgaacatcagcggtccgggctgcgcttcgcccgtcgcgtcagactaccccgtgcggttggcctggctggcatgttcttaccgattgcttcaacgctggtttcacacccgccgccgggctggtggtggctggtggtggctggtgttggtcggctgggcgttcgtctggccgcatttagcctggcagatagcgagcagggccgtcgatccgcttag

SEQ ID NO: 29623 - DNA, 459 bp, Escherichia coli
gtgaggatacaaaactatccggggattgctaccgatccttttggctatgcagtggttccttatctcacaacttatcaggaaaaccgtctctcggtagatactacgcagctgcccgataacgtcgatcttgaacaaacaacacagtttgtggtgcccaacagaggtgcaatggtagcggcgcgtttcaacgccaatatcggttatcgcgtacttgttacagtcagcgatcgcaacggtaaaccgttgccctttggcgctcttgccagcaacgatgatacggggcaacaaagtatcgtcgatgagggcggcatactatatctctctgggatatcgagtaaatcacaaagctggactgtacgctggggaaatcaggcagatcaacaatgtcagtttgctttcagtacaccggattcagaacctacaacctctgtattacaaggcacagcgcagtgccattaa

SEQ ID NO: 29624 - DNA, 1371 bp, Escherichia coli
atgctgaatcttatcgttgtcggaacccccaaatactacacttttttttctgaacccagtggcaatgactctttccctgtgtcgcgactcttcgaatccacgccagagtctcttagaagcagattgcttcccctgactgaaaaaacctatcattttcttcaggaactgcccgttgtatttatgtccgagccggaaattgaattcgatgaagataatgaaaaaataggttatttcagccacatccgcttaggaaaaatcagcaagataagtacgtccgtgtataacagagaaaaagttttagcgtttgattatgagattaccagtgatatcggctacaagcccttaaccagcgataaagagtacgtaagtgagctggagctgggcagtttcggactaaacagaacgttctgggcggtcaaagagatttccgtaaatgagattctgcgtgttttaggccttgaaggctattctaatgttgagcccgcaacagcgagtgcggaagcaccggagaataatgaagaactagagatcattgcgaatatcaatcagtacttgcaggtgatactcgatcatacacagggaaacgatgaagaggtattttaccgcggtcactcggacatcagctaccaactggaaccctcactgttccgcaaggatactcagggtaactatcgctaccgccatcacgaatcggacatgataacagagctgctgaccgtgcagcccgccgagttcaaagacgatcggtatatgctagataaactcgtgcgcatgcaacactatggcctacccacacgcctgcttgatgtatcaacaaaccccttgatcgcactatattttgcctgctctaaaatcaagcacgatgaaaataatcatgaaattgacgggaacgtcattattctgacgacgcccaaaagtgaaattaagtttttcgactcggataccgtaagttgcatagccaatctttcccgtcttccctctcgtttcaaaagcagcctgaaaactaatctcaccattccggcgtttaacgaatctgaagagtgcggacaactactacacctgatccgcgatgaaaagtcctatttcaaaagcatcatcgatccggtccacctaagtaaaattgttgtggtcaaaggtaggctcagtaacgcacgtatttcgtcccaatcaggcgctttcctgctctttggtgaaaacgtagacctaccggaaacgggactcagtacgctgaacatcaaaaagcttgttattagaaacaaagagcatctgatgcagcaactgagccgccttggcattaacgaaagcacggtgtaccccggcattgagaaggctgctacggaaattgcaaaactatacgatggacgaatctga

SEQ ID NO: 29625 - DNA, 1053 bp, Escherichia coli
atggaaagaatcaagaggaatcccgaacgatttgaagcctttgagcttttttcctcgttgggccagatctataattacgatattaaaaaccccgagcaccaggatgactttatacaaaaggtcaccacgtcattaatcgcttcccatcagaatccaattctgctgaacgggaaaagaatagaaaacctatttaaacacgtttgcgccgcactgaaccactgccagtttcttaaacaggaagacgccggagacttgatgtcagccgatcccgatctggtggcacctgactatcgcattatactgaaggatcgccgtcagatctttgtggaagtaaaaaactttaacgcggatgacgtggctgacgattatcgcctgaagaaatcgtacagtgataaggttgaaaagtacggtgagctccatggtattccagtttattatgccatctacatcaggatgctgcgccggtgggcgctggttgcacgctcctcaatgaaggagctagagcgtgaacataccttgacgccggcctcggcgctcgcaaaaagtgagatgtacctgctgggcgacctatcgatagcaacagaacccgatctggtttttgagcttatccccgaccggaccaaagaagtttcagttagtcccgaaggcatcgcccattttacaattggcgagattaaaatttactgcaatgacagacaagtaacggataaatttgaaatgaacacggcgtttcatctgatgcgctacggagagtggctctgccccggatcggaggcaatattcactgatggtcagcttgagagcatccgatacacattttccccggaagacgacgaaaattacaaaagacagggtttcgactttataggtacgctgagttcgctggtcacgtcggcctttaacgagcagactgtacacgacagccagatcaggtcagttgacacccggcagaatgtcagacttttcacggtaaccatccctgatgattacaaagggggaggcctgcctctgtggcgtttctcaatgcggccaaactatgaatttaccgattaa

SEQ ID NO: 29626 - DNA, 816 bp, Escherichia coli
atgattgacgaaactccaaaatcaactttacttaagcaaaaacgaggcatgcaattgaaaaagattaggaaaatcaataaaaaaattattgatgaattgctatctcttcgcgaatcaagaggagctatagaagacttctcaatgtctttcctactaaattttgcagaaaattgtcgacttatgcattcacttatttcaacgaaagataagaaaatagatatttataaaacagcatatcgacaatgttttgtatttctaatcagttgctgggaaacatattttagagacgtttttgttttcgtgcattcagttgatgaatctagaattacaacactactatctaaaatgagaacagaaacatctatcaatataaacactgagataaatctatcagagttattgagtaaaagctttaactttcaaaacttaaacgaccttgaagaagcatataatggcatgtggggtgagagttttttaaactacatatgtacaactaatatatctccttgcggtctgagtggccaaatttcccaaggtttatcgatagaaaatatatttccagactggagagccctcatagaggaagcattttacattaggcacaaagtggttcatgatgcaaacttcagacctaaagtcaacattgaattaatcagtaaggtagaggctttgtttttaataatcccacaatttgcaacgcatatcatatcagaaagattcaacttaaaaaaaatcgtcatttcagatggtaaaaataaccatacctatattttcaatatcagtgatatattatctgatgattgggttgttagttga

SEQ ID NO: 29627 - DNA, 699 bp, Escherichia coli
gtgagcaagattgactatcaggcactgcgtgaggcggcagagaaagcaacgtgtggcgagtggtcgctcgaatatggagatggccgatttgatggtgatgatgcactaattcatcgtgaagttgctggatatattcccatttgcagaattgaaggagcgcatccagaaagccgtttctatgaagatttccaaatggagcagcaggccaatgctgaattcatcgccgcagccaatccagctaccgtgctggcactgctggatgaacgggaaagaaacctgcaatacatcaaaagccgcgatcaggagaacgaggatattgcgcttacggttgggaagctgagagttgagcttgaggagacaaaatcaaaactcaacgagcagcgtgagtattacgaaggtgttatctcggatgggagtaagcgcattgctgaactagaggagcgggaaataaaaccagccaaaggtgaagttctggtcgttgtatctggttttactggttgcggaaaaagcgccattgccggggaaatagaaatcgcgatgaaggctattggtgtaccggttaagtggactaatggcgatgcagaaaagcgcatgactggcgctgactggctgactgcgattgagatgtacaaaccaactgtgcgcatcgtggaagttaatgtgccacgcgcccctggcattcgcatcaaaggagagtga

SEQ ID NO: 29628 - DNA, 162 bp, Escherichia coli; identical to SEQ ID NO: 27637

SEQ ID NO: 29629 - DNA, 2226 bp, Escherichia coli
ttgcaacgtgaggttgatgatttccatccagtgctaagagcgcttctaccacgtttgccgactgttacacatgttgaatataagcaaggaccatcagaaaaaggtgctgattttgtcataattaaacgagatgaggcattagatgaggaaatatatattggggttatttgtaaggttggaaagataattcagtcaaatagtgaggtcgaacgacaaatagaagagtgtcaattatacccacgctttatttcttctggctctaagaacatacatttgaatgaaatttgggttgttactaattcatcaatctcaaataatgctcaagaaaaaatctacttaaaattcaaatctacaaatataaagtttatagaaggtgagaaaatatgttctttaatcagtaaatattacccagagttttgggatttcgaatccattaattatgagcaatacttaacagatacattgcaaaccataagtgatactcctgaaagttctttttttggtagtgttggcataaataaccttattgatagatatgtaagcaaggaagatcataaaaaacgcaggcacaggccgttaaaactgtatagtgttgtgagagccgagagatttatttttttagagggaactgttggctccgggaaaagtactttgctgaaacagctaattaaaaaaataaaagaagaatattcttacgaaaaagactacatccttccagtattttgccaatacaaggatgttctagaaaaaaaactcaatattgaaaatataatacaaagtgtattaagtaagtacaaaatacaacatgatgggaatattttattaattgttgattcggtggatgaagtaaaggaatcacttgaggaaaggcaaaacaacttcagggacattgtagagaaagtatccaggagtgataaagttcgattactagttgcttcaagaattatggactctcttcaggactatgaagttatcgatcagatgtttgcaagatactcgataataccacttagcacaggtcaaataatcgactttgtagataaaatctgcaatgacattaaaataacaaacaagcttaagaatggtatagaaaaaacaccactatttaaattcattcccaggactccagtgagtgctattcttctagcaagaatactctctgatgagattaaagaattaccatctacaatgacagaactatactcaaaatacagtgagatagtattgggacgatgggatacatctaagggattattatcgcaaacagaatatgatgtaataagtaatatattagtagaaattgcgatgtttatgatggataactctctaaactgcatatcaatttctgaagtgcaggacatgtttttaaattatttggccaaaagaaacttgaatgttgatgaggacaaacttttcaaaagactaatttatcgcagtgaagtaacaacagttaatgttagaactaatacgttctcatttctacacagatcattcatggagtatttttacgctgaaggacttaggaagcgtggcttaatagacataaatgataatatttatgatatttattgggcaaatagttatttcttctattttggtttattaagagacaatgaatatcttattgataaaattaatgaacttaaacctagtaacgataaaacaagatttttaaggttattttataacggttctttttatttggcttcatatctaactccgtataaaaaaatagcaaggggagtccttttatcatatatagatgcaggtaaattatatgttgatattctccatggaaataccgacatcccgctgaaggagttttcaccagtagctcttctttgtatttttacaaagtgtttaagtaacaattacgcatatgattttttcaaatctgccttggaagacttgtcagttcaaattgaacaatatgaggaaattggggaacatattgattatgcacgtttcttcatagcatcaacactgaatgagctcggggataaatccgcatttgatagcttagtggaaaaaaataaattaggtgttttgattaatttagggataactcacgttacagacgactcagggctactaagtactacggttgataagtacctgaaaaaattcaataaaaaagtacgaagtaaccatgatatgtctaattatatatctaagttatatgaggaatctactggttccttacgtacaaacctacaaattcaataa

SEQ ID NO: 29630 - DNA, 1128 bp, Escherichia coli
atggaacaacgccacatcaccggcaaaagccactggtatcatgaaacgcaatccagtactacggagtatgacgttctgcctctggtcccggaagccgcaaaggtcagcgatccctttctactcgacgtgatccttgaaaaagaaacgctggcccccttcctttcatggctggaccctgcgcgtgttcttgcagtggatttgttccctgaccagcttaccgtgacccgttcacagaccttcaccgcttatgaacgcttgtcgacggccctgacggttgctcaggtttgcggcgtccagcggttatgtaactactattcggcgcgacttacgccgctccccgggcctgattccaccagggaaagtaatcatcgattggcacaaatcacgcaatatgcccgccaactggctagctcgccttctattatcgacaaccgatcgcgccagcatctgaatgacgtcggtcttactgcctgggactgtgtgatcattagccaaatcattggttttattggctttcaggcgcggacaattgcgacatttcaggcttatctcgggcatccggtacgctggttacccgggctggagatacaaaactacgccgacgcgtcactgtttgctgatgaatcattacgctggcgaagcagctatgaggtggaaaaactacctgaagagcacacaaaaagttcaactgcagaactttgccaactggccgaaatactctctctccaccctatttcactttcccttctcgaaaagttgttaaacagcacacggggcaatacacagccggataatcagcttgcggcgttgttatgcgcgcgtataaatggcagtcctgcttgttttgccacctgtatggattcatcaaatgaatataaaaaaatcagcacccttatgcgcaagggcgaaaatgaaattaaccaatgggctgaccgtcattctgttgagcgcgctaccgttcaggcgatacaatggctgacccgagcacccgatcgctttagcgccgcccagttcagccctttactcgaacacgaaaaatcatcaacgcagattattaatctgctggtatggagcgggctgtgtggctggataaatcgcttaaaaatcgcgttgggtgagacatattaa

SEQ ID NO: 29631 - DNA, 246 bp, Escherichia coli
atgaccattctggactacatcgctgccaatccgggttgtagcggtggagaaatcgccgcagcactgaatacaccaaccacaaccattaatgcggagctacgccgtctctggcgcagcggttcagtcataagaaaagagcgcaaaacaggcggtcgcttttcttatcaggtaaacccgatgccgtttgggtgtagcaacccactaacccagatgttcaaccagctactgagggaaatcagagcatga

SEQ ID NO: 29632 - DNA, 1083 bp, Escherichia coli
atggtaaacgtgagggaggatgaacttttcaaactcatcgagcaaggcatcaaaggcaacgcaaatgcatttacactcctatgcagaaagatgattaacaacatccgtaaaaatgatgaggctttagcttctaagctggcttcgttagttgctgagggaacagtattacgtggggcatctagtaaggctcctatgcctgtggatggagactccagacgaaaccttttgcaggaaacatctgtcaacgcaattgttgaagaacctgtatggaatacggatatctcaaagaagctggagtcaattgttaacgaaagagagaatgcggtttctttgttcaaagctggtcttgaacctgtgaagacggttttactttctggcccgccaggcgtaggcaaaacaatgtccgcacattggcttgctgcaaagttaaatttacctcttttaacattggatctctcatctgtaatgagttctcttttgggaaaaacaggtaataatattaaatccgttatggattatgccaaagagaaaccatgtgtccttttgcttgatgaatttgatgctgttgcaaaaagacgcgatgatgacagggacgttggagaattaaaacgtttagttactgtactcctacagaccatagatgagtggccagcgacctcgcttcttgttgctgcgactaatcaccctgatatcttagatccggctgtttggcgtcgatttgagcacatccttaaatttaatatgccatcagtagaactgatagatagatatttagtcaatcataatattgaacctgaactatctaaaaaacttgcaccattattagatggcatgtcctttgccatcattaaccgtattttgaatttctccaaaaagaatgaggtacttagaaatattccatttgaaagctcattaatagaagccgtaattacggagagggtttcattggatgagtttagcgataatgatctcaatataattaaatatcattttgacggtttttcaaataggaagatagctgaattagttggtgtttcacatccaacaatcgcgaataaattacaaaagtgggggattaaatga

SEQ ID NO: 29633 - DNA, 2202 bp, Escherichia coli
atggaaaggaacttacttttaggtaacggtcatgttctgacaaaaaaggaacctttgcctaaaggaagggatggtaagcgctatccctatactcttgaagaagtaagggagcatttaaacccagagattgatactttactctcacgctttcgcagtttggatgatgcggctaagccaaggggggagagtgtattcaatttaactttacacccagcgtttttgggtaaaagctactttccggaaggattgcttagagcgacaggtttacgggatgtcggcagccgtcaggtaatcattcgcccacggaaagcggcacgtcagtgcgatcagaataaggacttagtaacggcgcaactgtttgttagcggtgatgatgatgccgttataagatttaaggaaattttaaattcccctacagctccgaagggcgtacaaaaggatttgatcgaaattgaaagtgttagcttttttgaaggaaaagagagagcacgcaattttgagcatgcgaaaagtgatttgataaaatttgaagtggttcttcatgctggggttgaagacgatgatatcgttaaagcctatattagctatgcggcacaatatgatgtctctgttgattacaaaagtagaatccaagttggtgggctgactttcatcgttgcacacgcgcgacctgaagatatgaaaaaaacactcgatttttcattaatccgcgttgtgcggccgatgccgtctctcaggtgtactcagccgaacattgtcagaaagttatctaatatagttacaccggagctccctaattctaaagctgttcttgaatccgaacgtattgccatttttgatggtggcctggggacagctgacttgagtaattgggttacggaatacgtgtatccagacaccaaagaaacaagcggattattattgcagcacggtaatgaagtgacatccactttcttattcggacgtgtcgaggaaaatgcaccttcttttaaaagaccgtttatgaatgtagatcattatagagttctttcaccgacatcaggtgacaatagcaattgggatttatttgatgtccttaagaaaatacagtccgttcttgatagtggtgactataagttcgctaatctaagtattggtcctcatcttccaattggtgatgatgaggttcatgtatggactgctgttttagaccaaatctgtgctaagcatgggatattacttactgttgctgttgggaatgatggcaatgaggacggtgatgcagcgagaatacaacctccttccgatatggtaaacgcgctagcgattggtgctgctgatcgtagcggtgaaaaatgggggcgggcaccatatagctgtattgggccaggcagaagccccggattcgttaaacctgatggtgttatttttggtggaagcgacgacgagcctttttacacttacaaccctctgcttggttctatagttggagttcaaggaaccagttatgcctctccattagcattgagaacggccgctggagttgcggctctatcaggaactccattgaacaccattgcattgaaagcgttgcttgttcatcatgctgaaacatcaagaaaatattcgcgtgaacatatcggttggggacggtttagtgaggatcctaacgttttaatcgattgtccaaatgatactgctacagtaatttactatggttcattagcaaaaaataaatatttaagggcaccgatcccattccctgatgttccctttgacgaagcatttgagcttaccgctactttatgcattcaaaccccagtagatcctgaacattcagtaaactatacaagggccggtatgcaggtaactttccgcccaagattcggccttgacgataccgatacagatgatttctttggtcaaaaaagccagtataagactgaaagggagtgtaggagtgaaggtcataagtgggaaacttgtttgcacagaagcaaaaagttcagtgctgatacattattaagcgatccagtttttgatatacggtatcatgcccgagattcttcgcgccatgttaagggagtttcagcccctgatatgcaatatgcgatggtaataagcgtaagggtaaaagactttgatttatataatgttattcgccagcgatatacaattctgaatcctattcaactgcgcacacaaatttctctcgacacgtaa

SEQ ID NO: 29634 - DNA, 453 bp, Escherichia coli
atgcgacaagcattggcctggctggaagggcattcatgcagcgacgacagacagggtaaagccgagaatcaaccagtacgcggcaaccagactgccgaatccaatcgcggtaatgagtggaccggcaatcctgatattgataacgcaatcatcatgctcgaccgcatagatacggcggaaagttgcgatgatgaccgtattgaggccgttaaggctgtgttgcgtagactggcaggcaactctccggtaactccggatggttggataagctgtagtgagcgaatgccggataataatcacgacgtacttttcttcgatgtgtggggttatatcaggattggctggttcagtgcggacgactggtcgtggtttacgtcggatgatgggtgctgcatggaggtgacccactggatgccgctaccagaaccgcctcaggaggttaaccgtggctaa

SEQ ID NO: 29635 - DNA, 177 bp, Escherichia coli
atgaaaaacagaaagaaattttggattacttttttgtttgtatgcctttgcggtttatttgttttattagctggtggtgttaaatggggtacggtggggtgtggtttttggagtgggcttactcttttcgcagcttggcttatcgccaactttgagtcaggcggagggtattggtaa

SEQ ID NO: 29636 - DNA, 165 bp, Escherichia coli
atgattggcaaggcgcgtattgcgtgcgccattggttttctcgttttgtccgtgctggtggatttcaccagcaaagtgatgtcggtgttggctgatggggcactggtttcagtagctgtggtattgctattgccgattattaaagctgcgttcaggaactcatga

SEQ ID NO: 29637 - DNA, 708 bp, Escherichia coli
atggatatctgcattcttgaaaagccatcaatgaccagcattgagatcgcggagctggtgggaaaacgtcatgacaatgtgaagcgtaccattgaaacattagccgaatccggcgttattgttcgtcctcaaattgaggatgaaccaaaaatagatgtaatggggcgttctcgattaattcaggtgttccgatttagcgacgagcaaggcaaacgagacagtatcattgtagtcgcacagctttgtcctgagtttactgcccggctggtggaccgctggcgcgaactggaagaacaagtacgccagccgttgaccgaaatagagatgatcgccgcaatggctgcaaatgcagttcagcagcaaaagcggcttcatgctgttgagtcaaaggttagccaggtcgctgaaaccgtcgagcaaatcaagaagggcaatatgccagatggctacattggctaccgccagctggcggcgaaatgcggcctgactgaagccaaatgtcgcaacctggttaacgcttaccggattcccaccgatacgcatgagtttttaactccagagggggtattgtcgcgtcgttccatcgtggccttatctcccttcatgaatgcttttaaccggatgatgtcggaggctgaacaccgaggaaaacgctggtatcaccccaaaatggggcaattccaggtgatcggttggggaggtgagtga

SEQ ID NO: 29638 - DNA, 1638 bp, Escherichia coli
atgaatacttataagcaaaccattaaacaaaaatcaagattaaacatatgggaaacagctatcgcaaggttgacaacccaagctgagagctcaagaatcttagaatcaaactatttaacaaatcttatagatttttgttggaaagatacactaaatcaagttgctatatatgatgagagcattgtattacgcaatggttataattgggtgcaaaaaataagtgatagttataaacctaaagctgcaagtgaactaaagattgctttcttttgcggccctgaaccagaaaatgacttggatatactcttatcattagatgttagaatagaaaatatctgggcttttgaaattgataacaattcatataacactgccttacaaaaagctaaagagttctatccaaaattaaaaatattccctggttctattggggagttttttaaaaccacacatcatacctttgatattatttaccttgattttacaagttcgttattgactaaaaagagccctccccttggagtaataaactctgtatttgacaatcaggccctatcagacttaggggtgttaattgtaaactcttgcgaacccgatgctaacgaagataacgcaacatttcttgcaagttatttcatgaatcacgaaataattgaatcatctgtaattaacaaaactaatgatgatgattatgatgataactatgattatttttcactttttattgaatcccccacatcacaaggatacgatgatataaagtcattagcaaaagttataaagactaacatatccggagcgtactctgccttttcaacaagttatgtaatgcactatgcttcaatgattagtccaacacttcgttttctacaaaataactcattaaaaagacaattatttaatgataaaaaagctgaagtaactgcaacctttgcagaaattggatcaactgactttttcaaaacattaatatcaacagatggtgaagcatcgtccccctccattttaggaaacagattcctagataatgaaagctacccattctggaatttcattgattcattaaatggctcaggaacaagtatttcatcttactttaagagctttttcaccaccgctaaagaaggtgtatccattttaaatgccgtgcaatttcgggaatcatttcactcaatgcttacaggagctagaaagctattatctcagcgaatgctcaatgcaataccccaaataataaaagcaattcctgatgctagaggtggtttattctgtgacattcctttaccccacctttggttagaggtggcacttaatcagttaggtgcaccataccatgtaaacgtgaaaatgcataatcgatggaaatataaagcaaaaactcgcacaatgcatacggacttatttgtttttgatagatgcagaggtttttatgactcaatgcctatgatagatcaatacgaaacgattcttactaacatcgaagaacaaattttcgctaggtgttgtattgatattattggtaagcaatgtcgttggccaactccaaaactttattttggttcgaacctaattggaataaacgagtctgattggtctgagttcgccgaacttcgtgaaagagaaattataaaagaataa

SEQ ID NO: 29639 - DNA, 2199 bp, Escherichia coli
atgaaatttgataaacccgcaggggaaaacccgatcgatcagctgaaggttgtcggtcgtccccatgaccgcatcgacggaccgctgaaaactaccggcacggcacgctacgcctacgaatggcatgaagaagcccccaacgccgcctatggctatatcgtcggttccgccattgccaaaggacgcctcaccgcccttgatacggacgccgcgcaaaaagcgccgggcgtactggctgtcattaccgccagtaacgccggggcactcggcaaaggcgacaaaaacaccgccaggctgttaggcggccccactattgagcactatcatcaggccattgcgctggtagtggccgagaccttcgaacaggcgcgagcggcggcctcgctggtgcaggcacactatcgccgtaataaaggagcttactccctggcggacgaaaaacaggccgtcaatcagccgccggaagacacgcccgacaaaaacgtcggtgactttgacggggctttcacctccgctgcggtgaagattgatgctacctacacgaccccggaccagagccatatggcgatggagccgcatgcctcgatggccgtctgggatggaaataagcttaccctctggacctcaaatcagatgattgactggtgccgcaccgatctggcaaaaacgctgaaagttcccgtggagaatgtgcgtattatctccccgtatatcggcggagggtttggcggcaagctgttcctgagaagcgatgcgctgctggcggccctcgccgcccgagcggtgaaacgtccggttaaagtgatgctcccccgcccctctattcccaataacaccacgcaccgccccgccacccttcagcacttgcgtatcggtgccgaccagagcgggaaaatcaccgctatctcacatgaaagctggtctggaaacctgcccggcggcacgccggaaacggcggtacagcaaagcgaattactctacgccggggcgaatcgtcataccggcctgcggctcgccacgcttgatttgccggaagggaacgccatgcgtgcgcccggcgaagcccccggtctgatggcgctcgaaatcgcgatcgacgaactggcggaaaaagcgggcatcgatcccgtcgagtttcgcatcctgaatgacactcaggttgaccccgccgacccgacgcgctgcttctctcgccgtcagcttatcgagtgcttgcgcaccggagcggataaatttggctggaagcagcgcaacgccacccccggacaggtgcgcgacggggagtggctagtcggccacggtgttgcggcgggctttcgcaataatctgctggaaaaatcgggtgctcgggttcacctcgaacaaaacggcaccgttaccgtagaaacggacatgaccgacattggcaccggcagctacaccattctggcccagacggcagcggaaatgcttggcgtaccgctggagcaggttgcggttcacctcggcgattccagtttcccggtttctgcgggttctggtggacaatggggcgcgaatacctccacctccggcgtttacgccgcctgtatgaagcttcgcgaaatgattgcctcggcagtcgggtttgatcctgagcagtcgcagtttgccgacggcaagattaccaacggtacccgaagcgccacgctacatgaagccaccgcaggcggcagactgacagcggaagagagcattgaattcggaacactgagcaaagagtaccagcagtcgacctttgccgggcattttgtggaggtcggcgtgcatagcgcgacgggagaagttcgggtccggcgtatgctcgctgtgtgtgctgcaggacgcatcctgaatccgaaaactgcgcgcagccaggtcattggcgcaatgactatgggcatgggcgcggcactgatggaggagctggcggtggatgaccgtttgggctacttcgttaatcacgatatggcggggtatgaggtgccggttcatgcggatatcccaaaacaggaggtgattttcctggatgataccgaccccatatcctccccgatgaaggccaaaggtgtcggtgagctgggcctgtgcggcgtgagcgcggctatcgccaacgcggtgtataacgccaccggtattcgggtacgggattatcccatcactctggataagctgctcgataagctgccggatgtggtttaa

SEQ ID NO: 29640 - DNA, 252 bp, Escherichia coli
atggctagagacgatccgcactttaacttccgtatgcctttggaagtaagagaaaaattgaaattaagagcagaggctaacggaaggtcaatgaactcagagttattacaaatcgttcaggatgcgctatcaaaaccatcaccgattgcaggctatcgagacgatgcagaacgcatcgctgatgagcagtccgaacttgttaggaagatggtgtttgatacgctgaaggatttgtacaaaaaacccacctga

SEQ ID NO: 29641 - DNA, 1881 bp, Escherichia coli
atgaggccaagtgaacttagcgacctgctttgggcgcaggttgacagggtggctccgcacctgttgccaaatggcaagaaagaggggcatgagtgggttgccggtaacgtcaacggtgacaagggaaacagccttaaggtcaaccttagcggcaagaaaaaatgggctgatttcgctgagggagacggcggtgacatgcttgatttgtggatggcatgtcgtggaattaacctgcatcaggctatgcaggaagcgaaagcatttctcggtatcaaggatgacgatcaccatttcgatgccaaacgtgagaagaaattctccagacctgatcgcaagaaaatcgcccgctacgttaccagaacagaatcccatcttgagtacctgcaatcgcgtggcatatcgccagaaatcgtaaagcgctacgaggttgtcagcggcaaggtgtggaatggagagcgggaactggatgctctggtgattccgtacaaacgcgatggtgagttgttgcaggtcaagcgaatcagcactgagcgcccggacgggaagaaagtcattatggcagaaggtgattgcgaaccttgtctgttcggatggcaggctctggacgctggcgtgagggcggttgtactttgcgaaggcgaaattgattgtatgagctatgcgcaatacggcatctcggcgttatccgtgccgtttggtggcgggaaaggcgctaagcaacagtggattgagtttgagtatcacaacctcgacaggtttgaggaaatattcatctcgatggacgttgatgatgttggtcgtgaagccgcaagggaaatcgcaagccgactcggtgaacatcgttgccgtcttgttactctgccgtacaaagacatcaacgaatgcctgatgaacggtgttaccgaggatgaaatctggcagtacatcggcacggcatcctacttcgatcctgaagaactctacagcgcgcgagagttttaccaggacactatcaacgctttctacggcaagcagcagtatctgtttaatccaccgtgggaatctctggcagataaattccagttccgtgaggcagagttgacgctggtcaatggtgtgaacggtcacggaaaaacggaggttgtcgggcatatggcacttgaggcaatgcgtcagggtgtgaagacgtgcatcgcgtcacttgagctgaagcctggtattctccttaagcgccttacccgtcaggcgacgtgctgcaagatgccgccagtgctggaaattgactctgcatttaaattttatgacgaaagactttgggtgtttggcctgaccggaacggcgaaagccgacaggctgatcgaaatattcgactacgctcgccgccgatacgggatccagttattcatcatcgacagcctgatgaaatgtggcataggcgacgatgactataacgggcagaaggcgtttgttgactcgatttgcgacttcaaaaacaaaacaaactcccacgtcattctcgttactcactcgcgaaaaggagacagcgaagaaaaaccaaccgggaaaatggacgtaaaaggctctggagcgataacagacctgacagacaaccttttcatcatctggcgtaacaaggctcgcgagagagcgttacagagagttcagagtggtgaaaagatgtcagagaaggacgaacagctactggcatctccggcatctgttttgatgcttgaaaaacaacgtaacggcgaaggttgggaaggtggtgtcccgttgttccttgacgagcaatcgcaccagttcctgcaacttgaatcaggatcgccatatagctacatcgccaatatgccgaaatcggaatatgacgaggcgtggcgacaggaaaacgtgacggagtattaa

SEQ ID NO: 29642 - DNA, 690 bp, Escherichia coli
atgaaagaacgcgggatgatttttaacgatgagatggtcagggccatcctcgaaggaaggaagacgcagactcgccgacctgtaaaaaatgtcagggccgataactgcctggttatccgtaaaccgacaaagaaacgcaatggtgtctatacccacgttatggatgcacctgaacatggtttatgcccgttcggcaacgttggtgatcgcatatgggtccgtgaggcgtgggcgatattaggcaatgaagatggttgcagtgtggactggaacgacaacctttgtcgtggcgatgagaagaacgctgcaaggatttatcgggccagttgtgagcaaaagcctggtgattacggtttatggtcgatacccgatgatgccgactggaaacctcacactgtgaatgaaaagtttgatggtgggtggcgtccatcaattcacatgccgcgctgggcatcgcgcattcttctggaaattaccaacgtgcgcgttgagcggttgaacgatatcagcgaatgcgatgcaagggctgagggcgcaccaacagaatcgaccctcattggcgataagcattacccaagtttccgtagcctatggaaatcaatttatggcgaagatagttggaacgctaatccttgggtgtgggtaatcgagtttaagcgtattcagggggcaaccagtgagcaagattga

SEQ ID NO: 29643 - DNA, 1065 bp, Escherichia coli
  misc_feature (156)..(165): n is a, c, g, or t
gtgaacatatatatcgggtggcttttcaaattaatccctttgattatgggcttaatttgtatcgcgttaggtggctttgtgctggaaagttcagggcaaagcgagtatttcgtcgcgggtcatgtgctgatttctctggcggccatatgcctggcnnnnnnnnnngcattattcactaccgcatttattatcatttcgcagctcacgcgcggcgttaatacgttttacaatacattgttccccattattggctatgcggggtcaattatcaccatgatatggggttgggcactgttagcaggcaatgatgtgatggcagacgagtttgtcgccggccatgttattttcggcgttggtatgattgccgcctgtgtatcgacggtggcagcgtcatccggtcactttctgctcattcccaaaaatgcagcggggagcaagagcgacggaacaccggtacaggcttattcttcattaatcggtaactgcctcattgccgttcccgttttactcaccctgctcggtttcatttggtctattacgctgttacgtagtgctgacataactccgcattatgtcgcgggtcacgtattgcttgggttaaccgcaatctgtgcctgtctaattggccttgttgccacaattgtccatcaaacacgtaatacgttttcaactaaagaacactggctgtggtgttattgggttatttttctcggctcaatcacggtactgcaggggatatacgtcttagtcagttccgatgcaagcgcccgactggctcccggcattattcttatttgcctcggaatgatctgttacagcatattctcaaaagtctggctactggcactggtatggagacgtacctgttcgttagccaacagaataccgatgattcccgtcttcacctgcctgttttgccttttcctggcatcgtttcttgcggaaatggcgcagaccgacatgggatattttattccttcgcgagttctggtcggtttgggagcggtatgctttacgttgttctcaatcgtttcaatattagaagcgggttctgctaaaaaataa

SEQ ID NO: 29644 - DNA, 324 bp, Escherichia coli
atgacttttcgtctgtttaaactcgaaataagatgtacatcagcgacagttgagtctatttcgaaaacatcacccggcaaaacagttgtattagccacactacctaaaagcgcccgcattttgaggtctatttcttttttcgtgttcttcttatttatcgagaaatctttagtgaagagttttttattccagtatgaaaattgttttaaagaaggaacatatggagctctattttctaggtttgctgttttaatttcatccctaaaatacaaatcaatatgtctctctaatgttttctttatcgtatctccgttaactttataa

SEQ ID NO: 29645 - DNA, 144 bp, Escherichia coli
atgcattgctacccgcattctcgaactgtggcgccgctgggaaaagtagaatcaaacatgaaattaaacttgggaattccaaaaaaaacagagcattacctaatgaacgatcacgtgttttcattcttaatgaaagagatataa

SEQ ID NO: 29646 - DNA, 150 bp, Escherichia coli
atgggtaacagcccgaatttttatgggaaatgccacgagttggtatgggaaaaacctcgtattgctatgggaaacgcccctggtttaaattcgtgttttatgactgtggataacacgttaatttcccttgttggatgggcttttgcatga

SEQ ID NO: 29647 - DNA, 219 bp, Escherichia coli
atgactaaaaatacacgtttttcccccgaagtccgtcaacgggcagttcgtatggttctggaaagtcaggacgaatatgactcacaatgggcggcaatttgttccattgctccaaagattggctgtacgccagagactctgcgtgtctgggttcgccagcatgagcgggataccggggcggtgatggtgggctcaccaccgctgaacgtcagcgtctga

SEQ ID NO: 29648 - DNA, 807 bp, Escherichia coli
gtgagcgagattaactatcaggctctgcgactggcggcagaagaagcggaagaactggcacgaattgctctggcatcgctggaagcagagcctgtggcgtcatgcattattgaagatgggtgcatgtgtgttgacgggttcggtgagtatgttggtcactcgctgcctgatggaacgcaccagctatacgccgccccgccagtgcctgataagttgccgcgtgaatacagaaacggttggcctcttgcgtatagtgattatgctgaaggctggaacgactgccgcgaagccatgcttcagtccggaaactttcgggaaaacaagaattcgtcaaccaataattttcgggaaatcgcggaaacgtcaaccaactatccggtaattcctagtgaggtgttgtccgcaatcctgaaggttgccaagattcgtgccgatttcgatgattttgacggtgacaggcgaggtatcggtgattgtctggatgaggctgagcaagagcttatcgttaccattaacaaatatgccagtcagttggcagcagaacctatagcgcctaatgacgttcgagagcagacagccattccgcaagttccggtaactccggatggttggataagctgtagtgagcgaatgccaagcgaagaagatgttttggtttattgctcagacacaaaagagcagatggtagggtttcacaaaggtaaagggttatttcaattcttttacatgaatggtgttgagggggtatgtgagccgtcacactggatgccgctaccagagccgccgcaggaggttaaccgtggctaa

SEQ ID NO: 29649 - DNA, 267 bp, Escherichia coli
atgaagttcaaattgaacgatgaagttaaatggtcaagctcatcaaacggtgtaacgaaggtaaaaatcgggtttatcgtcgaggtgattcctcctggtgtcaacgtaaaaaaattcgaactaggtcgtctgctagatgcacctggccttccgaggaaagaagagagctatatagtttgtgtaggtccaagacccggatctcgtgccaagccaaaatattactggccgcgagttaataacctgcgtcgattacacgatgacaaatag

SEQ ID NO: 29650 - DNA, 540 bp, Escherichia coli
atgagtaactggtggcaggaactattacgtttcttcctgcgtggtcttacgctacaacagttaattcatatgcttattattttaattgccttgataataatcaccccagcatcaattaaagagtgggtagatataaggaaccccgaaatacttccagatcactggatgtattacgcaatgcttttgtgtatcagttatgttctgaacagggtgatggagtttatatttctggcatcttcagacagatataaaaaatatctcagtaagagagatgaggctaaagtaattgtggagactgagcgcctgttcaattctctgagtattcaggaaaaagaggttttagcatttgctgttatggcaaataacaaaatcgtacttaagcacggcgatccggtcgctttatctcttatgagaaaaggccttctccatcgctcaggtgtgacttacagcgcgtcaggtaaagagaaatttgttatacctgacgtctggttccatgagtgttatatgcgctttgctggtaaagctgatgagctaatttag

SEQ ID NO: 29651 - DNA, 135 bp, Escherichia coli
atggctcacgatgttaatcgcgatgacttcatctacgaacacgacaagccggtttatgtgcgcagttactgccgcatacgtttcggtgagctcgaacatgttcgtcagcacttccgctcttatccgagctgctga

SEQ ID NO: 29652 - DNA, 258 bp, Escherichia coli
atgaatcctttgttaaccgattcccgccgtcaggcgctgcgttcagcttcccactggtatgccgtgctaagcggcgagcgcgtcagcccacaacaggaagcgcgctggcaacagtggtatgaacaggatcaggataaccagtgggcctggcagcaggttgaaaacctgcgcaaccagcttggcggtgtgcctggcgacgttgccagccgggcgttgcacgatacccgcctcacccgccgtcacgtgatgaaaggatga

SEQ ID NO: 29653 - DNA, 1389 bp, Escherichia coli
atggctaaactgaacaagaaacaactttctttactcaaggaaatgcctgcagaacaactcatgcaaataatttgtgatattgcagaggataatggtcaggcaaaatcctttcttattaatgaatatctgttaactccagaagaatcactgaaaaaagctgaggctgaatacaaaagggcaattaaaacaaaacgcttttatgattattatgaagcagcgtttttttttgaggggctatacaggaatgtcatatttccacttgaaaagacggtatcaacgctgcctgaaaaaaccgaggcgttttgccatgatttactgctctcatttgataaagtcagcgaaattgctgatacatcagatggatcatggatggactattataatggtgctgtcgaaatatggttaaaatccctgtccctacaaaaagacaaaagcattgatgttatagcggatagaatactttccgtacttaaaggtgatgtatattttaactttgatatttttgataagtataaaaaagatctgggatacaatgttattcgtgctttaagggaaagtcttcttaagacaggtgatgttaatgatgctgttgagttaagtctgtatatcagggatgttgatttcatcaggcaatgctttgagaaaagaaaactgaaccagccagaatacatcattaagtttgctgagttgctggttgatgaactgtgtactgaggaagccattcaggttctcaataaaatcaaagaagataaatcagttgatcaggcagggcttcgtgataaatggactgaggtgttggctctggcgttgattgaagaaggcgagattcagcaggcaaaaacaatttgtatagacggatttaagaacaggtgtgatgttattttttataatatctataatcgggtggagaaaaataatgactcactggatttgttctctggcatagcaaagaaaaaaggctttccgtttgttattcttttcttgtccgggacagatagttatggaaaacttgattctgaagtcatgaatgcgagtgaaaatgaaatcgcagagatgatgtctttattacgcggttcttttgttcgtactttatcgagtgagctttacaggcatggttatgcatgttctgcaactttgctccgtagagttctggcagaggacagtatcagtcgttctcagagtaaatactacacctatgcagcatctgatatgaaaaaaagcattgattacagtaaagatattacatggactgaaaaaatcccttctacagaagagtatttaaaatccctgtttattgagcacaaaagaaaatacgcactctgggaaataatgctggaaaaaatcgctggtttagcgatagagaaagattcagtatcatattcagcatag

SEQ ID NO: 29654 - DNA, 918 bp, Escherichia coli
atgaacttcagacgcctgaaatacttcgtaaaaattgtagatattggtagcctgactcaggctgctgaagtattgcatatcgcacaaccagcgctcagccagcaggttgccacactggaaggtgagttaaatcaacaacttttgattcgcacaaaacggggcgttacgccaacagacgccggaaaaattctctatacccatgcgcgggccattttacgtcagtgtgagcaggcccaactggcggtgcataacgttggtcaggcattatcggggcaagtctcgattggctttgcgccaggaaccgctgcgtcatctatcaccatgcccttattacaagcggttcgcgctgaattcccggagatcgttatctatcttcatgaaaatagcggtgcagtgcttaacgaaaaactgataaatcaccaactcgatatggcggtgatttatgagcattcccctgtggctggggtatccagtcaggctttgctgaaagaagatcttttcctggtaggaactcaagattgcccggggcaaagcgttgatgttaatgctattgcgcaaatgaacctctttctccccagtgattacagtgctgttagacttcgtgttgatgaggctttttccctacggcggctcacggcaaaagtcattggtgaaattgagtctattgccacgcttaccgcagcgattgccagcggcatgggcgttgcagtattacccgaatcggccgcgcgttcgttatgtggcgcagtaaatgggtggatgtcacgcattaccacgccttccatgagtctctctttgtcattaaatttacccgccagagcgaacttatcgccacaggcacaggcagtgaaagagttgttaatgtcagtgattagttctccagtgatggaaaaaaggcagtggcaattggtgagctaa

SEQ ID NO: 29655 - DNA, 282 bp, Escherichia coli; identical to SEQ ID NO: 27524

SEQ ID NO: 29656 - DNA, 711 bp, Escherichia coli; identical to SEQ ID NO: 11284

SEQ ID NO: 29657 - DNA, 189 bp, Escherichia coli
atgaaaattggaactgtggcaggcactaacgacagtacaacgacaatcgcaacaaatgatatggtgcaagagcatgttaccaacttcactaaagaactgtttgggtatattgcaaatggtataggtgatgatatatcaagtattgccaggacaatgctcggtgaggttgtggaaaaaatagatgattga

SEQ ID NO: 29658 - DNA, 189 bp, Escherichia coli
atggaagttaaaaccaaagaagactggctgtatcagttccgtcgttgttcatcccgggagacactggaaaaagtgattacccgcacacgttataaacttacccctgcggagctggaagccttctgcggtcgatcggctggcagaactgacgacaaactttacgcgtgtggagccagtctggtcacctga

SEQ ID NO: 29659 - DNA, 1050 bp, Escherichia coli
gtgcaggcccccgcgccttcacggcccatcgagcggggtatcgccggaccggggctgctggcccgcgtgctgacctcgaagtatgcagagcacaccccgctgtatcgccagtcagaaatatacggccggcaaggtgtggagctgagccgttcactgctgtcgggctgggtggatgcatgctgccggctgctgtctccgctggaagaggcgcttcaggactatgtgctgactgacggtaagctccatgctgatgacacgcctgtcccggtgctgttgccaggcaataagaaaacaaagaccgggcggttatggacctacgttcgtgatgaccgtaacgccgggtcaacgctggcgccggcggtgtggttcgcttacagcccggacagaaaaggcatccatccgcagacccatcttgcggggttcagtggtgtactgcaggcggatgcatacgccgggttcaacgagctgtaccgggatgaccggataacggaagccgcctgttgggctcatgcccgccgtaaaatccacgatgtgcacgttcgcaccccgtcagccctgacggaggaagcgctgaaacggatcggcgaactgtacgccatcgaggcagagataaggggaatgacggcggagcagcgccttgccgaacgtcagttgaaaacgaaaccgctgctgaaatccctggaaagctggctgcgtgaaaagatgaaaaccctgtcgcgacactcagaactggcgaaagcgttcgtatacgccctgaaccagtggccggcgctgacgtactatgcagatgatggctgggctgaggcggacaataacatcgctgaaaatgcgttgcggatggtcagtctgggccgcaaaaactacctgttcttcggttcggatcatggaggagagcggggagcgctgctgtacagcctgatcgggacgtgcaaactgaacggagtggagccagaaagctacctccgctatgtccttgacgtcatagccgactggccgataaaccgggtcggcgaactgctcccctggcgcgtagcactgccgactgaataa

SEQ ID NO: 29660 - DNA, 927 bp, Escherichia coli; identical to SEQ ID NO: 11456

SEQ ID NO: 29661 - DNA, 1980 bp, Escherichia coli
atgccacaacgacaccaccagggacataaacgcacaccgaaacagttggcgctcatcatcaaacgttgtttgccgatggtgctcactggcagcggcatgctttgcactaccgctaacgccgaagagtattatttcgaccccattatgctggaaaccacaaaaagtggtatgcaaacaaccgatctgtcgcgtttttcaaaaaaatatgcacaactaccaggaacttatcaggttgatatctggctgaataaaaagaaggtttcacagaaaaaaattacatttaccgccaatgcagagcaacttctgcagccacagtttacggtagaacaactacgtgagctgggtattaaggtggatgaaatcccggcgctggctgaaaaagatgacgatagcgtgatcaactcgcttgaacaaatcattcccggtacagctgctgaatttgatttcaatcatcagcaacttaatttgagcattccccaaattgcactgtaccgtgatgcaagaggttacgtctccccttctcgttgggacgatggtataccaacgctgtttaccaactactcgtttacaggttctgataaccgttaccgccagggcaatcgtagccaacgacagtacctgaatatgcaaaatggtgctaattttggcccctggcgattacgcaactattccacatggacacgcaacgatcagacatcaagctggaataccatcagtagttatttacaacgtgatatcaaggcgttgaagtctcagttgcttctgggagaaagcgccaccagcggcagtattttttccagctacacctttactggcgtgcaactcgcttccgacgataatatgttgccaaacagccagcgcggatttgccccaacggtacgcggtatcgcaaacagtagtgcaatcgtgactatcaggcaaaatggttatgtgatctatcaaagcaacgtgtcagcgggtgcctttgaaattaacgatctctacccctcttccaacagcggcgatttagaagtcacgattgaagaaagtgacggtacacaacgtcgctttatccagccttattcttcattacccatgatgcagcgacctgggcatctaaagtatagcgcgaccgctggacgctatcgcgctgatgcaaacagtgatagcaaggaacccgaatttgctgaagccacggcaatatatggtttgaataatacttttacgctgtatggcggcctgctcggttctgaagattattatgcgctggggatcggtatcggcggcacacttggcgcactgggcgcgttgtcgatggatatcaacagagctgacacccaattcgataaccagcactcttttcatggctatcaatggcgtacgcagtacatcaaagatatcccggaaaccaacaccaatatcgctgtcagctactatcgctataccaacgatggctattttagttttaatgaagccaatacccgcaattgggactataacagtcgccaaaaaagtgaaattcaattcaacatcagccagacaatatttgatggggtaagtctgtatgcctccggttcgcagcaagactattggggcaataacgataaaaacaggaatatctctgttggggtttccggccagcaatggggagttggttacagcctgaattatcaatacagccgctacactgatcaaaataatgaccgcgcactctctttgaatctcagtattccgttagaacgctggttaccgcgtagccgggtttcctatcagatgaccagccagaaagatcgcccaacccaacatgaaatgcgtcttgatggctcactgctggatgatggtcgcctgagctatagcctggaacaaagtctggatgacgataacaaccataacagtagcctgaacgccagttaccgttcaccttatggcaccttcagtgccggatacagctacggtaatgtggatttgcccctatatttccagacacctgttatcacttaa

SEQ ID NO: 29662 - DNA, 534 bp, Escherichia coli
atgcaaaccaaaagctacaccatcaaagcatttcaggacttcttacagatgcttcctgagcttggtatcgtcaatgatgctacagcccgcaatctccgtgactcttccctgcgccttcttactgttcttgggtcggatttcaccgatgccgatatccgtgattatagcgttgccaacttagcaagttcgtacgcagactcagcagaaagcaaaccctctgaatcatctttgcaggcatacaaaagccggatgcaaagtgctattgataaatttatctcctaccagaatggtgagattaatgtgtcagttggtgatgtaaataaaaaaaaggagcgtaaaaagatggcacctaagaagaaggcggtagctgacgtacaggttggtgtaaaaacatttgaactgccgattccattgcgcggagatcttatcgtcaccattggcaacctgcctcgcgacctgacaaaagatgaagccaagcgtatcagtctgattgtggaatcttttgcgatgattgatggcggaacaaaagaataa

SEQ ID NO: 29663 - DNA, 549 bp, Escherichia coli
ttgccttattttaccggagcagaccgcgcagcgctggcaacccttacagctattggtcgcgctattatcgctaagggcagtataaaagatgtcctcaattaccttggtttgggagaaggctctgcattgcctgttggtgtaccaattccgtggccttctgcaacaccaccaggcggttggctaaaatgcaatggcgcaacttttgacaaagcgaaatatcctcagcttgcaaaggtataccctaccgggaaattacctgatttgcgtggcgtgtttattcgtggctgggatgatggacggggaattgataccagtcgtgctctactttcagagcagcaacctaaagttggtcagttctgggcaagaggaacaacatataccgtaagtcctggcagtatctatataaccgatgcgattttaataggacaatcaccatccagtgttgcggtaaataacgattccggcgcatcggaaaattacgttgaagtaacccctgttgataccagacctatcaacaatgcgtttaactatatcgtgagggctgcgtaa

SEQ ID NO: 29664 - DNA, 441 bp, Escherichia coli
atgaattacatatattccgcgactacaaactctttctatccgctggagatgaaagaggattacactcaagctgactcatggccagatgatgctgttgaagttgatgagcaagtgtatattgagttttccggattaccgccgaaaggaaaaatccgtatcgctggagaaaatggttttcctgcatggtctgaaattccaccaccaacacatgaggaacagattactgcagccgaacaggaaaagcagcaactgattaatcaggccaacgattatatgaacagtaaacaatggcctggtaaagcggctattggtcgtctgaaaggtgaggaactggcgcaatataatttgtggctggattatctggacgcactggaactggtcgatacttccggtgcgccagatattgaatggcctacgcctccggcagttcaggccagatga

SEQ ID NO: 29665 - DNA, 603 bp, Escherichia coli
atggaacaggctattttgggaaaagacggttacgctttaaatgatggggaaatcatcgtacataactatgatggcgaaacgcgggaatatatttctacatcaactgaatatctcgctgtcggcgtcggtattccggcatgctcttgtttggatgcaccaggtacacataaagctggttatgcaatctgtcgctctgtagatttaaattcatggaaatatgtgccagatcatcgcggtgaaatcgtctatagcaccgaaacaggagaatcgaaagaaatcacagctccgggtgattatcctgaaaatacaaccactatcgccccgttaacgccatacgatgaatgggatggtgagaaatgggtaacagatactgtggcacagcatagcgccgcagtaggcgcggcagaagcacagcgtcagtcactgattgatactgcaatggcttccattagtctgattcagctgaaattgcaggccggacggaatctgacgcaggcagaaaccgcccgacttaacgctgcgctggattacattgacgcggtgacggcaacagataccagcaccgcgccggatgtcatctggcctgaactgccggaggcgtag

SEQ ID NO: 29666 - DNA, 1404 bp, Escherichia coli
atgggggcagcaagtctttcggtaccgcaacagcaggtacagcttgatgctcccgggatgctggctgaaacggacgagtacatggccggaggtaaacgaccggcccgtgtttaccgggtggtgaacggtattgcggtactgccggtgaccggcacgctggtgcaccggctgggggggatgcggccattttccggaatgactggctatgacggcattgtcgcctgtcttcagcaggcaatggcagatagccaggtgcggggcatactgctggacattgacagtccgggcgggcaggccgccggcgcgtttgactgcgctgacatgatttaccgcctccggcagcagaagccggtctgggcactgtgtaatgacacggcctgttctgcagccatgctgctggcgtcggcctgctcccgacggctggttacccagacatcccgtatcggctccattggcgtgatgatgagccatgtcagctatgccggtcatctggcgcaggccggtgtggatatcacgctgatttactcaggagcgcacaaggtggatggcaatcagtttgaagcgttgccggcagaggttcgccaggacatgcagcagcggattgatgcggcgcgccggatgtttgccgaaaaagtggcgatgtataccggtctgtctgttgatgcggtcacgggaacagaggctgccgtttttgaaggtcagtccggcattgaggccgggctggcggatgaattaatcaatgcgtcggatgccatcagtgtgatggccacggcgctgaacagtaatgtcagaggaggcactatgccgcaattaactgcaacggaagccgccgtgcaggagaaccagcgagtgatggggatcctgacatgccaggaagcgaaaggacgtgaacagcttgccacgatgctggcagggcaacagggcatgagcgttgaacaggcccgggcgattctggccgcggcggcaccgcagcagccggtggcatccgcacagagtgaagccgatcgcattatggcgtgtgaagaagcgaacggtcgtgaacaactggcggcaacgctggcggcgatgccggagatgacggtggaaaaagcccgcccgatcctggctgcttcaccgcaggcgaatgccggaccatcactccgtgatcagatcatggcactggatgaggcaaaaggggctgaggcgcaggctgaacagctggctgcctgcccgggaatgactgtggagagcgcccgggctgtgctggctgcgggatcaggtaaggcagaaccggtctctgcatccacaaccgccctgtttgaacatttcatggcgaaccattcaccggctgcggtccaggggggcgtgtcacaggcgtcagaagacggtgatgcggacgtgaaaatgctcatggccatgccatga

SEQ ID NO: 29667 - DNA, 147 bp, Escherichia coli
atgcaacattacgtcgatctcttcttcgttctgtatatgaacgacattaccgttactcagaatgtttttcatcgcggtgaagaacatcgtatccctggtaattataagaaacataaccgactcctggtgcggacattaactttataa

SEQ ID NO: 29668 - DNA, 225 bp, Escherichia coli
atgcttaaacaagtaatagttcctaggaaaatagatttgaaatactgtttttgcatcccattaggtactaatacaagtaacccgacaactgtattaaaacctatgaatataggaagcaatgtcattaattgcattgcacctgcaattacttcacctttcatgccgaatattaataatgataattggttggcaaaaagtaaaaatggtattgctaaagccatgtaa

SEQ ID NO: 29669 - DNA, 612 bp, Escherichia coli
ttgccttattttaccggagcagaccgcgcagcgctggcaacccttacagctattggtcgcgctattatcgctaagggcagtataaaagatgtcctcaattaccttggtttgggggaaggctatgcactgcctgttggtgtgcctgttccatggcccaccgccacaccgccagcaggctggttaaagtgcgacgggcgcgcctttacaaaagaacaatatcctgttctggccagagtctacccgaccctccgtcttcccgatttgcgcggtgagtttatccgtggatgggacgacgggcgcaaagttgatacggggcgttcattgctaagtggtcaggctgcaacatttattcgtacagctttgcaggattattacggttacgatctgaatactaatgtcaaagtaggtatcgcttttgctactgctgattctgttataaccgttggaaacccagctaatcctaaagcaggaaataatagcgattatgttcctgcatcagcagataactctataacgggtattcaaaggacagcggaggataattttaccggggcatggatatcaatgcgcccccgcaatgttgcgtttaattacatcgtaagggccgcataa

SEQ ID NO: 29670 - DNA, 243 bp, Escherichia coli
atgaaagccagaaacactttatttgcagtattaatgttatccctgccagcgatttcagcagaacattcagaaatgaaaatgactgatatgtctacctcggcttcgtcacaggaatatatggctggcatgaaagacatgcatgacaaaatgatggctgccgtaaatgagtccgatcccgacaaggcttttgcgaaaggcatggttgaaccgccccgggtttcctggagagtattttatctgtga

SEQ ID NO: 29671 - DNA, 612 bp, Escherichia coli
ttgccttattttaccggagcagaccgcgcagcgctggcaacccttacagctattggtcgcgctattatcgctaagggcagtataaaagatgtcctcaattaccttggtttgggggaaggctctgcactgcctgttggtgtgcctgttccatggcccaccgccacaccgccagcaggctggttaaagtgcgacgggcgcgcctttacaaaagaacaatatcctgttctggccagagtctacccgaccctccgtcttcccgatttgcgcggtgagtttatccgtggatgggacgacgggcgcaaagttgatacggggcgttcattgctaagtggtcaggctgcaacatttattcgtacagctttgcaggattattacggttacgatctgaatactaatgtcaaagtaggtatcgcttttgctactgctgattctgttataaccgttggaaacccagctaatcctaaagcaggaaataatagcgattatgttcctgcatcagcagataactctataacgggtattcaaaggacagcggaggataattttaccggggcatggatatcaatgcgcccccgcaatgttgcgtttaattacatcgtaagggccgcataa

SEQ ID NO: 29672 - DNA, 291 bp, Escherichia coli
atggttattgtctggtataattgtaaagataaacgtatcagtagtattgtcggcgaatctattatattcttgaatatctatagaaggttcactattataaaaccatactttctccatctggtgactacgatcatttaccttccagtgaccatgttgcaggaaatagatgatatgcaggccaaaatcgttatctatttgcgaatcattatccagtttatcaaattcaactatctttgcacgatgtgttttatcaaccttgccatggtgttgatgactgttaactttatctga

SEQ ID NO: 29673 - DNA, 372 bp, Escherichia coli; identical to SEQ ID NO: 11381

SEQ ID NO: 29674 - DNA, 477 bp, Escherichia coli
atgtccgaaacctgtaaatccggtgcgtttaccgggcgtgatgttgccgtgttctatgccattgcttgtcccagcgcgaaaccggaagagggtggctacaagccgttaggtatgatgcgcggcaaaacgctttccgtagaatgggaatccgcagacgctaccgctgataaatccgccgactataccaaagagtcgctggttacttataaatcagtgagcttctctggtgatggtgtttcacgtagcgatgatacatacaaccagaaagcactaaaacggcatgtaatgtcgccgggcactgctaccggaaatcaaccatatgtgtggctgaaaattgtcagtgccaccgatgtaaccgagggggcattcctttgcacctccttcaaagaagaggctccgtatgatgatgtgacgacctggtctatcgagtgcgaaagcgctggccaggtaactgtaaccgatccggttgctgcgtaa

SEQ ID NO: 29675 - DNA, 543 bp, Escherichia coli
atggctaaggctaaaggcattaagttgcctcacttcaagatcccgctttttgagcataccactgttttcttttgcccgacccgcgagatgttctatgaattttgcgaaaaggcaggaattccgattgaacctgatttcgagttggctggaggattaacgcttacttgcactggcgagaatggtggtaacttctacgtgatcgcagtattcaacaatgagttgggaacgctggtccatgaatgcgcccacactacattccacgttttaagtgatgtaggcgtcgtggctaccacggatcctacccatccggcgaatgagacttacgcttacatggtagaccgtatcttcgatgcgtttttccctatcatagcagaatcaaacgaagcacaggttgcagcaatgcaggcggcagaagtcgtcgatcaggcgctggaacaggcagaacagccgaaggaagaggaaaaacccgcgaagaaaggcaaacgtaagcccaaagcaaaagaagcgtatgtgccgcgcgtaatgagctttaaacgaggctga

SEQ ID NO: 29676 - DNA, 183 bp, Escherichia coli
atgattgaagatggtatatacgccgtgaacctcattgatgaaatgttttaccgcgtggagggtaatgatattcgtatcagtatcgatggtggcgagtggaaagagccattcatggatatgacgcgggaaataattgaaatcatgctttataacggcgacgtggtgaaggttagcgacctgtga

SEQ ID NO: 29677 - DNA, 225 bp, Escherichia coli
atgggaaatagcgaccatcaatatgacggcgtttatcagtcattggtgtcacgcgcttattatcgccttgaaggtgaacacgtaatgatgcgatcacgccagtttgaaccgtggcatgaaacggttttacctgtgacagcgaaagaagttatcacgatgtttaatcacggacattggagcaagattggcgatattaagttcaggatgtttaaagagggcggttaa

SEQ ID NO: 29678 - DNA, 201 bp, Escherichia coli
atgattgaatgtcttatcattgctgtgtttctcctttatattgctggcgctatcctgatgtcttgttttatcaaatctaatgatctcgatcgtggtggtcttgagattcctttctggcctgtagcggtgtttatcgctttcttcgatgcaacgctagtgcagattaagcgagccattaaggagcgtaaaaatgggaaatag

SEQ ID NO: 29679 - DNA, 141 bp, Escherichia coli
atggatgacgaatacgttaacaattttattgttatgtttcttagtgaaaattggcgcatgtttgaacattattgttttgagcgcggggaaaatgctgaagaaatatatcaatatttaggcggggagaaagaggatgattga

SEQ ID NO: 29680 - DNA, 255 bp, Escherichia coli
atggttgtgatcagactatggcgcggagttagtaggcttgatggcacatacagccgtgtaattgaggttgttaacaatagtcggttttatgaactggaatacagcgaaaaaagggagaatgaatatttgagcgaatcgacccctatgtggtgcaaagtggctggcctttcttcacttatgcgttgcgggttttatacagattataacacgctaacagatgccgaactggtggcaactctttacgaaggagaataa

SEQ ID NO: 29681 - DNA, 228 bp, Escherichia coli
atgaaagttaaattcttgcacaatcacggctacccatcattaaaacgcgtggtaggggaaacggtagacgttgttcattctgatgatgtgacctgcgtcattttgggtaaagaccttatcgctcacggtgctgatgattactacattaacccggcgtggtcatatacgtttagcctgggcgacttcgtaggcgataaggggcgcggcttgcaagtagtcgagggttaa

SEQ ID NO: 29682 - DNA, 213 bp, Escherichia coli
atgaaaagtaaccgtaaacgccttgtaagggcatatgacaaagcattaatgacttttgatgatctacgacacaataagcgccgccgccgtaaatgggcgcgtatgcttgttagtgaatggcatgatgaggattttttccttgaagccaggcacatgacgcaggatgtagcggacgcattagctgacgagaacgtttattacatgatgtggtga

SEQ ID NO: 29683 - DNA, 270 bp, Escherichia coli
atgaagcctaaattaaaagaacatctatttgcaaagctggtcaatgacctgacattaacggcgcgtgtgtgcagtgatacgcagcaattgatggcgtggatagtaagggatttaagaaaatacattgagccaggcggaccaggcgatgaaatgacgatggacaaggccatcaaacgccgttcggctgaatggtcagtgagtaataccggattaaccggatatattgaaggctataacgactgtttacaggatcatagcgatggcaagtaa

SEQ ID NO: 29684 - DNA, 621 bp, Escherichia coli
atgaacaatatcaaaacggcttattcactcggcagcgaaggcatgttaattactcgctacacagaggacgcgagctttcacgaagtggtaactaaggattatcacgaagttttaaaagatatggaagcaggagtgtatgacagtgacttaaatctggcgctacagattgtcgatattatgatgaatgcatcaatccgcgattacgtgtctttaagcatggaagaaaaaacatcggtagcgcgttatgtgttctgcctcactttcgtaagacgcatggaggaggaattcggacgcgcaccagtgccggaagatgttgatccgctcgcgttcggaagtgctgttattttcccgttgaacaaggatctgcttggcagtgtttcactgcattctatgcgcggcctgatgaaaaaggtctttgaggttaagatgttgcagaaatttattgaggaaggacacgaagaagtgaacgttaaggcgtttattccggtgctttacggaaaatttgttggcgatgatatgcgcgctaatgaattcggcgtacaggcggctatagctacgcttaacgaagcaatgaaaagtgcacagcctattcatgaacaggaaaaacgtgtactgcattaa

SEQ ID NO: 29685 - DNA, 273 bp, Escherichia coli
atggttacttggaatgcaaaagatggcgatcttgttgttttgccagaatatcgtagcgaccctggtctggttgtgctgaacaagacatataacgatcttgagcgcccgatcctggttaaatatctggatggaacgattattgagcctcgtttctttgacaagattgaactgaaggcccgcaatgttcgcgttaagccgttccgggattatgttgaagaccactggcggaaattgtttgccgggctgaatgggatgtacggcgtatggctataa

SEQ ID NO: 29686 - DNA, 225 bp, Escherichia coli
atgatcgaagaaaaagatgttgataaagagctgcctgactcatctaatgactatgtcacttttaacggcggcctgtatgagttcgaaacgtctgccgggtggcacgataaatggcctatgccaacgcgcaaggaattaagcgaacgtaaaacatttggcgaagatgccgaacgcctggccaataacaaatggcttgataagttcattgcggaggctgataaatga

SEQ ID NO: 29687 - DNA, 246 bp, Escherichia coli
atgtattacgtgcgcaaggcttttgatattcgcctgaataacaatgatccggcgcaaaaactcatcttaattgcactggcaacaaaggctggatgcaacggcaaaagcgaagtaacgccagaagagatcgcggaaatgtgcgaaatttcgttacgcgacactatctctgcactgcatcaactgaaaagaagcggcccaatcagccagctgccaggtttcttctgtgtttatcagttaatgttttag

SEQ ID NO: 29688 - DNA, 888 bp, Escherichia coli
atgcgcaagttaacacacgaagaacaaattgcggctattgcgaaaattaatcctgatgttgaagtgctgggagaaattaccggaaatcataaaaaagtgttatgccgttgcaaggtttgtgatcatgagtggtcggctacaccttgcaacctaaaacacgggcgcggttgcccgaaatgcgctgggaagatgaagttatcgcacgaagaacatattgccgctatcgcgaaagttaatcctgatattgaagtgttgggtgaaattattaatgacaaaacaaaagtattatgccgctgcaatatctgtagtcatgagtggtcggctacaccttgcaacctaaaacacgggcgcggttgcccgaaatgcggaatattaaaaggcgcacaaggaaggacattaacacacgaagaacacatcacagatatagccaaagttaacacttatgttgaagtattgggaaaaattaagaaccatagagataaagtcccgtgccgctgcaagatctgtagtcatgagtggtctgccaggccttacaaccttaaaagcgggtacggctgtccaaaatgcgcgaaatacggtttccttcgtcatgagtatggcaaactttacatcatggttgatgatctggaagtgcctacacaaatgaaaattggggtaagtgttcaggaaaataaacgaagaaacgagatattaaaaagcgcacataaagcaggcgttagaattcctaatttgcatatcgtgaaaacgttagaagggccaaccgaaaatatacatgaactagaaaacacgatgcataaggcttttagcaattataaaattaactttcctgtaaaatttgatggtagcaatgagttttttattacaggccggaagtattcgacatggtag

SEQ ID NO: 29689 - DNA, 528 bp, Escherichia coli
atgaaaaccatttataaaacacaaatagcgaaatttttacaggatgccactgttgctggtgaagcaacaattattaaatctattccaggtcctgaaatcgagatcgttaatagtttgcgtgatatggtttctgacggcgctattattcctgtggaaatgggagggccgcgattatcatattgcttgaagtcagtgcgcgaaatggcaataaaaaaaatcatgcctttatttctgaatagtagcgattatttttctgctgaggatgttaaaaaagaattaaaactcgaaataaaacagaggaaaatttgtcgggttttaaagatgttaggcagtgaaaatttattaacagttaataaatttgatgggaaatacttttttagatcagctcgcttctatggttgttcgagtcctatcgtatttgaatttaacaaccgcctgaatgaataccggaaaaataacggcctgctgccggataaaccagtatttgagatcgaaaaacttaacggtgaaacggggttggaattatga

SEQ ID NO: 29690 - DNA, 279 bp, Escherichia coli; identical to SEQ ID NO: 4619

SEQ ID NO: 29691 - DNA, 1044 bp, Escherichia coli; identical to SEQ ID NO: 29075

SEQ ID NO: 29692 - DNA, 945 bp, Escherichia coli; identical to SEQ ID NO: 13664

SEQ ID NO: 29693 - DNA, 207 bp, Escherichia coli; identical to SEQ ID NO: 7169

SEQ ID NO: 29694 - DNA, 1401 bp, Escherichia coli
atgaacctaaagctcaaaagatgcgaatattggatggcggcacaaaagcagatgaaacgggttgtgccgcttcttctggttattatgcctgcatgttcaatcgcgggaatgcgctttaaccctgcttttctgtcgggtgatactgaagctgttgctgacttatcccgcttcgagaaagggatgacttatcttcctggtagctatgaagtcgaagtttgggtcaatgattcccctttactctctcgtactgtaacttttaaagcagacgatgcgaatcaactgattccctgcctttcacttgctgacttattaagccttggaattaacaaaaatgcgctgccagagcaggctttggcttcatctgaaaatagttgccttgatttgcgtatctggtttcctgatgtgcattacatgccggagctggatgcacagagacttaaactgacctttccgcaggcgataataaaacgtgacgcccgcggatatattccaccagaacagtgggataacggtattacagcttttttgctgaattatgacttttctggtaataacgatcgtggtgattactcttcaaataactattatttaaatcttcgcgctgggatcaatattggtgcatggcgttttcgcgattattcaacctggagtcgtgggagtaattcagcaggtaaactggagcatatcagtagtacgttgcagcgcgttattattcctttcagaagtgaattaacgctaggagatacatggtcatcatcagatgttttcgacagtgttagtattcggggcataaaactggaatctgacgaaaatatgttgcccgatagtcaaagtggtttcgctcccacggtgcgcggaattgcgaaaagtcgcgctcaggtaacaatcaaacagaatggttatgtcatttatcaaacctatatgccgccgggaccgtttgagattagcgatcttaacccgacatcatctgcgggagatctggaagttaccatcaaagagtctgataattcagaaactgtctataccgtaccttatgccgctgtccccatcctgcaacgagaaggtcattcaaaatattctactacggttggccaatatcgaagcaatagctataaccagaaaagtccttatatatttcagggggaattaatttggggtttaccctgggatattacggcttatggtggggcacaattctctgaggattaccgggcgttggcgctcggccttggcctgaatctgggagtatttggtgcaacatcgtttgatgttactcaggctaacagttcgcttgtggatgggagcaaacatcaagggcaatcttatcgttttctttattccaaatcgttagttcagacaggaacagcattccatattattggctatcgttattcaacctag

SEQ ID NO: 29695 - DNA, 342 bp, Escherichia coli; identical to SEQ ID NO: 9277

SEQ ID NO: 29696 - DNA, 1257 bp, Escherichia coli; identical to SEQ ID NO: 13723

SEQ ID NO: 29697 - DNA, 987 bp, Escherichia coli; identical to SEQ ID NO: 6009

SEQ ID NO: 29698 - DNA, 168 bp, Escherichia coli
atgttccaggaattgccagtgaaattttgcgcgggcgcgacgttcatcaccggcttcaatggcagtggctacagcgactgcaccttcttcctttattgcctgttcgtccggaatggcggcgcaaataaagactttactcattttgttttaacctcattacagatttaa

SEQ ID NO: 29699 - DNA, 210 bp, Escherichia coli; identical to SEQ ID NO: 22985

SEQ ID NO: 29700 - DNA, 456 bp, Escherichia coli; identical to SEQ ID NO: 12502

SEQ ID NO: 29701 - DNA, 267 bp, Escherichia coli; identical to SEQ ID NO: 2987

SEQ ID NO: 29702 - DNA, 567 bp, Escherichia coli
atgagttggttaaaagaattatcatttgttgacaccactggcgctaagaaaaatcattctttctggaaagtcagcgacccttctgattttcttgttggtgctaatgctgcttttgaattgcttaacttttatcaacgttatcctgaaatgaaacacagtccactcctgtacagaataacaaacgatatgaataggtctggtttattatcaagtgagtcagcgaaaggcttttttagcaaaattacgccacacatatcattcgatgcagcaaacgaaattgattatctatccacgaaacctcaagaacaattatctgtaccacctgagaaaaaagaaagacgaattgccagcattgaaaatatatcgaaagagcttcgcacaacaacgttgaggctgctgaactttcttacgctacttaattggatagatgatcaaacattgattccatcaaccgatgcgttggataacagagtccttcgtctaaacaaaaaatcgcaatttggttttgtgttcaccaaaaaaggtgaagatttaatcaaaagaaaatatagattattgaatgattaa

SEQ ID NO: 29703 - DNA, 279 bp, Escherichia coli
atgagcgaaaagaaaacaacttattgccaagtggcattgtctgataaggccaatgaaaaacttggaaaattccaaataaaactcaaagagaaaaaaatcaagatgtctaaggctgaagttatcaatgccattctggagacgatgactatggctgaatttgacaaagtcacatctgccgttggggtttccgctaagacgcgtgagaaaatcatgcgcatctatgaaaactccaatatgacaaaaaaagatctagaggaaatactgagcaggttgccgtaa

SEQ ID NO: 29704 - DNA, 351 bp, Escherichia coli
atgaccagcaaagataacacaccactaaaagtcacccctgaacacattgaacaactcattcaaagtgaacattatttcactgcatatgatgccagccacggggataacttcatctctgtttacaattcaaaaacagatatcgacaaaggtcatgagtcgttaaaactcttaacgttctgcgttatggttctcaaaaatggatataccgtaacgggaaaatctgcgtgcgtaagaccagaaatcttcaactttgatgttggtcgcgagtacgctcgaaaagatgctatcgatcaaatctggcccctggaaggctatctcctgaagcaaaagtggcatgaggcaaagcaatga

SEQ ID NO: 29705 - DNA, 1056 bp, Escherichia coli
atgagcgaaaacggcaataaaaacatagcgatcgttgaagcattttcagaaacagataaaaagacaggcgaagttgttacgttggttcctaacactaataacactgttcagcctgttgctttgatgcgtctgggcctcttcgttccgacgctgaaatcgacatccagaggaagaaaggggcaaatggtctctatggatgcctctgctgaactcaaacagctgtctctggcaaaagccgaagggtacgaagacataaggatctctggccttcggcttgatatggataacgactttaaaacgtgggtgggaataatccacgcgtttgccaaacacaaggtcgttggcgatactgtcacgttgccgttcgttgagtttgtaaggctgtgtggcattccgaccgccaggtcatcagcgaagttacgcaaacgcctggacagttcgctaagccgtattgccacaaataccatctcgttccgtagcaaaggctctgatgagttttacgtaacgcatcttgtgcaaacggcaaaatatagtgtcaagcacgatacggtcgaactgaaagcagatcccaagattttcgaactctaccagttcgacaaaaaggttcttctgcaactccgggctataaacgaactctcaagaaaagaatccgctcaggcgctttatacttttattgaaagtttgccgcctgatccggcaccaatatcactagcccgtttacgcgccagacttaatctgacaagtcgcactattactcagaatgcgacggtaagaaaggctatggaacagctgcgagagataggatatctcgattacacggaagttaagcgcggaaactcggtctacttcgtcatccactataggcggccaaagttacgccaggcacaaatatcaacaaaaatcgataatgatgagacggaatatagcctcccagatgagaatcaagatgacattatcgacgttgtgcctgacgaaaaagaaggcaaaatggtcatgttgagtaaagaagaactggcgcttctcgaagagttgcgcaaggcaaagactcgcaaatag

SEQ ID NO: 29706 - DNA, 633 bp, Escherichia coli
atgagcacggtagcgaaagatctcacagaagatattctcaatgaaattattgctggtgcaaatacctcgcttgagcaacttcttgcgttagctctgagagccgaacgtcgagacagaaaacgtttttatgagcgattaccagggaagcgaccagatagatcggatgaagaaggttgcgatatagactacatggagccttcagagatttatcaacttggtaaagatgacggctggaacgcttatcacgatgctgtgatgaagttggatgaaaaagttaaacctctttctcgaccggtagatcacggtttccgcgataactgcgaatgctctagttgccagaccacggcccgtatttgttccgaattgacagataagtccagcctaatctacgaagttaatgtaggcggtaatacatgggtcgaatgcacaagagctgtatacgtaagagcaaaagacaagggtgaattaaccagagttgttacccatcacccaaataatgagcttaaagatcaccagattagagaactggtgaacgagttgcgggatattgcggttcagtaccacggagcgcagcaattgcgggagaagattgccagagcagtgaacaactcaattagatcagaaagtatgtag

SEQ ID NO: 29707 - DNA, 735 bp, Escherichia coli
atgaaagagttgaaaagtttagaaatccctgggactggttataaattctttatggacaacgcggagtgtgcacctaacgcgttggaaaaaatacaaagtcttatcaacagccttactgaagaagcgaaagaactgaaaagcgaggcgacaaaggacaatacagctaaaatccaatgcttaaatctcgtttcttattgtttatatcaagtgtccaaaacactgattaaaggcaatatctattacgacgatgaagacacctcgacacctgaagaaaaagatagcgatgaagaactctatgaagatatctctactagtgcgggtcacgctgccttcgatgcaatgggtaaatcgtcaggcatcagatcatttgttgaacagaacaattcgacaataatgattgagtactgtgaacaaacaagctccaaggctatacatgttcttcacgatgttgctgcaggggttcgctgtgaggctgaagcggtcagaaaagatgtatttggtgcagacagtaatactgtgaaagcgttcatcaacagtgctctgctaaattcttactcaaaccttatagtcaatgcggcactatgcgcaaattcaggtgaagaacacattgtcataactgaaaccaaacatgagcatcaacagtcaccaaccatagaagaggtaactgcattggctatcaaacaggcgagtgaaattagtgatgaaattctctctctgctaaacaaaactaggtaa

SEQ ID NO: 29708 - DNA, 459 bp, Escherichia coli
atgtggattaaaaacaaactttctttacagatggagaaattagaagacggttgggatttggtatgcagtaattttataacattttcaaatgaaaaagaatatattaatgctcgaatttcaccagaaataataacttatgatatgatgcttaaaagtaattttattggtaacctgacaggtatatataatagggaaaaactgggtatatttaaccaagtaaatgaaggacatgaagattatataatgtggttggatataatatcagtgaccaatagagcttattgtatacaagagtgtttagctaaatatcgtgtaaatgaacattctttatcctcaaataaaattaaggcaatagcctggcagtggaatatttatagaaaaaaccgtcgcctttcattcttacattcaattaaatatatcatttattatttttttcatgccttgttaaaacgagtctaa

SEQ ID NO: 29709 - DNA, 483 bp, Escherichia coli
  misc_feature (456)..(465): n is a, c, g, or t
ttggtaggccatattgaacttgcattcaaagccggtgatttcaagctcgggttggatctcatcagtctattctcatctcgtatattaacttatgcacaacagtttcagttcgatattggtatacgtgaacttcggaaaatgaagacgatcattgaaaaagcctttacaccgtctgatgtcgttaattattttgaggaaaaggtgataaaagttggaattgcggatgcatgggctgcattaggcagcaatctttgccttgaaatgttacgccgcatgattacttttgagaaagaattggagcagttctttaaagatgatatctggacagagacctctctacacactttgcctgcttttctgcaggttgagttggcctttatcgtagaacgtatcgaattcgaaaaagagattgaaggacagagattatccaaaccaaagtacgtccagcagttggcnnnnnnnnnntatgcgattttcacgtaa

SEQ ID NO: 29710 - DNA, 225 bp, Escherichia coli
gtgctgaccggacatgaaaatgaggtgggatcagcgcagccggataccgtgattctggatacgtctgaactggtcacggtcgtggcactggtgaagctgcatactgatgcacttcacgccacgcgggatgaggctgtggcatttgtgctgccgggaacggcgtttcgtgtctctgccggtgtggcagccgaaatgacagagcgcggcctggccagaatgcaataa

SEQ ID NO: 29711 - DNA, 237 bp, Escherichia coli; identical to SEQ ID NO: 24306

SEQ ID NO: 29712 - DNA, 393 bp, Escherichia coli; identical to SEQ ID NO: 15238

SEQ ID NO: 29713 - DNA, 1374 bp, Escherichia coli; identical to SEQ ID NO: 14042

SEQ ID NO: 29714 - DNA, 330 bp, Escherichia coli
atgtctagatatggtgattctgctcgcaatgtttttgagatttattatgagacaggcctaactttgcctctttatctttctcgtaccacttggtctcctacaactttagtcgtcattaagtctattggtggccttacctctggcaagttaagtggtatgggtcgttatccctactttaatgaggcctctgttatttgtgatatttatggccctcagcctgcttttaacgttgattgcccgggttgcggctcttatcagtggaagctaagccctctgcgcccttccgacttcccctctatagacgcctcgcgctctcagattgaaatctga

SEQ ID NO: 29715 - DNA, 1032 bp, Escherichia coli
atgattgattggatcactgctattgttccttgtttccatgaaacccctttagattctgggcgaatcactaaaatcaactcatccggtgagcttgaatgggagtctcttaccgctatttctgttgttggtagccatgattcatcattaagacttaaaacccattctgttaatgactttggtaacggtactcatatttattttgatgggaatccagttaaatttcttcaaggccataacctttttggaacggataatttaatttcattgctttgctgcgtattgaagaaaataacttctattcctgagcttggacttaatccaactgattttgatgttcgttcttgggaaaagggggatttcaagttaaatcgcgttgactgtactgttatgtttgatgttggcaatactgctaacgcactgtcttggattcgtcaggccgagatgaatgccactctttctcatcgtggtcgtggtcaggtcactaaaggatctacgttatactttggtaaatcgtcgcgccgtagctcagtgaaattctatgctaagggtgaggagttccaaaaacactctcacgcagctttcttacagcttcctgcgctcgttgactacgctaatcgtggtttgcgttgtgaggttgttttacgttcgcttgagcttaaccatcgcggtctttcctccggttcggcatgggatgacttgcttcctctgcaaatagtaaatgattttatagggcgcattaatatggctgacattaccgctataacttccgaagaaaccgaaaatttgccagcgtctctcaaggctgtttatgagttatggaagatggggcatgacattagagccatgtatccgcgcaggactttttatcgttatcgtaaaggtcttatggatgccttgggtattgatatcgccactgtccaatacaagcagcctgataatgtcgttcccttcatacgcatcatagaggctaagcctatgggtgttcctgattgggctattggcactgatttgtattttgatggagttatttaa

SEQ ID NO: 29716 - DNA, 276 bp, Escherichia coli
atgccatctaagcgcccgcgcaccacgcttcttcttactcatgagttgatgactgcaatccgttctctttctgatgcgtctggtatgactatgtctgcaattgtcgttcagtttcttgagccttctatcccggtcatgaaacaacttgagcaggttgtcttagaggctaaaaagggtgctgctggtaacggtcgggctattgttggttctattcttgagggtgccactaaaacccttgccgagcttaacagggaatttggagagttagatgattga

SEQ ID NO: 29717 - DNA, 522 bp, Escherichia coli
atgagaacattggacatcacctacggcataccggctgaagtatggccgcgaaactacgaacatgctgaacgcaccttgctcttctggcggagtgctcaatttcctgtaagagtcactctcgaagacggccaagtgttttgcatgtatgtctacgggctgttgagcgcaagaaataagctgaacctcacaccagatccgtttagcaacacaaatcgtgtaaggctccctcttgagcgcattagcacaattgagtcaggcatagaagaggttgacacttcattcacaggtcgactaacactgaacaatgaacagatggttaatcagccatcacgccgtgacttttttgcgatatgtcgcaaggcttatcaaaacaaccaatctataagggtctacatggcagacggtcgtgaaatagaaggggtatcaagaggcgttgatgcttgccaggtcactcttaagttagaagacggcagaaaaatacttgttttcttcgattgggttgaacgaattttaccgttttag

SEQ ID NO: 29718 - DNA, 258 bp, Escherichia coli
ttgcacctgagcgttctgctgtggtgcactccccagcatctgcatggtgcccgtggttttaacaaggatttcggtgacgtaacgggtaataccgttatcttcccagctacgggtgcgaagctggccttcaatgtagacctgcgcccccttacgcagatattcacctgccacttccgcgagcttgccgaacagcaccacgcggtgccattccgtctgctccttcatttcccccgtctgtttgtcgcgccaggtttctga

SEQ ID NO: 29719 - DNA, 213 bp, Escherichia coli
atgaatccgccgttcagtcacgggcaggatatccggcatatcctgcgggctttttccctgttgcgtccgggtggtgtgctggttgccgtctgtctgaacgggccgcgccagcaggagaagctgttaccgttttctgatgtccgcgaggtgctgccgtgcggcacatttgcttatacccgtgttccgacgatgattattcgtctgcgtgcctga

SEQ ID NO: 29720 - DNA, 297 bp, Escherichia coli
gtgctgtatctgaataaccagaatcagctgattgccggtgaaaccctcttcaccggcaccatcaaccgcacggaagtccatccccgggaagtgattaaacgcgccctgtatcacaatgccgcagccgtggtgctggcgcacaatcacccgtcaggtgaagtcacacccagtaaggctgaccgccttattacggaacgtctggtacaggcactggccctggtggatatccgggtgccggaccatctgataatcggtggcagccaggttttctcctttgccgaacatggtctgctttaa

SEQ ID NO: 29721 - DNA, 213 bp, Escherichia coli
atgcagctccgcctgccaggtatcactgtccagctcttcgcccgtgtattcagcgccggtgagataaacggcaactgccggaaaatccgcctcatcaaaaacagcggggcgaccatcaaaaaacgtcgccccggtgtcatgcttctccagtgcatccagtacggctgcacggagttctgtatgtttcatcgctttattaccatcctcagttga

SEQ ID NO: 29722 - DNA, 129 bp, Escherichia coli
atgctgactgaaatgccgttaaccaccgcagagatgactggtcacaacaggattttgcgcacgtctggcagtttccatcaggaacgccgcttcaaagcgcgagctggcgggaaaaagcgcgtcagatag

SEQ ID NO: 29723 - DNA, 468 bp, Escherichia coli
atgaggaaagtaaaattagacaatgatgatttaattcagtatctgaacatcattaaagcattaaaaaaatatccaccgatgtctgaatacagaggtgaatatcgcagattaagaaccaatagctcatccttaattgaagcaaagaaatttaaatcggctcacactgttctccttagattagaccgaaagaaaaaatcgctgctcgataaatttattgaagaacttaatcctattagccatgcttcggctcttgcatccaagagccttgagaaggttcaggaatccatgctctacagaaaaactctaatagaaaaaacacctgatgaactcttcgctcttgtcatcaaacagcgtacagaagctgctcttgagttccaacgttctgttgaacagagtcttgagcaactttctaacatttcgtcagagttcgaaccatcaagccagaagcgcaagaaaatgtctctttaa

SEQ ID NO: 29724 - DNA, 405 bp, Escherichia coli
atgagtgaagctctcaaggcactgaacaatattcgtacacttcgcgcacatgctcgtgaaacagatctggcaactctggaagagatgctggaaaaactctctgttatcgttgatgagcgccgtgaggaagaacaagcaatactcaaggaacaagaacaacgtcaggctaagcttgaagccttccgcctgaaactgttagaagatggtattgatcctgcggaactactttcagcggttggttccactaagcctaaaaccaaatcgacacgcactccccgccctgctaaatataaatatacagatgataatggtaatgaacagacttggacaggtcagggccgtactcctaaagcaattgctgctgctattaacgcaggtaaaaaactcgaagactttgcgatctga

SEQ ID NO: 29725 - DNA, 474 bp, Escherichia coli
atgagcaaacacaggaaaaacaagtttgaaaaaaagttatatcgaactgtaaatacaactacttataatgtaccacacttgcatggtggtgaatatcgctgggatcggagtaagaataaaatagttaactctgagtttccgcactttttacctatgtcaggaaaaacaaaacgcgggcttgattatacgccattattcatgtttttactaagcaaaactggtgaaaaatgggatcaagtttatagtgaagcaattagacgactcgataagcctgatccaatcttctggctagttgctctacacgaaaaagaccgaagaaattttgttcggtgcggtgaatccagttattacaatggactgtatgtggatgaaaatggttacttgaaaaaggtttccccagatttaaaggcatcagacatcccggtattatgtaattgctgtacttacactctaaacgggaaaaatattaaatga

SEQ ID NO: 29726 - DNA, 123 bp, Escherichia coli
atgttagatgtacaactgaatgctgaagagattgcatgttatttaatggtccgatctggcaggctattggttgatgcacctgaaatcgaccttaaatatgaaacccccaagtctgatgaataa

SEQ ID NO: 29727 - DNA, 375 bp, Escherichia coli
atgagaccagtaaaagtcaccagcaaaaaaataagagaattagcacagaaagctcaagagatacttgcagccattgatggtggtgcaagtgaagaagatgcttttttaaaggaaatgatagatcaatggaacagtcaggtagtttgtccatatgagttctcagattttagagatttttcctcttggacaaatgcaaatgaatttacccgaatagcttttaatttggaaaagttctacgcggatttcatttgggaagaactggttcaaacgataaactgtgtatgtgatccaaaatcaaaagaatcggaacaaaaatttgctctttcgttgcttgaaaagaattttcatggaaatccatcagatcttatattctga

SEQ ID NO: 29728 - DNA, 618 bp, Escherichia coli
atggcggtgacttcactgttatccttcacattatctgccggaatggtcgctttatcgccattgctgtccgggatcagcgtcgggtcactggatgtccagccgttatcccctttctccagcgtcacggtgtgcttaccacctttttcatcttcaaaggtgacatccacagtatcgcctttattggcatcacccggcagatcaacagaaacagaaccatcatcctctgcttttaataccggtgccgacggcgccactgtatccactgcgaagtctgccggctgcccctggccactggtgttgcctgccgggtctgtgatttccgcagttacagaatactggccatctgccgtcactttatctgcaggaatggtcacatctgctttacctgcagtcacttcatctgcggtcagcgtgtgctccaccgtgtccgtcgtgccgtccggtttagtgaccgtcagcgtcagggtatcaccggcagcactgcctttcggtaccgtgacttcggtctgcacaccgtccttcagctcttcggcattcacgccgtctgctgcttccggaatggtcactaccggtgttgcatccaccacaccgtcaccgtcagtatcgcccgggatctga

SEQ ID NO: 29729 - DNA, 618 bp, Escherichia coli
atggcggtgacttcactgttatccttcacattatctgccggaatggtcgctttatcgccattgctgtccgggatcagcgtcgggtcactggatgtccagccgttatcccctttctccagcgtcacggtgtgcttaccacctttttcatcttcaaaggtgacatccacagtatcgcctttattggcatcacccggcagatcaacagaaacagaaccatcatcctctgcttttaataccggtgccgacggcgccactgtatccactgcgaagtctgccggctgcccctggccactggtgttgcctgccgggtctgtgatttccgcagttacagaatactggccatctgccgtcactttatccgccggaatggtcacatctgctttacctgcagtcacttcatctgcggtcagcgtgtgctccactgtgtccgtcgtgccgtccggtttagtgaccgtcagcgtcagggtatcaccggcagcactgcctttcggtaccgtgacttcggtctgcacaccgtccttcagctcttcggcattcacgccgtctgctgcttccggaatggtcactaccggtgttgcatccaccacaccgtcaccgtcagtatcgcccgggatctga

SEQ ID NO: 29730 - DNA, 369 bp, Escherichia coli
atgatgtatcgcatcagaaattggttggtagcgacgttgctgctgctgtgcgcgcaggtgggtgccgcgacgctctctgatattcaggtttctaacggcaaccaacaggcgcggataacgttgagttttattggcgatcctgattatgcgtttagccatcaaagcaaacgcaccgtggcgctcgatatcaaacaaacgggcgtgattcagggactgccgttgttgttcagcggcaataatctggtgaaggcgattcgctctggaacgcctaaagatgcacaaacgctacggctggtggtcgatcttaccgaaaatggtaaaaccgaagcggcagaatggcagcaattacactgtcgtctttacgattaa

SEQ ID NO: 29731 - DNA, 1254 bp, Escherichia coli; identical to SEQ ID NO: 64

SEQ ID NO: 29732 - DNA, 315 bp, Escherichia coli; identical to SEQ ID NO: 28038

SEQ ID NO: 29733 - DNA, 501 bp, Escherichia coli; identical to SEQ ID NO: 11817

SEQ ID NO: 29734 - DNA, 720 bp, Escherichia coli; identical to SEQ ID NO: 4899

SEQ ID NO: 29735 - DNA, 582 bp, Escherichia coli
atggttgtgaataaaacaacagcagtactgtatcttattgcactgtcgctgagtggtttcatccatactttcctgcgggctgaagagcggggtatatacgatgacgtctttactgcagatgagttgcatcattaccggataaatgaacggggggggcgcaccggaagcctggccgtcagtggtgcactgctgtcctccccctgcacgctggtgagtaatgaggtgccgttaagcctccggccggagaatcactctgcgtcagccggagcacctctgatgctgaggctggcaggatgtggggacggtggtgcacttcagcccggaaaacggggcgttgcgatgacagtctccggctcactggtaaccggccccggaaccggaagtgctttacttcctgaccgtaagctatccggctgtgaccatcttgttatacacgatggtgatacctttttactgtgccggcctgaccggcggcaggaggagatgctggccgcctggaggaaaagggcgacacaggagggtgagtattctgatgccaggagcaatccggccatgctgcgtctgagcataaaatatgagtaa

SEQ ID NO: 29736 - DNA, 537 bp, Escherichia coli; identical to SEQ ID NO: 29004

SEQ ID NO: 29737 - DNA, 285 bp, Escherichia coli
atggaacaaaaaacattatcagctgaaccccgcaggttattttcaaatgagtttaaacttcaaatggttaaactggctttacaaccaaggggttctgttgcccgtattgcccgggagcatgatatcaatgataatcttctgttcaaatggctcaggctctcgctgatcaaagggcgtatatcacggcgtcttccggtaacgaactcttctggcattggcgttgaattattacctgtggagatgacgctggatgagcggccttaccccgttttttacgcgaggtaa

SEQ ID NO: 29738 - DNA, 369 bp, Escherichia coli
atgacttttactattacacaagacagacaattggcttcattgaccgttactaaagaagaaaaagaaatcttatttgctgtaaaatctaaagctgggggaggactctttatacgcgttcgttatggtagcgacaataaaagctggatttatcgttatcgaatagctcaaaagccagctaaattaacactaggtagttaccctgccatgggattagctcaagctcgtaaagctcatgcggatgcaattgaattagtaagaaaaggtatagatcctcgtcatattagaaaaaatgaaaaacaaaaaaatgaacaaatgattatttactctgaattatggaaagattggatagaattcagaaagacaccttga

SEQ ID NO: 29739 - DNA, 405 bp, Escherichia coli
  misc_feature (335)..(344): n is a, c, g, or t
atgcaaatgagaaactttattgattattcattgttaaaaaatcttgatctcgttatcaagcaaaaagggttttacagagcggcccgaattcttggtatttcacaatcggcaatatctcagaaaataaaaaaacttgaaaatcagtgcggtgttcagttaattactcgtacttcacctccacatttaactgattatggtcagaaattagcaggactgctatatcatgttaatatattcgagcatgatgtattgaaccttgatgcaaataaaagcattgtgaccattccgatcgcagtgaattctgacacgctggcaacatggctaattcctgcctnnnnnnnnnnttcctgccttgtgtgtttttttaaaaaatccatctataagactggatataaaagtggatga

SEQ ID NO: 29740 - DNA, 2067 bp, Escherichia coli
atgttcaatctcctgcaatcgttggcatatgaaccggaaacttttgaacgttgcgtcaggctgctaattcatgcggtagattatgaggttgaaaacaacaaccatgactctgtacggggtaagatcaagaggctttatcagccatacctgtctggtacacaggcctctttagaccagcgccttgcaattttgaaacaatgcctttcatcagacgtcgttggacgcaaagaattgggccttatgatgctttcaacagccctcagcggcccaccttggacggggttcggggctaatgagtttggtgcacgaccaagagattatggttttcaaccaacctatgaagaacttgttgaatggcgtagtgcattcattgaagttgcggttaatgcaggaacttgcggaattcctgcggttgaggaaactgcgcggcagcttttagcgagggcttttcgatcaatatggcgtcaagaggctgccaggacaatgctcattgatgctgctcacaaattacattcttactatccgtgggttgaaggatggaaggccgttcgttcaacgatatattttgattacaccaagcgcagagatatcgaagatttagagccgttgccaagcgatcttgtcgctctggagagtgagttagaaccacatgacttggttccggaaataatggcttatgtattaagtaacggacgcgattatttggcatttagtgccgatacttctcctgatgaacctaataagttcgctaatcttaggacataccttgactctaaagcttatcaattggggcaggatttcgcgtcatctcagcatacgcttgatgagttggggcctaatctgttcttggtgggggggatgccctaccgtgttaaatttggtcaaggtttagcaagaggggcacttgacctacgggagtgttggcaacaactcgttgcttatttggatatacaaaccggttctcaaaaggattttgcagttatccgtggctttatcgacgagacagatactattgattcaatattagcccaagaatttctcgatcaatgtgtgcgtcatcctgagttgcgatacggaattgtttatttacatccttggcgagaattcactgaaactgacttggatcgctgtttggctcttttagatgaccccgacatcatgccgtcaatgtatggacaaattctttggggagaccaatacgctcatttgccagagccgcgcattgttgatcttgctcacaggcttttaagtatgccaaatggcgatgatgttattttggaagctttaagcatgaagttaagtgaccagaaagacggttcgagtactcttggctttgatctgcttcaaataggattgaaagctgcaatccagaggttcaaaagagagcacaatgattccgctgggggaatggattacggcatggaatgtgttgttggtgccatattgcgtctcgaaggcaacgaggcggggaagttagagtggttaaatacgatctttgctgttgttgatgaacagtatggctgtattcattcgtttgaagacactataaagatgactgcggcatcaatgccagaagcgttcctctctcgtatttttgaagggacagaagaacagcaacaacgacgtattcattttatccattatgatgatgtgacagagtcccctatcgcgaatatcgacgtgaatgtattgatcgaatggtgtcttactcgaaacgatattaatgtatgggcacctctcgcaaagggtatccgcctttggtctgtgggggatgatttggataaggtcacaatgcaggtttcagcgattcgcttccttgaagcagctcctgtgccaaaggccgtactggaagaattcgcttatcgcgtaacaccgacatcttggtggggaagtcgagttaacgtaatgcaacccagagcaaatactattagtagattaatagagcatgagcgtacagatattgctgcggcagctagaattgtttccgagaaattaaacgattggatagaacatgaaaagttgcaagagcagcaggaggatgagatgcgcgaacaacgcttcgaataa

SEQ ID NO: 29741 - DNA, 678 bp, Escherichia coli
atgctgacccaaaacggcgtcccgatgagccgttaccgtgccgggcgtctgatgaaatatctgaacctgagcagttgtcagcccggaaaacatcagtacaaaaatgctcgtcaggaacatacctgtctgccgaatctgcttgagcgccagttcgctgtgcccgagccagatagggtatggtgcggagatattacgtatatctgggcaggaaatcgctggtgctatctggcggtcgtcatggatctttttgcccgcagggttatcggctggagcctgtcagcgaatgccgatactgccctgataagcagtgccctgcggatggcgtatgaggtgcgtggtcagccgcgggacgtcatgttccatagcgaccagggaagtcaatatacaggactgaaatatcaacaacttctctggcgttacaggataaagcaaagtgtcagccgacggggaaactgctgggataacagtccaatggaacgcttcttccgcagtctgaaaacagaatgggtgccaaccgatggctacacaggcaaagacgtggcccggcagcaaatcagcagttatattctgaattattacaatagcgtcaggcctcaccattataacggagggctgacgccggaagagtcagagaacagataccatttttactgtaaaaccgtggccagtattacttga

SEQ ID NO: 29742 - DNA, 312 bp, Escherichia coli
atgaacaagaaaaccaaacgtactttcacccctgaattcaggctggaatgtgcacagctaattgttgataagggctactcatatcgacaagccagtgaagcgatgaatgtcggttctaccacgcttgagagttgggtgcgccagctcaggcgagagcgtcaggggattgcgccctctgccacacctattactccagaccagcaacgtatccgcgaactggaaaagcaggttcgccgcctggaggaacaaaatacgatattaaaaaaggctaccgcgctcttgatgtccgactcgctgaacggttcacgatag

SEQ ID NO: 29743 - DNA, 780 bp, Escherichia coli
atgatggaactgcaacatcaacgactgatggcgctcgccgggcagttgcaactggaaagccttataagcgcagcgcctgcgctgtcacaacaggcagtagaccaggaatggagttatatggacttcctggagcatctgcttcatgaagaaaaactggcacgtcatcaacgtaaacaggcgatgtatacccgaatggcagccttcccggcggtgaaaacgttcgaagagtatgacttcacattcgccaccggagcaccgcagaagcaactccagtcgttacgctcactcagcttcatagaacgtaatgaaaatatcgtattactggggccatcaggtgtggggaaaacccatctggcaatagcgatgggctatgaagcagtccgtgcaggtatcaaagttcgcttcacaacagcagcagatctgttacttcagttatctacggcacaacgtcagggccgttataaaacgacgcttcagcgtggagtaatggccccccgcctgctcatcattgatgaaataggctatctgccgttcagtcaggaagaagcaaagctgttcttccaggtcatcgctaaacgttacgaaaagagcgcaatgatcctgacatccaatctgccgttcgggcagtgggatcaaacgttcgccggtgatgcagcactgacctcagcgatgctggaccgtatcttacaccactcacatgtcgttcaaatcaaaggagaaagctatcgactcagacagaaacgaaaggccggggttatagcagaagctaatcctgagtaa

SEQ ID NO: 29744 - DNA, 240 bp, Escherichia coli; identical to SEQ ID NO: 11875

SEQ ID NO: 29745 - DNA, 132 bp, Escherichia coli; identical to SEQ ID NO: 4024

SEQ ID NO: 29746 - DNA, 237 bp, Escherichia coli
atgaacgctaataatctgtcatgcctgatttactgtcgttgttctcttctgctttttgctgcattagggttaacagtaacaaaccattcatttgctgctgaagaggctgagtttgattctgagtttttgcatttggataaagggataaatgctattgatatccgccgctttagtcatggtaaccctgtgcctgagggatttcgatattcaaccttaaagtcgataagtcaaaattaa

SEQ ID NO: 29747 - DNA, 402 bp, Escherichia coli; identical to SEQ ID NO: 5076

SEQ ID NO: 29748 - DNA, 1149 bp, Escherichia coli
gtgtctgacgagagcgacgacaaaacagaagcccccacacctcaccgactagaaaaagcgcgggaagaggggcaaatcccgcgttcccgtgaactgacctcactgctgattttgctggtgggcgttagtgttatctggtttggcggtgtgtcgctggcccgtcgattgtcgggcatgctctccgctgggctgcattttgatcacagtattatcaatgacccgaatctgatcctcgggcagattattctgctgatcagagaagccatgctggcgctgctgccgctgattagcggcgtggtgctggtggcgctcatttctccggtcatgctgggagggctggtatttagcggcaaatccttgcagccgaagttttccaaactcaacccgctaccgggcattaaacggatgttctcggctcagactggcgcggagttgcttaaagcaattttgaaaaccatcctggttggcagcgtgacggggttttttctctggcatcactggccgcagatgatgcgcttgatggccgagtctccgattaccgccatgggtaatgcgatggatttggtagggctatgcgcactgctggtggtgcttggtgtcattccaatggtgggatttgacgtctttttccaaatattcagccacctgaaaaagctgcgtatgtcacggcaggatattcgtgatgagttcaaacaaagcgaaggtgaccctcatgttaaagggcggatccgtcagatgcagcgagctgctgcacggcgtcggatgatggccgatgtgccgaaagcggatgtcattgtcaataacccgacccactattcggtagcgttgcagtatgacgaaaacaaaatgagcgcaccgaaagtggtcgctaaaggtgcagggctggtcgcgctgcgcattcgtgaaattggcgctgaaaataacgtcccgacgcttgaagcgccgccgctggcgcgagcgctgtatcgacatgcggagattggtcaacaaatcccgggtcaactgtacgccgcggtggcggaagtgctggcctgggtctggcaactgaaacgctggcgtctggctggtggacagcgccctgtacaacctactcatcttccggtgccggaagccctggattttattaacgagaaaccgacccatgagtaa

SEQ ID NO: 29749 - DNA, 378 bp, Escherichia coli
gtgaaaattgagggtgaatggcgagcgttgctggtgactgaagatatggcggggttcatcagcattgctgactggtatgcccagcatgcagtatcgccttattctgacgaagtacggcaagccatgttgaaagcagtggcgctggcgtttaagaaaatgcatagcattaatcgtcagcatggctgttgttatgttcgccatatctatgtgaaaacagaaggtaatgcagaagctggttttcttgacctggagaaaagtcgtcgccgcttgcgtcgcgataaagcgattaatcatgacttccgccagctggaaaaatatctggagccaatccccaaagcggactgggagcaggtgaaagcgtattactacgccatgtaa

SEQ ID NO: 29750 - DNA, 204 bp, Escherichia coli
atgcaggagatgaaatacagcggcttaagcagtatcggcaggaccttttgcatttcagggaaggttttaccaacgaccatgaatattaagccaacgccacatgaaagaatgattaacaaactccaggtaagcacaagttgtaaaaagtttgttatttcgaaatattcgcctgccatccagacgataagcataagcaatatataa

SEQ ID NO: 29751 - DNA, 123 bp, Escherichia coli
atgaaatattttcagtttatttacattgaacttctcgagaatattagcagtattatctgtacttccatcatttattacaataatttctatattttgatagctctgattaaggcaagatactaa

SEQ ID NO: 29752 - DNA, 495 bp, Escherichia coli
atgggcttttattctaaggcaaaagctagcttttattctgagataaaaaacatatctatacagctgtatatgtccagaatacttggactcgcgatagagtttccttcaaaccatgaattattcgaaaaaattgaaaaggaaaaagtcacccttaaaataaatgaaataccggcaattactgatcggttaaaaaaaataacaaaagacgaagagaattactacaaagtaatttccactctagataatgacaaactgactagaggaaagtatgtttactattttgttagcgagtggttaatccgcataaaaaaatacatcaattcaaggatagatagtataaataatgaaagcgccttaaactctacctcttcagtagtgaatgaaaaaaaattatccaaacaacaatatgatcatactgacctgtcaatcgcaaggcttgttcctgcatgtatgaaagtaaaagaattggatgctttcttaaaaaggattaattaa

SEQ ID NO: 29753 - DNA, 708 bp, Escherichia coli
atggacatggagtcgcaaaaaatattgtttgcactttccactccgatggaaatacgcaatgaatgctgtttaccttcgcattcatcacccaaaatgtatttaggtacatgcttttttgacctttcttcctcatggggaattgatgaccgtgatgacctgctgcgcacaattcaccgaatgatcgataacggtcatgccgctcggttggcagggttttatcaccgctggtttcgttattcgccatgtgaatggcgtgactatcttgctgaactaaatgagcaaggtcaggcttatgcgcaatttgtcgccagcaccgccgaatgctgtggcgaagggggaatcaaagcctgggattatgtccggatgggttttttaagccgaatgggcgtacttaataactggttgagcgaagaagaaagtctatggatccagtcgcgcattcatctacgggctctacgttattatagtaactggcggcaatactttgccggttatacctttggtcggcaatattggcagtctcccgaagatgatcatctgcctttattacgcgaattcttagcgcgtaaagaatacgacgattccggcaatgatatgttttatcaattatttgccagtgatgatgcgtattaccctaccttgtcctggcaaccattggcttactattctgcatgcccggaaacgcttaaggatatgagcgacctatga

SEQ ID NO: 29754 - DNA, 336 bp, Escherichia coli; identical to SEQ ID NO: 11159

SEQ ID NO: 29755 - DNA, 219 bp, Escherichia coli
atgatcaatgttcttttcgcgttattttcaattttggcaggggggattttagctgagattgcttacatttttttaattattattgagtacgcaatggttggtagttttaactttgacttgacatcagcatggttgtactttaaggccgcgggagtagaaggaggtataatgggaataggaatttctctatttcgatattttggagttaaaggattttaa

SEQ ID NO: 29756 - DNA, 210 bp, Escherichia coli
atgtataaaattaccgccactattgaaaaggaaggtggcactcctactaactggacaagatattcaaaatctaaactaacgaaatcagaatgcgaaaaaatgctctcaggtaaaaaagaagcaggcgtttccagagagcagaaagtaaaactgataaattttaattgcgagaaacttcagtcctcgagaattgcattgtattcaaattaa

SEQ ID NO: 29757 - DNA, 234 bp, Escherichia coli; identical to SEQ ID NO: 20329

SEQ ID NO: 29758 - DNA, 177 bp, Escherichia coli; identical to SEQ ID NO: 27493

SEQ ID NO: 29759 - DNA, 213 bp, Escherichia coli
gtggaaggcaaacaggagcattatttcactacccgcctgactgattcgacgattgtcgatatgaaactgcatatgccgcattgccaggacccggcgaaacgcgagttcacccagttgctcgaagtttcactggcctaccgcaaaattgaatgggaacacgtcaaatctggcacctccggtgccgacgactggcgcgcaccgctggaagcataa

SEQ ID NO: 29760 - DNA, 1416 bp, Escherichia coli
gtggacgtggtctgctatgacgaactttcctcgttcgaaccggatgtcgaaaaagagggttcgccaaccctgcttggggataaacgtattgagggctctgtatggcccaaatccattcgcggctcgacgcctaaaatcaaaggcacctgccagatcgaaaaagcggccaacgagtcggcgcatttcatgcgtttttatgtgccctgcccacactgtggggaggagcagtatctgaaatttggcgatgaatccacgccttttggccttaaatgggagaaggacagccccgaaagcgttttctacctctgtgaacatcatggctgcgtgatccatcagtctgagcttgaccagagcaacgggcggtggatctgtgaaaacacggggatgtggacccgtgacggtctgacgtttttcagcgccgcggataatgaaattccgccgccgcgctccatcacgttccatatctggacagcgtacagtccgttcaccacctgggtacagatagtctatgactggctggatgcactgaaagatcccaacggcctgaaaacctttgtgaacaccacgctgggcgagacctgggaagaggccgtgggcgaaaaactcgatcaccaggtgctgatggataaggttgtgcgttacacggcggcggtgcctgcccgggtggtttatctgacggcgggcattgactcgcagcgaaaccgttttgagatgtatgtctggggatgggcaccgggagaggaagcttttctggtggataaaatcatcattatggggcgtcctgatgaggaagagacgctgttacgtgtggatgcggcgatcaacaaaaaataccgccatgcggatggcaccgaaatgaccatttcccgtgtctgctgggacaccggggggatcgatggtgaaatcgtctaccagaggtcaaaaaaacacggtgttttccgtgtgctgccggtaaaaggcgcgtctgtctatggcaagccggtgatcaccatgccgaaaacccgcaatcagcggggcgtttatctgtgtgaagtggggacggacaccgcaaaagaaattctctatgcccgtatgaaagccgagcccacgcctgcggatgaagccacgtcgtatgccatccgttttcctgatgatccggagattttttcgcagacagaggcgcagcaactggtcgcggaagagcttgtggagaagtgggaaaaaggaaagatgcgtctgctgtgggataacaaaaagcggcgtaacgaagcgctggactgcctggtgtatgcctacgcggcattacgtgtgtccgtgcaacgctggcagcttgatctggctgtactggcaaaatcccgggaagaagagacgacccggccaacccttaaagaactggcagcgaagctgtccggaggagtgaatggttacagtcgctga

SEQ ID NO: 29761 - DNA, 378 bp, Escherichia coli; identical to SEQ ID NO: 6536

SEQ ID NO: 29762 - DNA, 255 bp, Escherichia coli
atgacacagggctggcgggaggataaatgcccgtctgtccgcgccgggaaaagacagcacgccggtggcgctgaaaggggccgcgcttacgcgccgcccctttcattacgcggatgttctgctgtgtgcttctgtcttttcatgcctgtcatttgtctgttactgatgatgttgttgttcctgctactgctactgctactgctactgctactgctactgctactgctactgctcttctttttcctgccgctctga

SEQ ID NO: 29763 - DNA, 1386 bp, Escherichia coli
atggagattttactttctattagtttccggaaacaaaaggaatttgagccggcggtcctggctgcaaatattgatcgtggcgcgcaatcattcagtgcgctgacattatctgttttctggacactactcccaattactgtagaaatcagtatggctgtttattttctttatcagagtctgggttttacttattcacttattttctcaatttctgttataggtatgatttttcttgccttcagcatagcgatctttagtcgtcatatccataccgatataatgaatactcagaatggggtgtattcttatacgattgagcgacttgccatgccgttggatatccgaattaattcagctcatgcaaaagaaagagttcttcgccaggaaattcttaatcagtatgttaatacaattaagctgaccaataaaaaaatgggctttttactgtcactacaggcagtagctgtaggcgtattgcttgctatatccgtactggttctggttttttttaaaaaagcgtctcatattggaactggtgactttattatgattgtgggctatattagcatgctaacatttcagttgcgcacaatagccggagccagcattgacattcaacgccagattgtgtacctgaaaattcttctggaatataacagtatgcatcccgaaggggttatccctgatacagtaagctcccgcagcactgagcgtatttttgatgtgcgtaatcttggagcttttgctgacggcagactcctctttaataatgtgagcttcaggatccatgaaggtgaaatgtttgcactttctgcgccttcaggttttggtaaatccacaattctgcaatatttactcggtcttgataccccaactgagggcgatatttatttccgaggataccggattaacacagagttgagtgcgtctatcctggaggacgttgctgttgtgcctcaaaaagccgttctggtgcagggaactattcgtgataatattctgtatggaaccgatgacattcttcccgatgatgaactgttttgcatcctgaattcattggggttaattaaagaggactgcggagaacatttccttgctttcctagaccgggatattaatcctctgggtagtggtttgagtggtggagagatccagcgattatgcatagcccgcgccctagcccgtaagaaaaagattatcgtacttgatgaacccacggcctctattggcgaagaactcgcgataaagatcattacctatatccggcagcattgccctaccgttattattacaactcataatccacgaattctggagctcgccgatcatttttttgatggtatgtcaaagtcttgcgtcattgttggagaaggcagagaccaataa

SEQ ID NO: 29764 - DNA, 1449 bp, Escherichia coli; identical to SEQ ID NO: 11330

SEQ ID NO: 29765 - DNA, 657 bp, Escherichia coli
atgcttaccgcgctgtttgaagcacttgcaccacctgtttattttcttttgttcctgatgttctgtgctggattttccttatcaatttacctgccattcattccgtttattttctggatgacaggcatcgggaactggatagtcagcgtattaataggatgtaccgccgggccgctgtgggctgcaacacatctcgggacatcagaagacagaggaagtcgggcagcctacggttatatatacttaattgatagtatgataaggccgcccatcatggtctttggttttttctttgcttctgtagccatcatcgccgtaggcacaatactgaatgcattatttggcgctgccctggttaacgtacagttcaattcgctgaccggtattttcagtcttgctggtttcttgctgatatacgccagaatttgtacaaccactgtagctgccatatttgcccttcaggcctacctacctgatcatgttattaacttcctagggggacgtgatggagccaacacgcttggcagcatggcaaattctgttaaagaaatatttattggaggaagtcgcaatatccgacatactcctggaatgaaagcagatcgtcttaaagataatacaaaaggaagtgacgacaaggacggaataaaaggataa

SEQ ID NO: 29766 - DNA, 567 bp, Escherichia coli
atggccaataaaactgaaaagccaacacaaaagaaactccaggatgcttctaaaaaagggcaaattctaaaaagtagagacttaaccatctctgtaataatgcttgtgggtactttatatctcggatatgtttttgatgtgcatcacattatgtcgattcttgaatacatccttgatcataacgctaaaccagatatttgggactattttaaagctatgggggttggttggttgaaaacgaacattccttttttgctggtttgcatgttcacaacaatacttgtctcctggtttcaaagtaaaaagcaattagcaactgaagctgttaaatttaagcttgattcattgaatccagtaaatggcttaaagcgtatatttggcttaaaaaccgtaaaagaatctgttaaagcaattctttatattatttttttgcattggcgatcaaagtattttggagtaatcataaatcactgctttttaaaactcttgatggagatatcatatctttattatcagattggggagagatgctattccttctcatactgtattgtctcggcagtatga

SEQ ID NO: 29767 - DNA, 168 bp, Escherichia coli
atgataattgtcttaatttttgattttatcgctgaatattttttatttatgaaagatatgaaaatggataaacaagaagttaaaagagaatacaaggagcaagaaggaaatccagaaattaagtctaaacgcagagagcgcatcaggaaattctttctgagcaattga

SEQ ID NO: 29768 - DNA, 1005 bp, Escherichia coli
atgttgcgattgaaaaaaaataacaggctaatcaaggaatccgccgaaatagctgcatggcgtgattcattgcaggcttcgattgataatcgtcaacaggggtatgatattcagattgctggttatggggttggcgataaaaatcagcaacgccagcaggaattactgcggattgaacgtgaatataacaatcagcgtctgcaacttgaacgtgactatgcagataaatcccgtgggatgtcaaatcatgtttttcaggagaaaatgcaggctctgaatgatgctctggaacgagaaaaagaaattgtcagacagaaaaacgagcagctcgatattcaggcaggagactgggttagtggtgcctcccagggattcaataactggctggatgacactaaggatatcagtgagcagataaaatcaaccacgactcagatgtttgatggaatgaccgatgcgctgggtgattttgtcacgacaggcaaagcaaattttcgttctttcgctacttccgtgatttcggatcttagtcgaatagcattaaaggcttcaattactgggattttcgacagcattagtaacagttcttctggggggattttaggaactatcgggagtgctattagtaaatttattccgaatgcaaagggcggtgtttatgagtctccgtcattgaacacgtattcgaacggtatttatgattccccgcaattttttgcttttgcaagaggggctggtgtttttggtgaggctggtccggaagccattatgccattaacacgaacttccgatggttctcttggtgtcagagctgttaatagtaaaagtggtaatggaggcggagatattacctatgcccctgtataccaaatcactattcaaaatgacggccagaatggagagattggccctcaggcaataaaagcacttatggggatggttgatcagcgggtgcagggcaatctgttaaatatgcgacgtgatgggggaatgttaagtggctaa

SEQ ID NO: 29769 - DNA, 483 bp, Escherichia coli; identical to SEQ ID NO: 11504

SEQ ID NO: 29770 - DNA, 192 bp, Escherichia coli; identical to SEQ ID NO: 9355

SEQ ID NO: 29771 - DNA, 162 bp, Escherichia coli
atgttaaggacgacacgatgggtcgctgctattatttttttgtattcttttccgggttatgctgaagaaacttttgatacgcacttcatgattggcggcatgagaggagaaaaagtttccgaatatcgtgctgctaaccacactgggggtaaagaccgataa

SEQ ID NO: 29772 - DNA, 465 bp, Escherichia coli
atgctcgcatcaaataatatgctgagttatttcctatctaaattaaaagctgtcatcgactcaactaaagagctcgaactaaaaatagagagctttgttaccatttgcaataaatatctacagttatcagatgattcaaaatcgctaaattttgacattgaaacattacaagttattgtaaaagacttattcacaaataaccccattgaattagaagatctttcctcaggcgaaaaacaaataatttctttgatggctcatatgtatcttgaccatactaagaaaaaaattgttttaatagatgaaccagaattatcgctctcacttgaatggcaagagcatgtcctcgtagatatagtgaatagcccttcagttactcaaatgcttgcaataacacattcaccttttgtttttaataatgaactgaaatcccaagtaacatctttgaaagttatcaagcattga

SEQ ID NO: 29773 - DNA, 501 bp, Escherichia coli
gtgaatgcgaacgccgggacgctcaacaatgtcacaattaatgagaactgtcagattaaggggaaactgtcagccaaccagattgaaggcgatatagtcaaaacagtgggtaaggcttttccgcgggactcccgggcaccggagcggtggccatcagggaccattaccgtcaggatttatgacgatcagccttttgacaggcaaattgttattccggcggtggcattcagcggtgccagacatgagcgggagaataacgatatttattcgtcatgccgcctgatagtacggaaaaacggtgctgaaatttataaccgtaccgcgctggataatacgctggtttacagtggtgttattgatatgccagctggtcgcggccacatgacgctggagttttctgtatcagcatggtgggtgaatagctggtatcccacagcaagtatcagcgatttgctggttgttgtgatgaagaaagccactgcaggcatcacgattagctga

SEQ ID NO: 29774 - DNA, 234 bp, Escherichia coli
atgacagcgcttcccgaccatgccgccagtcccctgatgacccgactgcaggacgagctgcgcacggaatctgtccggtctcaggcccgtgaacagtttaccggtgcggtggaccggatatttgacacggcggagagcgtctgtattgcctctgttgcacgcacggttctgcgtgccgtccgtgacacggtggtctctgttgcccgtgcggtatggaactggattttcttctga

SEQ ID NO: 29775 - DNA, 126 bp, Escherichia coli
atgttaaggacgacacgatgggtcgctgctattatttttttgtattcttttccgggttatgctgaagaaacttttgatacgcacttcatgattggcagagtcaccagccaaaccatgtctgcctaa

SEQ ID NO: 29776 - DNA, 375 bp, Escherichia coli; identical to SEQ ID NO: 5335

SEQ ID NO: 29777 - DNA, 273 bp, Escherichia coli; identical to SEQ ID NO: 7046

SEQ ID NO: 29778 - DNA, 210 bp, Escherichia coli; identical to SEQ ID NO: 22985

SEQ ID NO: 29779 - DNA, 348 bp, Escherichia coli
gtgttgcaggattatgcgtcaggcagccgaccgctgattgacgcagcgctggcgcgcaatggtattcaggcgaatattgtgcaggagattggacatccggcgacgctgttcccgatggtagccgcaggcatcggcatcagtattcttcccgcactggcgctaccattgcctgaaggtagcccgctggtggtaaagcgcattacgccggtggtggaacgccagttgatgctggtgcgtaggaaaaaccgttcactttccaccgccgctgaagcgttatgggacgtggtacgagaccagggcaatacgctaatggctgggcgggaaggggatccgttgtatcagatatag

SEQ ID NO: 29780 - DNA, 414 bp, Escherichia coli; identical to SEQ ID NO: 23528

SEQ ID NO: 29781 - DNA, 201 bp, Escherichia coli; identical to SEQ ID NO: 23527

SEQ ID NO: 29782 - DNA, 222 bp, Escherichia coli
atggcagacatcattgattcagcatcagaaattgaagaattacagcgcaatacagcaataaaaatgcgtcgcctgaactaccagactgtatccgcaactcattgttgtgagtgtggcgatccgatagatgaacgaagacgcctggcagttcagggttgtcggacttgtgcaagttgccaggaggatctggagcttatcagtaaacagagaggttcgaagtga

SEQ ID NO: 29783 - DNA, 270 bp, Escherichia coli; identical to SEQ ID NO: 23612

SEQ ID NO: 29784 - DNA, 492 bp, Escherichia coli
atgactcaaagatattttctgtttgcgggaataattttatgtgcttttattgcagcaattctgagccatattgcgtttcatcatgccaatgaaccagcagagcaaaacatatcatgtaatgcccatgttattaatttcaccgatcatacaaaaatggatcaatatttttcgttaaatatgatttctgaaaataacacaggaaacatgtatctcacgggcgcatacacggtagatggaaaaaagataggcttcatccgccgatatgtgagttttacatacaagaaattccgtgataccgtttacttcaccactgttaaaatacaaaaaatacaaaaagatgataacattagtgatgaaatccttgaaaatatcacttctgattttttcataaaagttgacacctcaattaatttttatgttacacgtcaaaatgattacaactacgtattctctacaggcaggacaccacgcttcatatgtatttcccactaa

SEQ ID NO: 29785 - DNA, 429 bp, Escherichia coli; identical to SEQ ID NO: 23588

SEQ ID NO: 29786 - DNA, 2640 bp, Escherichia coli
atgcctgaccattctcttttccgactgcgggtacttccctgctgcgttgcattggcaatgtccgggagttatgtcaatgcctgggctgaaaatgaaattcagtttgattcccgttttctggagttaaaaggcgacacaaaaatcgatctgaagcgattttccagccagggttatgtcgaacctgggaaatacaatttacaggttcaactaaataaacagccgctgacggaagaatacgatatttactggtacgcctctgagaacgatgccagtaaaacctatgcctgcctgacgcctgaactggtcgcgcagtttggcttaaaagaggatgtggcaaaaaacctgcaatggatccacgacggcaaatgcctgaaacccggtcaactggaaggcattgatattaaagctgacctgagtcagtcagcgttagtcatttcattaccccaggcttaccttgaatataccgacatcaactgggatccgccttcacgctgggatgacggtatatctggtttaattgctgactacagtattaccgcccagacacgacatgaagaaaatggcggggatgacagcaatgaaattagcggtaacgggacggttggggtgaacctcggcgcatggcgtcttcgtgccgactggcagactgattatttgcatagtaaaagcaatgatgacgatgttatcaacggtgatgacacgcaaaaaaactgggagtggagccgctactacgcctggcgagccttaccgtcgctaaaagccaaacttggccttggcgaagactacctgaattctgatattttcgacggctttaactacgtgggtggcagtatcagcaccgacgatcaaatgttgccgccgaatctgcgcggctatgcgccggatatctccggcgtggcgcacaccaccgcgaaagtgaccgtcagccagttgggccgcgtcatctacgaaacccaggtcccggcggggccgttccgcatccaggatcttggcgattcggtctccggtacgctgcatatccgcattgaagaacagaacggtcaggtgcaggaatatgacatcaacaccgcctcgatgccgttcctgactcgccccggccaggtgcgctataaactgatgatgggccgcccgcaggagtgggggcaccacgtggaaggcggtttcttctccggcggcgaagcttcctgggggattgccaacggctggtcgctatacggcggggcgctggcagatgaacactatcagtcggcggcgcttggcgtcggtcgcgacctgtctgtgtttggtgcggtggcctttgatatcacccactcgcatacccgtctggataaagagaccgcctacgggaaaggttcactggacggcaactcgtttcgcctgagctattccaaagacttcgatgaactgaacagccgcgtcacttttgccggataccgcttctcggaagagaacttcatgaccatgagcgagtatctcgatgccagcgacagcgaaatggtgcgcaccggcaacgacaaagagatgtacaccgccacctataaccagaacttcagggatgccggtgtgtctgtttatctcaactacacccgccatacctactgggatcgcgacgaacagaccaactacaacgtcatgctctcgcactacttcaacctgggcagtatccgcaacatgagcatttccatgaccggataccgctacgagtatgacaaccaggccgataaaggtgtgtacatatcgctcagtatgccgtggggtgacagcagcaccatcagctataacggcaactacggcagcggttcggacagcagccaggtggggtatttcagccgtgtcgatgacgcaacccattaccagttgaacgtaggcaccagcgacaatcactccagcgttgacggttattacagccacgacggatcgctggcgcaggtcgatctcagcgctaactaccatgaagggcagtacacctcggcgggtatttccttacagggcggcgcgacgctcaccgcacaaggtggcgcgctccaccgtacccagaatatgggcggtacgcgtctgctgattgatgccgacggtgtggctggtgttccggtggaaggaaatggcgcggcggtttacaccaatatgttcggtaaggcagtggtggcagacgtcaacaactactaccgcaaccaggcgtatatcgacctaaacaacctgccggaaaacgccgaagccacccagtccgtggtgcagggcacgcttaccgaaggggccattggctaccgtaagttctcggtgatcagcgggcaaaaagcgatggcggtgctgcgtctgcaagatggcagttatccgccgtttggcgcggaagtgaaaaacgacagcgcgcagaacgtcggtctggttgacgatgacggcaacgtctacctcgcgggcgtaaaacctggcgagcatatgatcgtttcatggggcggtgtggcccactgcgatattcatctgcctgacccgctgccagccgatctgttcaatggcctgttattaccatgccagcaaacaggggcgatatctccttcgatgcctcatgaaattaagccggtgatccaggagcagacccagcaggtgatgccaacggaagcgccagtatcggtatcagccaattaa

SEQ ID NO: 29787 - DNA, 504 bp, Escherichia coli; identical to SEQ ID NO: 23719

SEQ ID NO: 29788 - DNA, 375 bp, Escherichia coli
gtggttaaaccggatgctgcaattcagagcggcagcaagtggggaacagcagaagacctgaccgccgcagagtggatgtttgacatggtgaagaccatcgcgccatcagccagaaaaccgaattttgctgggtgggctaacgatatccgcctgatgcgtgaacgtgacggacgtaaccaccgcgatatgtgtgtgcttttccgctgggcctgccaggacaacttctggtccggtaacgtgctgagtccggccaaactccgcgacaagtggacccagctcgaaatcaaccgtaacaagcaacaggcaggcgtgacagccagcaaaccaaaactcgacctgacaaacactgactggatttacggggtggatttatga

SEQ ID NO: 29789 - DNA, 411 bp, Escherichia coli
atgccatttgctcgttatttctgcattttcataaacgttggtttgggagaagcggcaaaacgggatgtggggacaggggaaaatcagataccggacatggcctcttttgccagtggtaatggatggatgaaattacccaacgggaaaatcctgcaatatggtcgtggtgcggttacgccgacattatcgacgcaaacaatgagaattacattcagcatccctttccccaaaaaagcggactgcgccatgcttactcattctggtgatggcggtgcgcctttaggcgctgggcgagggttcgtgatgactgcagaaggcccaacgttaaccggctttaattctgcttacagaacgtcatcaaccagcgacacggtatcgatgaattacagttggtgggctgttggtgagtaa

SEQ ID NO: 29790 - DNA, 207 bp, Escherichia coli
atgatgtttagtattaagcgctttatttcctgcaacatccattttgcgaaattactgccaggtgaatattttttctcgttatttttaatatcaagctcagcagcgacatttctatttttatccaaaaaggtggaagggcagagatttgccatcattattccgctgtttataggacttgccataatatacctcacgatgaaccattaa

SEQ ID NO: 29791 - DNA, 822 bp, Escherichia coli
atgtgtataagagacaggtattatgagaaagttggcggtggtttttatagatatatagaatcctttaaccccatatcttcagagacaccaaataaaatagtctacaagggggaatcagtagatttaactaaggagccaaattcggaattatattcaggtaggtattctataaataacaaacaggttaatgtttatttctttcgtgacgctgatggtacattttataaatcagaaggtcttcatggtgggggagttattagatacatagataaaccgtattctcagttaagagaaggagatattgggtatgatgaggatttgttggatatatacgatgattctccggtgcttgaagacacgttgcctgctttatcttctgaaatagtaccaactccagaacatagtattaaacaaatttattcgaaaattaaggaggggcacatagaactgtccgattcagacatcatattgtgtcgcggcacaaccggtattcaagctgaaaatatcgttgaatataaaactgctggagggcttcctgattcaaatccaaatgtaaaagcaccagatgaatatatggcacaacagcaggtacgtattggaagaatattgcctgaatacacatcggatcttagcgttgctgatcggtttagtcgtgagcattatctaatagttgttaaagtaaaggcaaaatatatcacacgaggaagtgttacagagagtggttgggttatagataagaccgcacctgttgaaccacttgcgataattgatagaacttttggtatgaaggaaaatatctcaatggtaaatgcatcgaaatag

SEQ ID NO: 29792 - DNA, 354 bp, Escherichia coli
atgaatcttttagttaaaagaaacgttgaagagtttttaagattattgggaaatgatttttatttatttgataaccgtgttgaaattgattttaatgggttttctttttttattgaaataattgataataatgtttttgttacgtttgctttagagtataacgaaaacgcatttttctctttctttagtgcccttgctcctgagcgtacgcagggagtgattgaacatatttttgtctacgataataaattgtgcttaagttgtttgttaaccaatatcgatgttttttttctaatgaatacttttcaacagcatgtgcagattattgagcgcgttcgcaggatgacatcatga

SEQ ID NO: 29793 - DNA, 300 bp, Escherichia coli
atggaagcagcaaatttaagtccttctggtgcagtaatgccgctggcgacctcactcagtggaaataactcagtggatgagaagacaggagtgattaaaccagaaaatggaacaaatcgcaccgttagagttatagccggattagcacttaccactacggctctggcagctctaggtacaggtattgcagcggcatgctcggagacgagcagcacagaatacttagccctgggtattacttctggcgtactaggtactcttactgcggttggcggtgcattagcgatgaaatatgcctaa

SEQ ID NO: 29794 - DNA, 378 bp, Escherichia coli
atgaacaacattaatcaatcggaaaacattaatattcaattaaataaagcgccccaaacaaatttcgttgatgagcatacctcgttagcctcagccccctctgcggcaggtgcggctcagtttcttgatcaattactccctaaaacagcgggagtgtcttctccagaacaagtgttgattgaagaaattaaaaagagacatcttgcaacaatgaacagcgatctcagtttcgatgctctatctgcaggtgggctctcgccagaagacgtgctcaccttacaaaagaatgtgctcaacgcaaacgtcaacgttgatgtcgtatctaagttagcaagcctcctttcaacatcggttacaaaattagtttcgatgcaataa

SEQ ID NO: 29795 - DNA, 573 bp, Escherichia coli
atgaaaaaacacattaaaaacctttttttattggctgctatttgtttgacagtggcatgtaaagagcaattgtatacaggattaacagaaaaagaagctaatcagatgcaagcactgttgctatccaatgatgtcaatgtttccaaagaaatggacaaaagtggaaatatgacactcagtgtggaaaaagaggattttgttcgcgcaataacgattttaaataataacggcttcccgaaaaagaaatttgcagatatcgaggttattttcccacctagccagttagtggcatcgccatcacaagaaaatgcaaaaatcaactatctcaaagaacaagacatcgaaaggttgctaagtaaaatacctggtgttatcgattgcagcgtttcattaaatgttaacaataacgaaagtcaaccctcctcagcagccgttttagtcatcagctcgccagaggttaacttagcaccatcggtcattcagataaaaaacctagttaagaatagtgttgacgatctcaaattagaaaatattagtgttgttatcaagtcatcctcaggacaggacgggtaa

SEQ ID NO: 29796 - DNA, 456 bp, Escherichia coli
atgaacaataataatggcatagcaaagaatgattgtgactggctaacggcccttgattttgtaaaggatgtcaacggttcaccaacgcatctcactttttatatctaccaaaaaaatgctttcttgcacgattttggaaactactgggttctatatattgagcttagtggtgattttcgtcaggttccaacagatacatttatcagactctgcaatatcctggccgttagtaacgaatataaacaaatgggtattttcctgtctaataagaagtggtatctttgccaaatttttcataaagataataatcatcgcgcaaacatgtcaaaagcaataatgcaacatactctcgcctctttgctcgataagcaatttgataaactagagcaattatcttcatcggatacaatgatgccgccaacacacttgttttctgatataggacgaattgtgtaa

SEQ ID NO: 29797 - DNA, 1539 bp, Escherichia coli
atgaaaaaaataagtttttttatttttacagcactattttgctgcagtgcacaagctgccccgtcctctctggaaaaaagattaggcaagagcgaatattttattattactaaaagttctccagtacgtgcaatccttaatgactttgctgctaactacagcattcctgttttcatcagtagttccgtgaatgatgatttctctggcgaaataaaaaatgaaaaacctgtaaaagtactggaaaaactgtccaaactatatcatctcacatggtattatgatgagaacatcttgtatatttataaaacaaatgaaatatcaagaagtataattacaccaacatatctggatattgactcactgctaaaatatctgagtgatacaatctcagtaaacaaaaactcttgcaatgtgagaaaaattacgacatttaactcgattgaagttcggggtgttcctgaatgtataaaatatattacatctttatcagaaagtcttgataaagaggcacagtctaaagccaaaaataaagatgttgttaaggtctttaaactgaactatgcgtcagcgacagatataacatacaaataccgtgaccaaaatgttgtcgtcccaggtgttgtctccattctgaagacaatggcaagtaatggttcacttcccagtaccggtaaaggtgccgtcgagcgaagcggtaacctgtttgataacagtgtaacgatttccgctgatccacgtcttaatgcagttgttgtaaaagaccgcgaaataacgatggatatctatcagcaattaatttctgagcttgatattgaacaaaggcaaattgaaatttctgtctcaattattgatgttgatgcaaacgatcttcagcagctcggcgtaaactggtccggtacgttaaatgcaggacaaggtacgattgcctttaatagctctaccgcacaggctaatatcagctcttctgtgataagtaatgccagtaattttatgattagggtgaatgcgttacaacagaactcgaaagctaaaatactctctcagccttcaattataaccttaaataatatgcaggcgattcttgataaaaacgtaacgttttatacaaaagtctccggagaaaaggtggcgtctctggaaagtattacaagcggaacattgctgagagtgacaccacgtatacttgatgacagctcgaatagccttaccggaaaacgtcgggaacgagttcgtttgttacttgatattcaggatggcaatcaatcgactaaccaaagcaatgctcaggatgccagcagcaccttacctgaagtacaaaattcagaaatgacaacagaagcgacattaagtgcaggagaaagtttattacttggcggatttatccaagataaagaaagttcaagtaaagatggtataccgctgttaagcgacattcctgttattggtagtttattctccagtacggtaaaacaaaaacatagtgttgttcgactctttttaattaaagcaaccccgataaaatctgcatctagcgaataa

SEQ ID NO: 29798 - DNA, 456 bp, Escherichia coli
atgagcaggaaatttagctctctagaggatatttatgatttctaccaggatggtggcacattagcgtcattaacaaatctgacacaacaagatctcaatgaccttcattcttatgcctatacagcatatcaatctggtgatgttataaccgcaagaaatctattccatttgctcacatatctggaacactggaattatgactacaccttatctctgggcttatgtcatcagcgtttatcaaatcatgaagatgcacaactgtgtttcgcacgctgtgcaactttagttatgcaagatcccagggcatcttattattctggaattagctacttactcgtcggaaataagaaaatggccaagaaagcctttaaggcttgtttaatgtggtgtaatgaaaaagaaaaatacactacatataaagaaaatattaaaaaattgttaggtaatacagagtaa

SEQ ID NO: 29799 - DNA, 1143 bp, Escherichia coli
atgacaaataaacacccatcattgttttctccttttatgctgacagaaaaaataaagctacgtaatcgtatcgttatggctcctatgacgacctggtcagcgaatcctgatggaaccatctctgagcaagaactcgaattttataaacgtcgctcacaaaatgttggtttagtaataacaggatgtacctatgtcacgccaagcggcattgggtttactcatgaatttgccgcgtatgacgaccgtttcattaacagccttgaaaagttagcagcggcagccaaaagtggcggtgctccggctattttgcagattttccacgccggtaataaagccatcccggagcttgtaccaaataacgatgttattagtgccagcgcatcaagcgtaaaatctggtgactttatgaagagagtggtacaaagcagggaaatgactgaaaacgaaattcaggaaaccattagagcattcggagatgtcacaaaaagggcgattaaagcaggttttgatggcattgaacttcatggtgcgcacggattccttctacagaattttttctcccctctatttaaccagcgtaatgaccgatggggaggagatctcgaaggacgtatgcgcttcccgctggccgtattacaggaagtaaaaaatgtagtctatgaatatgcgacaaagccctttgccatcggttacagaatatctcctgaagaatctgcaacaggggggctgcggatagaggatacttataaactccttgatcggctcatttcatccggtatttcgtatatacatacctcgctggtcagtattaacgatagctaccctgttgagtcgccaaatggcccccgaactattgaattgattttaaatcatattgcaggcagagtgccggtaatcgctgcaggtaaaatacgcacaccgtctcaggctcaagaagcaatttccactggcctgccacttgttgcgatcggtaaagggctggtgataaatccagaatgggtgactttagctgaatcaggtagaggccatgaaattcaaacaacccttaatccacaacttgttcctgaattaaccattccggataaactatgggatcaaattcaggcatcgaaaggaactggctggtttccgttaatggattaa

SEQ ID NO: 29800 - DNA, 315 bp, Escherichia coli; identical to SEQ ID NO: 23639

SEQ ID NO: 29801 - DNA, 180 bp, Escherichia coli
atgagtgaaggaccaggcgggccacagggagcgaccgcaggcggtacgctggcaatgcggatgctgtcgcagcgggcgatggccgccagccagatgaaacgggcagccaacgacaaagccattgcacagatgttggcatcaaaaaagtctggccccccccgccgccaggctgggcgatga

SEQ ID NO: 29802 - DNA, 408 bp, Escherichia coli; identical to SEQ ID NO: 23991

SEQ ID NO: 29803 - DNA, 426 bp, Escherichia coli
atgaaaatcaagcatgaacacatccgcatggcgatgaatgcctgggcgcgtcctgatggcgaaaaagttccggcagctggaataacccaggcttattttgagttgggtatgacgtttcctgaactgtacgacgacagccatccggaagccctggctcgcaatacccagaaaattttccgctggatagagaaagacacccctgatgcagttgaaaaaatgcaggctctgttaccggcgatcgaaaaggcaatgccgcctctgctggtggcccgtatgcgcagtcacagctctgaatattaccgtgagatcgtcgaacggagggatcggctggtgaaagatgtggatgattttgtcgcagcggcgatcgcctggggcaccctgactaacagtgggggtcagcctggtaatgctgttgtcgtgcattga

SEQ ID NO: 29804 - DNA, 234 bp, Escherichia coli; identical to SEQ ID NO: 23941

SEQ ID NO: 29805 - DNA, 165 bp, Escherichia coli
atgagcggatggtgcaggcctgaaatcatgatactaacaatgaaggtaaaatgcatcggcagtctgattggtcgtagtgaggcggcggtcaggatgaaagcccaggttaagggaataagcctgattctgcggggtgattttcaccagtcaacaaaatatccgtag

SEQ ID NO: 29806 - DNA, 183 bp, Escherichia coli
atgaccgaacatcgtggcggtgcaggtaatttcgctgaagatcgacaaaaagcttctgacgctggtcgtaaaggcggccaacatagtggcggtaattttaaaaacgatccacaaagagcatcagaagcagggaaaaaaggtggtcagaatagccatggtggcggccgtaaatctgactcttaa

SEQ ID NO: 29807 - DNA, 828 bp, Escherichia coli
atgattaaacttcaggataatttcttcaactattgcattgtcaaaggtgttacagagattaatgatgagttacgaataaactaccttaaaaatgtaataaaactgtcagacgatgacattggtaattatcagaaaacaattaacgacaataaagatagagtaaaaaaactaattcttgatttacagaaacaatttggtgaaaaccgcatttcaattaaagatgttaactctttaacctctctttcaaaatcagaaaataatcacaattatcaaactgaaatgttgcttcgatggaactatcctgccgcctcagacctgctcaggatgtatatccttaaagagcatggtggtatttatacagacacagatatgatgcctgcatactctaaacaagtaatttttaaaattatgatgcagacaaacggagataatcgtttcttggaagatttgaaactacgtcgtgcaatatctgatggtgtattaagatatgttaataaccaaaatattgatgaagttaactataatgaaatcagtgatgcagataaaaacattatcaagaagatattaacagaaatatctaaaatgccagaagatagtatttttactaagatcaatacaaggattcctcgagacacaatgcccatccttcgtcgttatcacctatggcctgatggatggaatattcgtgggctcaatggattcatgctatcacataaaggtagtgaagtgattgatgctgttatcgcaggccagaatcaggcttacagggaactaagaagaataagagataatattcatagtgaaatatacttcaaacaaactgattga

SEQ ID NO: 29808 - DNA, 216 bp, Escherichia coli
atgtaccagatggaaaaaatcacaacgggtgtgtcatacaccacgtcagcggtggggacgggatactggttactgcagctgctggacaaagtctctccgtcccagtgggtggcgataggtgtgctggggagtctgctgtttggcctgctgacgtatctgactaacctgtatttcaaaatcagagaggaccgtcgtaaggcggcgcggggagagtaa

SEQ ID NO: 29809 - DNA, 147 bp, Escherichia coli; identical to SEQ ID NO: 23916

SEQ ID NO: 29810 - DNA, 822 bp, Escherichia coli
atgaaactggaagatttaccgaaatactactccccaaaatcccccggcctgactgatgcatcggcctcaacgtcgaaagatacgctgagtatcactgatgtgatggccgcgcagggcatgacacagaattgggctgagatggggttttctgcgttccttgggaaaatgggcattagtatgaatgacagagagcgggcaacagaattgctgacagaatatgcactcagtcggtgtgatcgcgtggcggcgttaagaaaactcccggcagaaataaaaccggcagtgatgcgtattatggcttcgtatgcgtttgaagattatgcccgtagcgcggcgagcaaaaaacagtgcccctgttgtcacggaaaaaaatttattgaaagcgaggtttttacaaacaagatccagtatccggatggtaagccgccagtgtgggcaaagtgcacaaaaggcgtgtatccgtcttactgggaggaatggaaaaaagtcagggaggtggtaaaagttgcctgtccggagtgtggagggaagggggaggtttccaccgcctgtaaagattttcgtgggcgcggtgttgccattcatcgtgaagagtcggtaaaacgtggtatgcctgttatcagagactgccagcgttgtggtggtcgtggctatgaaagattaccttcaacggaggcatttaatgccatatgtaatgtaaccgatgccatatctcttgatacatggaaaaaaacagttaaacgtttttacgatacgctggtggtgcagtttgatattgaagaagcatgggcagaacaacaactgaaaaaggtgaccagatag

SEQ ID NO: 29811 - DNA, 180 bp, Escherichia coli
atggaaactgtattgcatgcactgaaagcgatgggaaaagccaattctgttgaactggcggcgcggcttgatatcagccgtgaagaagttcttaacgaactgtgggaactcaaaaaaatggcgttgttgataaaacgggtcacacctggtttctggctgtcgaaggtgaagccggggtaa

SEQ ID NO: 29812 - DNA, 564 bp, Escherichia coli
atgactgaattaaccaaagaatggctacagaacacgattaccggaattgagtcatcacgggatgaaataccgttcggactcgatgaagatcaaaacaacatgcttaccgcattaaaaattgcactggcatcactggcatcagtatcggatgaacgggcagcctatgaattatttatggagaagcgtttcggggaatctgtagatcgccgcagagcaaaaaatggcgatagagaatacatggcatgggatatggcgcttggctggattatctggtgtcaccgcgccgccatgcttcaggctggaaactttcgggaaaataagggttcgtcaaccaataattttcggataatctcggaaacgtcaaccaactctccggcaatccctgatgaggtgttgtccgcaatcctgaaggtcgccaggcttcgtgcagatttcgatgcttctgaagtggacaggcgaggtatcggtagttgtctggatgaggccgagcaagaacttatcgttaccattaacgaatacgccagtcagatcgcagtagaagcgacacagggggagaaccaatga

SEQ ID NO: 29813 - DNA, 792 bp, Escherichia coli
atggcctgcgggagtgtatgtgctggtcagttcgtatgcgttattgccgaagctgcgcaccgtctcgcggtgcagcctgtcgcgcgtgaactccaccagcggcgtcccgcccagcttcatccccgcaagataaccgctgccgtaggtcagccactccacccgcggcaggctgtccggcgtgacgcggtttgccagaccctgttcgttgtatgcgtgctctgtctcatgctgccacagcagttcccccgtctccgggttatgcaccgtctggcgctccccggccaggcggcccttatcatcataaccgtaatgcaccgccacctgatggccttcgctcaggtggctgatttctgtcagccagccgtgctcgtcgtactgccactgctctgccggttcgccgttcaccgtgcggtgagtgaggcggtccgattcgtcgtagtgccagagggtgacaagcccctcatcttcactctgcgtgagttttccggtcaggtcatagtggtaacgttgcgtccgcccgtcaaagccgcgctgctgtaccagccggtcaagcgcatcgtaggtaaactcactccggctgccgttctcgttggtcagcgtggtgatgcgtccggcaaggtcgtactccatactgcgcgtcagcccgccctgcgtggtgctgaccgcctttccccacgcatcgtactgtgtctcgctccggttgccgtccggggtgataacggcagtcaggtcgcctgcggcgttgtactcataccgcgtttcatggccctgtgcgtctttcaccgagattaa

SEQ ID NO: 29814 - DNA, 270 bp, Escherichia coli
atgaacatattaaaaaaaattatgcagcgtctgtgcggttgcggaaagcatgatgaccgtgaaaacggggagttacttacagcacagctgcgactgggaccggcagacattctggagtccgatgagaatggtattatcccggagcaggacagggtaatcacgcaggtggtgatactggatgcggataaaaagcagatacagtgcgtggtaagaccgctgcaaatcctgcgtgctgacgggacgtgggaaaatattggcgggatgaaatag

SEQ ID NO: 29815 - DNA, 198 bp, Escherichia coli
atgctgaaacagcaggatatgacagaaaccgccagagtggtgtttaatgaattaagcgttaccgacccggcgacagtcggggagattgcgcagaatacttacctttcacgcgaacgctgccagttaatactgacccagctggttatggcgggtctggcagactatcagtttggttgttacagacgccttcagtcctga

SEQ ID NO: 29816 - DNA, 360 bp, Escherichia coli
atgctcatagatttggttttaccttacccgccgacggtgaacacttactggcgacgccgtggcagcacatattttgtatcaaaagccggggagcgttatcgccgggcagtggtgcttattgttcgccagcagcgactgaaattaagcctgtccggacggctggcaataaaaattattgcagagccaccggataagcgtcgtcgtgacctggacaatattctgaaagcaccgctggatgcgctgacgcatgcgggagtgttaatggacgatgagcagtttgatgaaatcaatattgtacgtggtcagccagtatctggtggacggctgggtgtgaagatttacaaaattgagagtgagtga

SEQ ID NO: 29817 - DNA, 336 bp, Escherichia coli
atgctttcggactcaggtgaagcacaatcgcaagagagtattcaggacaaaatatctcaatgtaagtttcctgttagttcaggaaatttccagtgcccgccagagtctattcagtgtccaattacactagagagacccgaagaaggagtgtttgtcaaaaattcagatagttcggcagtatgctgcttatttgattttgatgcattttctcgtttagctagtgaaggctcatatcatccactgacccgagaaccaataacggcatcaatgattataagtcctgataaatgtgtttatgatcctatcaagggaaacttcattataaaagatagttaa

SEQ ID NO: 29818 - DNA, 270 bp, Escherichia coli
atgaacatactaaaaaaacttatgcagcgtctgtgcgggcacggaaagcatgatgaccgtgaagacggggagttacttacagcacaactgcgtctggggccggcagacatcctggagtccgatgagaatggtattattccggagcaggacagggtaatcacgcaggtggtgatactggatgcggataaaaagcagatacagtgcgtggtaagaccgctgcaaatcctgcgtgctgacgggacgtgggaaaatattggcgggatgaagtaa

SEQ ID NO: 29819 - DNA, 189 bp, Escherichia coli; identical to SEQ ID NO: 24023

SEQ ID NO: 29820 - DNA, 189 bp, Escherichia coli; identical to SEQ ID NO: 17045

SEQ ID NO: 29821 - DNA, 153 bp, Escherichia coli; identical to SEQ ID NO: 23983

SEQ ID NO: 29822 - DNA, 474 bp, Escherichia coli
atgccatcgggtgggttaagcataaatgtgagcctggcgctaaatggcctgaaattcaggcagagatgcgcatctggaaaaaacgtcgcgaaggtgaacgcaaggaaaccggaaaatacacgtctgttgttgatctcacccgcgccagagtcaaccaacagaacactgaaaacgctgctgaaaaaaccggggctgtcactgttgccattcgccgcgaatacaaacagacatggaaaacactcgacaatgaactggcctgcgccctctggcccggtgatgtggatgcaggaaacattgacggtaccatccatcgctgggcgacaaatgaggttatcgacaaggatcgcgaagactggaagcgtatctcagcatcaatgcgcaaacagcccgaagcacttggctatgaccgtcagactatttttggccttgttcgcgaacgtccgatcgatattcacaaagatcccgttgcactga

SEQ ID NO: 29823 - DNA, 1305 bp, Escherichia coli
gtgggctggcggtccctgtttcaggcggtggctgagccttttgccggtgcctggcagcagggggtgaaagccgatccggaaaccgttttgtcctttcacgcggtgttttcatgcatttcgctgatatcccaggatattgccaaaatgcggcttcgcctgatgcagactgatgtacagggaatacgccgggaaaagcggcagggagatactgcccgtctctgtcgtcgtcctaatgcgcagcagaatcgcatccagttttttgaactgtggctgaattccaaattgcgtcacggcaatacggtggtgctgaaaatccgcaccccccgggggcagatcaaagaactgcgtattctggactggaaccgggttgaacctctggtggcggatgacggcgaggtgttctaccgcatcacgccggaccggaactgtgggatcacagagtcggtgacggtgcctgcccgggaggtgatccacgaccgttttaactgtttttttcatccgcttgtggggctgccgccggtgtatgccgcaggactggccgccatgcaggggcatcatattcaggcaaattcgacgtattttttcagaaatggcgggcgaccatcaggcgtgattgaggtccccggcagtattacggaagaaaacgcgaaaaaactgaaggggaactgggacagcggatatacgggcgaaaatgccgggaagacggccatactgagcaacggggcaaaatacagccccacgacgttttcaccggtggatgcgcagacggtggaacaactgaaaatgacggctgaaattgtctgttcggtgttccgtgtcccggcctacaagattggcgttggccacccgccttccagtgacaacgtggaggcgctggagcagcagtattattcccagtgtctgcagacgctgattgagtccattgaactgttactggatgaggcgctggaaacgggggaaaacgagagcacggagtttgacgtcaccacgctgctgagaatggacagcgaacggcgcatgaaaacactgggtgaatcggtgaaaaatacgcttctcacgcccaatgaggcccgtaaacgtgagaacctgccgcccctggccggcggtgatgcactgtatcttcagcagcagaactacagtctggaggcgctgtcccgtcgtgatgcccgtgaggacccgttcgcgtcggccgggaaaacagtttcagcacaactgcctgacggcgcatctgacggtaataaggcaatcagtgaaacagagcatgatgcggtgaaagcgatgttcagggggatactgagaaaatga

SEQ ID NO: 29824 - DNA, 894 bp, Escherichia coli
atgacggaacgggaactgtccattattcgtgcactgggcgaagaattctccacggtgctggcggatttacagcgcacatttgaggggaagatggccgcgcaggcacaagcgtttgaagagaaactggcttccctgtcggcggtattacagaagcatgtgacggtggatgaggtacatccggttctgcaggcgatggtggatgacgctgtggggaccattccggtaccgcgtgatggtcgtgattatgatccggaagtactgaagcaggcggtgaatgatgcggttgcgaatattccggtaccggcggacggcaaaagtatcacccccgatgatgtgcgtccgatgcttgagcagatggtgaaagaggctgtaagccatattcctgttccgcgtgatggtcgtgactatgatcccgatgttctgcagaaggcggttctggatgcggtgagagccctgccggctccgcaggacgggcgtgatgccacggcactggaaataatccccgccattgacgatcaaaaatcctttccccggggcacgtatgccacacaccagggcggactctggcgggcgtatgaaaaaacgcacgggatgcggggatgggaatgcctggttgacggggtggccgatattgacgtcagcatgaccggcgaacggtcgttcactgtggtggtccggcagagcagtggccagcgtacggaaaaaacattttccctgccggtgatgctctaccgcggtgtgttcagagccggtgaaacctaccaccccggcgatacggtgacgtgggggggctcgctgtggcactgcaacagtatgaccgaagataaacccggagaagctcattcatcagcctggaccctggctgcaaaacgtgggcgggatgcaggaggctga

SEQ ID NO: 29825 - DNA, 207 bp, Escherichia coli
atggaaaaaatcacaacaggtgtgtcatacaccacgtcagcggtggggacggaatactggttactgcagctgctggacaaagtctctccgtcccagtgggtggcaataggagtgctgggaagtctgctgtttggcctgctgacgtatctgactaacctgtatttcaaaatcagagaggaccgtcgtaaggtggcgcggggagagtag

SEQ ID NO: 29826 - DNA, 534 bp, Escherichia coli
atgaacgaaaaaataaaatacggcctgtcggctgccgttctggcgctgattggtgcaggtgcttctgcgcctgaaatcctcgaccagtttctggatgaaaaggaaggtaaccacaccacggcataccgtgatggtgcggggatctggaccatctgccgtggtgccattctggtggatggtaagcctgttattcctggcatgaagctgtcaaaggaaaaatgcgaccgggttaatgccatcgaacgtgacaaggcgctggcatgggtggagaaaaacatccgggtgccgctgaccgaaccccagaaagcggggatcgcgtcattctgtccgtacaacattggccccggtaagtgcttcccgtcgacgttttataaacgaattaatgcaggcgatcgaaaaggtgcctgtgaggcgattcgctggtggattaaggacggtggcagagactgccgtatccgttcaaataattgctacggtcaggtctcacggcgtgaccaggagagcgcgctggcgtgctgggacatcgacagatag

SEQ ID NO: 29827 - DNA, 363 bp, Escherichia coli
gtggatggtaagcctgttattcctggcatgaagctgtcgaaggaaaaatgcgaccgggttaacgccattgagcgtgataaggcgctggcatgggtggagaaaaacatcagagtgccactgaccgaaccccagaaagcggggattgcgtcattctgtccgtacaacattggccccggtaagtgtttcccgtcgacgttttacagacgaattaatgcaggagatcgaaaaggtgcctgcgaagcgattcgctggtggattaaggacggtggcagagactgccgtattcgctcaaataactgttatggtcaggtatcccgtcgtgaccaggagagcgcgctggcgtgctggggaatcgacagataa

SEQ ID NO: 29828 - DNA, 147 bp, Escherichia coli
atggggtggctaatgatatcagataaactcataacgctggtgaagagcctctgtgtacttgtcggcatttcatttttagtcatgctggttgccattttcttttccaccgcctggcgagtcctgacgttatcgggactggtggggtga

SEQ ID NO: 29829 - DNA, 468 bp, Escherichia coli
atgaaccgtgttctgtgtgtggtgattattgtcctggcggttggctatggtgcgctgtggctggcaacaaaccattaccgtgacaacgcgctcacctacaaagcgcagcgcgataaaaaagccagagagctggaacaggcgaatgccaccattactgacatgcaggtgcgccagcgtgatgttgctgcgctcgatgcaaaatactcgagggagttagccgatgcgagagctgaaaatgaaactctgcgtgctgatgttgccgctggtcgtaagcgcctgcggatcaacgccacctgctccggtaccgtgcgtgaagccaccggcacctccggcgtggataatgcaaccgtcccccgactggcagacaccgctgaacgggattatttcatcctcagagaacggttgatgacaatgcagaagcagctggaaggggcacaggactatatccgcactcagtgcctgaactaa

SEQ ID NO: 29830 - DNA, 1611 bp, Escherichia coli
gtgaaatccctgcaggaaaaagcgcagtccattcaggatgtgcttgccgggctggaagaccgtcgtgtggcgttaattcgtcagcaggcggcagagcagaataaggtgtaccagtccatgctggttatgaacggtcagcatacggaattcaaccgtctgctggggctgggtaatgaactgcttcagcagcggcagggactggtgaatgtgccgttacggctgccacaggccactctggatgataaacagcagagtgccctgacaaaaacagagcgtgagctggccctgtccagactgaaaggggaagaaaaagagcgtgcccggctggggtatgcggcggatgaccttggttttgtgggggattcgtatcaggaggcgagacagcgttatatcagtaatgctctggaagcctggcgtaataacgaggcgaacaaacctaaatcccggggtggaaaatcagagacggaaaaagcggaagacagtttttcccggctgctgaagcagcagaaggcgcaactggcactggccggtcagaatacagagctggcgaagctgaagtaccagactgcgcagggcgaactgaaaaccctgacggagatacagaagcaggagctgctgcgcaatgcggccctgattgaccagcaaaaaatccgggaacagttgcgatcccgggaagagacactgaagaatgagaatgcggctgcgcgtgcgtcgaatgatgctgaactgctggggtacgggcagggggagcgagccagagaacgcatgcgggagttgcagcagatccgcgacagcttccgccagaaggatgcggaccttcagtctcagtatcagaccggggatatcagtgaggatttttacagacaggctctggcacagaacgcgcagtatctgagtgaacgccttaaagaccaggaaactttttatgccgaatcggatgcgcagcgtgcggactggcagaaagggctgcaggagggattcagtaactgggtggataatgcgtccgattacgcctcacaggcagcacagcttgcgacggagggtatctcagggatggtgaataacatcacggagatgctgaacggaaacaaagtggaatggcgcagctgggcctcatccgtactgcaggaaatatcaaaagttcttatgaatgcggccattgtcaacggaattaagacggcggcaaacggtatgtccggtgcgggaggatttctcggcagcattggtgactggctgggcggagcggtggccaatgcaaaaggcggcgtgtatacctcggcaaacctgagtgcgtacagcaacagtattgtggatacgcccacgtactttgcctttgcaaaaggggccgggctgatgggggaggccggacctgaagccattatgcccctgacccgggcggcggatggctcgctgggtgtgcgcgcggtgggcagtatgaacggcagtgcgggtctggtgtattccccggtctaccatatcgccattcagaatgacgggactaatggccagatagggccggaggcggcaggcagtcttgtgcagctgattgaccagcgggtgcaggcggtgatgctgtccatgcgacgtgacggaggaatgctgagtggctga

SEQ ID NO: 29831 - DNA, 342 bp, Escherichia coli; identical to SEQ ID NO: 24027

SEQ ID NO: 29832 - DNA, 1512 bp, Escherichia coli
atgagccgccttaaccatccgaaagcggacctgtcaaaggggcagtacggaaccgtggggcaggggctgcatatcgccaaaaaattgctgccgtttataccggcgaatgcgggcattctgctggttccgtgctgtcgtggtggttcagcgttcaccaccggagccgatggcacatacagtgacgcgagtggtgcctcggagaattcaacccgctggggtgtggacaagccgctgtataaggaccttatcggtcgaacaaaagcagcactgaagaagaatccgaaaaatgtgctgtttgccgtggtgtggatgcagggggaatttgattttggcggtacgccggcaaatcacgcagcacagtttggtgcgctggttgataaattccgtgcagacctggcggatatggcaggtcagtgcgtcggtggctctgctggcggtgttccctggatatgcggggacacgacgtatttctggaagcagaagaacgaatcctcgtaccagacggtgtacggcagctataaaaacaaaacggaaaagaatatccatttcgtaccgttcatgacggatgagaatggggtgaatgtgccgacgaacaaaccggaagaagacccggacattccgggtatcggatattacggttcgaaatggcgtgacagctcagccacctggacgtcacaggacagggcgagccatttcagcgcctgggcacgccgtgggattatttccgaccgtctggcaacggcgattttgcgccatgcgggaagagtggcgctaaacgcgggggcatcatcgacagtatcagaggtgcgcccgtcatcgccttccggtgcagaagccacaggcgtcacaacactgctctcttaccttgccagcgagtcagagggaagcctgaaagtacagggatggtcagccagtggcggcagggcagaagtggtcagcgatgcggagggaaccggaggtaaggcagtgaagctgaccaaggaagccggtaaaagcagctgggtgctggagtacgccgcgggcaacggtgcggctctgttacagaaaggggggcagattcgctgccgctttaaggtttcgggagcgctggctgcgaaccagtatgttatggcgttttactggccggtatcttcactgccacagggcgttgccctgaccggagacggggggaataacctgctggcagcgttctacatccagacagatgcaaaagacctgaatgtgatgtaccacaatgcgaaagtggcgacaaacaacctgaaactgggaacctttggcgcatttgataacgaatggcatacgctggctttccgctttgccgggaataacagccttcaggtgacgccggttattgatggtcaggatggcacaccgttcacgctgacgcagtcaccggtcagtgcatttgcggcggataaactgcatgtgacagacattaccaggaatgcgacttacccggtgctgattgacagcattgcggtggaagtgaacaacacagacactgcggcatga

SEQ ID NO: 29833 - DNA, 180 bp, Escherichia coli; identical to SEQ ID NO: 23969

SEQ ID NO: 29834 - DNA, 216 bp, Escherichia coli
atgtaccagatggaaaaaatcacaacaggtgtgtcatacaccacgtcagcggtgggaacgggctactggttcctgcagttgctggacagggtttccccgtctcagtgggcggcaataggcgtgctggggagtctgctgtttggtctgctgacgtacctgacgaacctgtatttcaagattaaagaagaccggcgtaaggcggcgcggggagagtaa

SEQ ID NO: 29835 - DNA, 567 bp, Escherichia coli
atgaatatgatgaccgtgccgtttcacggcgattctctttatgtggttaaccataatggcgaaccgtatgttccaatgaaacccattgttgaggggatggggctggcttgggctccacaatttactaagttaaaacaacgatttgccaaaggcgttacggaaatcataataccttctgctggtggtgagcaaacaatgacttgtcttgctctgcgtaagctggctgcctggcttcagaccatcaactcaaacaaagttaaacctgaaatccgcgacaaggtaatccagtatcaggaagagtgcgacgatgttctctatgaatactggacgaagggggttgtcgttaatccccgtcgaatgagtgtgatggaagaactcaatcaggcttgcgctgacatgaaacgggataaaaacattgccagtgtgtttgctaccgggctgaatgagtggaaacaggttaaagccgcgcatgtatcaaaaatccgcacattgataaacgaagcgaatctgctgattgattttgtcctagctgatacaggcaaagggaaaataacaaaggcggattga

SEQ ID NO: 29836 - DNA, 486 bp, Escherichia coli
atgacaaccgtttcgcataattccaccacaccttctgtttccgtaaccactgcatcagggaataacccacctcagctggttgccactcccgtccctgatgaacagcgcatcagcttctggccgcagcattttggcctcattccacagtgggtgaccctggagccccgtgtcttcggctggatggaccgtctttgcgaagactactgcggtggtatctggaatctgtacaccctgaacaacggcggggcatttatggcacccgaaccggatgacgatgatgacgaaacatgggtactgttcaatgccatgaacggcaaccgcgctgaaatgagcccggaagccgccggtattgctgcctgtctgatgacgtacagtcatcatgcctgtcgtacggagtgttatgccatgacggtccactattaccggctgcgggattacgccctgcagcatccggaatgcagcgccattatgcgcatcattgactga

SEQ ID NO: 29837 - DNA, 819 bp, Escherichia coli
atgagattagccagtcgttttggttatgcgaaccagatacgtcgtgatcgtccgctgacacacgaagaactgatgcgccatgtaccgagtatttttggggaaaaccgacatacctctcgcagtgaacactatgcgtacattcccactatcaccgtcctggaaaatctgcagcaggaaggctttcagccgttctttgcctgccagacccgcgtgcgcgaccagagccgccgggaatacacaaaacacatgctgcgtctgcggcgggccggacagataaccggtcagcatgtccctgaaattattctgctcaactcccatgacggttcatccagctaccagatgttacccggatattttcgtgccatttgtaccaatggactggtctgcggtcagtctctgggagaattgcgtgttccacaccggggaaatgtggtggacagagtcattgaaggggcttacgaggtggtgggcgtttttgaccggatagaggagaagcgtgatgccatgcagtcgctggtcctgccgccaccggcacgccaggcgctggcacaggcggcactgacttaccgttatggtgacgaacatcagcccgtcaccaccgccgacattctgacaccacgacgccgggaggattacggtaaggacctgtggagtgcttatcagaccatccaggagaatatgctgaaaggcgggatttccggtcgcagtgcaaaaggaaaacgtatccatacccgggccattcacagcattgataccgacattaagctcaatcgcgcattgtgggtgatggcagaaacgctgctggagagcatgcgctga

SEQ ID NO: 29838 - DNA, 1572 bp, Escherichia coli
gtgcttgccgggctggaagaccgtcgtgtggcgttaattcgtcagcaggcggcagagcagaataaggtgtaccagtccatgctggttatgaacggtcagtatacggaattcaaccgtctgctggggctggggaatgaactgcttcagcagcggcagggactggtgaatgtgccgttacggctgccacaggccactctggatgataaacagcagagtgccctgacaaaaacagagcgtgagctggccctgtccagactgaaaggggaagaaaaagagcgcgtccgactggggtatgcggcggatgacctcggttttgtgggggatccgtatcaggaggcgagacaacgttatatcagtaatgccctggaagcctggcgcaataacgaggtgaataaacccaaatcccggggtggaaaatcagagacggaaaaagcggaagacagtttttcccggctgctgaagcagcagaaagagcaactggcactggccggtcagaacacggagctggcgaagctgaagtaccagacagcgctgggtgaactgaaaaccctgtcggagatacagaagcaggaactgctgcgcaatgcggccctgattgaccagcaaaaaatccgggagcagttgcggtaccgggaagagaccctgaagaatgataatgtggctgcgcgtgcatcaaatgaatctgaactgctggggtacgggcagggggaacgagccagggaacgcatgcgggagttgcagcagatccgcgacagcttccgccagaaggatgcggaccttcagtctcagtatcagaccggggatatcagtgaggatttttacagacaggcgctggcacagaacgcgcagtatctgagcgaacgccttaaggaccaggcagtcttttatgccgaatcggatgtgcagcgtgcggactggcagaaagggctgcaggagggattcagtaactgggtggataatgcgtccgattacgcctcacaggcagcacagctggcgacggagggtatctcagggatggtgaataacatcacggagatgctgaacggaaataaagtggaatggcgcagctgggcctcatccgtactgcaggaaatatcaaaagttcttatgaatgccgcgattgtcaacggaattaagacggcggcaaacggtatgtccggtgcgggaggatttctcggcagcattggtgactggctgggcggagcggtggccaatgcaaaaggcggcgtgtatacctcggcaaacctgagcgcgtacagcaacagcattgtggacacgcccacgtactttgcgtttgcaaaaggggccgggctgatgggggaagccggacctgaagctattatgcccctgacccgggcggcggatggctcgctgggcgtacgcgccgtgggcagtatgaacggcagtgctggtctggtgtattccccggtctaccacattgccattcagaatgacggggctaacggacagatagggccggaggcggcaggcagtcttgtgcagctgattgaccagcgggtgcaggcggtgatgctgtccatgcgacgtgacggaggaatgctgagtggctga

SEQ ID NO: 29839 - DNA, 279 bp, Escherichia coli
gtgggggcaaccggacctcagggaccgaagggcgacccgggggagacacaaatccgttttcgtctggggccgggaaacattattgagacaaacagccatggctggttcccgggtacagatggtgcgctcatcaccggactgacctttcttgcccccaaagataccacacgggttcagggtttttttcagcatttgcaggtcaggtttggtgacgggccgtggcaggatgttaaggggctggatgaagtgggcagtgatacaggcagaacaggagaatga

SEQ ID NO: 29840 - DNA, 270 bp, Escherichia coli
atgaatattttgagaaagcttatggagcgtctgtgtggttgcggaaagcatgatgactgtgaacacgggcagtcgcttacagtacaactgcgactggggccggcagacatcctggagtcagatgagaatggcattattccggagcaggacagggtaatcacgcaggtggtgatactggatgcggataaaaagcagatacagtgcatggtaagaccgctgcaaatcctacgtgctgacgggaggtgggaaaatattggcgggatgaaatag

SEQ ID NO: 29841 - DNA, 576 bp, Escherichia coli; identical to SEQ ID NO: 23633

SEQ ID NO: 29842 - DNA, 213 bp, Escherichia coli
atgctgaacacatgtaggttagcctcttacgtgccgaaaggcaaggagaagcaggctatgaagcagcaaaaggcgatgttaatcgccctgatcgtcatctgtttaaccgtcatagtgacggcactggtaacgaggaaagacctctgcgaggtgcgaatccgaaccggtcagacggaggtcgctgtcttcgtagactacgaatctgagaagtaa

SEQ ID NO: 29843 - DNA, 345 bp, Escherichia coli; identical to SEQ ID NO: 23976

SEQ ID NO: 29844 - DNA, 468 bp, Escherichia coli
atgaaccgtgttctgtgtgtggtgattattgtcctggcggttggctatggtgcgctgtggctggcaacaaaccattaccgtgacaacgcgctcacctacaaagcgcagcgcgataaaaaagccagagagctggaacaggcgaatgccaccattactgacatgcaggtgcgccagcgtgatgttgctgcgctcgatgcaaaatactcgagggagttagccgatgcgagagctgaaaatgaaactctgcgtgctgatgttgccgctggtcgtaagcgcctgcggatcaacgccacctgctccggtaccgtgcgtgaagccaccggcacctccggcgtggataatgcaaccggcccccgactggcagacaccgctgaacgggattatttcatcctcagagaacggttgatgacaatgcagaagcagctggaaggggcacaggactatatccgcactcagtgcctgaactaa

SEQ ID NO: 29845 - DNA, 228 bp, Escherichia coli; identical to SEQ ID NO: 23996

SEQ ID NO: 29846 - DNA, 366 bp, Escherichia coli; identical to SEQ ID NO: 23997

SEQ ID NO: 29847 - DNA, 372 bp, Escherichia coli
atgaatatggaaaataattcacatacaacaagtccatacattcagcttatagagcaaattgcagttctacagcaggaagcaaagcgactgcgagagcaggaagttcaaagtgtaattgagtcgattcagaagcagattacttattacaatataaccttacaagagctgggatatactaatgtgcctgatgatggactcgctcgccggaactcatcgaaaggtgtttactaccgcaatgaagaagggcagacctggtcgggcgtaggccgacagccacgctggcttaaagaagcactgttgaatggaatgaagaaagaagattttcttgtgaaggacactgaagaagaaataataccgctgaaaaatatttaa

SEQ ID NO: 29848 - DNA, 165 bp, Escherichia coli
atggagctactgcttggtgaaaaaggtgagctgatttttacaggatttaatgtgattttctgtggtgatacagagaagctgctttttttatatacagctgtaatattgcggttgacggttggaaaaagtgaagaaacattgttaatcatgcagattaccttataa

SEQ ID NO: 29849 - DNA, 753 bp, Escherichia coli
atggcaacaccaaatccccttgagccggtaaaaggtgccggtaccactctgtgggtttacaacggcaagggtgatgcttatgcaaacccgttgtcagacgatgactggcagcgactggctaaggtgaaggatctgacgccgggcgagatgacggcagaaccctacgatgataactacctggatgatgaagacgcggactggaccgcgaccgggcaggggcagaagtctgcaggagataccagttttacgctggcctggaaaccgggagaagaaggtcagaaagggcttataggctggtttgaaagcggggatgtgcgggcctataaaatccgtttcccaaatggcacggtggatgtgttccgtggctgggtcagcagtatcggtaaggccgtgacggcgaaagaagtgatcacccgcacggtgaaagtcactaacgtgggcaaaccttccgtggcggaagaacgcagcgaaattacgccggccactgcaattaaggtgacaccgacatccggtacggtggcaaaagggaaaacaaccaccctgactgtttcttttgagccggaaagtgcaaccgacaagacgttcagagcggtttccgccgatccgtcgaaagccaccattagtgtgaaagatatgacaattacggtaaacggcgtggcgacaggtaaggtgcagatccctgtggtgagcggaaatggtcagttcgccgcagtggctgaagtcaccgttactgaagcgggcgctgcagggtaa

SEQ ID NO: 29850 - DNA, 423 bp, Escherichia coli
atgtttctgaaaacagaacaatttgaatataacggtgtgtccgtcacgctttccgaattgtctgcgctgcagcggtttgattatataaagtttgtttcagacgcagaacaacaggagacaacgaagcatgatgtcgtgcacattaaccagcgatatctggaaacggcatccctgcttgtggcgatgtcgctatggcattcccattccctcaaaggcactctggcctctccggagacagagatgcagcagatccgccgtgaagtgatgctgggatggcctgctgatgcactgaatcaggcaacgaaccgggtgctttatctttcaggtatgctggataaccggcacgatgccgatcctgaacaaaccggtaaagcagaagcgactgagtcggtaacatcaaaaaagcattcgaaggcgagctga

SEQ ID NO: 29851 - DNA, 189 bp, Escherichia coli
atggcgctaacatcagtgtctttgatactgacaatgtttattatgtctccgataatattacagataaatgataatatttctcaggaaccaatcaattataccgactctgatttttttcaaaaagttgatgagaaaatattatcaccatatcgcggttttttagaaaaaaatacagagaaagacaagtaa

SEQ ID NO: 29852 - DNA, 648 bp, Escherichia coli
atgcagttttcctattttttcccgaaacagccccagatacccttctgcatcattgctggcccggccactggcttccacaaaagcagatttccccaccaggttgacgctgcgcacgtaaaaccagaaatccttcccgggcttaatgtgcgggccggatacactccactgactgccggtccccagataacgggcagaggtttccacctgagatgtatctgcgatttttgtctccgaaaaccagaactcaaactgtaccgtcgggtcatacaccgcaagacgcgggaccgctgttatctgaaaatagcccggtgtcagctcaatcgtggcgggtaccgcaggtgcattaatcctgaacgtggtggtggccggttccccctgctggccataactgttaatcgccctgaccgtcagggtgtattcccccggcggcagaccactggaacgatgctctgtatccgcagtgatggcggtggtcaccagacggctgccttctccgcttccgctggtcaggcgcagactgaagcgcacgcccttcaccacccgcggcgtgtcccatttagcctgcgccagatactggccgtcagctgcgctcacctccaccgtcaggtgctgcactgccggagggatgacgctgttcagggtgcctga

SEQ ID NO: 29853 - DNA, 564 bp, Escherichia coli
gtgctgacaacgcaaaaacgaaaatttgcgctggcgctcatgtccgggaaaaacaaaacagcgtcagcccttgccgccggttattcggcgaagacagccagggttaaaggctcgcagctggcaaaagatccggaggtgcttgcgtttatagcccgtaaacagtgcgagacggtggaggtggatgaggttcctgtttatcggcagaaaaaatcagagccggaggataaaccccgtcgccgtgaggcggctgcaataccacagccggacgaaacaaatccggagatgccaccgcccgtggtgatatctcctggtattgagtatatggaggacggtcttcccgatccggtgaaagcgatggggcgtcttctggtggagaacattaataccgaccccaggctggcgctggatgcggcttataagctggcgcagttcacgcaccacaaaaaaggggatgccggtaaaaaatcggcaaaaggtgacgcggcgaaaaaagcggctaaccgttttgcggtgccaccaccaccccgcctggtggtgaataatgataatgagggcaacggatga

SEQ ID NO: 29854 - DNA, 1095 bp, Escherichia coli
atgaaatatataccagtttaccaaccgtcattgacaggaaaagaaaaagaatatgtaaatgaatgtctggactcaacgtggatttcatcaaaaggaaactatattcagaagtttgaaaataaatttgcggaacaaaaccatgtgcaatatgcaactactgtaagtaatggaacggttgctcttcatttagctttgttagcgttaggtatatcggaaggagatgaagttattgttccaacactgacatatatagcatcagttaatgctataaaatacacaggagccacccccattttcgttgattcagataatgaaacttggcaaatgtctgttagtgacatagaacaaaaaatcactaataaaactaaagctattatgtgtgtccatttatacggacatccatgtgatatggaacaaattgtagaactggccaaaagtagaaatttgtttgtaattgaagattgcgctgaagcctttggttctaaatataaaggtaaatatgtgggaacatttggagatatttctacttttagcttttttggaaataaaactattactacaggtgaaggtggaatggttgtcacgaatgacaaaacactttatgaccgttgtttacattttaaaggccaaggattagctgtacataggcaatattggcatgacgttataggctacaattataggatgacaaatatctgcgctgctataggattagcccagttagaacaagctgatgattttatatcacgaaaacgtgaaattgctgatatttataaaaaaaatatcaacagtcttgtacaagtccacaaggaaagtaaagatgtttttcacacttattggatggtctcaattctaactaggaccgcagaggaaagagaggaattaaggaatcaccttgcagataaactcatcgaaacaaggccagttttttaccctgtccacacgatgccaatgtactcggaaaaatatcaaaagcaccctatagctgaggatcttggttggcgtggaattaatttacctagtttccccagcctatcgaatgagcaagttatttatatttgtgaatctattaacgaattttatagtgataaatag

SEQ ID NO: 29855 - DNA, 132 bp, Escherichia coli; identical to SEQ ID NO: 24006

SEQ ID NO: 29856 - DNA, 315 bp, Escherichia coli; identical to SEQ ID NO: 24010

SEQ ID NO: 29857 - DNA, 846 bp, Escherichia coli
atgcgggagttgcagcagatccgcgacagcttccgccagaaggatgcggaccttcagtctcagtatcagaccggggatatcagtgaggatttttacagacaggctctggcacagaacgcgcagtatctgagcgaacgccttaaggaccaggcagtcttttatgccgaatcggatgtgcagcgtgcggactggcagaaagggctgcaggagggattcagtaactgggtggataatgcgtccgattacgcctcacaggcagcacagctggcgacggagggtatctcagggatggtgaataacatcacggagatgctgaacggaaataaagtggaatggcgcagctgggcctcatcagtgctgcaggaaatatcaaaagttcttatgaatgccgcgattgtcaacggaattaagacggcggcaaacggtatgtccggtgcgggaggatttctcggcagcattggtgactggctgggcggagcggtggccaatgcaaaaggcggcgtgtatacctcggcaaacctgagcgcgtacagcaacagcattgtggacacgcccacgtactttgcgtttgcaaaaggggccgggctgatgggggaagccggacctgaagctattatgcccctgacccgggcggcggatggctcgctgggcgtacgcgccgtgggcagtatgaacggcagtgctggtctggtgtattccccggtctaccacatcgccattcagaatgacggggctaacggacagatagggccggaggcggcaggcagtcttgtgcagctgattgaccagcgggtgcaggcggtgatgctgtccatgcgacgtgacggaggaatgctgagtggctga

SEQ ID NO: 29858 - DNA, 147 bp, Escherichia coli
gtgaaacacgatacgcgtgaagcggaagatgtgctggatgtggcggtggccattgcggaggcagacggcgaaattgagccggaagagcgcaaggtgctggaagagattgccggtgttctgggtcttcgtctggagaatcacctgtga

SEQ ID NO: 29859 - DNA, 168 bp, Escherichia coli
gtgacggtaaaactgcgcctggctgtggctgcactcctgctgtttctggtggtgatggtggatttcaccagcagaatcatgtcggtgctggcggatggggtgctggtctgcggcattgtggtattgctgtggccggtgataaaaagaaacagcctgcataatgcttga

SEQ ID NO: 29860 - DNA, 342 bp, Escherichia coli
gtggctgagataaaaacgctgcatctggtcccgcgtgaagggatgcaggtgagtgagaagccgtcggtggtgagggtgcggtttggtgacggttatgaacagcgccgccccacagggctgaatcctcaactgaagacgtttcaggcggtgttccgggtgacggatgagtcaacccggcgctggctggatgaatttttatcctggcatggtggttaccgtgcctttttgtggcgaccgccgaaacataaccggacggtgaggggtgtgtgccgggagtggagcgtcacggataacgcccggtacagtgatttcagttgcacgatagagcaggtggtgaactga

SEQ ID NO: 29861 - DNA, 744 bp, Escherichia coli
atgttatcatcttgtattggggtggttatgaaggatggtgcgctgctcaggagttcttcactttttattgcctacatgggatgccttggatgggggagtgcttatttctatggatggggtacttctttttactacggcttcccatggtggattgtaggtgcaggtgttgatgatgttgccagaagtttattttttgcagttatcgtcattgctatatttcttatcggttggggtattggtgttgtattctttttcgcagtgaaaagaaaacattctatgcaagagctaaatgtatttcgcctttattttgctgtggaattattgtttgtgccggcaattattgagttttctatattgagacagaagattcaggtacctcttttgctactgtcagcagcgattgcgctggcggtcacaatttcgataagatcttatgggcgatttttatcggtatcatgcttctatgataagccatttataaaaaaacatttttttgagattgtgatgattgcttttgtggcatatttctggcttttttcatttctgacaggatattacaaaccgcagtttaagaaagaatatgaaatgattaattataatgatggttggtattatgttcttgctcgttatgataattgtctggttttgtctacttctttcaatgcaggtagtaaaaggtttgtgatttatcaatcagcacaagataagaatcttcaggttgatattgtaaggaccagaatttaa

SEQ ID NO: 29862 - DNA, 375 bp, Escherichia coli
gtgtcagacaaactctccgggataactcatcccgatgacaatcacgaccgcccctggtgggggcttccctgcacagtgaggccctgttttggcgctcgtctggtgcaagagggtaaccgcctgcattaccttgccgaccgcgccggtatcagaggccgcttcagcgacgcagatgcataccatctggaccaggcctttccgctgctgatgaaacaactggaactcatgctcaccagcggtgaactgaatccccgatatcagcataccgtcacgctgaatgcaaaagggctgacctgcgaagccgacaccctcggctcctgtggttacgtttatctggctgtttatccgacaccagcacccgcaaccacctcataa

SEQ ID NO: 29863 - DNA, 147 bp, Escherichia coli; identical to SEQ ID NO: 23916

SEQ ID NO: 29864 - DNA, 168 bp, Escherichia coli
gtgacggtaaaactgcgcctgactgtggctgcactcctgctgtttctggtggtgatggtggatttcaccagcagaatcatgtcggtgctggcggatggggtgctggtctgcggcattatggtattgctgtggccggtgataaaaagaaacagcctgcataatgcttga

SEQ ID NO: 29865 - DNA, 147 bp, Escherichia coli; identical to SEQ ID NO: 29858

SEQ ID NO: 29866 - DNA, 168 bp, Escherichia coli
gtgacggtaaaactgcgcctgactgtggctgcactcctgctgtttctggtggtgatggtggatttcaccagcagaatcatgtcggtgctggcggatggggtgctggtctgcggcattgtggtattgctgtggccggtgataaaaagaaacagcctgcataatgcttga

SEQ ID NO: 29867 - DNA, 777 bp, Escherichia coli; identical to SEQ ID NO: 23638

SEQ ID NO: 29868 - DNA, 369 bp, Escherichia coli
gtgctgggggcggcagccatcgtgggctctttcttcactgccggggcatcaatggcgttatggggttcagccctggcagccggtggtttttctgccaccacgatgctgttttcacttggagccagcatgattctgggcggtgtggcccagatgctggccccgaaggcaaaaacaccggattaccgcgcaacggataacggcagacagaacacgtacttttcctcgctggataacatgattgcccaggggaacccgatgccggtgccttacggggaaatgctggttggctcccgccgtatatcccaggacatcagcacccgtgatgaaggcgggggcggaacggtcgtggttgtcgggcgacagggataa

SEQ ID NO: 29869 - DNA, 435 bp, Escherichia coli
atgcgtgatatccggcaggttcttgagcgctggggggcatgggcggcaaataactatgaggatgttacatggtcgcccattgctgccggatttaagggactgatccccgaaaaagtaaaatcacgtccacagtgctgtgacgatgatgcgatggtgatatgcgggtgcatagcccgcctttaccggaacaatcgcgatctgcatgacttgctggttgattattacgtgttgggggagacgttcatggcgttggcacggaaacatgggtgctctgacacctgtataggtaaacgccttcacaaagcggaggggattgttgaaggcatgctgatgatgctgggagtgaggcttgagatggatcggtatgttgagcgtgaattgccgggagggagaacctctgtattttatcagcgaaaaaatagtttacgatcgtaa

SEQ ID NO: 29870 - DNA, 195 bp, Escherichia coli; identical to SEQ ID NO: 23944

SEQ ID NO: 29871 - DNA, 489 bp, Escherichia coli
atggcgaagcccttctgcgcccacgctgaagtccacggtctgcgtttccagcagttccgttttaatcagccacagcccggcacggtgtgcctgcccccgactggtacagccaaaggcatccatcttcgtgacgttacgaccgtaacggagaatggcctgcgtgtcctccacaagctctgtcgccgtctcccagccgttgtccgggtcagtccagttcacctcaacggcattatggcggtctttcagggcgctaaagctgtagcggaacggcgcgccatcatccggcatcaccacattactgcggttataggtccacaccttatccgacggccggtcctgcacgaacgtcagcgtctgcccgttccataccggcatacagcgcatcgccgagcagaaatcgctgagaacatcccacgccttacgctgtgtggtcaggtaggcattacaggtgatgcgcggctccgtgccgccaaagccgtccggtactga

SEQ ID NO: 29872 - DNA, 318 bp, Escherichia coli; identical to SEQ ID NO: 23982

SEQ ID NO: 29873 - DNA, 396 bp, Escherichia coli; identical to SEQ ID NO: 23898

SEQ ID NO: 29874 - DNA, 270 bp, Escherichia coli; identical to SEQ ID NO: 24012

SEQ ID NO: 29875 - DNA, 192 bp, Escherichia coli; identical to SEQ ID NO: 24041

SEQ ID NO: 29876 - DNA, 189 bp, Escherichia coli; identical to SEQ ID NO: 24042

SEQ ID NO: 29877 - DNA, 330 bp, Escherichia coli
atgaaaacctttcgctggaaagtgaagccggatatggaggtgaactcgcagccatcggtgcgtgaagtgcgttttggtgacgggtattcgcagcgtatggcggcggggctgaatgctgacctgaaaacataccgtgtgacgctttccgtgacccgggaggaggcccgacatctggaggcattcctggcagagcacggaggctggaaggcatttttgtggaagccaccctatgcataccggcagataaaggtgacctgtgccgggtggtctgcgcgggtcgggatgttgcgcgttgagttcagcgcggagtttaagcaggtggtgaactga

SEQ ID NO: 29878 - DNA, 315 bp, Escherichia coli
atggcgttatggggttcagccctggcagccggtggtttttctgccaccacgatgctgttctcactgggggccagcatgatactgggcggtgtggcccagatgctggcaccgaaggcaaaaacaccggattaccgcgcaacggataacggtaaacagaacacgtatttttcgtcactggataacatgattgcccaggggaacccgatgccggtgccttatggtgaaatgctggttggttcacgacggatatcccaggacatcagcacccgtgatgagggcggagacgggaaagtggtggttatcgggcggggatga

SEQ ID NO: 29879 - DNA, 270 bp, Escherichia coli; identical to SEQ ID NO: 23881

SEQ ID NO: 29880 - DNA, 207 bp, Escherichia coli
atggaaaaaatcacaacaggtgtgtcatacaccacgtcagcggtggggacgggatactggttactgcagctgctggacaaagtctctccgtcccagtgggtggcgataggcgtgctggggagtctgctgtttgggctgctgacatatctgactaacctgtatttcaaaatcagagaggaccggcgtaaggcggcgcggggagagtaa

SEQ ID NO: 29881 - DNA, 171 bp, Escherichia coli; identical to SEQ ID NO: 24055

SEQ ID NO: 29882 - DNA, 147 bp, Escherichia coli
atggggtggctaatgatatcagataaactcataacgctggtgaagagcctctgtgtacttgtcggcatttcattttcactaatgctggttgctctttttctttccatggcctggatggcgttgacttcggcagggctggtggggtga

SEQ ID NO: 29883 - DNA, 213 bp, Escherichia coli
atgctggcaccgaaagccagaactccccgtacacagacaacggataacggcaaacaaaacacctatttctcctcactggataacatggttgcccagggcaatgttctgcccgttctgtacggtgaaatgcgcgtgggatcacgtgtggtttctcaggagatcagcacggcagacgaaggggacggtggtcaggttgtggtgattggtcgctga

SEQ ID NO: 29884 - DNA, 216 bp, Escherichia coli
atgtaccagatggaaaaaatcacaacgggtgtgtcatacaccacgtcagcggtggggacgggatactggttactgcagctgctggacaaagtctctccgtcccagtgggtggcgataggcgtgctggggagtctgctgtttgggctgctgacatatctgacgaacctgtatttcaagattaaagaagaccggcgtaaggcggcgcggggagagtaa

SEQ ID NO: 29885 - DNA, 357 bp, Escherichia coli
atgaaaaaagcgggtctggacaaacctgaacttgaggcttttttgcgggatatgatcaacggcaatcaaaaaagctggctggcacattgtaccgattcagaggcgttaataatcgatagggttattggtgaagtactggcaggttatcccgggctgctcaatgttctgagtcagcgttatgtggggcgggggatgactaagcgcaaaatggctgaattgctgaatgatgcacatccggaatggagtttaagaacctgtgaaagacgcattgagcattggctaaaggtggcagaatttattttgtacaaaccaatggttatggcttttggtatagagaaaaaagttattgctttttga

SEQ ID NO: 29886 - DNA, 228 bp, Escherichia coli
gtgaacgccttatccggcctacaagtggcgcaagaatttgtaggcctgataagcgtagcgcatcaggcatttatcaccattgccggatgcggcgtgaacgccttatccggcctacgaatggcgcaagaatctgtaggcctgataagcgtagcgcatcaggcatttgtcaccattgccggatgcggcgtgaacgccttatccggcctacgaatggcacgagaattgtag

SEQ ID NO: 29887 - DNA, 192 bp, Escherichia coli
atggagaaaaataatcttcagtgggctatccgtagtatggatgaagatgattttaatctggacgcagatggccctgatatttcagcatgggaacctgagcgaccagaaggtgagggatggtttatcggttcgatacatgacaccgaagatggtcctgtttgtgtatggctgagaaataaggccgaagcataa

SEQ ID NO: 29888 - DNA, 159 bp, Escherichia coli
atgcatatgttttttcagaagctttatatacaaaaccacgatgtgtataaatttttgaggctagttcatagccttgcaacaaagccaatgattctaaaacaatctctcgttttagggctaactgagcatctctacggggtattggaggatgaagactaa

SEQ ID NO: 29889 - DNA, 183 bp, Escherichia coli
atgaagcatcctcacgataatatccgcgtaggcacgatcactttcgtctactccgttacgaagcgaggctgggtatttcccggcctttctgttatccgaaatccgctgaaagcccagcggctggctgaggagataaataataaacgggaggcgatatgcacaaagcatctcctgttgagttaa

SEQ ID NO: 29890 - DNA, 141 bp, Escherichia coli
atgtgctatcaggcgttatttgatggattaatcctgacgaagaactttgtgaccataatcgagcaacgcatcagtgactttacgcatcatgcggctttcaggagcaaagcggtgccagtagagcatccggcgttgaaataa

SEQ ID NO: 29891 - DNA, 333 bp, Escherichia coli
ttgttgaccacttcaggtgtccttgataccaacggtggttgggtagatgatgctcagaacgttgatgaactgaacattactctgaacaacggtagtaagtgggttggctcagcaaacatgagtgctgaagtaattgctccggcagatatgtatgatgttgcgccgaacagcctgacccctggtgccactatcgaagctaacgattggggtcgtattattgacaacaaggtattccagagcggcgtatttaacgtagcactgaacaatggttcagaatggaataccgttaatagttcagtaattgatacattagctgtaaataatggctcttag

SEQ ID NO: 29892 - DNA, 135 bp, Escherichia coli
atggcgcagataacaacgaccgatgccaatgaatttagcagcagtgctgaattcacccccatgcgcggctttagcaattgtcatctacaaaccatgctgccgcgtctgttccgtcgcaaggccgtcgcaaggtga

SEQ ID NO: 29893 - DNA, 633 bp, Escherichia coli; identical to SEQ ID NO: 2408

SEQ ID NO: 29894 - DNA, 240 bp, Escherichia coli
atgaatgttactaaagaagagcgtgataaattgcgtcagaaagtacccggtttacgtaacgttgctttaacggcaccgtacttccatcgcggtgacgtgccgacgctggacggggcggtgaaactgatgctgcgctatcaggtaggcaaagagctgccgcaggaagatgtggatgatatcgtagctttcctgcacagtctgaacggggtttacacgccgtatatgcaggataaacaataa

SEQ ID NO: 29895 - DNA, 339 bp, Escherichia coli
atgaaaaaaatcatgatactgctcagtttactgatgttcctgcctctgacggcaatcagtaagcccttaattccaataatgaagacactttttacggatgttaccggtactgtaccagatgctgaagagatcgcgcataaagccgaactttttcgccaacaaaccggagttgcaccgtttattgtggttttacccgacattaataatgaagccagtctcaggcaaaatggcaaagcgatgctggcgcatgcggcatcttcaatgagtaatgtaaaaggaagtgttctgttactctttactacccgcgagccacggttaattatgataaccaacggctag

SEQ ID NO: 29896 - DNA, 324 bp, Escherichia coli
atgaataatcacccaatgcaaattttcgttgataacgacaccgctatgatgattcaggctttcactgatgtaggtgttagcattgactttgataagttgttagagttaatggctgataatgcggaaagcatctctgactttattcactcggtggagtttaacgagcctcgaatgatgctaccaattaaagacagcaacatgaaaagattggttatcgagcaaacgaacaaatacagcgttagccctgaaaaatatctcaaggcagctatagcaattttgtacgctgacaatattttggttacggattcgaaggtggtgcattaa

SEQ ID NO: 29897 - DNA, 273 bp, Escherichia coli
atgaagcaatggcgagatgatattaaacggttctttgcaacttacttcatgattaattacgaaacaggaatgcttgaatggattgatggcggagaggttaagacaagagatgatgcttacggtaatccaatgattcgttatggcactcgtgattattatctgaagtatgtcatctggtttttgcatcatgaagttcaggcaactaaaaagattatcttcaaggatggtaataaaagaaattgccacccaaacaacttactacaggaggtttaa

SEQ ID NO: 29898 - DNA, 552 bp, Escherichia coli
atgaacgacagagaatttcaaagatttcttgaagagagcaaagcaagaaacagatacaactcctacagctacacagacacccccaccagctacgaactacccaagctcaccagagcagaacgcaaaggccttgatgaattaattcgtagcattacgccacgagacagatatatgccaacacgcaaagaaaaagaaaatactttaaaaactttcttgatgggctttgattcttacgagcaactgccagcaaaaattgaagatttaattatcggtacttgtcgcagttttggaagggataactatcaccggaaagttttctatttactacgaaatattgacaagattagctcaagcacaataacaagttatctacagcgtcaagcgacccgattaagccatgagctaccaagtgataaatattgcgctaacttagccactatttgcatgaaagttatcgagacaatcaatcatcatgttgaggttggcaatatcagccttacgaccagtgaaccagactttgagtttgacccgtatattttggaggaattttaa

SEQ ID NO: 29899 - DNA, 549 bp, Escherichia coli
atggcggtgattggttattgcagggtatcaacacaagaccagactgtagacaaccagaaactacagatagagaaggttcacaaggtcgataaatggtttattgatgaggctgtctcaggaactacaaaggccaccagcagagatggttttagagacatgatgaactatgtaaggtgtgacgatacgttagttgtggtagctattgaccgtttagggcgtaataccgttgatgtgctctctaacgtggagtcactacagtctaaaggtgtgagagttgtttctttgcgtgaaggtttcgacttattaacaccaatcggtagagcaatgcttactatgatggctggtttagctgaccttgaaaaagaccttatcagtgaacgtagaaaggctggtattgaacgtgctaaagctgaaggggttcacatggggagacctgtaaaagcttcttcagagactgtaaagacgcttatttcacaaggtaagacgaggttgcagattcaggaagagttaggaatctctaaagcaacttattacagacttgctaaataa

SEQ ID NO: 29900 - DNA, 510 bp, Escherichia coli
atgaaaaaatggatgttagcaatctgcctgatgtttataaatgggatctgcgaagccgccgattgctttgatcttgcaggtcgggattacaaaatagacccggatttactgagagcgatatcatggaaagaatcccgttaccgggttaatgccatcggtattaatccggtaacgggatatggcagcggactgatgcaggtagattcccagcattttaacgaactggcccgctatggaattaagccggaacatctgacaacagatccctgcatgaacatttataccggtgcttattatctggcaatagcctttaaaaaatggggcgtctcctgggagtccgttggtgcatacaatgccggattcaggaagaccgaacgccagaaccagagacgtcttgcctacgcatcagaggtttaccggatttatacctggataatgagcagtaaaggcatccgggttccgaccacgaagaaatcactttcccaaattaacagtgtgcagaaaaattaa

SEQ ID NO: 29901 - DNA, 216 bp, Escherichia coli; identical to SEQ ID NO: 10053

SEQ ID NO: 29902 - DNA, 513 bp, Escherichia coli
atgttctcggcaataagccagaaaacggggctcagtaacgtaacaccgatacttggtactagtgataacggtaacggtacaaatctggcaattattggctttaactcagagcctgataaaaaagcagtcagtacggcggccagttttgctaatagcagctaccgccttttctctacagaaatgaataacctcaataaacgtatgggggacattcgcgacagtggagaagccggggtctggggacgctatatgctcggtcaggggagtggcactgacggttatcagaatacatacaaccacctgcaactcggtgcagacaaaggcataagaattgaatcagcaatgctatacactggcttaatatttacccatacaagtaccaatgcagagctgagcggcagctattatggcgatactaaaagctatggtctgggtgggtatacgtccatcttctttgataacggtttttatactgaaccgccccgggtttcctggagagtgttttatctgtga

SEQ ID NO: 29903 - DNA, 228 bp, Escherichia coli
atgccgcttggtgactctcttcgtcacgcaacccgacctatgactaatgactgtgggacctgggatcaagggggctggcggagagacaacatggataccaaatatacaacgctgactggcataataaccctcgtagaccacttaggtgactggactagaaaaaaatcacagccgtcgagcttgcaaccatgtgaactttacactgtctcccatcatatgctacgttga

SEQ ID NO: 29904 - DNA, 717 bp, Escherichia coli
gtgcaggatctccagatcagtctgtgcgcaacactgctagcggaagcctgcaatataggacatgaacctctgataaagcataatattcccgcgcttactcgccatcgtctgagttgggttaagcaaaattatctcagggcagaaacgctggtcagcgctaatgtacggctggttgattttcagtccacgcagccgctcgcgggatactgggggaatgaggttgcttccgcagatggtatgcgttttttcacaccggttaaaacggttaattctggaccaaatcgtaaatactttggttcaggatgcggtatcacttggtacaaattcgtccccgatcagtactctggtttccatggcattgttgttcccggtacgcttcgtgatcccatctttgtactggaagggctcctagagcagcaaaccgggctaaatccggtagaaattatgacagacacggcaggatccagcgatatcatttttggccttttctggttatttggctatcagttttcccctcgtctggccgaggcaggtgtggcgatgttctggcgggcagataaaacggcacattatggtaccctgaatgagttggcccggggatgtgttgagatgtcaaaaatagaatcccaatgggatgaaatgatgcgaatggagggctcactaaagcttgggaccatccatgcatcagaacttaattcgttcactgttgagaagtag

SEQ ID NO: 29905 - DNA, 324 bp, Escherichia coli
gtgctctggtgcatcattgagaattctcttgatcgccattcgtttttgggaaatgggctgagtactgaaggtactatggggaaaatggtgattcagatactcgcggctgtcgctgaagctgaacgtgagcacatcctcgaacgcaccaacgatggtcgactggttgctatggttgctggtgttaagtttgggcgtaaacctcaccaaaaatcagcaatgatacgggaatttatcagccagagtgctaccgttaaactcatcatagagaaaactggtatttctcgtgcaacgtatttcagaataaaaaactcacccgccatttaa

SEQ ID NO: 29906 - DNA, 903 bp, Escherichia coli
atgatttatgtttttggccaccaaaatcccgatagcgacagtatctgcagtgcacttgtcaccgcagactggttaaacatgcttgggaagtttgcaaccccatttcggctgggtgaaattaccccagaaaccgccttcattttgcagcaagccggggttgaagctcctcgattacttagcgaagacttgagtgggacgtcggtctggctggtcgattttaccgatgcggagcaagggcctccttctttagctctcagtaatattgttggcatcattgaccatcaccgactgggaactgtgatgacacaaaaccctccggatgtatggatacgcgccgtcggatgttgtgccactatcctctggcaaatccttacctttgaaaaccaactaagtatttccagcactcaggctaccctgatgttaggagctattttgagcgatacagttgtactcagctcaccgacgacgaccgttcatgatattgccgccgtaaaggctttaatcgcaatcagcaaactcgactataacccctttgttaaggggttacttgccgctaaaaccgatatccaggggcaaagcccccacactctgcttatgaaggatgctaaacgctaccagattaacggcctctcggtgctcctttcacaaattgaagtcgcggccatgtccgaagtggatttggtgcttcccgaccttcatacagcactgatgaaagaatgtcagtgtggcggttttgacattgcagcgatggctatcacagatatttttcaaaaaaactcaacgttatatttctcagaaaataatgcactcaacttcgcgagtttgtcactgcctggggttatcagcaggaaaaaaggcatattgccgtggttgacgagtgctatatcaacctcctggaggtaa

SEQ ID NO: 29907 - DNA, 360 bp, Escherichia coli
atgtcaatgtataagcacgctctcatattgctcagtgatgagtctgacggtcagtttctgctccaaagtgttgcgcaaagttttcatgagcaaggaacggcgatcaccattggacatctcacgtcggattaccgtgaactcgatattgcctccgattctttaacaaaagaccatcagtctgccgacgttattgctgcaaaagccatgttaagtcgattagtgcagtcagccaggttccctgttgatgtaaaagaaattgtcacaattcgtcgattgcgtgacgttgaagtctgcgtcaccgaagcgggtgttgaaccgccccgggaatcctggagactaaacttcctgagaaagaggtaa

SEQ ID NO: 29908 - DNA, 294 bp, Escherichia coli
atgcacaaatatgtactttcagatattaaaaatgagaaaattatagtgctttataacttatatgttttaggtgtattagctatggttgcattgagtgggatggctattctttcaggccgtctttcatcctttctgacactaggtgaaagcattttaattgtatatgctctgttctacaaaagaaatacacctctggcgtttctaattttttcttttttaacaattgtgcaattaggatatgatctatttatttctaatgtgcatcctgagcttactctgattatatttgggtga

SEQ ID NO: 29909 - DNA, 525 bp, Escherichia coli
atgctgagtttccgcattgccgatcccgtttctgatgcagaacgtttcacccgctggatgaatgatccgcgcgttgagtatttctgggagcaaagtggctcactggaggtacagaccgcctatctggagcgccagctcaccggtaaacatgcattcccgctgattgggtgcttcgacgatcggccattcagctatttcgaaatctactgggcggcggaagaccgcattggtcgtcactattcgtggcagccctttgaccgtggcctgcatctgctggttggtgaacagcaatggcgcggggcccactatgtgcaaagctggctgcgcgggctgacacattacctgctgctggatgagccccgtacgcagcgcacagtactggagccacgcaccgataacctgcgcctgttccgccatcttgagcctgcgggataccggacaattaaagagttcgacttcccacataagcgctcgcgcatggtgatggcggatcgtcatcacttcttcacggaggtcggtctgtaa

SEQ ID NO: 29910 - DNA, 510 bp, Escherichia coli
gtgcagaacgacggtcagcgccatgctctgagccaggcgaaatccattgccgatgaattgatgaccgggtgtacaaacttcgtgttcagcggtaaacctggtaccggtaaaaatcacctggcagcagcgattggcaatcggctgatggcgaaggggggaagcgtgattatcgtcaccgtgtccgatgtcatgagcgtgttgcatgacggctacgacaacggccagtccggggaaaaatttttacaggagctttgtggagttgaccttctggtccttgatgaaattggcatgcagcgggatacgcgcaacgagcaggtcatactgaaccagatcgtcgaccgcagaacggcatcactgcgcacggtcgggatcctgacgaacctgaatcacgcagcgatgagcacactcctcggagatcgggtgatggaccgtatgaccatgaatggtggtcgttgggtgaattttaactgggagagctggcggtcaaacgttggacgtcagggtatgtga

SEQ ID NO: 29911 - DNA, 297 bp, Escherichia coli
atgagtgttctcgccagagagctggttgccagtggcgatgtatacgactctggttacgggttattcccgtctgaacaggcgcgtaaggactggcaaaatgctcgcaaaaaactctcaagggcaaaggtgaagaaacctgcagtggttgatccggaccttatctggtcgttaccagacggcgaaatgcgccgctacgacaggcaccagaacataatttgtcgtgagagcaggaggagcgaagttatgcagcgtgtgctggcgttctatcggggaaactttcaggaggtgatggagtga

SEQ ID NO: 29912 - DNA, 216 bp, Escherichia coli
gtgcaaagctggctgcgcggggtgacacattacctgctgctgaatgagccacgtacgcagcgcacagtactggagccacgcaccgataaccagcgcctgttccgccatcttgagcctgcgggataccggacaattaaagagttcgacttcccacataaacgctcgcgcatggtgatggcggatcgtcatcacttcttcacggaggtcggtctgtaa

SEQ ID NO: 29913 - DNA, 684 bp, Escherichia coli
atgacagacattacagccaatgttgtagtgagtatgccttcgcaacttttcactatggcgcgttcttttaaagccgtagctaatggcaaaatttatatcggtaaaattgacactgacccggtaaatcctgaaaaccagattcaggtttatgtggagaacgaagacggttctcacatccctgtttcgcaaccaatcatcattaacgctgctggatatccggtatataacggacagattgccaaattcgtaaccgtgcaaggccattctatggctgtatatgatgcgtatggagcgcagcaattctattttcctaatgtgctgaagtatgatccagacatgtttcagcagaaactaaatcagattgacggggtatcgtatttaggaggtggtaattatacagacatacgttcatataatggcacaaatgacaaaataatctgttatggaagaaataatttgttcgatggcggtgatggggtgttctatgctgacccaacagatacgacatcagaagataatgacggaacaattcttgtaggttttaacggtagaaggtggaagagggtttacgggaatgaggtttcaccgtcatggtttggggttacaggtgatggtgtaagcgacgatagcgatgccttacagaatgctttaaatatcgcaaagataaacggatgtttgaattaa

SEQ ID NO: 29914 - DNA, 1449 bp, Escherichia coli
atgtttgaattaaacacaagtttacatctacgaggtgcaactattattcgtgcttttgataattcagacacaggtgtaaatacatttgcttgcatatacacatctgaagtcgaatgtggtaataatatatctgtatttggtggtgtttttaataacaatggcaatatatacaaaaaccaagccagtatatttgaatttgtttttactaatgggattatatttcgggattgcacattccttaatgtttcaggggcgcatgctatagacttgtctcgcgtgagaaatgttaatattgaaaactgccgttttatggggtttatggattgggcaggtaacagaggtttttcagatgctattcagattgaaacaccattgtccagcaatgataatatcgctagcattaaagtgtctggttgttattttggaccgtcagaatctctaccgtcatgggctgttggcgtagggaatcacggttcaacagatggagcgcagccagttattgatataaaaatccaccattgtacttttgatggtaattcttattctggcattcgtggcttttctaggtgggaaaatgttgacattggttcaaacacatttataaatttcactaatccagcaataatatttaccgggaggaaagtaagcacaactcttcgggaaacatcaagagatgtgtgtatacatcataatacatttaaaaattgcactggaaattctgtgatatcatgccttacaccaacatttattgagagcggattggaaggtagtagaatatttcacagagactggaggatatcaggaaataattttgagtcctgtgatggctccattcttgatatgagatgggttgacggagtttccatcactggaaacacagtcgattcatgtaatgggatattccttagagggaattacattgctaatgtgattgcaagcaacaataaagttgatacggctaaggcgatattctatatatttgaggatgatggcgaatacaaaggaactttgttaagtagaaacatatcaattgtaggtaatacagcaatgaacggaagaagagctgtccatattaactgcgaatgccacggattcactgtgacatcaaattcatttgaatctgtagctggagacgcagttataggtattgattcatctgctaaaaatggtgtgattagtaacaactgttatcacaactcgataagcaatgagttttttgtagatgtaacagcaagttgctcaaatattattgttgcagataacgtttaccctcctgctaacattgttaggaatttagccacagacgttagttacagtataattgctggcactggaaatcctgaaggagtacaaatagccacacctggaagcgagtatcgagatatcgtaaatggaagactctacatcaaagaatcaggtcgctggaattctggttgggtggtgaaatga

SEQ ID NO: 29915 - DNA, 885 bp, Escherichia coli
atgtcattcagccattcttccctctccgcgcaagtgaaatcacatctgacgtttcttcctgaagaaattcgccagaaaatccttgaacatctccgcagcgctattcattacgaacccgtgattggcattatgggtaaatccggcaccggcaaaagcagcctgtgtaatgctatttttcagtcccgtatctgcgccacgcatcccctgaacggctgcacccgtcaggctcatcgccttacccttcagttaggtgaacgcagaatgacgctggtcgatctgcccggcattggtgagacactgcaacatgatcaggaataccgggagctttaccgtcagttactgccggaactggatctgattatctggatcctgcgggctgatgaacgtgcgtatgccgccgacattaccatgcatcagtttttactgaatgaaggcgcagatccctcgcgttttctgtttgttctcagccatgccgatcgcgtgtttcctgccggcgagtggaacgacacagaaaaatgcccgtcccgtcagcaggaactctcactggcaacagtaacagcccgggtggcaaccctgttcccttcatcacttccggtactccccgttgccgcacctgtcggctggaatcttccggcactggtgtcgctgatgatccacgcactgccaccacaggcaaccagcgcagtttattcacatatccggggggaaaaccgctctgaacaggcccggaaacacgcacaacaaacttttggtgacgccatcgggaaaagctttgacgctgccgttgcccgattcagctttccggcctggatgttacagcttctgcgtaaggcccgggaccgcattatccacttgctggtcacactgtgggatcgtctgttctga

SEQ ID NO: 29916 - DNA, 477 bp, Escherichia coli
atggtaacgctgaccattaaccgtaaaccgcagggtattttcagtaagtcaccggcaacgccgctgcaggataaaacgaacacagtacacaacgagaagcctcttcgggtgaggaatcaaacaccatggcgacatatgacaaaacgccagcgcaaaaaccgtaagcgtataaatcgtcttgtggaactctggcctgagttattcaaccgggaaaaaccaaaaccgcttaaagtggggataactgacgacctgatacaggatatcgccatcagagaattggcgtttggcgcaggtgcattacgcgcggcagtagcgtcttatgtgcagtctccgcgctattaccgtgcgttaatggctggcgacgcccgttacgacctgaaggggcagccgtgcggggaagtaactccacaggaacagaaagaggcagagacccggctaatgatgctgaatgatcgactaaaagccagaaagcgctga

SEQ ID NO: 29917 - DNA, 351 bp, Escherichia coli
atggcaggtatgttttcggcccaggctctggctgatgagagcaaaacaggcttttatgtgaccggtaaagccggtgcttcagttgtgatgcagactgaccagcgcttccgtcaggactttggggatgatgtttataagtataagggcggtgataaaaacgatactgtatttggtgccggccttgcagtgggctatgatttttatcaacattacaatgttccagtacgcacggaagtggaattctatggccgtggagccgtggagctgcagactcccgttatacactggatacatggcgttctccgatgggggatggtggtcgggaagacacacaaaataggctcagtgtga

SEQ ID NO: 29918 - DNA, 474 bp, Escherichia coli
atgatttttaccaaaatcattaggggattcatcagggcaaggcagcgtaaaggggagtatatgacacataaaacaaaggcgaccggaggcggtcgccaatgggaaaacactaaacataagcccgaacatcatagcgatttgctggctggtgggcaatgtgatcagtgtgctggcttgctggtgggctatcaaccttttggctcgataccgcgctgttgtaattctttgcggattattcgctttatccaggcagcaagagaatcatcgccgtcctgttgttgtgctttttccatcttttcccgtaagtcaggatctaaacggaactggaacggaggattaccacgcctttcgtttttgtgtgttgacacgttaattacaccccatgtaatgtatttatgtgtaatgacacattacacacaatcggcgcaaaaagcaaagccccgcaagtgtcgttaccactggcagggcttataa

SEQ ID NO: 29919 - DNA, 210 bp, Escherichia coli
atgagcacgattttgcatgagcagggctataacaccgcgtggatagaaacgcagctcgctcacgttgataagaactcaattcgtggcacatacaaccatgcgcaatatctggatggacggcgggagatgcttcaatggtatgccgactatatggattctctcgagcatggcggaaatgtggtgcatatggtgtttgaaaaacacgcatga

SEQ ID NO: 29920 - DNA, 492 bp, Escherichia coli; identical to SEQ ID NO: 27401

SEQ ID NO: 29921 - DNA, 498 bp, Escherichia coli; identical to SEQ ID NO: 11652

SEQ ID NO: 29922 - DNA, 1752 bp, Escherichia coli; identical to SEQ ID NO: 11847

SEQ ID NO: 29923 - DNA, 396 bp, Escherichia coli
atgctgcagggcgtaatcccgcaaccggtaataatggaccgtcatggcataattctccgtacgacaggcatgatggctgtacgtcatcagacaggcagcaataccggcggcttccgggctcatttcagcgcggttaccgttcatggcattgaacagtacccatgtttcgtcatcatcgtcatccggttcgggtgccataaatgccccgccgttgttcagggtgtacagattccagataccaccacagtagtcttcgcacagacggtccatccagccgaagacacggggctccagggtcacccactgtggaatgaggccaaaatgctgcggccagaagctgatgcgctgttcatcagggacgagagtagcaaccagctgaggtgggttattccctga

SEQ ID NO: 29924 - DNA, 396 bp, Escherichia coli; identical to SEQ ID NO: 11849

SEQ ID NO: 29925 - DNA, 927 bp, Escherichia coli
atggtcactaagttacaacttcccgaatatgactctattaaggtactccgaaccatcatttcagaaagagagagatataaagatttctatgatagcttatcgaatgattggatagcacatgtagaaagctatttggaacatcatggtgatccacgctttattacacctctcgacctctctctgtatatttcagaagaattaatacaaaatgaagaagagaaaacaactgatgccaataggcatatatcggcgcaagaaagactgacgcaaaaaaggaaacaaactctaattaatttatactctcctgctgaggggaaaactccctacgatattcttgatactttaagacgaggacatggcctgttattttgcccatgttgtggggaaccaggaaagccgacaacgttagaccattatttgcctaaaactatctatcctgaattagctataattattgctaacttaacgccgatgtgtaatgaatgtcagcagaataaaagttctgattattttgatgaggatggtaacaagatttacatacatccttattttgatcctattgaacaagttaatttaatcattgatatagaagaaccctatgctactccaacattcaggctaaacattattgaggatggagatgataatgagatttatgaattgctaaggcgacatataaatggtgttaaatttttagagcgattcgatgagttttgtcgaaatgaatatatggcattattgcgcacaatgtcattagaacgtcaagatgctcaaccggatagagcgtcaagaataatttgtcgattcaaacgccaatatgagggtcagtctccaaatagatgggaggctattttctatagagggatattgaataatgccgacctacttaattatctagatcatggaaacttgcctgattttacataa

SEQ ID NO: 29926 - DNA, 765 bp, Escherichia coli
atgatatatgatgatgagaaatataaatttataaaaggaaggataaataaattaaatacaataaataatgtattaaaatcagctattgattatgaacaatgcgcactaaaactaaagtcatcagaacatcctacatttttccacgaccaagctatccctataaatggtgaacagttttttttagctaaagatatatcaacctggatacctaatatagatttgcttcgtgaagcatgtagtcttaatgatggtgttatttttataaaaaatgatcagatcgttccattaagttcggggcagcgattatttgcctacatcgtaatcaacgttgttgcatcaattaaagataatagcttgattgttattgatgaacctgaacttttcttacacccaacattagaaatcgaatttgttggacttttgaaaaagatacttaagccatttcgttctaaagcaattcttgccacacattctttatcgattactcgagaagttccttctaagtgtgtacatatatttcatgatgaaggtgaaggcttagaaatactacctcctccatttgaaacattcggtggtaatgttcaacgcatttcatcctatgttttcggtgataaatcgatttctaaaccttttgatgaatggcttgagatgcagttgcaagatattggagatcctgaaaaattaattgaaatgctaaatgaagaaattaatgaagaaataatcatgaaaatcatgagtttagggaaaaagtatcatggtcactaa

SEQ ID NO: 29927 - DNA, 216 bp, Escherichia coli
gtgacactctataacctacatgttgatggtaaagttatagatggtggtatggtcgcaccatttagccatcgccaacaatcatggtgtaaatcgcaaggggtttgtgaaatagcatggcagacattggatatttataataatgtattgcctgcatggaaagtaaatatgaatctgttgcagatggatgtgtcaggttcacaagttaaaacggattag

SEQ ID NO: 29928 - DNA, 1014 bp, Escherichia coli
atgaaaaccgccactgcgccgttaccaccgctgcgttcggtcaaggttctggaccagttgcgtgagcgcatacgctacttgcattacagtttacgaaccgaacaggcttatgtccactgggttcgtgccttcatccgtttccacggtgtgcgtcacccggcaaccttgggcagcagcgaagtcgaggcatttctgtcctggctggcgaacgagcgcaaggtttcggtctccacgcatcgtcaggcattggcggccttgctgttcttctacggcaaggtgctgtgcacggatctgccctggcttcaggagatcggaagacctcggccgtcgcggcgcttgccggtggtgctgaccccggatgaagtggttcgcatcctcggttttctggaaggcgagcatcgtttgttcgcccagcttctgtatggaacgggcatgcggatcagtgagggtttgcaactgcgggtcaaggatctggatttcgatcacggcacgatcatcgtgcgggagggcaagggctccaaggatcgggccttgatgttacccgagagcttggcacccagcctgcgcgagcagctgtcgcgtgcacgggcatggtggctgaaggaccaggccgagggccgcagcggcgttgcgcttcccgacgcccttgagcggaagtatccgcgcgccgggcattcctggccgtggttctgggtttttgcgcagcacacgcattcgaccgatccacggagcggtgtcgtgcgtcgccatcacatgtatgaccagacctttcagcgcgccttcaaacgtgccgtagaacaagcaggcatcacgaagcccgccacaccgcacaccctccgccactcgttcgcgacggccttgctccgcagcggttacgacattcgaaccgtgcaggatctgctcggccattccgacgtctctacgacgatgatttacacgcatgtgctgaaagttggcggtgccggagtgcgctcaccgcttgatgcgctgccgcccctcactagtgagaggtag

SEQ ID NO: 29929 - DNA, 549 bp, Escherichia coli
gtgaaaacgggggccgaagccatccgggcgctggccacacagctcccggcgtttcgtcagaaactgaatgacggctggtatcaggtgcgcattgccgggcgtgatgcaggcgaaaatgaattatctgcccgtcttaatgagccgctggcaaatggtgccgtgatccacatcgtgccgcgtctggcgggagctaaaagtggcggtgtgtttcaggtggtgctgggggcggcgctgattgcggtggcatggtggaatcctgtgggttggctgggtgccgcggctgtatcgggcatgtatgcggcaggggccagtatgatcctgggcggagtggcgcagatgctggcaccgaaagccaggacgcccacggcagccagtacagataacggcaaacagaacacctatttctcctcactggataacatggttgcccagggcaatgttctgcccgttctgtacggtgaaatgcgcgtggggtcacgcgtggtttctcaggagatcagcacggcagacgaaggggacggtggtcaggttgtggtgattggtcgctga

SEQ ID NO: 29930 - DNA, 363 bp, Escherichia coli; identical to SEQ ID NO: 27441

SEQ ID NO: 29931 - DNA, 396 bp, Escherichia coli
atgctgcagggcgtaatcccgcaaccggtaataatggaccgtcatggcataacactccgtacgacaggcatgatggctgtatgtcatcagacaggcagcaatgccggcggcttccgggctcatttcagcgcggttaccgttcatggcattgaacagtacccatgtttcgtcatcatcgtcatccggttcgggtgccataaatgccccgccgttgttcagggtgtacagattccagataccaccgcagtagtcttcacacagacggtccatccagccgaagacacggggctccagggccacccactgtggaatgaggccaaagtgctgcggccagaagctgatgcgctgttcatcagggactatggtggcaaccagctgaggctggtcattccctga

SEQ ID NO: 29932 - DNA, 132 bp, Escherichia coli
atgactcctgtcagtattgctgctataaccgaaacgtattacgaaaaaggaagcatttatgccttacatcaaaccggatatgccgtattcagtatatgcatgaccatcaatgatagggaaggcaataattaa

SEQ ID NO: 29933 - DNA, 186 bp, Escherichia coli
atggatcaggcgctactggacggggttatcgctgttataccggcgaaaatatcgatgtctattttaacactgcgatatgtcagcattctggcaattgcgtacgtggcaacggcaagttatttaatctcaaacgaaagccgtggatcatgccggatgaagtcgacgtcgccactgtggttaaagtga

SEQ ID NO: 29934 - DNA, 192 bp, Escherichia coli
atgaatgatagcgaattaatgacggtgaacgaggtagccgctttattcggcgttacccgtcgcacgatattccggtggatgaataagattaaaggttggcccgttccggttactccggtcggtgcgcgaattaagtttatccgatctgaaattatggcgttctactacagcaaagcgtcacgcaaaaattaa

SEQ ID NO: 29935 - DNA, 312 bp, Escherichia coli
atgtatcatccaaatgacacttaccttaatttggttggcgataattacaagccttctactgaagcaatggataaaaaagcgttcgataaagcaatgaacgacgaagcagaacgcatcattaatatgctgccagcagtcttaactgagattattgatgaaggcgcttccgtattgtttgaccagatgccggaatgtatgaaaggtgaagatccggtcactcacgacatcatcaacgaaaaacatattcgccggatgcttgccgggaaaatttcaaatcgcctgggccacggtatgggttttttacagaaatga

SEQ ID NO: 29936 - DNA, 468 bp, Escherichia coli
atgacacgcaaagaatatattcgccagttggcacaggaaattattcgcacgaatcaaccactgattgaccgtattgttaatcaggaagtggacaaaattaaagctcaattagcatcgctcgcgccgaacatggcggcaatgcgaagcgaaatgttggctgtaatggggtcaaatagctctttgggcgtgtatctggcaaacgtcgataaactacaagccaataaatcagacattgccacaaacgcattcacagcgccacagcaggcaccaaatccgcgagaatatttcggcaatgagatcactgatagttttaccagacagtacttcgatggggatgacgagacgaataaacgtattagcgaatacttcgatggcgatcctgtattcaacgccgctattgatgagtatttcaatggtcccaaagaatttcgcgatcagctagacaattatttttatatgggagaataa

SEQ ID NO: 29937 - DNA, 345 bp, Escherichia coli
atgagctttttagatatggcccgccagcgtattgctatggcggttaaggcaaacgaatcagcagcggaaccggatgatgctgaactgaaattcaaaaaaggcatggcgcttgtgttagagaacatcgataaggtcgatgaaaagttattacaggaaatgatggttgtgctgatggaccaactggaacgccgatttggtggtaaacagcaggaacagccagaagaacagcaacccgccgccaacgcacagcgcgggcctaaaacgccggatctggaatcttatttctccacgccgacccggaaaactgatacccggacaccggatattggaagctatttcgactaa

SEQ ID NO: 29938 - DNA, 294 bp, Escherichia coli
atgctattggctaccaggatgatacacggcatggcccgcgagatcgccgaacgagttaattatctgcgcaatgaatgcccgtacccgtgccagccagcaaaaagagtagcgctgagggcatttagcgagcttgtgcttggcacaatcaacaagctgattgccggaaaattaaaagacggaaagagtcttcacgaatgttcaccggaagaaaaggaattcgtgaagcgcctgaaactaatccgcgctgatattcatagccaactggcttcggtaggttgcgatcttgatgattaa

SEQ ID NO: 29939 - DNA, 405 bp, Escherichia coli
atggaggctggagataaagaaatcaataacttgcctgtaaatggcaacaggttagcgcgaaaacgggctaagtataccatcgcgctggcggaagaaatttgtttgttggtagcggaaggtcatagcttgcgtgagatagcaaagatgccaggtatgccgagccttcgtaccctgatgcgctggcaatatgaacatccagattttagagagcatatcggaatatttaagtggattcacgcccaggacgcagcagagcaagctgttgaagctatcagagatgtagatctggaagcggaagacgcgccactgaaattaaaacaggctgaggcattagcccgcactttgttaggtcgtgccaaattgcttgagagcaaaaacaatccattcaacgggggcgacaaatga

SEQ ID NO: 29940 - DNA, 510 bp, Escherichia coli
atgagctttatgggtaaacacaagactggtggtaaagacgacgcacagggcttgtttaaggccgggaaaaaggcatctttaacgccggaagagaaagagcagcaactacagcttaagccgttcaaccagtggacaaagcaggatatcgcaatgtatcgggatattcagatcgagcgctgccaggaagacgtggaagacggctggcgggaggatttcgaactggaagacctgattaactcctgggcctttgaaatcgtggatgacgccctggtgatgacccgcaccgcgccaccgcctgacgaaatgatgctcggactaacgaagccgaccaccgatcttgttgttggttactgccagattgatggccttgatagcctggctgccgccgatacaaccgactcaatggaacaagccgcacgccagcaacggaagattgaactgcaacgacgcctacaccatgagcgcaacgtaccagggcaagaactggaaaccatcccgcgccgccagtaa

SEQ ID NO: 29941 - DNA, 534 bp, Escherichia coli
atgatcgagttaaatctgcatggcaatctcgccaaatactacgggaagaaagtgtctctaaacacagagacaccgcgcaacgccttaaaccttctcatggcacagaatcaaggctttaagcgtgatttactgagtcaacagcacctgataactcttaacaacagggaactgaacgaaaacaatttcggcgttaaccttgatgccagttataaaaacgcacaaattcacatcacgccagtgattcagggtggcatagctggtgctgttagccttgttacgtggatctcggtgggtttagctgtggcaagcgttgcgttttccctctttatgtctcgcaacatgaaggtaaaaacatcagcagaaagagcacaggataacaccataacgaataacacctacaccagcgttgaaaacagggtgggccagggtagaccagtgccaatcttattgggtgaaatgaaagtagggtcgaacgttggatcgttgggtatcgacacgaccaacaacaaagatgcgctggatgtagttagctaa

SEQ ID NO: 29942 - DNA, 237 bp, Escherichia coli
atggataagacagcaacaatacttattaaccgtgagcaagtgcaaaaaatgttaggcgggcttagtaagtcctcatttttcaaactggtcaggaagtggaaagatgctggaactcctttcccggatccggttgagggaatgccagcactgaagcacggaggttttttgtatcgctatcaggatgtgatgaaattctttaaatcaattggactgctttctgacagcgataaccagtaa

SEQ ID NO: 29943 - DNA, 552 bp, Escherichia coli
atgtttgacttggtacaggttgatagcgagtggcgcattagtagtcttgagttgttggacttggttaatcagattcgtgtggctgaaggtcttaacaaactgccgccgaacagattcaacaagaaaattaaagacgagcttgaaggtgaaagtctctactggcataaaatgcgcattaatataaatcaacaacttacaaaagaagttgagatttgtgaactcactggagaccaggctttaagagtggggatgcgcgaatttaagcgtgtcagggcaaaagtagtagaacgaatcaaccaattgcgattggaggtatcgcagtacaaactgattcaacaatgcgcagacaaggcagatcaggcggtagcgttagccaacgaaggcaagttaaacgaagcagcggatctcattgtgatagcgaaacgcgagtatctaccgctatcaagcgcggcaggtaaaacgctaaataggtgtagaccgacgaaacgcaaactgaaccagtcggaaaactatattggtagtcttcttcaaattgacttgttccctgaatga

SEQ ID NO: 29944 - DNA, 1122 bp, Escherichia coli
atgaagtatatagcaacatctgtagtggcaatgctgctcttatcgggttgcgataatacgcaaagtaacaattcatccccgtcagaaacagaagtcggcgttgttacactcaaatctcaaccggtttcggtagtcagtgaattaaccggacgcaccagtgctgcgctcagtgctgaagtacgtccgcaggttgggggaattatccagaaacgcttatttaaggaaggtgatctggtcaaggctggacagcctctctaccagattgatgcggccagttatcaggctgcatggaatgaagcccgggcagcattacaacaagcacaggcactggtaaaagccgattgccagaaagcgcagcgttatgcccgactggtgaaagagaatggtgtttcacaacaggatgctgatgatgctcagtctacctgtgcacaagataaagccagtgtagaggcgaaaaaagccgcactggaaactgcgcgcattaatcttgactggaccacggtaaccgcaccgatttcagggcgcattggcatttcgtcggtaacccctggcgcactggtgaccgcgtcgcaagatacagcgttaacgactattcgtggtctggatacaatgtatgtcgacctcactcgctccagtgtcgatttattacgtctgcgtaaacagtcactggcgaccaacagtgacaccatgagcgtctcacttattctggaagatggcacaacctacagcgaaaaagggcgtctggaactcaccgaagtcgctgtagatgagtctaccggttcggtgacattacgggcgattttccccaatccacaacagcagttattaccgggaatgtttgttcgcgctcgtgtcgatgaaggcgtgatggaagacgctattctcgcgccgcaacagggcgtcacgcgcgatgctaaaggcaatgcaactgcgctggtggtgaataaagacaataaagtagagcagcgagcgctcgaaacgggagaaacgtatggtgataaatggctggtgctgaacggcctgcacaacggcgaccgactgattgttgaaggttctgccaaagtcacttcagggcagaccgtcaaggctgttgaagttcaggctaatggaggcaacgcctga

SEQ ID NO: 29945 - DNA, 567 bp, Escherichia coli
atgaccagcaagctggagatacgccacaaacagcgtcaggatgaaatcattaacgccgcccgtcggtgttttcgtcgctgcggatttcatgccgccagtatgtcgcaaattgccagcgaagctcagcttagcgtgggtcagatatatcgttacttcgccaacaaagacgccattattgaagagatggttcgccgtatcatcgactttcgtattgcccaaatggacattgacgcgcgtaccgatcactttccggaagttcttgccttgcgtaaatccttaaatgaggacgacgacgcgctgatgctggaagtggctgcagaagccacacgcaacccgcgggttatggcaatgcttgaagaagctgacgccagaatgttcgctaacggttgtgctcatatgaaaagaatgcatccccatcttagcgacgagcacattcgttgctgcgttgaagtgtttgctaccatgatggaaggtacggtttatcgtcgtttaacaccgcaaaaaagcgatccacaacatctgcaggaaatatatcaggatattgttagtatgttgataaataaataa

SEQ ID NO: 29946 - DNA, 1176 bp, Escherichia coli
atgcctttaaacgatatgcagattcgccgcgctaagcctgaagataaaccctatacgcttggggatgggcaaggcttgtcattgcttatagaacctaatggaagcaagagctggcggttccgctatcgctacgccggtaaacccaagatgatctcgcttggcgtttacccaacgatcacccttgccgatgctcgttcccgtcgtgatgaagctcgaaaacttgtggcagaaggaaagaaccctagtgaggttcgaaaagagcaaaagctggctctgcaaacagagtcagagaacgccttcgaaaagatcgccagagagtggcatcaacttaaatctgctaaatggtcagctggatacgcatcagacatcatggaagcgtttaagaacgacatttttccttatgttggaacaaggcctgtgggagagattaaaccgctagagctgctgaacgtactgcgtaaaattgagaaacgtggtgcgttggagaaaatgcgtaaagtgcggcagcgttgctccgaggtgtttcgctacgcaattgcaacaggtagggcggagtacaatcctgctgcggatctctccagcgctctcgaagtgcatcaatccaatcatttcccgttcttaaaagctgatgagatacccgaatttctgcgtgccttagagagttacaccgggagtaaaattgtccagatagcaacgaaattactgatgattacgggcgtgagaaccatcgaattacgcgcggcattatggcaagaatttgatctggataacgctatttgggaaattcctgctgaaaggatgaaaatgcgcaggccgcatcttgtgccattgtctactcaggcgttagatttactcaatgaactcaagacaatgacaggcaactatcgttatgtttttcctgggcgaaatgatccgagtaagccaatgagtgaggccgctatcaatcagcttataaagcgacttggatacggtggcaggcttacaggtcatggatttaggcatatgatgtcaactattttacatgatgctggctttaattctcaatatattgaattacagctcgctcacgttgatagtaatagaattcgcggtacatataatcatgcaacattcattgaagaaagaaggaaaatgttgaactttttctcttcaatgttatttttaaggaaaatgtaa

SEQ ID NO: 29947 - DNA, 1701 bp, Escherichia coli
atgagaattgaaactgtttatattaaaggattcaggaattactgtgatgctgttattaattttaatgaaactaatttgattataggtgcaaatgatgttggaaagaccaacctattatatgccattcgattattacttgataaaagtttatctgaattagatctagaaccaaaaagcaatgactttcatgtaaattcgacaggtgaacaggttgaaaatatagaaatcactatcaagtttacagatgttagtgaagatgctgtaatatctaaattaggagggtatgttagcgatgaaggggaaacatacattaagtatcttgcttcatcattaactatggattacaagatattacttagtcatgaacataacaattttgatgaggttcctaatagattttacttaaagtgtttaagtctaaggtatataaattcgcaaagagatcttgaaaaatacattaaaattgaaaagaagcatcttttaagattggcgcaagaagttcgtagtgaaaaggatactgaaaatgatggggcggtttttactgaattaaataagctacttactgaagtaaatgaaaaagttaaaggaataagttatgttgcatcagcaacagaagagcttaacgaggaacttagaaagttatcctatactcatgatagattaactgttcaacttgatactggtgcaatagggattgaccagtttatagagaaattagaattaagtgcgaatacaaatgggaagaaactaatgcttggtggcgatgggtttaataaccaaatccttcttgcgttatggaaagcaaaaagtgttcgcgagcatgatgttgaaagtgaagtagtgatctattgtatagaggaaccggaagcacatctatttcctcaccagcaaagaaaattggcggcctatttaatcgataaacttccaggccaagcaatcgttacaagccactcaccccaaattgcagtgaattttaaacctgattcaatcataaaactatactatgatgatggagagactctagccgcaagtaatggatgttctgattgtattagctctgcatgggatggaatgggctaccggatgagtattattcctgctgaggcattttttgctaacgtggtttttttggtcgagggaccatctgaggtgattttttacactgaattagcaaaagcattaagtattgatcttgattattataacatcagcattctttctgttgatggtatccaatttgaagtttatagaaaaatattaacagctctaaatattaattggatcgtaagaacagacaatgatgcttcaaaagtacctcataagaatgaatggcaatatgctggtgtaaatagggcgttagcactgtgtggagagaataaagaaccaaactcaagtattcctatagatagtaaagctttgcatgctaagtggggaaccatttcaccaataataaatcctaacggcgtttatatatctttttttgatcttgaaggagatcttgctaatgacttttcgaagcatgttcttgattatgcaagtaaggataatctagatgatgccgctgattatttgagaggaaaaaaagctatacgtatgcgtgagttaattaaagagaaaaaagcttttttaactgaactgaagagcaaagatatagccagacctctaatgcatgcactgaaaattgctagaggtaaattatga

SEQ ID NO: 29948 - DNA, 1623 bp, Escherichia coli
atgaagctaactaaggaacagttagatgcaattgattacgaaggtaatctggttataactgcatgcccaggaagtggtaaaacaacaatactcgtccataagattgctgcctgtttatcccattccaaggattatcagggagttgttgcgttatcatatacgaataaatccagcgaggagctaaaagccagatgtagaaaattgggagcagagttaaattctagcttctttggtactattgataagtttttcattaacgaaataatattaccttttgtaaggcaagtatggggcagaaacgaaagcgctctcgaagtagtaaagtatatagatctttctcaagaattaaaagataagacaaataagtactttgaccgagtggatttttattctaatacctcatttgagggcatgggttctctgagggatatttatttaaaggggatgttgattttagacttccttcctcacttggctttttatatagttagaacatcatattcttgtcagcggtatttaatggcaaagtatattggtttttttgtcgatgagtatcaggataccggttattttactcatcaggttttcaagttcataccaacgctagggatgcctcttattatcgttggtgatttggatcaatcaatttatttgtattctcaccgcagttcggattcactaaaagatttcatgaatgatagtggtttctgtcataaggaaattacagtaaatcacagatgtcacccatctatagtaaattacgccaatagaattaaagattttgaatgtcaactagctccgtgtgatgagatttttgtttatagaaaatgtgttgatggcaatcaaattgatatagctaaatggattggtgaagttcttgataatgtaaaaaataaattttcaatatctgataataaggagattgctatattggtaagaagcaatgcttgcgcggagctagtttctgataatttagttgtttctaatagggcttatttggataatgatttaacaaaggctggtggtaaggtttctggtcttgttaatgatttattatgttacaggtataacttaaataaaactgctcagtctattttggagggggttttgggaagcagtgtcaaaaggagcgaggctactcgtatccgtaaggctattaagcaggttagaagtgttacagatgcctttcttattgacgtaataaataaaattgtagtaactcttttagggactgaaatcgagcagcatcataagtccgctctttcagagatattagttactccgaggatgcaaaataattatttggatgttagaagtgatgaagtacaaataatgacgttacataagtctaaaggtcttgagtttgactttgtttttcatttggatctgtatgattggattttgcctaaaagagttttcatagaaggaagctatgatgttgtattcgaaaatgaacagcaatgcataaatcttcattacgtaggaattacacgagcaagaaaaggcattatgctaatgcattctacgaaacggtataatggttcaggtgatcttaagaacggggctccatctcaatttcttttgaaacctgggttagatggcctttataaaaaaataaattaa

SEQ ID NO: 29949 - DNA, 147 bp, Escherichia coli
atgctgatttcaatacccccggtgattattgaaggagagacgaaaacgactttattcccctggtatgtgtatccaccagtagaacccttcgttgcccgaatgctggcagaaactgttggcagaacggcaacatttttttgtcgttga

SEQ ID NO: 29950 - DNA, 963 bp, Escherichia coli
atggctcaggattaccaccacggggtgcgcgttgttgaagtcaacgaaggtacccgatctattaccacggtgagcaccgccatcgtgggtatggtctgcacgggcgatgatgccgatgcaaaaatgtttcctcttaataaacccgtgctgatcactgatgtgctgactgccagcggtaaagcgggtgagtcaggtactctggcccgttcgctggatgccatcgctgaccaggcaaaacccgtgaccattgttgtgcgtgtgccgcagggtgaaacggaagacgaaaccacgaccaatatcatcggcgcagtgactgctgaaggtaaaaaaacaggtatgaaagccctgttatctgcccagtcacagctcggcgttaaaccgcgcattctcggcgtgccaggccacgacaccaaggcggtagctactgagttgctgagcgtggcgcaaagcctgcgtggatttgcttacctgtcagcgtatggctgcaagacagtgcaggaggcgatcacttaccgcgaaaacttcagccagcgcgaagggatgctgatctggcctgactttactggctgggacacggtgctgaatgccgaagcaacggcatatgccaccgcccgtgcgcttggtctgcgcgccaaaattgacgagcagaccggatggcacaaaagcctgtccaacgtgggcgtgaacggtgtcaccggaatttctgcagatgtgttctgggatctgcaggacccggcaaccgatgcaggtctgctgaaccagaacgacgtcaccacgcttgtgcgtaaagacggtttccgcttctggggttcccgctgcctgagtgatgacccgctctttgccttcgaaaactacacccgcacggcgcaggtgctgatggacacgatggcagaagcacacatgtgggcggtggataaaccgcttaacccgtcgctggcccgcgacattatcgaaggtatgtga

SEQ ID NO: 29951 - DNA, 720 bp, Escherichia coli
gtgaattcactctataccgctgaaggtgtaatggataaacactcgctgtggcagcgttatgtcccgctggtgcgtcacgaagcattgcgcctgcaggttcgactgcccgcgagcgtggaacttgacgatctgctacaggcgggcggcattgggttacttaatgccgtcgaacgctatgacgccctacaaggaacggcatttacaacttacgcagtgcagcgtatccgtggcgctatgctggatgaacttcgcagccgtgactgggtgccgcgcagcgtgcgacgcaacgcgcgtgaagtggcacaggcaatagggcaactggagcaggaacttggccgcaacgccacggaaactgaggtagcggaacgtttagggatcgatattgccgattatcgccaaatgttgctcgacaccaataacagccagctcttctcctacgatgagtggcgcgaagagcacggcgatagcatcgaactggttactgatgatcatcagcgagaaaacccgctacaacaactgctggacagtaatctgcgccagcgggtgatggaagccatcgaaacgttgccggagcgcgaaaaattggtattaaccctctattatcaggaagagctgaatctcaaagagattggcgcggtgctggaggtcggggaatcgcgggtcagtcagttacacagccaggctattaaacggttacgcactaaactgggtaagttataa

SEQ ID NO: 29952 - DNA, 1038 bp, Escherichia coli
atgttttccgcattgcgccaccgtaccgctgccctggcgctcggcgtatgctttatcctccctgtccaggctgccactgtaagacctggagatattgccaatactcaggcacgacatattgctactttctttccgggacgcatgaccggaactccagcagaaatgttatctgccgattatattcgccaacagtttcagcaaatgggttatcgcagtgatattcggacatttaatagtcggtatatttataccgcccgcgataatcgcaagagctggcataacgtgacgggaagtacggtgattgccgctcatgaaggcaaagcgccgcagcagatcatcattatggcgcatctggatacttacgccccgctgagcgatgctgacgccgatgccaatctcggcgggctgacgttacaaggaatggatgataacgccgcaggtttaggtgtcatgctggaattggcagaacgcctgaaaaatacgcctaccgagtatggtattcgatttgtggcgaccagcggcgaagaggaagggaaattaggcgctgagaatttactcaagcggatgagtgactccgaaaagaaaaatacactgctggtgattaatctcgataacttaattgttggcgataaattgtatttcaacagcggtgtaaaaacccctgaagcagtaaggaaattaacgcgcgacagggcgctggcaattgcgcgtagtcatggaattgccgcaacgaccaatccgggtttgaataaaaattatccgaagggtactggctgttgtaatgatgccgaagttttcgacaaagccggtattgcggtactttcggtggaggcgaccaactggaatcttggaaataaggatggttatcagcaacgctcaaaaacaccggccttcccggcgggaaatagctggcatgatgtaaggcttgataatcaacagcatattgataaggcgcttcctggaagaatagaacgtcgctgccgtgacgttatgcggataatgctaccgctggtgaaggagctggcgaaggcgtcttga

SEQ ID NO: 29953 - DNA, 1143 bp, Escherichia coli
atgaaaatttttcttgctcatgcaaaagaagatgaaacgataactgaagaaatctatgaaaggctaaaaagtggaggatattccccttggatggatgtaaaagatatacccgctggcgtaaactgggattatgaaatccaaaaaaacttcgctaattcaaacttgataatccttatccttagcaaagtgagcactcagaaaaatggttatattcgccgcgaaataaatgacgccattgataaactaaagtattacaaaccagatgatgtgttcgtgataccattacttattgatgattgcgaagtacccgcctacatatcaagcaagctccaattcattgattttaagagaaatgatggttgggacattttatctagatctttaagattagcagcatcgcaacaaaaacttgaaatatctcaaggtatcacttatgggccatttaactttagcagcgaggttttcaaggaagaatataacaagatcccagggcatgaaattgaaatagcatatccaagaattgaaagccatacattaccgaaatcagcaaaactcattagtgattacttttcaggaaaagcggctttacatattttttctgaacgcacatcactatggccaggaacaccatattgggatgaagaatataaacacacttacactagttcctataatgaaagttataacatctcatactgtaacgaaaatgttatgagcatccttcattccgtacattggtatggtgcgggagcagcacaccctaacagtcattttgaaactagtaatttcgtaataaccaaggatgactacgcatacaaatttagtttatgggatgtatttaccgaagggaaagagcaagaagcgattaataagataaaacaaaaaataatctctgaatcagctcgtgaattttgggagaaaactggtgaaaaaccaagtgaggacgacattagtacgtttgcaacgggtatcatggatagtaacttagactcgttcacaataaatagtgatggatttagattccattttgcaccttacgaaattcatgcatatgcttttggttcttgggaattctttatctcattctttgaagtaatagacttccttaaagaggatggaatttactctctaataaggagttaa

SEQ ID NO: 29954 - DNA, 276 bp, Escherichia coli
atgtcgatgtacacaaccgcccagctgctggcggcaaatgagcagaaatttaagtttgatccgctgtttctgcgtctctttttccgtgagagctatcccttcaccacggagaaagtctatctctcacaaattccgggactggtaaacatggcgctgtacgtttcgccgattgtttccggtgaggttatccgttcccgtggcggatccacctctgaatttacgccgggatatgtcaaacccaagcacttagcatggctttctgaggctttcgtgtag

SEQ ID NO: 29955 - DNA, 327 bp, Escherichia coli; identical to SEQ ID NO: 5216

SEQ ID NO: 29956 - DNA, 507 bp, Escherichia coli
ttgcatgaagataaacaatacgatttgatgataaaggcttttctaaagttcaaaaaattagtcaatgataattgtaaattattaattgctgggggtgatcatggagctaagaaaattttacaggacttgattgatgaattaaaattaaatgaccatgttcaattattaggatatatcactgatgaagataagtgggactactatgaaaattgttgtgcacttatcttactagggaaatatgaaggttttggtattcctgtattggaagctatgagtgtcaataagccatcaattgtagcaaataccggggctctacctgagatcataggtaaagcaggatttgtcataaatgctgatattgattcaatttgtgatgttatgttaaaaagctattcatataaagttgacccaaaattgtttgaagatgaattatcacgcttttctactaataaacaaataaatactttgcagcacatgtttaaggaaatatgtaaagatgtcagatga

SEQ ID NO: 29957 - DNA, 597 bp, Escherichia coli
gtgtcggggcgcagccctgaccaggttcgtagaaccgcacagggttgcaaaggggtgtcccctttggcacaagcgacggagcaaaacgccccgttttgtgtacgccgcttatcgtgcctgtgttttagcagaacaaaaaatgccgtgcatacagcctacacaatgactcacataatcacccacaactcaaaacacacggcccacataatcacccacactttaacccacaaaaaagaccacaaccccattgacaccccacaaaacaacccacacaaacggcgagcaaatcattttgccgtttttgtgccgcagccgttccgcgcagtcgacaaactggcagtcggggaatctcacgaagtgcacgaagtgcacgaagtgcgcacttatacaaactacacttcgtttcgtttgtcgtgcggtctgcgacgctcaaaaaaccgagaaacggcgggaattttcgggacaggatgtgggaatgtcggaccgcgcacgcgccctcagacattccccacctggtcagggctgcgtcccgacaccctcgacaccgtgcacgcaaaatcaattttgcgaggcgtatacgcgcgtgaaacgcgttaa

SEQ ID NO: 29958 - DNA, 1014 bp, Escherichia coli
atgaaacagtcctgtaatacagctctattcctgcgtgactacagcacgcaggatacgaaatgggacagcgaccgcgcgagggccgatcgggtggctaagatttatgctggagatcagcagttcatgcaccgaggggaacgaatgctcgattgcagtcaacggctcctgttcgcgccgaaggtttcccgcctcaccggagagatgaaaatctcgctgcgttacggtgagttttgccacgttccgttctgtcccgtgtgcagccgtcgtcgctctctgcgctggatgcggcgtctctgggaggcgcttccggtcctgtttgcagagcgtcccaccgccagctgggtgttcctgaccctgaccgtaaaaaatcctcctgttaaagatctgcgcgagacactcaaacggatgaacgcagcgtggaacaggttgattttgcgtaaagaatttgcccctgtgttgggctggctgcgaacgacagaaatcacgtttggcaaagtggcaggcggttgtcatcctcactttcacgcgctgctctgggttccagcgtcttggttcacaagagattacaccagccaggaatgctgggttgaaatctggagcgcgtgtttgcgggtggactatgaggcaggggtggatatccggcgcgtgcgactgaaaaaggggcgtgcactgccggaaaaggcaacgcctgctgatgcccagcgggccgcactggagtcggcagtgattgagacgatgaaatacacggtgaaatcgtcggaaattgtgcgcgatccggcgtggtttctggaactggcgcggcagacctacggtttgaggatgattgctacgggtggacggttgaaacaggttttgcaggttgagaaaccggaaacgaacgaggatttgatcggcgctgatagcccagcgacaccggacgagtttgaggagcaggcgttctggctggcgttcgactgggagcgagctgagaaactgtatcgccgaaatccgaaggccgaccgggccgcccgttaa

SEQ ID NO: 29959 - DNA, 183 bp, Escherichia coli
atgcgaaagtttaaaataattattgaaacggaaatagccggtggagatttcgaggatgaattcgaagtggatgatgatgcgacgcctgatgaaatacatgacgaagcaaaagatattttctttaactactgcaattactcatatcacgaaataaaagacgaagaggaagagcaaaatggctga

SEQ ID NO: 29960 - DNA, 1350 bp, Escherichia coli
atgattaataaagataataatttaaatatagatattctacgtcagcagaatgcaaacattcctcttcaagaggcatcctcgcaaagtgaggagcctcatcaactgggaaacagcaaaagcgagggtaatttgcataacagcgccagtaaggataataatattggcgctatgctcaagaaagatgttgaaaaactatcaactttagtcagtgaacgtggcccgcgaaatgaagactggaaatgccagcatgacatacagcttaacttcgttaaaaacatgctcagaaatttcccaactgagaacctgtcagagaaaggatccgcgctcttacacgaaagttatttgctgataaaaaacgttctgcagcttacagaaaatgttaatactattgacgtaaaattaaaggataccgctacaatattgaccctgcataactctgtgagaaaaaccctggctaacgttgctcacaacacaaccgggtcaagtgcaatggcaacgaccaaaggtaccttaaatcacgctatcgcttctttagacagttctgtgcctgaaatgagaagttcagcaaccagcagtactttaacggccagtagttcaaacgaatttaaaagtgataaatatatatgcagtgatattgctgatttgatgagtgtgctcggtagcgactacctcgaaatctatgcaaatagcgttgagataatgagcgcatactggcaggacttcagtgaacatatccaaagcaatatgggaaaatggactcactctaataaaaaaggcgatgcgatagtttttgacgtcaatgcattacaaaaagccttgatgcatttttattatatcgataaatatcctaatggtgatttccactatcattacaatccagactatgttttataccctccggcacctgctgacaaaattggtgtaccactagaagaagcagaaaaatggtgcgccgctttaggacttccggtaattccacccgatcccaaacaccgcacaccttctccgattgtcgaagttgaaccgcaaggtagcggtctgtatgttattattcccaaccctcagattattgacagtatgagtcagtcttcagactcaatggtgcatagggacgataaagggaaggaaaaaaatatatctaaagaattcaccggttatgaaataagcacagctgaataccaggcatggctggcgggttataacggccagacagaaaacatgaaaaccgacgtgcaggttatcacgactaaatacagtacagccaactccacctacgatacaattatcaaattattatcttcaaccattactgcgttgtttgattcagcgaaagattatttacgtttctga

SEQ ID NO: 29961 - DNA, 873 bp, Escherichia coli; identical to SEQ ID NO: 17645

SEQ ID NO: 29962 - DNA, 765 bp, Escherichia coli
atgaccctgcgtcgcctgccggatgaagatccgcagaatctggcggacccggcttaccgtcgtcgccgtattattcggcagaatatgctggatgaaaatctggccattgctcaggtcgaagagatgcaggccgtttctgccgtgcttaagggcaaatacaccatgaccggtgaagccttcgatccggttgaggtggatatgggccgcagtgcggcgaataacatcacgcagtccggcggcacggagtggagcaagcgtgacaagtccacgtatgacccgaccgacgatatcgaagcctacgcgctgaacgccagcggtgtggtgaatatcatcgtgtttgatccgaaaggctgggcgctgttccgttccttcaaggccgtcagggagaagctggatacccgtcgcggctctcattccgagctggagacagcggtaaaagacctgggcaaagcggtgtcttataagggaatgtatggcgatgtggccatcgtcgtgtattccggacagtacgtggaaaacggcgtcaaaaagaacttcctgccggacaacacgatggtgctggggaacactcaggcacgcggtctgcgcacctatggttgcattcaggatgcggacgcacagcgcgaaggcattaacgcctctgcccgttacccgaaaaactgggtgaccaccggcgacccggcgcgtgagttcaccatgattcagtcagcaccgctgatgctgctggctgaccctgatgagttcgtgtctgtacaactggcgtaa

SEQ ID NO: 29963 - DNA, 312 bp, Escherichia coli; identical to SEQ ID NO: 16811

SEQ ID NO: 29964 - DNA, 429 bp, Escherichia coli
atggcagcgcaggggatggtgcagtcgaaagcaccacttgggttggccttatttctggcaaaagttggtgttcaggaccctcagtttgcgattgaaggcctgctaaattacgcgatggcactggataacccgacattgaacaaattgagtgaagaaatccggttacagattattccttacctcgtgagttttgcctttgctgattactccaggtctgcggcaagtaaggctcgctgtgagcattgttcaggtacgggattttataatgtattgcgcgaagtggtgaaacactacagacgcggggaatctgtaatcaaggaagaatgggtgaaggaactatgtcagcattgccatggtaagggcgaagccagcacagcgtgcagagggtgtaagggtaaagggattgtgtcaacgacggatgaaaagtga

SEQ ID NO: 29965 - DNA, 663 bp, Escherichia coli
  misc_feature (541)..(550): n is a, c, g, or t
atgacaaataaacacccatcattgttttctccttttatgctgacagaaaaaataaagctacgtaatcgtatcgttatggctcctatgacaacctggtcagctaatcctgatggaaccatctctgagcaagaactcgaattttataaacgtcgctcacaaaatgttggtttagtaataacaggatgtacctatgtcacgccaagcggcattgggtttactcatgaatttgccgcgtatgacgaccgtttcattaacagccttgaaaagttagcagctgcagccaaaagtggcggtgctccggctattttgcagattttccacgccggtaataaagccatcccggagcttgtgccaaataacgatgttattagtgccagcgcatcaagcgtaaaatctggtgactttatgaagagagtggtacaaagcagggaaatgactgaaaacgaaattcaggaaaccattagagcattcggagatgtcacaaaaagggcgattaaagcaggttttgatggcgttgaacttcatggtgcgcacggattcnnnnnnnnnncggattccttctgcagaatttcttctcccctctatttaaccagcgtaatgaccgatggggaggagatcttgaaggacgtatgcgcttcccgctggccgtattacaggaagtaa

SEQ ID NO: 29966 - DNA, 312 bp, Escherichia coli; identical to SEQ ID NO: 9017

SEQ ID NO: 29967 - DNA, 678 bp, Escherichia coli; identical to SEQ ID NO: 9016

SEQ ID NO: 29968 - DNA, 279 bp, Escherichia coli; identical to SEQ ID NO: 4909

SEQ ID NO: 29969 - DNA, 504 bp, Escherichia coli; identical to SEQ ID NO: 22302

SEQ ID NO: 29970 - DNA, 537 bp, Escherichia coli
atgataaaaagcacaggcgctcttttactgtttgccgcactgtctgccgggcaggcaatggcctcagatgtggcattcaggggtaatctgcttgacagaccctgccatgtgtccggtgacagtctgaataaacatgtcgtcttcaaaacccgcgcgtccagggatttctggtatccgcccggacgttcgccgacagagtcgtttgtcatcaggctggaaaactgccatgcaacagcagttggcaaaattgtgaccctgacctttaagggaacggaagaggcggccctcccgggccatctgaaggtaaccggagtgaatgccggccggttaggcattgcactgctggacaccgatggcagcagtctgctgaaacccggcgcttcccataataaaggccagggggaaaaggttaccggaaacagtcttgagcttcctttcggcgcgtatgttgtggcaacgccggaagccctgcggacgaagagtgtggtacccggtgattatgaagcaacagccacgtttgaattaacatatcgttag

SEQ ID NO: 29971 - DNA, 2208 bp, Escherichia coli
atggtcagactgatggggttaacagcagaatctctggataaagttgtttactggcatgatggtcagtgtgcggattttcatgggttgccgggagtggatattcgtcctgataccggagcgggcgtattacgcatcaatatgccgcaggcctggcttgagtattctgatgccacctggctgcctccctcacgctgggacgacggcattcccggactgatgctggattataacctcaacgggacggtttcccgtaattatcagggaggagactctcatcagttcagttataacgggactgtgggggggaatctggggccctggcgcctgcgggctgactatcagggaagccaggagcagagccgctacaacggggaaaaaacgacaaacagaaatttcacatggagtcgcttttatctgttccgtgccattccccggtggcgggcaaacctgacgctgggcgagaataatatcaactcagatatattccggtcatggagttatacgggagccagcctggaaagcgatgaccggatgctgccgcccagactgcgaggctatgcaccgcagattaccgggattgcggagactaatgcccgtgttgtggtgtcgcagcagggacgggtgctgtacgactctatggtccccgcagggccattcagtattcaggacctggacagttcagttcgcggacgtcttgatgttgaggttattgaacagaacggacggaagaaaacctttcaggtcgatacggcctcggttccttatctgacgcgtccgggacaggtccggtacaaacttgtctccggtcgctcccgcggatacgggcatgagaccgaagggcctgtatttgcaaccggagaggcgtcctgggggctcagtaaccagtggtcgctgtatggcggggctgtgcttgccggtgattataatgcactggcagccggtgccggctgggacctgggtgtgccggggaccctttccgctgatatcacgcagtcagtagcccgtattgagggagagagaacgtttcagggaaaatcctggcgtcttagctactccaaacggtttgataatgcggatgccgacattacgttcgccgggtatcgtttctcagagcgaaactatatgaccatggagcagtacctgaacgcccgctaccgtaatgattacagcagtcgggaaaaagagatgtataccgttacgctgaataaaaacgtggcggactggaacacctcttttaacctgcagtacagccgtcagacatactgggacatacggaaaacggactattatacggtgagcgtcaaccgctactttaatgttttcggactgcagggtgtggcggttggattgtcagcctcaaggtctaaatatctggggcgtgataacgattctgcttacctgcgtatatccgtgccgctggggacggggacagcgagctacagtggcagtatgagtaatgaccgttatgtgaatatggccggctacactgacatgttcaatgacggtctggacagctacagcctgaacgccggccttaacagtggcggtggactgacatcgcaacgtcagattaatgcctattacagtcatcgtagtccgctggcaaatttgtccgcgaatattgcatccctgcagaaaggatatacgtctttcggcgtcagtgcttccggtggggcaacaattaccggaaaaggtgcggcgttacatgcagggggaatgtccggtggaacacgtcttcttgttgacacggatggtgtgggaggtgtaccggttgatggcgggcaggtggtgacaaatcgctggggaacgggcgtggtgactgacatcagcagttattaccggaatacaacctctgttgacctgaagcgcttaccggatgatgtggaagcaacccgttctgttgtggaatcggcgctgacagaaggtgccattggttaccggaaattcagcgtgcttaaagggaaacgtctgtttgcaatactgcgtcttgctgatggctctcagcccccgtttggtgccagtgtaaccagtgaaaaaggccgggagctgggcatggtggccgacgaaggccttgcctggctgagtggcgtgacgccgggggaaaccctgtcggtaaactgggatggaaaaatacagtgtcaggtaaatgtaccggagacagcaatatctgaccagcagttattgcttccctgtacgcctcagaaataa

SEQ ID NO: 29972 - DNA, 2529 bp, Escherichia coli
gtgattgcgaaccgggatatcagcattaccggtgacagtgtggtggttgacccggggcatgaccgtcgtactgtggacgaaaaatttgagcagaagaaaagcgggctgacggttgccctttccggcacggtgggcagtgccatcaataatgcggttaccagtgcacaggagacgaaggagagcagtgacagccgtctgaaagccctgcaggccacaaagacagcgctgtctggtgtgcaggccggacaggctgcgacaatggcctccgcaaccggtgacccgaatgcgacgggagtcagcctgtcgctcaccacccagaaatcgaaatcacaacaacattctgaaagtgacacagtatccggcagtacgctgaatgccgggaataatctgtctgttgtcgcaaccggcaaaaacaggggcgataaccgcggagatattgtgattgcaggaagccagcttaaggccggtggtaacacaagcctggatgccgcgaatgatattctgttgagtggcgccgcaaacacacaaaaaacaacgggcaggaacagcagcagtggcggtggcgtgggtgtcagtatcggtgcaggtaaaggtgccggtatcagcgcctttgccggcgttaatgcggcaaaaggcagggagaaaggtaacggtactgagtggactgaaaccacaacagacagcggtaaaaccgtcaccatcaacagtggtcgggatacggtactgaacggtgctcaggtcaacggcaacaggattatcgccgatgtgggccacgacctgctgataagcagccagcaggacaccagtaagtacgacagtaaacagaccagcgtggctgccggcggcagttttacctttggctccatgaccggctcaggttacatcgctgcctcccgggataagatgaagagccgctttgactccgttgctgaacaaaccggaatgtttgccggtgatggtggcttcgacatcacagtgggtaaacatacccaactggatggtgcggtgattgcctccactgccacaccggataaaaaccacctggataccggaacgctgggtttcagtgaccttcacaacgaagcggattataaagtcagtcacagtggaatcagtctgagcggtggtggcagcttcggggataaatttcagggtaacatgccgggtggcatgatatccgccggaggtcacagcggacatgcggaaggaacgactcaggccgcagtggcagaaggcacaatcaccatccgggacagggacaatcagaagcagaatctggcgaacctgagccgtgaccctgcgcacgctaatgacagtatcagcccgatatttgacaaggagaaggagcagaggcgtctgcagacagtggggcttatcagtgacataggcagtcaggtggcggatattgcgcgtacacagggagaactgaatgcgttgaaggccgcgaaggaagcaaccggcgaaacacttcctgctaatgcaacagagaaacaacgccaggaatatcttgcgaaactgcgtgacacgcaggcttacaggaatgaaatggcgaagtatggtaccggcagtgaaattcagcggggtatccaggccgcgacagcggcgcttcaggggctggcggggggtaatttagcaggtgctctggccggagcttcagcaccggaactggcacatctgctgaaatcaacagaaaaagacccggcagtaaacgccattgctcacgccattctgggcggcgcagtggcggcaatgcagggtaataatgccgctgccggtgcagcaggcgcagcaacgggagagctggcagccagagcgattgccggaatgctgtatcctggcgtgaagcagtcagacctcagtgaagagcagaagcagacgataagtacgctggcaactgtgtcagcagggctggccggcggtctaaccggaaacagcaccgcatcagcagcagtgggagcacagagcgggaagaatgctgttgagaataactcactcagtgctggctggaacaatatcctgccatcaggaacacaggattacggacaggccgtagcctcgtggaatcagtatgctcaggacaataatctgacaccggagcaggttcaagaagggatgaatcgtatagctattggtgaagggccttcttgggggacaacatataaagtacacccggtagttcaggctggcggtgatgttagctttatccggggttatactttaagcggaactatagatgacaatcatatttcagttaatcaaggggatatttatagtataggtgctcatggcggagcctcgatcggattatcctttggcccgtatttcccgggattaataaattcaaatgataacgattattcgataaatggtggttttggcgttggtgcagtggggctttctacgggtaaagatggtgttagtttcacttttggttttggcccaagttggggttggagtgcaactgaaattaaaggcgttgacgttaatggcacttcaacaagtgaggtttatcgatatgattttaaataa

SEQ ID NO: 29973 - DNA, 429 bp, Escherichia coli
atgagccgaattatcgccaccatcgaaccattcttaactgatttctgtgaggactttatcgtgtcagacacactgcccgggacaacgcatcccgacgacaatcacgaccgcccctggtgggggctgccctgcaccgtgacgccctgtttcggggcacgtctggtgcaggagggtaaccggttgcattaccttgccgaccgtgccggtatcagaggccggttcagcgacgcggatgcataccatctgggccaggcctttccgctgctgatgaaacaactggaactcatgctcaccagcggtgaactgaatccccgccatcagcataccgtcacgctgtatgcaaaagggctgacctgcgaagccgataccctcggcagctgtggttgcgtttatctggctgtttatccgacacccgaaacgaaaaagtaa

SEQ ID NO: 29974 - DNA, 573 bp, Escherichia coli
atgtttgcagcgcaacctcattggtataagcctgttcctcaagtaaagcggaaatatggtgttgcattttttggtggctactatggtaatcagtttagtgaaaggagccaaatgcaatatgatgttctacactcactttcaagatgtgggttggttatttatgatcgattttggaataaaaaaaataactgtagttatccaaatgatttacatgtatattgtcgaccatcaattcctttaaatttagttgcacaggcatacactcaatatcaaatctatctaaattttaatacaattagaaaatctacaacaatgctttcacggagggtttttgaattaggtgcttcagggtgttctataatcagcagtccatcaatagctatgaatcgtatatttgaggatagtattatttcaattgcgaatggtcaatccgcgcgagaatggtgtttggaattgcaaaaagacataaataaaagaactgtcttgggggaacgcgcaaaagaaattgtattatctcaacatacctggcatcatcgccttcagcagatgaatcgggattttgaactttattag

SEQ ID NO: 29975 - DNA, 165 bp, Escherichia coli
gtgctaatcctgcaaacgtgtgtatttcaactgaattacatctacgaaacccgaaaaccaggcattaaagagcaaattgttgaaatggttcataacggagccggggttcgcgatagctccagaacgctgaaggtggatatcaacaccgtcattctcactttataa

SEQ ID NO: 29976 - DNA, 588 bp, Escherichia coli
atgaggctgcaattctctgctctgtttttcttttttggctgtgtgtttgttcatggtgtttttgccggtccgtttcctccgcccggcatgacccttcctgaatactggggagaagaacacgtatggtgggacggcagggctgcttttcatggtgaggttgtcagacctgcctgtactctggcgatggaagacgcctggcagattattgatatgggggaaaccccggttcgggatttacagaatggtttttccggacctgaaagaaaattcagcctccggctcaggaactgtgaatttaacagtcagggtgggaaccttttctctgattcccggataagggtgactttcgatggcgtccggggtgaaacgccggataagtttaatttatccggtcaggcaaaaggaattaatctgcagatagctgatgccagggggaatattgcccgggcagggaaagtaatgcctgcaataccattgacgggtaatgaagaagcgctggattacaccctcagaattgtgagaaacggaaaaaaacttgaagccggaaattattttgctgtgctgggattccgggtcgattatgagtga

SEQ ID NO: 29977 - DNA, 435 bp, Escherichia coli; identical to SEQ ID NO: 5759

SEQ ID NO: 29978 - DNA, 270 bp, Escherichia coli; identical to SEQ ID NO: 8342

SEQ ID NO: 29979 - DNA, 945 bp, Escherichia coli
atgactgaaccaaccaataaagatagcgaaataaaaaaacacctattagaatttcttgattcacagtctgaaaatatagcaaaacacttctactctcatataaaagacttaatagaagcaggagagctttctgaagctcataataacctagcgctaattgaaaaatacataactaggccaccgatggatgaagaacccaatataaatgaaaataaagccaataaaagaaaaaatgtaaaatcacttgaacctaataattatgtagaacatataatacaattagaagaacgaaacagcatattaactctacagttagagcattatactcaggatcttaatagaaaaaacgcaataatcgaaaacaacgtaaaacaaattaattcattgattagtgaaaataaggaactccgtagccaagtacagcaacaaagaatcgatgataaaatccccacctatgttaacgatgttaaatcagatcttggtagtgatgacaaacattttatattgatgtctattatctggtctattgcaggggtattttttggcttccttgcagtagtatctgctttttttacattatacatgaacttagatttaaaaaatctcactaaccttcagttaatatatatcttcacgcgaggattagttggaatcgccattctttcatggctatcatatatctgccttagtaactcaaaaaagtacacacatgaatcgatcaggcgaaaagatcgtcgacatgctttgatgtttggtcaagtttttttgcagatatacggttctacagcaactaaagaggatgcaatagaagtctttaaggattggaatatttcaggtgactctgcattttcaggtcagacagagcaaccaccgagttttgcgtcatttttgaatacaatcaaagacaaagttaaagtaactggaagtgataaagaaacagattaa

SEQ ID NO: 29980 - DNA, 936 bp, Escherichia coli
atgtcaacacatgaaatcacatttcgccatgtggacgaaaaaaagaaatccttaatcatgcagaatcgcggagggcaatcggttatagatcggatactgaaagcctatggtttttcttcccgacaagcattctgtaatcacctaggtatatcgcaaagtacaatggcgaacaggtatgcccgtgacactttccctgctgattgggttgttatctgtagcatggagactggagtgccggtcgagtggttggcatttggcactgataccgagaagggaagcattacaaataatgcagaaaaaagtcacaacaattgtgacagcaagcatcaacatctcaatagagaacaagacatccaaaatgagaactcttttactattaaccaaggtggaaaagcagcaatagagcgaatcgttttggcttatggatttaagacaagacaagctttagctgatcatattggtgtatcaaaaagtacattagccaatcgttacatgagagatacctttcctgctgactggattattcaatgctcactggaaaccggtgcttcattaacatggctaaccactggtaacggggcaatgtttgaaaagcctcgaaacgatactatcactatcccatatcataaaataattgatggatctcttgctcaagaaaccttcttgacttttgactctaagttgttagaaggaacctttctgcaacctttagcagtattcattgatgaggaaatatatattgtagaatcaaaatttaatgaagttactgatggcaagtggcttgtgaatattgaagggaaaataagtatcaaagatttgactcgcatacccgttggtatggttaaagttgtaggcactaacgcaagttttgaatgcttacttactgacattatcgttttggcaaaatgtaaaagagtttttactaaaaatgtataa

SEQ ID NO: 29981 - DNA, 684 bp, Escherichia coli
atgaaaaaggttaaatggcttaaattaaacatacggcttgagtttgaaacagccgttagacgtctttctcttgattcttttacagaggataaagggaaagggttcatttttgataaaatacgccatgattttgcaaatggtcgctttgtcgagcgtattgtttatcatgataaaatattaagctttgacggaagcgaaactaccgttgaaagaatcgaatatcgcaccacaaattttagcgtggctttagactctcttcctgtaatgcagattaccaacccacccagaactttaaagcctttttcgcaggctttggtaaaaaatcttggcttaggtgttagtttggaagaaattgacataaaccctatagactggcttaatgaaatatcttcaagtgtaaatatcaatttaacacaacttgatatttcaagggttagagtttctgattacgccacagctaaaatgcaaataattggcagcaatgatcttaggaagtattataaagaagaattagagggtaaaaaaataagaattgacaggcttgtttgctctgttaattcattagaatattccggtaagctcaagatcaccaatagcggccttgcttatattgatgttagaaatgagaatgagtttacgaaaatcgtttttgatacgttaaaaaaagtcacccttcaatcatag

SEQ ID NO: 29982 - DNA, 291 bp, Escherichia coli
gtggctaacgataccactccttatcttatggtgttgctacttaataacgatgtctggtgtaagagtcgtgaggtggtggttctaagaaatctgattgagcaggcgtggggaaaagtattgggtgaagataactccattacacatctggttgtgtatcctgaagtgttgtcgttggtatttgatgcagctaacacatacaacgctgagtctggtgtactggaacagacggcccgggcttacattgaatcgcatggtgctattgaacgtcatcttgggtgtagtgacttttaa

SEQ ID NO: 29983 - DNA, 1314 bp, Escherichia coli
atgagtaaaaattggcaaatatgccagttgggtgatgttttgaccctcatcaatggcagagcatataagaaagaagaaatgctcacagaaggtgttcctattctcagaattcaaaatttgaatggagggaataaatggttttattccaacttagagctacaggaagataaatattgctataaaaatgatctcctatatgcttggtcagcaacatttggtccatattggtcgaagtgggatcataaactaatttatcactaccatatttggaagattgaaacatcccctgcacttaataagcaatttgcttattatgcattattgaatattacagaggcacttaaagcatcggctcacggcgtggcaatgccacatattaccaaagctggaatggaggcttgggaaatacaacttcctccaatttcagaacaaaaaatcatcgctgaaaaactcgatacgctgctggcgcaggtagagagcaccaaagcacgtcttgagcaaatcccacaaatcctgaaacgttttcgtcaggcggtgctgggtgcagcggtaagtggaaaactaactgaagactggagagataattcgagcctgtctgggtggatagaaggcaaacttggggaatttataaaaaaaccaagttatggaacgtcatctaagtctaataaagaaggactcattcctgtattaagaatgggcaatcttcagggcggaaaattggactggacggatctagtctatacttcagataccatagaaattgaaaagtataaacttgagtacaatgatgtattattcaatcgtacaaatagtcctgaacttgtcgggaaaacagccatatataaatcagagcaaccagctatttatgcaggttatttgattagggttcaatgtttacctgatttaaaccctgactatcttaactaccatttaaatagcattttggggaggcaatattgctactcagtaaaatctgatggggtcagtcaatcaaatattaatgcacagaaattaattgcatacccaataactgttcctccactccccgaacaacacgaaatcgttcgccgcgtcgagcagctcttcgcctacgcagacaccatagaaaaacaggtcaacaacgccttagcccgcgttaacaacctgacgcaatccatcctggcaaaagcgttccgtggtgaactcaccgcccagtggcgggccgaaaacccggaattaatcagcggagaaaacagcgccgccgcgttgctggaaaaaatcaaagctgaacgcgcagccagcggaggtaaaaaagcctcgcgtaaaaaatcctga

SEQ ID NO: 29984 - DNA, 180 bp, Escherichia coli
atggctagacctgttaagtttactcgtgaaatgattgttgatattgctaaacgcttttatggcgatactgaacgaggcggcgagaatttctttaagaaggaaggaattgatagaagcggattctataagctaatgaagaaatacgaaattcagataaagattaacgttcaagtttgttaa

SEQ ID NO: 29985 - DNA, 174 bp, Escherichia coli
atggatctttttgtctactttgctactctgctgtttgtgactatcgtcgctggcattaaattgatttttatatcgctggtggtgtttttcaaatttctaatcggtacgccttacggctgggtatgcttctttttgtttattctttttagttgctgtaaaaaggatactaaataa

SEQ ID NO: 29986 - DNA, 222 bp, Escherichia coli
atgaatttgatgtgtcttaaaaatcagatactaaatatatacgtgaaggatgttgagctggtcaacgtctacgggggagaacatcccccgctaacctttttcttatttgaggatttacctatggttgaatttttgatttatctggctgtaggattaactatcgtatattcacttgctcacattggcatttctgctgtgtgtaatgctttcaagtatcattaa

SEQ ID NO: 29987 - DNA, 780 bp, Escherichia coli
atgaaaaacattatcgctgctgtcgttctttctgctactgctttctgtgctaatgctgcgtcctttgattgcgctaaagctactaccaaatcagagaagtttatttgtgctaatgagtcaatctccgcactggattcgaaacttcatgaagtatatgttaaggctgttaagattgatccgtctctgaaacaagagcaacgcaactggaataaaactgttcgtgatacaatgatcaatatcgggcagattcagccactggaggctgtatataacgctcaaatccaaaacttgatgaatgtattatctaaagaagaaaccgcgtcagaaagcgattcagagacttctgcgaaggttgaagaagaacaaccgaaacaggaagaagtaaagaaactgaatgttaccgcgatttacgcatgtactgcaaaatttacatggaaagttatcgatggtgaggaaacagaagctgtaaaagatatactctacggaaacaaaacttttgataataacggcggtaaacttaagatcaaaatggtagacgatgttccggtatcttttgtgtattccgacaagtatgatgtttataaatcaagtctcaagccatctaaagagaatccaaacgcaatggaaggtaaatccaaacaggatactattggacgtgttaacacttataacatctgggtaagcaaaaaaggtgacatgcgtcttgaagtaattgaaccaaaatttgattctgaatataaacacactcaatttgcatgtgacatggtagacgcagagtaa

SEQ ID NO: 29988 - DNA, 192 bp, Escherichia coli
atgctaacactgccgcacttccagtttatctacgcgttaatgggtgctgaaaggatcctgttctccgtcgattatccctatcagaccctggacggtgtaaaaacctttatagacagtctgcccgtcaacaaggctgaaaaagaggccatcgcgtttcgcaatgcagaacgtttactgggcatcacggtttag

SEQ ID NO: 29989 - DNA, 327 bp, Escherichia coli
atgacattaactgcgctcggcggccagggtgggcaatggggcggcgctacaaataccgctggcgggctcggtggttcaggctctggcggttataaaactgaacaaggcggagacggttcagacggacaggcgggccaggcgctattagtaggcaatggggcatcgagctattggggtggcggcggccgcgctgggcaactgagcggtaattctggagtttgctctggctccggcggcgggggtgcatacgataatagctattcacacacgtcaggacgtggcgggcacggagctaatggcgtgctggtaattcgggagtacatgtaa

SEQ ID NO: 29990 - DNA, 1098 bp, Escherichia coli
atgaatgagcaaacgatcaaccttttaagagatatcaccgaacgtgttggatggaagctcacaaaaaaaattgtgggggaaccacttggtgtcacatcagttggccttgacccatttatcgcgaggctccaagcaacagaagatgtagatcaggaagctgtaagtactcatataggtgaagtatggcaaaatttactattgagtgggacccgtttagttaagctgtataagttagaaccggaagaagtgcaaactctacgggagaatataaatgccctagaaagagacgaatccgttttttgcgaaagctatccatatcctttgcctaaagatgtgttgcttgcagctgatacagatcttcattttttagaaactacattttctgtcgtaaacaaagtttctttagaaacaacgattcttacgtcgaaagcatactacacagaaactattgaactcgacgcgacccatttaagcgatgctgggctagctcttcgctccaatggtggtgaaatcaaatgtaaaacacgtgaagttacacagtgctttaatacaataatgattctacccgagttgcatttacttgcgctcactgttgatttatctgtgatgcctcgttcagagtcggaacgacagcaatttttgcttgatcagtttattagaactactactggtttgactttacctgcgcccattgacctctttggattagtacaagaaatgtacgagcaaacagatggtagaatctcgcagatgtcatttcttacatcagatggaaacaccagctcattaaaactccgtccgggtgaaagctgcttgcgctcagacagctaccatcatgggggcgaagaggcaagtcccatactaacgaaatacaaactcggtaaaatttgggatctgactgattcagcttctcaagttttccctgtagaattaatactgccaggtaaacgggctatgattgataaaccgaacagtcacctttatgatgcaatcatagatcgttgctcctcaattgagcatattttgtttgtaatcaacaagatgttagagtcactatcaagcatacagagaaagcgagccactgacgaggctgcataa

SEQ ID NO: 29991 - DNA, 423 bp, Escherichia coli
atgttaactaaacacgacatatactcgaaaatcaaccacgacctacatgggccggttggagatttatgtcgtgttgtggttgattttttaaccagcaaagaagctaagtcactgaaacacataacatatgtaagtttggttaatggtactaagcttgatgtgcaaaataacgatgccaaagttttactgatcaaagtaactgactatctttcgagcaacagaatgcacttgctagatatgcatttccagtatatcgagtctgacgatagtgatcctattcccgtcgatgatgatgacgtgtctcatgcgcttcatacaggtaagttttatcatccttacagtggtcaattagtcgataattataatcattatttgttcccatacttcactcctactgaggctttggaggaattacatgagtga

SEQ ID NO: 29992 - DNA, 636 bp, Escherichia coli
atgagtgaatgtaatttcaaccttgcccaattagacaccttaagtcaatttgaccctgaattgtctggttttcttaagcgaaaatttgcagcaagtcacgacgatttcgtgaagcaactttacgttgaccttgatgacgcgatgtatgttttggaaacccaaaaacatatgtatcaaacacagcagtggggtgaagatgagctcacatcagttattattgcttttttgaaaggccgtaattatgacgctgaacatgacactcagcatggagggcatatagatatattagttaaacatcagctcggccgatttgcatggattggcgaagctaaattatggaaaggtcctgcgtacatcttaggtggatggaaccagctcaacgagcgatatggcactggcactgcgcgtgacaaccatggtggcattatcatttactgtaaaattaagaaatctggcgagagacttgatgactggcgaaagcatcttcagcaggaagtagctgatgcaaaaattacaaccgacgaggataatcccttgcgattcatgagtacaacattgcatccagctacaaatcaaccatattatgtaagacatatggtcgtttcattatttcatgctacaggagactcagagtag

SEQ ID NO: 29993 - DNA, 387 bp, Escherichia coli
atgcgtaatatacagatgatccttgaacgttggggggcatgggcagcgagtgatagctcaggagttgactattcgtctatagctgctgggtttaaggggcttcttccatataccagaaagacacgtctagcttgttcagatagtgatgcattaattattgaaggtagccttgctcttcttaagaagagaaaaccgtacgaacattctttgattgtggctcattacctgtatggcatctcgaaaagaaagatcgcaaaggcacgtaataaagacgaaaaattgatacgtatcgagatacaggttgctgaaggttttatcgatggctgcctaagtatgctggatgtgaaacttgaaatggatgactactctgagtctcctgtagcatga

SEQ ID NO: 29994 - DNA, 483 bp, Escherichia coli
atgtcttcttcgtgtgcatcaccaaggaataatccacaaaaattcccatactcaatcataaatgataaactggttttattagttgccgatggatcctttacaaatatatcatttccattgcttagcaactgcagtgcttctttaatactatatttttcagatgaagatgatattttaatttctgtgtttttacgctcttgttgttctaaatattttaaaaggatattttttgaaggagtaataggtgttatttttatatttctgattaaaataggagagtcatctgaagttagtgtcgaaaagacaaaacttccatctttcactattctatcaagatttatatcttgtttggtcgatattttattgcttgaattctttattacatgtttaatgttagataaactattgaatacaaatctcttgatgtttattttattttcaattaggtatttgaaaccaccgatatggtcatcatcattgtga

SEQ ID NO: 29995 - DNA, 243 bp, Escherichia coli
atgagtgaaattgataaaataataaatggtacatgtaactttcaatcaatgccgccaggtagttatgtaaaacaatgtagtgaaatagttaatggtcagcttgtaatgtcaaatgcaggacgtggagtttctacggatgaaaaaaaatcaataaatgaagccctattaagcatcaatgtttttgacttgtttcgcccatcttgggttattttgcaaaatagtagtcaattcccacattattga

SEQ ID NO: 29996 - DNA, 426 bp, Escherichia coli
atggcgactgagaaaaagaaaggtggtcgcccctctgattatatgccggaggtggctaatgacatttgcgcattgctttcctccggtgagagtctgcgcaaagtttgcgaacgcccaggaatgccgagcaaaacatcagtttttcgctggctggctgaacatcatgagtttcgtgaccagtacgcgaaggcaacagagactcgggccgactctattttcgaagagatattcgaaattgctgactacgtaatccctgatgccgccgaggtggcaaaggcaagacttcgcgttgatacccgcaaatgggcgctggcccgaatgaatccccgtaagtatggcgacaaggtaactaatgagcttgtcggcaaagacggcggcgcaattcagattgaaacatcaccgatgagcactctattcggaaaatga

SEQ ID NO: 29997 - DNA, 510 bp, Escherichia coli
  misc_feature (413)..(422): n is a, c, g, or t
atgatgaaacacgattattacgaagctccaaatctaactgaaaagcttgaacaagcggaaaaatcatcatctttgtacacaaatccaatttctcagtcatcaggaatgtctggcatgaatatgggcatgctacaatcaagtggtggtggagctgggagtaacaacatgcttgaggctagggttgcacggttagaggcagatgttgaaaacattaagaccaatctatctgaggcaaggtctgacatctctcgtttgcgtgatatctcagctgatacatccagagatgttgcggtggtcctgcaaaaaatagtagatgtagacgaaaaattatcaaaaaaaccgagtaagagcgaagtccagacattgatctctactgcagtaaacaagcaaatactatggaccatagggactgnnnnnnnnnnaaatatatattttagctcacctcatcagctatcttcttgttccattcactcagtgccactgctaggaaaactaaggaggttggtgtga

SEQ ID NO: 29998 - DNA, 273 bp, Escherichia coli
atgaacatcggtaaagcaatcatcaactacgcagcgcgtcgcaacatggacattaccttgattggggatgagaccgtggcgttctgggaagcggataacgattgtgaatggatgttctcctacatgattggtaatgatggtttcctccactttaaaggcaatgtgtatctgccgcaggatattaaagaagaattaccagcgtgcatcgatacagacaagaagctgaaaaaagtaatcaactttatcgctaaagagtttatcagcaagaagtaa

SEQ ID NO: 29999 - DNA, 1014 bp, Escherichia coli
atgacgtacgcagtggagtttgacaacgtctcgcggttgtacggtgacgtgcgcgcagtagatggcgtcagtattgcgataaaagatggtgagttcttctctatgctggggccgtccggctccggcaaaactacctgcctgcgcctgattgctggcttcgaacagctttctggcggggctatctctatctttggtaaacccgccagcaatctgccaccgtgggagcgggacgtgaatactgtcttccaggactacgcgctatttccgcatatgtcgattcttgacaatgtcgcctatgggctgatggtcaaaggcgtgaataaaaagcagcggcacgcaatggcgcaagaggcgctggagaaagtggcgttggggtttgtacagcaacgtaaaccgtcacaactttctggtggtcagcgccagcgggttgctatcgccagagcattggtgaatgaaccgcgcgtattgctgttggatgaaccgctcggcgcactggatctcaaattgcgtgagcagatgcagctggaactgaaaaaactgcaacaatctctcggtatcacttttatcttcgttacccacgatcagggcgaagcgttatcgatgtccgatcgtgtggcggttttcaataatggacgcattgagcaggtcgattccccgcgcgatctctatatgcgcccgcgcacgccgtttgttgccgggttcgttggtacatcgaatgtttttgatggactgatggcagagaaactttgtggcatgacgggaagcttcgccctgcgaccggaacatatccgcctcaacacccctggtgaactgcaggccaatggcacgatccaggcggtgcaatatcagggcgcggcaactcgttttgaactgagactgaacggcggtgaaaaactgcttgtgagtcaggccaatatgacaggcgaagaactgcctgccacgctcacgcccggacaacaagtgatggtttcctggtcgcgtgatgtgatggtgccgctggttgaggagaggtga

SEQ ID NO: 30000 - DNA, 171 bp, Escherichia coli
atgactcttttggatagtgtcgaagcaggcaagctgactctcagagaattaattgatactcttgcaaaagataaaaattacaaagcttccaagtgggatcagcgataccgtgaatttacgaccttgctacaacaaaccttaacttttgctgagcctgaaacggatgtgtag

SEQ ID NO: 30001 - DNA, 549 bp, Escherichia coli
gtgcaaataaccaaagccttactttcagaaccggaggaaatccggcgttttgttcagcaggcgggggaccactggccacatctgctggcagtccacttcacactccattcggcagaaggaatcaacgggcaacagattcaggcattctgtacttccttttaccgacaggtgcacgaacgtattactgagcgtaatcacacggtcagtccatcatcgccgttggtattacgctggttgcgggaacaacatgaaggagcaacaatacgatgcctgttgctgctcagccaggcgagtagtatttgccatccgcgaaccagtgccacggttgatgaagaatgttcgcaagtggtggatttactgcaacagacctggctggtgataagcactggcggacaatgccgggtggaaaggtgttttaaggttgtccggggtgatacatctggtcagtatgttgcgttaaaaacagtcgcattgtctctggggttaccggttgtgagcgctattacccatcgtccggtacagcgctgtacattgattacagctcagtga

SEQ ID NO: 30002 - DNA, 315 bp, Escherichia coli
atgttgactacaacaagccacgacagcgtattgctgcgtgccgacgatcccctgatcgagatgagttacatcaccagctttaccggtatgactgacaaatgtttttgcacgctgatcagcgaagggcatttccctaaacccatcaaactggggcgcagcagcatgaaacgtgttgtgatgccggtacgctggcagtgtgcaaaatgccggcgctggtattgtggaaatcaatcctgtcccgggtgttggcgacactcccgtgaaccttccagcagacattctccggtcagccaacagtttgtcatcatttcctga

SEQ ID NO: 30003 - DNA, 165 bp, Escherichia coli
atgacgctggagtcggttgttgaactggaaaatggcaagatggtgatggtcagcgaattcttcaatgaagacgatcctgactttgaccactctctcgaccaaaaaatggccattaattgggtagaaagctgggaggtcgtactggctgatgaagaacacaagtaa

SEQ ID NO: 30004 - DNA, 150 bp, Escherichia coli
atgctctctccgccacgcagccagcttctggaggcggttttaatgcagatgcatggaagggctcatgccgcgccagtactggtgcgtcgggatatggaaaattcgggatataccttaaagcatataccaattcatgaaggagtggcatag

SEQ ID NO: 30005 - DNA, 1611 bp, Escherichia coli
atgaattgcaaaactatcatcctacgtttcagagatttggtcacccccgccggagaaacaatcactctacatcaggaagtaatcaaatctaaaggttcagtttggtggggatggtgggcaaagccggatgaaagagtttcttctgaattcataaaaatcaaacaaaatttggcgagtaaaccattaggtattttcctttttgatagtgggcaaaagaaattgtatgaagccaagttgaaagatatttttttaaatggcgatttagctccgtgtcctgccccagaaatgtctcctgcatattatgctaagcaatgttataatttatggtttgaattatttgatataaatcaaattaatgatgacgtaattaataattacgcatactccgacaaggttaaagatttttttgatgaccctactttattttcagtattcgataacaagcaggtgtcaggacttagggagttaagatttcaagacagaaccatttggtttgttaatgaatatgaccctaaaaagcatgaatctcatgagattttgttgaacgatgcaaacattggaattcccggagtgtttccaaaacgcccggtggacttacacaatggaaaagtagtttggttttcggatatccatttcgatgaagataaggagaaacatcaatttaatcaagttaatcaattgtcgctttctaagatattaattagcaggcaggatctcgacataaacgggatgattatttcaggtgatttaacgtggaaagccacaaagaaagagtttgaattggctacgaatttcttcaatgatatctgttctgttaaacgagtaaaatatgatgcaataggattttgccctggtaatcacgatgtcagctttagtaaaacacttccagctaaagtaaaaagagcacttaataactatcatgaagctcaaatggggaagaaaaaaatcactaaagaagaatggaatattcttgctgcaagaagtctttctaataaaagcaaagaaaactataaggatttttttaaattgacagtaggcacagagcctaacgaatttctttcgatgggcaaacgctttattattagaaatcaaaagatagttgatttctgtttcttaaacagtaattttcttcagcaacatcaacttgcttttcaaggtcaaggatttgtcggagcagaacagcttgatgatgctgaaaagaaaatgctttggcaaaataatgagaaaattaaagggggataccgggtggttgttttgcaccataatttgtatcctgttaattatacctcagagccgtatgtgagtgctccagctagtctggtatatgatacggaagcaataattcaatggtgcttcaaacatggagttgatttgatacttcatggtcatacacatgaacgtttcatgactaaagtatccagaaggatagatggttgcactaaaagtctatggataactggtttaggtagttcaggtgtgatctcttctcaccttgtaggttttaatgagtttgcagaaattgatttcaataatgaaaaaataaatatcaagttctataatataaagaataatgcaattgatgaccaatttgaaatcattaacttggactga

SEQ ID NO: 30006 - DNA, 846 bp, Escherichia coli
atgaaaaaattattaattacagatttggataacacattatatgattgggtttcattctatgcccagtcatttactgcaatgctagatgtattagtcaatattttagatgtacctaaaagtgagttgcttgaagaatttagacaagttcacatcaaacatgggaattctgaatatccatttggtgcattagagatagattcagtaaagaaaaaatatgcccacctaactagagatgaggttgctttaaaactcgatgaggcttttcatgcctttaattctactagaaagaaaacattaagatgttatgagggagttatcgagaccttagactacctcaagaatcaaggggtcgtcattgtaggccacaccgaagcccctgttagaaatgccatattccgattgaaatctcttggtattcttgaatttatgacacatctttatacccctcaagatagattccacgatgaattggatgttaaaactaagtcttggattgaatcatatggtgattttatttatctattaagtgacgaggaaaaaaaacctaacccactcttgttagccgacatttgtgctaaagagggattcagtacaagtgaggcagtttacattggagattcattagttaaagatatctccatggcaaatgatgcaggtgttgaatcaatatatgcagagtatgggcgacagcatgaaaaggtatactgggatattttagtttcaataactcattggacgcaagaagatattcaaagggaaggtaaattaaaggaactttataaacatgtcgttccaaatcacataataaaatcttttgataaagtaattgatgttatcctgaaataa

SEQ ID NO: 30007 - DNA, 1587 bp, Escherichia coli
atggatatctcgcttctcagtaccacccgtgaccctgaacagcttcgcgctctggcaattgccatggtgcaaaaagctatggctgagagtcagaatcttgcaaatgtggtgcaggaaaaagaccggaatattgcagaacttcagaaccgtatccgcatcctggaagagccgatgaagctcgcacgccagcagcgttctggtaaaaaatgcgaatcgctggccgggatgcagcgttccctgttcgaagaggatgttgatgccgatatcgccgcgcttaccgcacatctggataaactgctcccgcaatccactgaagaagacgaaaaagcgccccgttcacgcccgatacgcaaacccttaccggttcatcttcctcgggtggaaaaaattatccagccggacactgaccattgccccgaatgtgacgagccgctgcactatatccgtgatgcggtgagtgaaaagctggagtatattcccgctcacttcgtggtgaaccgttatatccgtccgcaatacagttgtccctgttgccagaaggtgttcagcggtgaaatgccggcacatatcctcccgaaaagtgccgttgagccatcagtcatcgcacaggtgatcatcaataaatacggtgaccacctgcctctgtatcgccagcaacaggtctttgcccgttcagatgtcgggcttcccgtcagttcgatggctgacatggttggcgcggcgggtgccgcattatctcccctggcggcgttactccatcgcgagttgataaaccgtccggtggtgcatgcagatgagactaccctgaagatcctgaacacgaagaaaggcggtaaatcctgctccggttatctgtgggcatacgtcagtggagaaaggacgggaccgtcagttgtgtgcttcgactgccggaccggacgtagccatgagtatcctgaaaactggcttcagggctggggcgggacgctggttgtcgacggacataaagcttaccggactctggcaaacaaagtgccggagatcacgctggccggatgctgggcccatgcccgcaggggcttcgccgacctgtataaaatcagtaaagatccacgggctgccatagccgtgaagaaaatcgcggggttgtaccgtcttgagaagaagatcagtagccgccccgtggaaaaaatccgccagtggcgacagcgttatgcccgtccgatactggaagaactgtggtcatggcttgaagagcaggaaccgcaatgttctccgggaagggcattacacaaagccattgtctatgcgctgtctcatcgcgtggaactgagccgcttcctggaagatggtgcggtgccgctggataataatgtgtgtgaacgggccatcaaaaacgtggttctgggcagaaaatcgtggctgttcgccggttcgcagatggcgggagaacgcgccgcgcaaataatgagcttgctggaaaccgcgaaacgcaacgatctggagccgcatgcctggctgacagacgtcctgatgcgtctgccggagtggccggaggagcgactggcagagttgctgcctcttgagggatttaccttctccgggtga

SEQ ID NO: 30008 - DNA, 339 bp, Escherichia coli
atgaacgaattagatgatctgcataataaaataggtcagttattagtggatgccggtcctgctaatgcgatgaagatcattgctcgtgctaaattatcactagatggtgagtcatgtgagtatgagtatgattatcttgatcaagagggagatgaagattggttcgttcctgataagttagccagtcacgatcttaggctactgttagttaaaatgagggatttttacatccgaaataatatgactaacgggaaaccagcatggataggttgtgaaataatcgttgatataccagaagaaaaaattagcataaactttcaatatgatgatgaactatga

SEQ ID NO: 30009 - DNA, 210 bp, Escherichia coli
atggatggcaacctgaataaaggtgcatggaaacagatggaaaacacatgggctaatgctttgaaagatggcaaacaagttaatgttaaaatagaacctgtttacactggggagaataagcgtcctgaaagctttagtgtaacatactctattgatggaggccgtcctgttatcaaagacatcagcaacacacctggaggggtaaaatga

SEQ ID NO: 30010 - DNA, 360 bp, Escherichia coli
atgacattattacttaatgacaagcaatataatgaattatgtgaagctgcagaaggtcgtaatttgggggccgttttttcctatagtgaaccagaagaacccccgccgttaaatttttcatttgaagaaaggaaaaaaatttttctatgggtattgacccgtcttctgaaagaaggacgcatcaaactggccaagcacggtaagtttctggaaggaagtgttgacgagcaggttgagcgttttcgacaagcatttccgaaaacagaagaagagatggaagacggtatctggttttttgatgagagttgtccggggggcgctgtttgggtgcttgaagatggctctctcgaatggacctga

SEQ ID NO: 30011 - DNA, 288 bp, Escherichia coli
atgaccgaatccagcgattacgaatccgtccaggtctttatcggcgttgatgtcggtaaagatacgcatcacgctgttgccattaatcgttcaggtaaacgcctgttcgataaagcattacccaacgacgaaaacaaactcaggtcgctaatatctgacctgaaacaacatggtcagatactgatggttgttgatcagccagctaccatcggtgcgttacctgtcgccgttgcccgctcagaaggagtccttgtcggataccccctggactggccatgcgccgcatag

SEQ ID NO: 30012 - DNA, 921 bp, Escherichia coli
atgcgccgcatagccgacttacacgccggtgaagctaaaactgatgctcgtgacgctgccatcattgccgaagctgcccgtaccctgcctcacgcgctacgcacgctgaaactggctgacgagcaaatcgccgaactctccatgctctgcggcttcgatgatgatcttgccgcacagacaacgcaggccagcaaccgtatccgcggccttctgacccagatacatccggcactggagcgcgttctcggtccgagacttgatcacccggcggtactcgatcttctccagcgatatccctcaccagaaaaactcgcttcgctgggtgagaagaagctggcagcccagctctgcaaacttgcgcctcgtctgggtaaacgccttgcagcagacatagctcaggcactggccgaacaaaccgtcgtcgttcccggcacgaatgccgctgccgtagtactgccacgtctggcactccagctcatcacgctgcgtaagcaaagagacgaggtggcgcttgaggtagaacagcgagttcttgctcaccctctttacccggtcctgaccagtatgcccggagtcggtgtcaggaccgcagccagactcctcaccgaggccgcctgccgcgccttcgcctctgccgcacatctcgctgcttatgctggccttgcgccggtaactcggcgatccggctcgtcaatacgcggtgagcatccctcgcgacggggtaataaagctctcaaacgggcgttgttcctgtcggccttcgccgcgctcagggatccgctctccagggcttactacacccgcaaaatgagtcagggaaaacgacacaatcaggcgcttatcgccctggcgagacgacgctgcgacgttctgttcgccatgatgcgcgacgggactttttataccccgcaggcgtcataa

SEQ ID NO: 30013 - DNA, 237 bp, Escherichia coli
atgggaacaattaatataaaagatttggttaagcttatttttttatgcataggcttgatgttcgctactgtagtaatggcctatttattagcgtcagtaattgtttattttaaaataaacacatttgatttcaattggagtgaggctcttcctgatgccttcagagtggggggagttggtgggacaatccttggtttaggtctctggataaaagcaaaactacaagaaagaaaataa

SEQ ID NO: 30014 - DNA, 162 bp, Escherichia coli
atgtttattggcggtgactctggggcgactcgtgaattgattcgccaggtgaatcgtgccggagggcctgaaaccttaatgaagattaaaggggtgatacaattattggtatatttactgattcctcgcgttgcttgtattccaatatcccacgtgtggtaa

SEQ ID NO: 30015 - DNA, 576 bp, Escherichia coli
atgaagaatgacttatccgttctgttgatgcagcagatggatgagtcagggatagtgagcagtactgactttgcccaacggctggaaaaacagtatggtcttgacagtcagagagccgaaattttagcgggagcggcaatggcagccgtgaccggtgggttgggtaaaggcgggaagcctgcggctggaaccgcagggaaaaatatcgttgtggttgactcgggcaagaaaggtgcctggagcaaggcgatgaacaagccggagccgaacactatttataaagtggacggggataagacttatcacactgataacttggccagacccactcaggttgaagcaactcttagcgcaaatgtgaaagaccggaatggttatcagcaatgtaaggcgggtagatgtggtaatcttggagatgaaggtgggcatttaatagccagtatatttaatggtcctggtgaaaaattaaacctgctaccaatggatggaaaccttaataaaggtgcctggaaaagtatggaaaacacttgggctaaggcattaagtgaaggtaaagatgttaaagttaatatctag

SEQ ID NO: 30016 - DNA, 504 bp, Escherichia coli
atggtggtgtccgctattgccagtacacctcagctgaccattaaccgtaaaccgcagggtattttcagtaagtcaccggcaacgccgctgcaggataaaacgaacacagtacacaacgagaagcctcttcgggtgaggaatcaaacaccatggcgacatatgacaaaacgccagcgcaaaaaccgtaagcgtattaatcgtcttgtggaacactggcctgagttattcaaccgggaaaaaacccaaccgcttaaagttgagatacctgacgacctgatacaggatatcgccatcagagaactggcatttggcgcaggtgcattacgcgcggcagtagcatcttatgtgcagtctccgcgctattaccgtgcgttaatggctggcggcgcccgttacgaccagaaggggcagccgtgcggggaagtgactccacaggaacagaaagaggcagagacccggctaatggtgctgaatgaccgacaaaaagccagaaaacctcgttga

SEQ ID NO: 30017 - DNA, 906 bp, Escherichia coli
gtggatagcgcacgcgcccttattgcccggggatggggagtaagcttagtcagccgttgtctccgggtgtcgcgtgcgcagttgcacgtcattctcagacgaaccgatgactggatggatggccgccgcagtcgtcacactgatgatacggatgtgcttctccgtatacaccatgttatcggagagctgcccacgtatggttatcgtcgggtatgggcgctgcttcgcagacaggcagaacttgatggtatgcctgcgatcaatgccaaacgtgtttaccggatcatgcgccagaatgcgctgttgcttgagcgaaaacctgctgtaccgccatcgaaacgggcacatacaggcagagtggctgtgaaagaaagtaatcagcgatggtgctctgacgggttcgagttccgctgtgataacggagaaaaactgcgagtcacgttcgcgctggactgctgtgaccgtgaggcactgcactgggcggtcactacgggcggcttcaacagtgaaacagtacaggacgtcatgctgggagcggtggaacgccgcttcggcaacgagcttccggcgtctccagtagagtggctgacggataatggttcatgctaccgggctaatgaaacacggcagtttgcccggatgttggggcttgaaccgaagagcacggcggtgcggagtccggagagtaacggcatagcagagagcttcgtgaaaacgataaagcgtgactacatcagtgtcatgcccaaaccagacgggttaacggcagcaaagaaccttgcagaggcgttcgagcattataacgaatggcatccgcatagtgcactgggttatcgctcgccacgggaatatctacggcagcaagccagtaatgggttaagtgataacaggtgtctggaaatatag

SEQ ID NO: 30018 - DNA, 597 bp, Escherichia coli
atggctattgaaaacaaactcagtgacaaactgttaaagagtcttgtcggaaaacggcaggacaaacaaaaaacaatagcggatgggcgcgggttgtctgtgcgtgtaagcatggttggggggatcagctttgttttttactatcgtcttggtggcagggaatcccctccggtatggcttacacttggtcgctatcctgacatgtctcttgcaacggccaggcgcatgcgtgatcagtgccgtgaatggctggctgaaaatctggacccccgcaggcaaataaaacttgctgccgaaaaaactatgcaaccagtgaccgtaagggatgcgctgttttactggtacgacaatcacgccacaacagccagaaaagagcatgaatatttaataaaacgatttgaaaagcatatcttcccctatatcggtgatatggctatagaacagtgcaaattacacacatggcttaccgtctttgacaggatcaaaaaaatgcgcctgttatgtctggtgcaatttttcttgatatcaaacaggcgttgcgtttttgtcgcgtcaggcaatacatcgcgtgcgatccctttggagatattaacgtaa

SEQ ID NO: 30019 - DNA, 1473 bp, Escherichia coli
ttgttggtaattatcacggcagaactggatgatgcgtatagctggttatctaatctttcatcgcaggtatacgacgatgttgccacggatgaggcatttttactgcgtcttttgggagtacctcgtcgtgctgcgccacgcttggctgaagccttaagattaacgcgggaggattcgcttcctgccattcgtcaacgtctggaaaagctaccagaacaagtttggagcgaagctttaggtaaaagaagaaatggtctatcgcaaggcctagatgattatagttggggaacagtgatgaggcagaatacaccacctgttttttctgatcttttcatgctggcagcttatctgcgcagagaactggaaaataaaaagaccatcttgctctatgcctataatggtacagggaagactcgactgtcgatggcgtttaaagatgcaggtaaaaaaacgattcaccgccctttttcggttggtgatcatgtgggccagccgcttacaattaccgaaacgaccggagataccttatatttcaacgcattcactgaagatctgttccattggaacaacgatctagaaggtgatgaggatcgccgattgctgctcaacagggattcgcgattttttcggggattgtttgagctggaaatggacaaccgtatacgcccgttattgcagcgttatacagacttcgactttcgaattgatacagaagaatgggcgatacgcttctcacgaactgtagatggtcaaatcattgataacatcaaggtttcacgaggagaagaaaatatcttcatttggtgtttcttcttagctatcgtacaattagcacttgatggtgcagatgcttaccagtgggtaaaatatatctacatagacgatcctatatcctcactggatgagcataacgctatcacagttggtaaccatctggcacaactattgaacaaagctgataacccgttgaaagtgatgatctcatcccatcatccattattcttcaatgtcatgcacaatgaacttgatgctcgtaaatccagaaaggttgcagcctactttttatcaagatcacggattgatggtagttattccctgacttatacaggcgcgacaccattctttcatcatgttgcgatactaactgagttgtataaagcggagcaatcaggtgagttatatacctatcatttcaatatgttacgttcagttctggaaaaatcagccagcttccatggtttttcaaatttctcagcctgcattgcgcaggatgttgatgaccccgaaaggattttgcattcgaggctcatcaatattttaagccatggaaactattcgcttttcgagcctcaacctatgctcgaagaaaataaaacttatttcagaaagattttgcatgattttctgaaacgctatccatttaatcctgatttatttcctcaacagattgaggaaggtgaaaagaaactatga

SEQ ID NO: 30020 - DNA, 1431 bp, Escherichia coli
atgaccttgcagataacttacaagtctgagcaaggctgcgtttcttggcaggggcactgcgtgcagaaagactgtgtatttaatgatttcctgcaagggccagtggctgctcgtctgaatgatacgacagaccatgatgcgctgactgagcatcttcgtgagcttagcttgaccggcatgggacatgattcactggaagaagtcctagcagctgaggtgcctgaaactcgtgactgtgccgtcggcaaagcattggcagaagccgtgctggaggcactgcacgacgtggtgcttccgtggtataccgagtgcggcaagcgcaatccttttgcctcattgcccgacgcgaatattgtgggtttccagcgtgatgacgaatcccaccaactgtctctgggggaagtcaaatgttcatccgaaaccctgtcaccaccacagctcataagcgggcgcagtagcatgacacaccaactggatactctcgccagcaaccttgccaatctctgcctgttactcaaatggctgctatcatggggcaaaagtactgagcatgaaacagcgttcaataacgcctgcacgcgctatttcaatagcgggaatcgtgatctggtattgttcggcatactgattcgcgatcagtccgtaaatgagacggatttacgagcgcgatgtcgtagtctggctggtcgtgtttttcaaggccaactcggtatagttgctctcgtcgccaaagatgaacgtgaagtagcacaaaaaaaggggtttattaaccaaaacactggcgacttgaattctgcgttgattcagattatgcagacggctgatggattggaatgccagggatccatcgtataccacctcccggaatggtcgagcttcttacaatgtctgactcatacttatcgccagatggggcagccatcgaattttgtggatcagatcgagcaggtgctgcgtggcacttttggtttcgagaaattacgtacatcggatagccagataactcgttgtttactggatggtatccatcactatgtcgattatcttgccagtccttcccaacttctgaaactggttgatagtactggattttcactgcaaagcatcaggacggtgttaacgcacaaaggtgatctgagaccggactcctggaatcgagaacaactatttagctccggtgacaataccctaaagaacatgatgggcgtgctgatgcgagtacctgaattgcgcgacaatctgaattcggtgctggaaggcaaatcacctgatggtggcaagcttgcatgtattctaaaggattgggggaacggaaaagatattgctcatatcgcgaagcaatattttagtaaggatgatacagatgttgttactgccttgactaaatgcggacagaacttgcttggtaaactgactcataccacggcatga

SEQ ID NO: 30021 - DNA, 1263 bp, Escherichia coli
atgagtggaagtaataaacatatactggtaccacaattgcgtttcccagagtttagagatgcagaagaatggaccacctataatttaggccaactgtcaaaaattgtaacagagagagtgggagataatgattgtattccatatacaatcacatctggagttggtcttatcagccaacaagaaaaactgggtagaactattgcgggtaattctttaaaaaattatatactcctacaacataacgatttcgcttacaataagagtgcaacaaaagcatacccacaaggatatattgcatgttacttaggacatgagcgtgcagctgttcctaatagtatattcacttgttttcgccctaccccaaacttagtcataccagcttttttgaataatctttttgttgccaacttacatgggaaatggctaaagaatcgcgttgctgttggtgcgcgtgctaatggtgcactgcaagtcaataataatgatttaatgaacgtacccgtaccattgccaactggttcacagtcactttccgaacaaaaaaaaatcgccgactgtctgtcttctctggatgacctgctcacagcagaagtccagaaattgaatgtgttaaaagaatataaaaaaggcctgttgcaacagctttttcctcgggaaggtgaaactgtaccacagaagcgttttccggaatttcgaggtacggtgtccaccttgcctctagaaactgttgctgattttgtgagcgagaagatctccatcaataaaatcactccagctcattatgtaagtacagaaaacttgctgtctgacttcggcggcataaacttggctactaaattgccatcagtttcatcagttacgagcttcagacctaaagacattcttgtttcgaatattcgcccatatcttagaaaagtctggcaagcaaatgtatgtggcggagcgtcaaatgatgtgcttgttattagacccactgagcgtgtcggatctaactacttggctgtagtactccgaagtaacttcttcattgattatgtgatgcgtggtgccaagggagtcaagatgcctcgcggagaaatttcgatgattagacagtttccagtgccgaccccttgctctgttgaacaacaaaaaatcgcagattgcctatcttcgctcgatgatctcatcaccgcccaaagccacaaaatcgatgctctgaaaacccacaaaaggggcctaattcagcagttattccctgtactgaatgaggtccccgcatga

SEQ ID NO: 30022 - DNA, 186 bp, Escherichia coli
atgacagccattttttctaataacatacactggaggagtaaaaatttgaattcgcatatcatcgcgaacagcaaattcatgttcgtggaagttaatactcatgcgatccccaaatgccagcaagaacagatatgggcaccgatgccctcaattagtgacgtaatgcctcaggaacaagctgtatga

SEQ ID NO: 30023 - DNA, 1776 bp, Escherichia coli
atgtcccagtacgacaaagccacgcaaacagcaggtttagtacgcataactaatcaattagagtctatatacggaacttttattgatatgaaagatattaattccgtaggagagcataggaaagaaactctaattacacgctgtgtagctgcgcatgcaatcagcttgtatggtgatgaaccagaccctgagttagctgctaatgctgtctgcgatggaaaagatgatggcgggatagatgcagtttatgttaataaaaattcgagaaagatagtaatagttcagtcaaaatatattaaaaatggcgacggttctataaccacaagagaattcggaagattcaaagacgcatgcgcaaaagtaatagccagcgactttacaacatttaacgaaaggtttttaagaaacaaagactccataattgaagcaatctcaggatttacatataaatgtatatgtgtatttatatatacaggggttcatgagccaagcgaagaagtaaaatcagacatagagttttgggaaaaggttcagaatcggtctctattatttaaagatatagagaatagagatgagtattcagtgctattcgagccggcaggtatacaagtgataatggatggtctttctaatgatcgatcaaaatctataaatgttagcaatgttcaccttgaaagttatggagagatagcagaaccttataaagcaatatacggaacaatatccgcaaggatcctatacgactggtgggaaaagtacaagtactctctgttcgagaaaaatataagaagtgtcctcggtaattcatccataaactctgggataaagaaaacattaagtgaaaagccggagaatttttggtactataacaatgggataactgctgtatatagtgatgtagaagaaagcatgatcaacttaagtacaagcaggaagtacgggctatttagttttaaaagtctgagtataataaatggagctcaaactgtaagcactattggtgaagtgttcaactctttacccgaagaaaaaaaagatctaatcaaggtgagcattagatttatcagtgcagcaaaagaagattttttaacctctgtcactaaattcaacaatacacaaaacagggttactggaagagatttctcatcacagaggcccgagcaacaaagaatacaaagagaaataaactttattggcggatatagctacaaactactcaggcaagaagactccagccagacaggtggtaataccattgatattgatgatgctttaaacgcattagtgtgtgcctctaaagatgaaacattgatatcttccttaaaactaaatagaggacgtttttttgaaagctggggaggtctttatgaaaaagtattcccagctgaaaatggtcctaccggtttagatataataaataaagtaaatgcttatagattagcaaatgatatattgcaagaaagtatagttaaactactatcagtagatatggaaaatcagaagcagattcatcaaataatgattcatggaaattatgttttaatatccatactcatgaataaaatagaagtttcctctgtggagaatcacatcttctcttatagccgaaacgtttcactggaggaatgtatagagctggcttctgatacttataatcacatacaggaagtcttccccaatagttatatagcaagattcttccagaacagagaaaaagtattaaatattattaatcatctactaggtaaagagcagatcatcgaattgcaagagtaa

SEQ ID NO: 30024 - DNA, 201 bp, Escherichia coli
gtgagcaggattgactaccaggaattggctgctgctaacgctttcctggctgatgtacgggcggtggcgtttaacgacctttgcgcggcgtttgccaggcacgcaaaagttgcaggactggatgatgccgataccgtaacgcttaaggaagtgacagaagcattgttgcattgtgcggaacagattcgcgcgcctgaataa

SEQ ID NO: 30025 - DNA, 282 bp, Escherichia coli
atgaaagatttaacactaaaattttctgacagggccgacttttcggcctttatggatagcattggctattatgatgacgagtcgatgcaggatgatattctcattgacgtgataggtaacgtgtacaaagaaaccggagaactgaatgaagatggcgaaccggtatgtgttaaggaagacggatattttgtaaacgtgcgcatcattaatgatgtgaaaacaccgtcaatattcgatgaatacgtggttgctgttgagcatcaacttcgtggctggatgtga

SEQ ID NO: 30026 - DNA, 1266 bp, Escherichia coli
atgattacgggcttttcgccatcatataaaaaaattgttattggtgacgatgaaataacgatgcctggcgacaagattgttaagtttaaacgtgcatcaacggctacatatgtcaataaatccggggaactgaaaattgtagcaatcgacgaaccacgatttgaaaaagatggtttactgattgaaggccaacgaagcaattcatttgcagattctaataatccgtcgttatggaataaagccgcacaattgaatataaccaatggcaaagatgaatttggttttacctatggtcttattaatgttgtagccgaaacaagcactaccggacgcgctacatttatttcaactggatatccaagatcaatgccagcaaaggcaggggaatctcttacaatatccttccgagttaaaaaagttgctggtgatggggttctgacagtatatccgaggattgcttatgtaaatgatgatggctctagtaatactctttcttcgaatgcctatataaatgcggaaacgggcgaagttttaggaactcctgcaggcggaagctcgacgaaagtatatactaaaattgaatccaatggatggttgtttgtatctttgacttataaaaccgcagaagacaaaacattttatggtcgaattgaagttggtgcacataaacgagatatacagattggtgatcagtggatgataacgacaccgcaatttgaagttggtagcagtgcttcttcttttattatttctggatctgcgacaacgacaagagcgagtgatttagttacaatcccgatcaaaaacaatatctacaatttaccgcttactgtaatgtgcgaaactaatcttaattgggaatgggattctccgccaaatgccgcacctagaataatggattttacgggtcaaaaagcggggcaggccataatttatggtctacgtggtgggactgcggttgatactggatcgccctatgttgatatgggtgatggcgctacaagaattaataagtatgtaaaaacaacaaatcgaaagtttatctctggctttaggtgtaaagaaaatggagatactcaagcgttttgtaattctgttttttcatcgtctgcaaggacagattatattcatgtagcaccaactgcaacgataagatttggtgggcaaaccagtacgggtgagcgtcatatattcggacacatccgaaatttcaggatttggcataaagcgttaactgatgcacaaatgggggagagtattaaatga

SEQ ID NO: 30027 - DNA, 144 bp, Escherichia coli
atgtgtgggcagcacgactccacgatggcgggcagcgaacacttgattaaatgcatcaacagaatatacgctgtaaggcttattaccaacatgattgatattgatattcaggcgtgttttttctgcaaggagcatctgcaatag

SEQ ID NO: 30028 - DNA, 309 bp, Escherichia coli
atgtatccagtgtataacgggagtctgcagctccacggccatagaattccacttccgtgcgtactggaacattgtaatgttgataaaaatcatagcccactgcaaggccggcaccaaatacagtatcgtttttatcaccgcccttatacttataaacatcatccccaaagtcctgacggaagcgctggtcagtctgcatcacaactgaagcaccggctttgccggtcacataaaagcctgttttgctctcatcagccagagcctgggccgaaaacatacctgccattgcaagcgctgaaacagcaataa

SEQ ID NO: 30029 - DNA, 138 bp, Escherichia coli
atgccacagggacatcgccaccagaaacgcgccggttctgatgacgtcttccacagtaacctgacggttgctgtcggatcccgcctgttctgcctgccgtttcatcagggcaagatgctcaatacgctgcagggctga

SEQ ID NO: 30030 - DNA, 711 bp, Escherichia coli
atggatctttttgaaaagctgcgtgatctggataagcagcgtgaagatcagcgccaaaaatatctttcattgctgggagacgctaaacgggttaagcaacagcaactggattgtgtccgtcaggtgcaaaaactgcatgatgcagcccgcactcagcatagctttagtagcgcctttaaaaatgcgcaggaaacaattaatttactcgatcggtatagcgacgtattaactcaggcgagagtaaagacgctatctgctaactttgaagttgcctatcgcaaactggctcgtaaagaagatatgcaactgagtgctcatattaacccagagacatttgatgttgagttaattgatgagaagaaagctgtcattaatcgtaagctactatctgccggtgaaaaacaaatttatgccattgctattcttgaggcgctggcaaaaacttctggccgtgatttgccggtgattattgatacgccattagggcgtctggattcacaacatcgggataaactgattaaccattatttcccatttgccagccatcaagtggtgttattgtctaccgatacggaagtggatgaacgttattttgttgaccaattacgcgatgatatttctcatgcttacgagatagtatttaacacgcatactaaatcatcagcgttgaaacctggttatttctgggaattaactaaggaggctgtctga

SEQ ID NO: 30031 - DNA, 252 bp, Escherichia coli
ttgaaaatctgcaaagaattaagcgggtattcaaatatccttcaaccaattaagaaacatttcaaattagtcactgatgatttacaggacggcgacttactggtcacagcccacaaattaggaaaccgtaattattattccgtagttcctcattattccggttatggcctcgttgaagaagatggtatctggatgaccattcctgtttcagacattgactatgaacaagtttatagattcgggggtgaataa

SEQ ID NO: 30032 - DNA, 183 bp, Escherichia coli
atgattctgtccccaacgctgaaactgatatgtcaattcattttcgggtacattggcactattaacagaattatttatatcattctgattgagcaagatgaacgacaagggcaacgacatcagcctcatgatgagcaagaaaatgaaggtaaattcgaaaacgatcagaaggacgaaagttaa

SEQ ID NO: 30033 - DNA, 390 bp, Escherichia coli
atgagatggggtaagaatactggacaatctagcttcaatattcgtgcatggggtaatgatactcgtaaacaagtattagaatgcgcagatgaaagcggctggcatttctacacacagcgtgctggcggtcctggtactaccgcaatcgagtttagcgtaaacggtaaaattaacgctccccaactgtctattagtcaggatgcaaccattcctaagtttaatagcggttttggtgttggtgttgctaacggattgggtggaaattctattgttttaggcgatagtgatactggatttaaacaaaacggtgatggtgtccttaatactatccatgttaaccaagaatggagcacggtcacgagttacatcagagatatcggaataacctaa

SEQ ID NO: 30034 - DNA, 141 bp, Escherichia coli
atgtttaactacggcaaagaaaccgctcaggaagccccagaagaagatgaacaagacgaagatgacgacgactacacaccaatctgtttctcttctcagaatggcttctacggttacgatgaaggcttagatatgctgtaa

SEQ ID NO: 30035 - DNA, 261 bp, Escherichia coli
atgacctatgattttgaggcgaagagagttaaacataaacaatataaagaatgtatccgtgaccatgaaaaggggaccgtgttttgtgtcgctacattggctaaacgtcctaaatatcgttttcgtgtagggcaagaagtcgatgtagttaatccttatagctttaactgtctgggtgatgcacgcgcggtgtgtgtaggcactgctccttattatatcaagggtatgcgctttattggttatatcttcgaaatgatctaa

SEQ ID NO: 30036 - DNA, 852 bp, Escherichia coli
atgcatttggcagcagaaagtcatgttgaccgttcaatcaccggtcctgctgcgtttattgaaacgaatattgttggaacatacgttttgcttgaagcagccagaaaatactggcaaaccctagagggggaaaagaaacagggattccgtttccatcacatttctactgatgaagtatatggtgatctccctcatccggatgactgggataataaaaatagtccaccactgtttactgagaataccgcatatgctcctagcagcccatactctgcctctaaagcatcaagcgatcatttggttcgcgcgtggcatcgtacttataatctcccaactattgtgactaactgttcaaacaattatggtccttaccatttcccagaaaagttaattccgctggtgatccttaatgcgttgcaagacaaatcgttgccaatttatggcaaaggcgatcaaatccgtgattggttatacgttgaggatcatgctcgcgcactctataccgttatcacgaaaggtatcgtaggtgaaacttacaatatcggcggttataatgagaaaaagaatattgaagtggtagagactatttgcgatatccttgacgaaataaagccgaaaaatacctcgtatcgcgaacaaatcatttatgttgccgatcgcccaggtcacgatcgccgctatgccattgatgccagtaaaatcactctggacctcggttggaaacctcaagagacctttgaatctggtattaagaaaactattcattggtatcttgataaccaggagtgggtccagaatgttatgagcggtgcctatcaggactggattaacaaaaattacgggcaactttaa

SEQ ID NO: 30037 - DNA, 1797 bp, Escherichia coli
atgttcatactcttcgccgagcgaaaagttggggaacagcacgggccggccgcgcaaggcgtgctggcagccgtgcagaccctgcgtgagatgaacgccgacaacctgcgcaaggtgccggccgatgcacccacggccttcatcaagccgcgctggaagccgctggtgatcaccccggaaggcctcgaccggaaattctacgaaatctgcgccctgtccgagctgaagaacgccctgcgctccggcgacatctgggtcaagggctcgcggcagttccgcgacttcgacgactacctgctgccggccgagaagttcgccgcactcaagcgcgagcaggccctgcccctggcgatcaacccgaacagcgaccagtacctggaagagcgtttgcagctgctggacgagcagttggccaccgtcacccgcctggccaaggacaacgagctgcccgatgccatcctcaccgagtcagggctgaaaatcaccccgctggatgcggcggtgccggatcgggcgcaggcgctgatcgaccaaaccagccagttactgccgcgcatcaagatcaccgaactgctgatggacgtggacgactggacgggcttcagccgccacttcacccacttgaaggacggggccgaggccaaagacaggacgttgctgctgtccgcaatcctcggtgatgcgatcaacctcgggctgaccaagatggccgagtcgagccccggcctgacctacgccaagctgtcctggctgcaagcctggcacatccgcgacgaaacctattcggcggccttggccgagctggtcaaccaccagtatcgccacgcctttgccgcccactggggcgacggcacgacctcatcctccgatggccagcgcttccgcgcgggtggccggggcgagagcaccgggcacgtcaacccgaagtacggtagcgagccgggacggctgttctatacccatatctccgaccagtacgcgccgttcagcacccgcgtggtgaatgtcggcgtccgcgattccacctatgtgctcgacggcctgctgtaccacgagtccgacctgcggatcgaggagcactacaccgacacggccggcttcaccgatcacgtcttagccctgatgcacctgctaggcttccgcttcgcgccgcgcatccgcgacctcggcgaaaccaagctgtacgtgccgcagggcgtgcaagcctacccgacgttgcgcccgctgatcggcggcaccctgaacatcaagcacgtgcgtgcccactgggacgacatcctgcgcctggccagctcgatcaagcagggcaccgtcaccgcctcgctgatgctgcgcaagctcggcagctacccgcgccagaacggactggccgtggccctgcgcgagctgggccggatcgagcgcacgctgttcatcctggactggctgcaaagtgttgaactgcgccgccgcgtgcatgccggcctgaacaaaggtgaggcgcgcaactcgctggccagggcggtgttcttcaaccgccttggggaaatcagggatcggagcttcgagcagcagcgctaccgggccagcggcctcaacctggtgacggcggctatcgtgctgtggaacacggtgtacctggaacgcgccacccaggggttggtcgaggccggcaagccggtggacggcgagctgctgcaattcctgtcgccgctgggctgggagcacatcaacctaaccggcgattacgtctggcggcagagccgcagactggaagacgggaagtttcggcccttacggatgcccggaaaaccttag

SEQ ID NO: 30038 - DNA, 390 bp, Escherichia coli
atgaaagctaggctacagcatcgtgttcctttatcccggcaggctatttacattctggaaaatatacgtggcctgcatgatgaactggtgttcccttcacccagaaagcagcagatcctttccgatatggtgttgacaagttttctgcgtaaaaagaaagccgtcagtgacattccggggcgagttgccacagcacatggttttcgctcaacattcagggactggtgtagtgaacaggggtattcgcgggatctggcggaaagggcgctcgctcatacgctgaaaaataaggttgaggcggcatatcatcgtactgatctactggagcagcgtgtaccgatgatgcaggcatgggcggattatgtgatgtctcaaattgtgaataaataa

SEQ ID NO: 30039 - DNA, 396 bp, Escherichia coli
atgatttataagttcataaactgtcaggaacatgaaaacaataacattcactcagctatgataaataacctattacaggaagttgatatagcccttggtaaaataaataacattatagacagcagaaacatatcagctccccatgaactggcaaatattcttacccgcgaaaaaatacttacaacacgggaaaaaaaaggaaacctgataagcctgtttgatggattcactttattccattgtgttggaatgataacctttcttatccattatctcagaacacctgaagaaaaagttgaaaatatatttatgttatatggtgcagataaaaacaataaactacgcagaagactgatttatgacgcactaggaataattcagtctcagcaggagtga

SEQ ID NO: 30040 - DNA, 849 bp, Escherichia coli
atggcctttatatacgtgttatactgtgcatttgattttgaccagagtgttaaagataactctggctggttatctattttaagtataggagtactaatagttgttatttcagccataataaacacgaggtatcttgaatatgacttatcgtttaaaaataatagaatgaaactgttgagacgtgttcagatctatcttatcattccgttgtctattgctttactggtgcatcttcaggtaattccactggagatggtttttaggaatattgaaacttcagataagagtattaatttcaaagtgatagctgaactggctttcatgtcatattttatttttattctgacaatacttcccggcctcatttatctaaaaatgaatccacagcataaactttctaaaagaattagttctgcatttgtcgcatccttgatgatattattagttatatcgactcaaataaccgtattaccagtaatttttacccattcagttattaagctctcaggtataagtgacttcaaaatacatagctacattattaaaacaagtgaatatccggaggagtttttttccaatgcagtatggggtaaaaaaaatataaaaccgggggaatattactctgtgcaggctgtttctatgtttacgacaaaccagtttattctcctttgtcccaaggatattataaggttttatcgggaaagctggaagttcgacctgcttaatgtagacttcgatacaaataccaggaagaaactccaggaagaagcagcatattgcgtaccaatttctgcaatatctgtaaaacgatgggatatgcctcttcagggctcgaaaccctcaaattag

SEQ ID NO: 30041 - DNA, 276 bp, Escherichia coli
  misc_feature (223)..(232): n is a, c, g, or t
atgcaaactacgcgtaccccctactctgtttcctttatggcgacagtgttacttttatttctctttgcttgccatagcaccattgccaacgcagctgtcgcacttggtgcgacgcgggtaatttatccggcaaaccagaaacaggttttattgcctgtcacgaataatgatcctgccagtgtctatctcattcagtcatggatagaaaatgcgggtgaccagnnnnnnnnnngcttttttccatgcaaggtaaaaaagagaatacgcttcggataa

SEQ ID NO: 30042 - DNA, 528 bp, Escherichia coli; identical to SEQ ID NO: 15035

SEQ ID NO: 30043 - DNA, 519 bp, Escherichia coli
atgatatgtagtggatggcgcatttataatgcttctcctttgttttcttttaactatccggcagcattaactctcggtggctggcttggcggtgcgttactgtggcacttcgccctgatgtggattctgctgattaatgccacgatctatcttactctgggaatttgtagcggacgtttccggagcaagtttttcccgctgtcatggacctcactgaaaaaatcccttacgcaggcactgtatggaaagctgcatcatacgaatatgcaggaatacaatatggtgcaaaaagtcgcctatattctgattattttagatggcgctgctcttctattgtctggtctggttttatggaaacccgttcagttttcccttctgactatactattcggtggttatgatacagcgcgttatatccactttctgtgcatgaacattatggtactgttcattattattcacctggttatggtgttattggttccgcgtgcattgttatctatgatacggggtcactaa

SEQ ID NO: 30044 - DNA, 651 bp, Escherichia coli
gtgaacatcgaatataaagtccaggaaagtcctgatggtcttgcccaggcatttataattggtgaagaatttatcggtaacgattcttgtgctttagtcctcggcgacaatgttttctatggtcacgatttgccaaaagaacttgaaatagcaatgaatcaggaaaaaggtgctacggtctttgcctaccatgttaaagaccctgaacgctatggtgtggtagatttcgatgagaatggcaaagcgctttctttagaagagaaaccgctgaaaccaaaaagtaattatgctgtgactgggctctatttttatgataacgaggtcattgagatggctaaacaactgaaaccgtcagctcgcggtgaattagaaatcactgatattaatcgcctctacctggaaaaaaactcgctctcagttgctattatgggccgtggctatgcctggcttgatacaggtacgcatgagagtcttattgaggcaggtaactttattcagacgatcgaatcacgtcaaggactcaaagtttcttgcccggaagagattgctttccgtaaaggtttcattgataagaaacagcttgcaaaattagccaaagaactcaataaaaatgattacggtaaatatttgcagcatttagccaaagattga

SEQ ID NO: 30045 - DNA, 381 bp, Escherichia coli
atgcaattatgctctctggaaatcacgcgcaggagtttaagatatcattctcatatagataatgtgtccttaaaacaaggaactttacttttagatgcatataattttgtctatctatgcatacaaccattatgtgatagcgtcagattgcatgaaaaagccgattttttattcctcaggggaacactggacgataataattacaatttgttaatcgaagatgaatatggcggtttttataaaattaaaatgccggcaaaagcttctaatattatttcattttcatttggagtcgaaaatggaaacggtgtcatcatagggaaaaagaacaatctagttaatacctgtctcttatacacatctccgagcccacgagactag

SEQ ID NO: 30046 - DNA, 1128 bp, Escherichia coli
atggcgtcctgggcaacccgtacgcctgctatccgcgatattctctctgtctcgatcgctgaaatgggcggtgttctctttggtctgtcgatcggttcgatgagcggtattctctgctcagcgtggttagtgaaacgctttgggacgcgtaatgtcatccttgtcacgatgtcctgcgcattgattgggatgatgatactaagtctggcactctggctgacatcgcccttgctctttgccgttggtctcggcgtctttggggctagttttggttctgcggaagtggcgataaacgttgaaggtgccgccgttgagagagaaatgaataagacggttttaccgatgatgcacggtttttatagcctgggcacgctggcaggcgcaggtgtcgggatggcactgacggcctttggcgttccggcaacggtgcacattttattggcggcgctggtaggcatcgcgcctatttatatcgccattcaggcaatccctgacggtacgggcaaaaatgctgccgatggcacccagcatggtgaaaaaggcgtacctttttatcgcgatatccagttgctgctgattggtgttgtggtgctggcgatggcctttgccgaaggttctgccaacgactggttacccttattaatggttgatggtcacggttttagccctacttccggctcgctgatttatgccgggtttaccctggggatgaccgttggacgctttaccggcggttggttcattgaccgttacagtcgcgttgccgtggttcgggccagtgcactaatgggggcgttgggtattgggctgattatttttgtcgatagcgcctgggtcgctggggtgtctgttgtactttggggactgggtgcctcgttgggcttcccgctgactatttctgccgccagcgataccggccccgatgcaccaacccgcgtcagcgtggtagctacgaccggttatctggctttcctcgtcgggccgccgctgctgggctatctcggcgaacattatggattacgtagtgcaatgctggttgtactggcgctggttattctcgcggctattgtcgcgaaagccgtcgccaaacccgataccaaaacgcagacggcgatggagaatagttga

SEQ ID NO: 30047 - DNA, 144 bp, Escherichia coli
atgtttgaatttatcgatctactgatgtttttgctttgttctggcgtgcttatcgtcgcgttaatgttatgcgtatacgcgattgtaatgactggtgcgctaatttacagagaagcgaagcatatattcaaggggcaacaatga

SEQ ID NO: 30048 - DNA, 198 bp, Escherichia coli
atgggaaatagcgaccatgaatatgatggcgtttatcagtcattggctacgcgagcttattaccgcctcgaaggtgagcacgttttgatgcgcctcggtagtcttgatcggtggcatgagccatttttacctatgacagcgaaagaagttatcacgatggttaatcatagatactggcgcaaggttggtgatttgtaa

SEQ ID NO: 30049 - DNA, 201 bp, Escherichia coli
atgattgaatgccttattgctgtgactgttttgctttatatcgctggcgcgatcctgatgtcatgttttattaagtttagcggtgccgaacatggtggacttgagattcctttttggcctgtgactgtgtttatcgctttcttcgacgctacggcagagcaaatcaggcgagccattaaggagcgtaaaaatgggaaatag

SEQ ID NO: 30050 - DNA, 300 bp, Escherichia coli
atgaaaagcgataaattcattgcgtgctgttttgttgaagtgcctaaaggtgatgccttctgcgattatgaatttaaagacagttggggaaaatctcatgttgtagttggcaagcgcggagactggttatacataacagacgacgacatgatttttactgcaaaccagttattcaaaattaagtcagaaaatagtgaaacgccactttgcagcatgtttaacatgcattatcactcactattattgttaaaacaagatgttataaataaagcgcgtagcttacctggtgcggagttttaa

SEQ ID NO: 30051 - DNA, 204 bp, Escherichia coli
atgaaatttaaacattacatggaatggaaaattccagaagcagcaacaaaggcagcgccaggaaatttttctggcgtttatttttatatggatggcaaatggtatttcggcagcaggccggatcactactatcaagaaatatgcaagcctcacgtatgggatattaaagagcgcgtgaaaggcggggtaattgaggacgtttaa

SEQ ID NO: 30052 - DNA, 621 bp, Escherichia coli
atgaacgacatcaaaacagcttactctctcggtaatgaaggtatgttgatcactcgctatacagatgatgcaaactttcacgaagtggaaattaaagattatcacgaagtattgaaagatatggaagctggcgcgtatgacgctgatttgaatctggcgctacaggttgttgatattgtgatgggtgcgtcaatccgcgattacgtgtctttaagtatggaagaaaaaacatcggtagcgcgttatgtattctctcttacttttgtgaagcgcatggaggaagaattcggacgcgtaccagtgccggaagaggttgatccgctcgcgttcggaagtgctgtcattttcccgttgaacaaggaacagcttggtagtgtttcactgcattctatgcgcgtcctgatgaaaaatatctttgaggttaagatgttgcagaaatgcattgaggaaggccacaaagaggaagaagtaaaagcgctcatgccattgttttacggtgaaatggttggcaatgatatgcgtgcaaatgatttcggcgtacaggcggctatcgctgtgcttaattacgcacggaaaaacgcacagccgacgcctgaacagggaaaacgtgtactgcattaa

SEQ ID NO: 30053 - DNA, 252 bp, Escherichia coli
atgacagctacaacattaagcgaaaataacgggcgcggttttcaggggactgcggaaacctcagacgatggtgatgtatttgtcgaattcggtggcggtaactatgaattcgaaacgtcggcgggctggcacgataaatggcctttcccgacgcgcaaggaattaagcgaacgtaaatcatttggcgaagatgccgaacggctggctaataacaaatggcttgataagttcattgcggagggtggcaaatga

SEQ ID NO: 30054 - DNA, 1056 bp, Escherichia coli
atgattgctacttatcatatgaaactcaattgtaaggacacgcaattactgtctgttaataatctggtttctgaacttgaaattgatagacttaaatcatttgttaaatactctgatctttacggatttgaggaatacaaggattttattgttgatggcgatgatgtgtatatcacacccataacgtttattagattcgttacacctggtaaatatagacattatgaatataatgaaaaatgggttaagccagttattgaatcttgtggattagttgacttgcaagatatctttaataaatattcaaataacaccaaaaaagatagtccttatgcttataattatattttatggtgtaacaattatgttgaaacgagtgatactcctgggcgatgttctgtgtatgtgtcaaaagaagatgctgaaaagtacaaaaaatggttgttcgtcactcgcggagtatcaatagaaaaactatgggtaaggttgttccattcaagcgatattgcagatccagatgcgtttttaactgaacacctcaataatgatgagtttaccattgatttaaatattgaatattttatagttaaaacaaattatgggtatgaaagatatattagcgataagatggcagaaaagtatcatgcatggggtgaaaataaaggtcttaataataattttgaatgcgggaattataacgacatagaaaactttattgaattaaaaagcgataaaaatgtaattgaagaaataaaaaaggagtgcgactcgaaattatcagaaatgagagataattgtaaaaatatgattaggaagcgttatgaacatgctggcttaactatgtatgaaaaactaaaaggagttaaattaataaggcaatatcctgttgatgttgctggcaataagtattttattgatggctacgatcctgtgaataacgttgctgtagaaattgatgagtcacatcacaaacggcaagtaaaaagcgatgcgataagacaaaaacgcattgaagattatttggggtgcaagtttttccgttgtgctatatcctaa

SEQ ID NO: 30055 - DNA, 660 bp, Escherichia coli
atgaataaacttaaagcaattggcgtgattagccatcgcactaaccctgagtgttacccatcgtttgaggtaacaacatgccgcacagaatataattttggatcatactatttattgggtgttcgcgcggatggcggcacttattcggttatggctgcaagctggaaatttgataaatacgctaatttatctaataaggatgatgacggcatgaataaagaaagtgagatcattgatgaattaatcgaagatgagcggcatgattgcgaaacgcaaccagaaaaaacggaatgggccgtaggtgataaacctcctgttaatgtgtggcttgattgtgtaggtatgaccagcggaacggttcttgatgtcgtcaagtttttatatctcggtgataattgggctatcgctcacagtaaattaatatcagatgtggaaacgataattacatggaaacaatactcttatcgcattcacattgaccagaaagaaaaggcacttgctgaaattgctttcgcactggctactaaggttatcggtgaagatgcggcgaaagagattaactttaaccgcgacaacgaattttcgtgcgattatcgcaacatggcgcaagctattattgacggatgtatcggacacgttgaatacacgggggataaataa

SEQ ID NO: 30056 - DNA, 1020 bp, Escherichia coli; identical to SEQ ID NO: 28988

SEQ ID NO: 30057 - DNA, 585 bp, Escherichia coli
atggccaccaagcatattaatgacgagctctggcatcgtattgaagttctgaccgtccgggcaaatgccaggcaaaacctgatccgcccggtcaaagaagcggacgtgcttcatctggttctgcagcgtggcctggagctgcttacagacgacgatctgctgcagctgggcaagtaccgccggcccataggatttgtgctgcgtcggccgggcatggagatgctgaagctggacacactgagtatggctgacgctgctactatcctcatgcgcagcggaccggcaacgctgtgcatctggagtcgtgacgatatcctgcggcaggccagtgaagcggtgatccgcgaacggctaccggaaacggccctgctgtcggagggggatgaccgggcccggttccagacgctgctgcctggcgtctggaatgccgcgaaccggggcgaaacggccgtgatttccctgcgtgctgacaatgcggatctcgctattgcacgcatcactgacctgatgtgcgaatccctgctgggttataaggggcagcgggcataccgggcaggtgaaaacgaacagggagaagagtcatga

SEQ ID NO: 30058 - DNA, 159 bp, Escherichia coli
atgatgcgtcagggggtgatttccgccgttatttttttactgctggcattgctggtcatgatctacatgccggagggatatgcagcgattagctgggccataggcgcggttgtggttgtgacgctgatttatattcgtgcccgtaaaggagaggattga

SEQ ID NO: 30059 - DNA, 345 bp, Escherichia coli
atggaatatgaagcgtataaggttcgcggctacggcttcggactgaaaaaagagatcaccggcgtgctggggcgttaccccaccctggaagaggcgcagaaggtcgcggatgactacacgcaggcctgcctgccggataacctgccggacagctacgatatgggcatggtccggccggtcgctgccggcgaacctgccgccctcgatccggacgtgtttcgcggtccgggctcgccgttcatgatcgaggccggccagctaagcacaggtcacaccgtatgcctgggcaaagcggcggatggaaaacggttatatgtcggcggggagcattccggtggccagtga

SEQ ID NO: 30060 - DNA, 1554 bp, Escherichia coli
  misc_feature (1387)..(1418): n is a, c, g, or t
atggcgaaacctgaaattgcaactgaaagaacccgtctgagtattccctttgacgatcgccaacgtgcaatacgtgcggccggcaaactggctgatggcagtaatgctctggactacgtgaaggaagaaaaggtgtggtatgcacagccgggggccaacctgagccggctgaaagagtggatttttgaccccaataaagtgatcgaagaaccgcccctggatattcaagccattgaagatgaatttacggcgtggcttgaagagcgcggtgccattatcaaagaccccatagagttcgatggccagaagcattatgtcgataccgtggacggtaaagctggttcaagaaagggggtgtatgccgcctttctggatggccgacctgcagggtggtacagggactataagaacggtggtgaaattcagaaatgggtatctaccggcgcagcccctaaccctgaacaaatggccatgctccgtgctgatgctgcggcaaggcgtgaacaaagagctgcagcgcaagcggataagtttgatcagaccgctaaccggttgatggaagaatataaccggcttccggatgccacgggagatctggcatacctgaaaaacaaacaggtcattgccgctaacggccttaaagctgatgagcggggcaacgttgtgatccctctgtttaatgctgatggcgagttcaggacccttgagcgcatctggtccgacggtagtaaacaccttgaaaaagacggccaggcatgggggagttttttcgttgtgggtggtcaactgaaggatggtgacaacctgctttatgccgagggatatgcgacagcagccagtatcagcgaagccatcaatcagcctgtgatcatgacggttaatgccggcaacatggtggaagttgctggccgcctgaaagacacctttccaaacagcactcattacttccttgctgacaatgacatttataaagacgagaacgttgggctagaaaaagcgacagaagctgcagagctgactgccggccatgttctggtccctgcctttagcaacccgaaagaagggcttactgactacaacgatttgcatgtctctgaagggctggagcaagtcagattgcaggtagaaggagccattaatcaaatgaacagggtagacactatgccgactgataacccgaacattactgacgttaatcacagctcgactgacagcgctgccgttgcagatcctgaaaaagccgcgccggtggccagcgcccctgcagctgccgaaccggaggaaaccgcgccggtggccagcgcccctgcagctgctgaagcggtggaagccgcgccggtggccagcgcccctgcagctgatgaaccggtggaagtcgcgccggtgnnnnnnnnnnnnnnnnnnnnnnnnnnnnnnnnaaccggaggaaaccgcgccggtggccagcgcccctgcagctgccgaaccggaggaaaccgcgccggtggccagcgcccctgcagctgccgaaccggaggaagctgtgccggtgtccagcacccctgcagctgctga

SEQ ID NO: 30061 - DNA, 477 bp, Escherichia coli
atggatatcaactactacgataaacatcaggaagaatttgaggcggtcacgctggcgctgaaagccaatctggaagaagtttggggcagcagcctgaaaaatcagggggaaagcctggatgatcaggtgacgtatatgaagctatttgaagagctgcaatacaacctcaatccgtactacttcaaggagaacacctcagcaaaagagatggatgaagataaagtagcggcctttgtggccagaacccgcgactataagtacggcattaccattaaatcctggccgggactcccgcagaaatggctgaaaggccgaatcaaacctcttcatcctgtggaaggcacaaacctgtgctggatcgacacgtccaacattgtgcatatcggtgccgataggcagtttgacgatcaatattacctcaccgtgaccacacagaacggtcagagttacggcactgttgcaaatagtcggtggtga

SEQ ID NO: 30062 - DNA, 243 bp, Escherichia coli
atgaatcaatgcctgcagcgcctgagaaatgatcccctgcccctgatgagattcgtcgagccagtagccgatttcagcggttttattcagtggttcaatacgattaaaagagataacgccgataagttcatcttctttgaaaatcatgaacattttggcatagccgcgttgatgcaacatcacattaccctgcaccgtttttcgcgtgtcctcttcactttgaacaaactgcggccagtttag

SEQ ID NO: 30063 - DNA, 1074 bp, Escherichia coli
atgcaactggaagtcccccgtgatcagtatgccggcgctgttgaaaccatgaggaataagatccgcgaaggtaaagtacccggtgtaaccgatcccgcagaagcgtcccggctgattcgtcggggacatctgacttatactcaggcccgtaatatcacccggttcgggaccatcgaatcggtcacttatgatattgccgagggttcggttgtcagtctggcggccggagggatcagttttgccctgacggcatcggtcttctggctcagcaccggcgatcgcgatgctgccctgcagacagctgctgtccaggcaggaaaaaccttcacccgcacactggctgtctacgtcacaacccagcaacttcaccggctcagtgttgttcagggtatgctgaagcatattgatttttcgacggccagcccgactgtccggcaggcgcttcagaaggggaccggtgcaggaaatatcagtgccctgaacaaagtgatgaagggtacgctggtgacatctctggcactggtagctgtcacaaccggccctgacatgatcaaaatgttgcggggacggatctccggtgcgcagttcatcaggaatcttgccgtggcatcttcctgtgtggcaggtggtgctgtcgggtcagtggcgggcgggatattgttcagtccactgggaccatttggtgcactgacagggcgtgtggttggcggtgttctggggggaatgattgcctccgctgtatcaggaaaaattgccggagcgctggttgaagaagatcgcgtcaaaattctggcaatgattcaggagcaggtgacatggcttgccggcagtttcctgctgaccggacatgagattgaaaatctgaacgcgaatctggcccgtgttatcgatcagaatgctctggagatcattttcgctgccggtatacaacaacgggccgcgaccaacatgttaatcaaaccactggtggtcagtatcatcaggcaacgccccgtcatggaatatgatgcatcccatctcggcaatatggttaaccgactggaagaaacattacccccggagttaccggcataa

SEQ ID NO: 30064 - DNA, 234 bp, Escherichia coli
atgaagatgataggtattatcaaactcgttgttacatctaacaaaaagaaggattttaatataaaagataaatacccattattcaaaacatcttctggtacttatttcactgttggcaactgtttaaactttgttccgctgacagtgcttgatgtttctggaggcatggtgaaagggtatggaactgtttacggcgatgattttatgcctgatatgctattttttgatgcgtag

SEQ ID NO: 30065 - DNA, 492 bp, Escherichia coli; identical to SEQ ID NO: 15993

SEQ ID NO: 30066 - DNA, 582 bp, Escherichia coli
atgtccgccaacaatgccgcaatagttctacgagtcatggccgagaacgatctgccaatgctccatgcttggctgaaccgcccccacatagtcgagtggtggggcggcgaggatgaacgcccaactcttgacgaagtcttagaacactattcgcccgaagttctggcaaagcaagctgtagtgccttacatcgcaatgctagatgacgaacccatcggctacgcccaatcctacatcgcacttggaagtggcgatggatggtgggaagacgaaactgatccaggggtccgcgggattgaccagtctttggctaatccatcacagttaaacaaggggttgggtacaaagctcgtacgctcgctcgttgaactcctgtttagcgacccggccgtaacgaaaatccaaaccgatccatctcctagcaaccatcgcgccattcgctgctacgagaaggccgggttcgttcaagaaaaaaacatcctcacacctgacggccctgcggtgtacatggtccaaacacgccaggcgttcgaaagcctgcgcactgttcaaagcttcaaaatcaaggggaagtggtcatga

SEQ ID NO: 30067 - DNA, 126 bp, Escherichia coli
atgaatggctgcaccatctctaccaactggtatctcggcgtgttctcatctgccttcgcatctgtcgtcagcctaaccgggcgttcaaccggacatcaacgtgctgcgcacgttgatgtcggttaa

SEQ ID NO: 30068 - DNA, 1356 bp, Escherichia coli
atggatcacccagagggtgcgggcttgcaacgggcagatcgggtggatttcgaccctcgcgtgcggctggaatttcgcggcacgcagctcagttccgacggcggccttctggtgatgcgcgagcttgatgacgcgctcgggttgtccgatttggcgtcagcggcgctgcgcgatactcgctctggcaagaacacggtccatcggctcgacggcctgttccggcaatcagtctttgggcggctggccggatacgaggatgtcaacgacgccaaccgtctcgcctgcgatccggtcatgcgccaagttgtcggcggcagagcggtcgatgcacaagcggcctcggcatcgcagatgggacggttcgagaccgagacgctggctctggccgggaaccgtgccgcgctggccgacctgaacgggcaatggatcgaccggttccatgaccgtaacgggctgaagtacatcgttctggacatggacagctcggtcagcccgacccatggcgaccaggaagggtccgcctggaatggccatttcgactgtagctgctatcaccccaactttctgttcaaccagttcgggatgctggaacgctgcgccctgcgccatggcaacgtccacagcgccgatggctggcgtgatgttctcgaccccgtaattgcgcgctacgcggagcgcgaccttggtggcaggttcttccgggccgatgctgcctacgcgatcccggcgatctatgagcgattggaagaagcgcggttcttctacgccatccggctgcccgcaaacgcggtcctcaaggacaagatcgcgcatcggctaacgcgccctgtcgggcggccgtcactgaccaaggtcaagcggttcttcgaggaattcgagtatcaggcggcgtcctgggacaaggaacgccgggtgatcgccaagatcgaatggcatccgggcgaactgttcccgcgtgtcggcttcatcgtcaccaacctgccgatggagccggactgggtggtgcggttctacaaccagcgcggcaccgccgagcagcacatcaaagagggcaaatacgcctttcgctggacgcggctgtcgtgccggaagttccgcgacaatgaggtgcggctgcaactgcacgccctggcgtacaacctggccaccttcttgcgctgcatcgagctgcccgaggccatggccgactggtcgttgaccagcctgcaactgaagctgatcaagatcggggcacgtgtggtccgtcacgcccgcaccatcaccttccagctggccgaggtcgctgtcaccggcacgatggtacgcgccatcctcgccgctatccgccgattgcgagcgccaccgctatgcgcatga

SEQ ID NO: 30069 - DNA, 810 bp, Escherichia coli
atgaacacaagggaaacaattgcggcggacctttcacggctgggtgtccaatccggcgctctcgtcatggttcacgcatcgctgaaggcgatcggccccgtcgatggaggcgcagcatcgatagtgtctgccctgctcgatgccgtcggccccactggaagcttgatgggatacgcctcgtgggaccggtcgccttacgaagaaacgctcaatggcgcacggatggatgcggaactgcgccaccgatggccgccgttcgatccagccatatcaggcacgtatcgcggcttcggcctgctcaaccggttcctcctccagacacccggcgcccggcgcagcgcgcacccggatgcctcgatggtcgcggtagggcctctggccggcactctgacgcggcctcacgaacttgggcaggctttcggacctggatcgccgctggagcgtttcgtcgagcgtgccggaaaggttctgttgctcggagccccgctcgattccgttaccgtcctgcactacgccgaggccattgcccgcatcccgaacaagcgacgcgtgagctacgaaatgccgatccgcagcgaggacggcggagtgagatggaaacgcgccgaggatttcgactccaacggcattctcgattgtttcgctatcgaaggagagccggacgccgtcgagacaattaccaatgcctatgtggagctgcgacgccatcgggagggcttggtcggtcaggcgcactgctacttgttcgaagcgcgggatatcgtttcgttcggtgtcgactatcttcaacggcactttggctcgccctga

SEQ ID NO: 30070 - DNA, 414 bp, Escherichia coli
atgtctgctaccgcaaccatgtttgcccagtcgttcttccatggaaccaaagccgctcttgcacccggtgatctgatcgccgtcggttatcgatcgaatttcacagacgcgaaatccctgtcgtgggtgtattttacaggcacgctcgatgcggcgatctggggcgccgaattggcgggtggcagcggaacggaacgaatttatgtcgtcgaaccgaccggcgccatcgaggaggatccgaacctgacggataagaagttcccgggtaacccgaccctgtcttatcgctcccgcgatccattgcgcgtaattgctgaagtgacgaagtggcaagcacacacggcccagcggctgcgggaaatgaaggagggcctggcgcgtctgaacgcagaaggtgccgagatcatcgattaa

SEQ ID NO: 30071 - DNA, 1047 bp, Escherichia coli
atgcttaatgcgattggtttggaatgtggggcgattcaggcatcccggctatctgaatggctcaactcaacagccggtgctcatgaacttgagcgattttcggataccctgaccttttctttgtatggctcagtgctgatttgggttaaatcatatctacgcgaatcaggaagaaaactgcagttagtcggaatcgatttacccaacaccttgaatccaagggacgacctagcgcaattggccgaaattatccaggtcatcgaccacctcatgaaaccccacgttgatgcgctgactcagttgttgacgtccattgatggccagtcggcggttatttcatcggcaaaatggggggagttggaaacggctcagcaggagaaagctatctcaggggtaaccagattgaagctccgtttggcgtcgcttgcccctgtcctgaaaaatcacgtcaacagcgattttttccgaaaagcctctgatcgaatagagtcgatagagtatacgttggaaaccttgcgtgtaatgaaagctttcttcgatggtacctctcttgagggagatacttccgtacgtgactcgtatatggcgggcgtggtggatggaatggttcgagcgaatccggatgtaaggataattctgctggcgcacaacaatcatttacaaaaaactccagtttccttttcaggcgagcttacggctgttcccatgggacagcatctcgcagagagggaggagggggattaccgtgcgattgcattcacccatcttggactcaccgtgccggaaatgcatttcccatcgcccgacagtcctcttggattctctgttgtgaccacgcctgccgatgcaatccgtgaggatagtgtggaacagtatgtcatcgatgcctgtggtaaggaggattcatgcctgacattgacagatgaccccatggaagcaaagcgaatgcggtcccaaagcgcctctgtagaaacgaatttgagcgaggcatttgatgccatcgtctgcgttcccagcgccggcaaggacagcctggttgccctatag

SEQ ID NO: 30072 - DNA, 339 bp, Escherichia coli
atgggaagtacccccctgggtattcagacatcatggcttgcattaaatgacaggcaagaaataacccaagaagatctgctggcgacgggttcgctctatattttactggaagaaaaactcgctattaaacctttagaagcaacagaaattatctctgcccggcttccctcgccccttgagcgtcaattactggaactgactgccgatgatgtcgtattaagttgtacccgcgtcacgttatccgtggaacgcaaaccaatggagtatgtagagatggtgtatcccgcaagccggtactcctacaaagcacgaattacaaaagacagttttagcgtgtaa

SEQ ID NO: 30073 - DNA, 681 bp, Escherichia coli
gtgctcgacgccctcagcgaacaggatctgctcacccagggcgtggcgctgcgggagatgaagctggtctccggcggttccggcctcgccatcggcctcgcccgcgactgggcgcagcgccatggcgccaggggggaaagcgctcaggccggcatgccgctggccggtccggcggtggtgctctcgggctcctgctcggtgatgaccaacagccaggtggcggcctatcgtcaacaggcccccgcccgcgccgtcgacttaagcgcctgctttaccgatctggagagctacgtcaggacgctgactgactgggtggacgcgcagcgcgatgcgccgctggcgccgatgatctatgccaccaccgagccgcaaacgctgcagcggatccaggcgcagtatggcgacaaggccagcagcgaacgggtggaacagctgtttgccgctcttgccgccgccctgaaggcgaacggatttacccgctttattgtggccggaggggaaacgtcgagcattgtggcgcagaccctgggggttgaggcgttccatattgggccgaccatctcccctggcgtgccctgggtgcgtgacacccgccagccgctctccctggcgctgaagtcaggtaacttcggcgatatccagttctttgcccgtgcccagcaggagtttcgtcatgactga

SEQ ID NO: 30074 - DNA, 633 bp, Escherichia coli
atgcagcttggtgtcattgccgatgacttcaccggcgccacggatattgccagcttcctcgtgcgcaacggcatgccgacggtgcaactgaatggcgtgccgacccgcgatattccgctgaccagcgaggcggtggtcatcagcctgaaaacccgctcctgcccggcggaaatggccgtcagccagtcgctggcggccctgcgctggctgcaggcccagggctgtcagcagttttatttcaagtactgttccactttcgacagcaccgcgcagggcaacattggcccggtgctggatgccctgctggccgagctgggtgagacgcggacggtgatttccccggcgctgccggttaacggccgcacggtctatcagggatatctgttcgtcggcgagcaactgctgaatgagtccgggatgcgccaccatccggtgacgccgatggaggatgcgcacctgggccgcttaattgagcgccaagggcgcggaaaagccgcgctgattgcctggccgattgtcgcccggtcgccgccgcgctggcggcagtcaacgatccggcggtgcgctatgtggtgctcgacgccctcagcgaacaggatctgctcacccagggcgtggcgctgcgggagatga

SEQ ID NO: 30075 - DNA, 903 bp, Escherichia coli
atggctgcacacactaacgtctgcgtgattggactgggttcaatgggcatgggcgccgcccgcgcctgcctgcaggcgggcctgaacacctggggcgttgacatcaatcccgacaactgtcgcgcactgctggcggcgggcgccaaaggcgcgggccccagcgcggtgccgttcgccgcggaactggatgcagttgtgctgctggtggtcaatgccgcccaggtgcgggggatcctgttcggcgagagcggcctcgccgcccatctgaagccgggcaccgtcgtgatggtgtcgtccaccatcgcctccgccgatgctcaggccattgccgaggcgctggcggagtaccagctattgatgctcgacgcgccggtatcgggcggcgccgtgaaagcggccgccggcgacatgacggtgatggcctccgggagcgatgccgcctttgcccgactcgcgccggtgctggacgccgtggccggcaaagtctaccgcatcgggagcgacattggtcttggctcgacggtaaaaattatccatcagctgctggccggggtgcacatcgccgttgccgccgaagcgatggcgcttgccgcccgcgccgggatcccactggagacgatgtatgacgtggtcacccacgcggcgggtaattcctggatgtttgagaatcgcatgcagcacgtcctggatggcgattactcgccaaaatccgctgtcgatatttttgtcaaagatctcgggctggtgaatgacactgcccgggcgctgaccttcccgctgccgctcgctaccaccgcgctgaatatgttcacctccgccagtaatgccggattcggtcgggaagatgacagcgcggtgatcaagattttcaacggcatcaccctgccgggccataaacagtga

SEQ ID NO: 30076 - DNA, 843 bp, Escherichia coli
atgctgcacggcggtgatggcatacgtgccgtcgtcgttctcacggatactcacgcagcggaacaggcgctggcgcaacgtcggcagcttcagcccccatacgctgtattcagcaacgccgtcaggaacacggctcactttcaccttcacgccgtcggtgacggactgaacctccacgctgaccggactcccctgcccgtcaaccagacttatcagcgtggtgccggaagatggcagcgtgatttcacggtcgagcgtcagcgtccgggtctggctgtttaccgccagcacgcgcccgccggtgcggataccggcatagtcatcatcgcagatttcaatgacatcgcccggtacatggcgaagcccttcggcacccacgctgaaatccacggtctgcgtttccagcagttctgttttaatcagccacagcccggcgcggtgtgcctgcccccggctggtacagccaaaagcatccatcttcgtgacgttacgaccgtaacgggcaatggcctgcgtatcctccacaagctctgtcgccgtctcccagccgttgttcgggtcaatccagttcacctcaacggcattatggcggtctttcagggcgctgaagctgtagcggaacggcgcgccatcatccggcatcaccacattactgcggttataggtccacaccttatccgacggtcggtcctgcacgaacgtcagcgtctgcccgttccataccggcatacagcgcatcgccgagcagaaatcactgagcacatcccacgccttgcgctgtgtggtcaggtacgcattacaggtgatgcgcggctccgtgccgccaaagccgtccggcactga

SEQ ID NO: 30077 - DNA, 621 bp, Escherichia coli
  misc_feature (563)..(572): n is a, c, g, or t
atgaagaaaaaacgttttttgtctgacagtgatgcccattacgtggtgaaagatgcagaaaaaatccttgcgccggacagacgtcgtttactccaacagggactgacgcttgggggaattatgatgctgactggctgtgatataagcaataatgatgatattgaaaaagcattgttccgtatatccagatttaatgaccggattcaaagttttctgttcagcaaaaacagtgtggcaccagaatatcttccagaggacattaccactccattcccttttaatgccttctatggagaagaagagatcccagtaattgatggccaggattataaattggaaatacgggggctggtacgtgataaccgtaactggtttttgtctgaattgtataacatgcagcatgtgagtcagataacccgtcatatctgtgttgaaggatggagtgcaataggaaaatggggagggataccattccggcatttcctgacgctgattggtgccgatatgcgggcaaaatacgtcagttttcgttgcgtcgatggttactacaccagtattgatannnnnnnnnncaaaatacgtcagttttcgttgcgtcgatggttactacaccagtattga

SEQ ID NO: 30078 - DNA, 264 bp, Escherichia coli; identical to SEQ ID NO: 13536

SEQ ID NO: 30079 - DNA, 633 bp, Escherichia coli
atggaggtgccggtagaaaatggcacgctgcgcctgcgggttagcggaaactatccgtggcaggaacaggtgacgattgcggttgaatcaccccagccggtgcgtcatacgctggctttacgtctaccggactggtgcatacagccgcagatcatattgaatggggaagaggtcgagcaggatattcgtaaagggtatttgcacattacccgtgaatggcaggagggcgacacgctgaatctgactttgccaatgccggtacgtcgcgtttacggtaacccgctggtgcgtcacgtcgccggaaaagtggcgattcagcgcggcccgctggtgtattgtctggaacaggccgacaacggcgagtcactgcataatctgtggctgcccgccgatgcgccatttacgacatttgaaggtaatggattgttccgccataagatcttaatccaggcaccgggttaccggtatgaacagagcaatccagagcagcaaccgctgtggcattacgacagcgcgccagccaaacgccagccgcaaattctgacgtttatcccgtggtttagctgggccaaccggggtgaaggcgaaatgcggatctgggtgaatgaggaaaccagtgccatccgtaggtag

SEQ ID NO: 30080 - DNA, 234 bp, Escherichia coli; identical to SEQ ID NO: 28524

SEQ ID NO: 30081 - DNA, 903 bp, Escherichia coli
atgcaaatcaccaacatgcattgcagtggacagaccgtttcacttgccgcgggggattatcacgcgaccattgtgaccgtcggtgcaggtctggctgaattaacctttcagggctgtcatttagttattccgcataaacccgaagagatgccgctggcacatctgggcaaagtccttattccgtggccaaaccggatcgccaacggctgttatcgctatcaggggcaggaatatcagttacccattaatgaacatggttcaaaagccgctattcatgggctgctcgcctggcgtgactggcaaatcagcgaattaagcgccaccagcgtcacattaaccgcctttctgccacccagttacggctacccgtttatgctggcttcgcaggtggtttattcgctcaacgcccgcacgggtctttccgttgagatcgcaagccagaatatcggcactgtcgcagcgccttacggtgtgggtattcacccttatttaacctgcaacttaacatctgttgatgaatatctgttccagcttccggcaaaccaagtttatgccatcgatgagcacgctaatccgacaacgcttcaccacgttgatgagctggatttaaatttcacgcaggcgaaaaaaatagccgcgacaaaaatcgaccacacctttaaaaccgctaatgatctgtgggaaatgactattacccatccacagcaggcgctttcggtgagcctctgttccgatcaaccctgggtgcaggtttatagcggtgaaaaattacaacgtcagggactggcagttgaaccaatgagttgcccgcctaacgcctttaattcaggtatcgacttattattactggaaccagggaaaacgcaccgcctgttttttaatattcacgggcagcacaattaa

SEQ ID NO: 30082 - DNA, 234 bp, Escherichia coli; identical to SEQ ID NO: 28524

SEQ ID NO: 30083 - DNA, 558 bp, Escherichia coli
atggcgtatcagcttttgctggacggcatgacgcaggattgccgtaatgtattgttgaatgcgcatggcaacttcaagataaccaagagcctcaacttttttcaccggaaccagcagatcacccgtatccagttcggcaacatctttgtcaccgattaccgggaagacataagtttcaaggcgcttccatacggcatcaccataatcatcagaccattttgttttcgtggagaaccacgctttggctactgttctgaaggagcgtgtattatcacgtttggctttaagctctttaacctctgcctgtttctttgcattagggtcaataccctgagcaagaagccttctggcctcatcacggcgctgtcttgcgtcagaaagagaaacagcagggtaaacaccaatagagaagagtttttgtttcccttcgaagcggtaagccatttgccagtatttcgaacctttaggggtaacacgaaggaacataccaaagccatcagtaagcttgtattccttctcaaggggttttgcattttttgctttaatatcagtcagtga

SEQ ID NO: 30084 - DNA, 483 bp, Escherichia coli
atgaagcaaccaggcaatggctgtaattatgacgacgccgagtcccgaccagactgcataagcaacaccgacagggatggatttcagaaccagagaaagaaaataaaatgcgatgccataaccgattatgacaacggcggaaggggcaagcttagtaaagccctcggtgcggcggacattatccgcgaacaggctgaacagcacggcattgcgcgggtaacggatgtctggctggaagtcggcgcactggcggatgttgaggagagtgcactgcatttctgttttgatatcgcctgccgtgataccgtggcgcagggctgcacactgcatattgatgttatcccggcacaggcatggtgctgggattgcagccgtgaggccgaaatcatgcagcacgccggatgctgtccgcactgcggcagtgaacggctgcgcatcagtgaaggtgatgatttgcgggtaaaaagcctggaaggtgagtga

SEQ ID NO: 30085 - DNA, 876 bp, Escherichia coli
atggtcagacgttatctcccccttaacccgctgcgcgcctttgaggccgccgcccgtcatctcagttttacccgcgcggcgattgagctgaatgtcacccatgccgccgtcagccagcaggtcagggcgctggaagaacaactcggctgtgtgctgtttacccgcgtctcgcgcgggctggtgctgacccatgaaggtgagggattactgccggtgctcaatgaggcgtttgaccggattgcggatactctggagtgtttttctcacgggcagttccgtgagcgggtgaaagtcggtgcggtgggaacatttgccgcaggctggctgctgccgcgtctggccggattctatgacagccatccgcatattgatctgcatatctccacccataacaatcatgtggacccggcggcggaagggcatgattatacgatccgtttcggtaacggcgcgtggcatgagtcagatgcggaactgattttcagtgcaccacacgctccgctgtgctcaccggccattgcagaacagttacagcagccggatgatgttcaccgctttaccctgctgcgctcattccgccgggatgaatggagccgctggctggattgtgcgggcggcacaccgccttccccgtcacagccggtaatggtgttcgatacctcactggccatggccgaggcggcacaactgggtgccggggtagcgatcgcaccggtatgtatgttcagccgcctgttacagtcaggcgcactggtacagccgtttgccgcagaaatcaccctcggcggctactggctgacgcggttacagtcccgtacggaaaccccggccatgcagcaattcgcccgctggctgctgaatacggcggcggcgtaa

SEQ ID NO: 30086 - DNA, 1140 bp, Escherichia coli
atgaaaaaatcgttatctgcaacactgatttccgctctgctggcgttttccgccccggggttttctgccgctgataatgtcgcggcggtggtggacagcaccattaaaccgctgatggcacagcaggatattcccgggatggcggttgccgtctccgtaaagggtaagccctattatttcaattatggttttgccgatattcaggcaaaacagccggtcactgaaaatacactatttgagctcggatctgtaagtaaaactttcacaggtgtgctgggtgcggtttctgtggcgaaaaaagagatggcgctgaatgatccggcggcaaaataccagccggagctggctctgccgcagtggaaggggatcacattgctggatctggctacctataccgcaggcggactgccgttacaggtgccggatgcggtaaaaagccgtgcggatctgctgaatttctatcagcagtggcagccgtcccggaaaccgggcgatatgcgtctgtatgcaaacagcagtatcggcctgtttggtgctctgaccgcaaacgcggcggggatgccgtatgagcagttgctgactgcacggatcctggcaccgctggggttatctcacacctttattactgtgccggaaagtgcgcaaagccagtatgcgtacggttataaaaacaaaaaaccggtccgcgtgtcgccgggacagcttgatgcggaatcttacggcgtgaaatccgcctcaaaagatatgctgcgctgggcggaaatgaatatggagccgtcacgggccggtaatgcggatctggaaatggcaatgtatctcgcccagacccgctactataaaaccgccgcgattaaccaggggctgggctgggaaatgtatgactggccgcagcagaaagatatgatcattaacggtgtgaccaacgaggtcgcattgcagccgcatccggtaacagacaaccaggttcagccgtataaccgtgcttcctgggtgcataaaacgggcgcaacaactggtttcggcgcctatgtcgcctttattccggaaaaacaggtggcgattgtgattctggcgaataaaaactacccgaataccgaaagagtcaaagctgcacaggctattttgagtgcactggaataa

SEQ ID NO: 30087 - DNA, 3603 bp, Escherichia coli
atggacgttctgcgttttatcctccgcttaccttttattttgctgcgtctggcggctcgcagtcttgtttatctctttactctgctgggttttctgctgcgcccgttcaccggacggatccgctgggcggtgccgggctgggtgacctttgccggtaatcagcttgcccggctggagcgggggggcaaccgctatccgaaaaccatatctgccttattattactgactgctgcggtggcagcgggcagttattacacctggcactggtatcagaacaaaccgaagccggtggatgttgcgccgctggtggtgcaggatatttccgcgtctgtgcagcgcccttcggcggttaattataaccgtgatgataattcagcgcagattgtggtggtgacattctcccgctctgccgcaccggtaacgctgatcggtaaaccggtcaccgccggtattaccctgacccccgcaatggaaggtgagtggcagtggcgtaatgaccgtaagctggtattcacggcgaaaaaaaccttcccgatggggaaaacctacaccgtcgatatggatgccaaaacactgctggctccgcaggtggcgttaacagagaaacaaaaaacctttaccacccctgagttttattatcgcggcggccgggcggagttctatcaggatccgcaagatccgatgaaaaaacacgccattatcggcctgaccttcaatgcccccgctgatgtcaaaaatctggaatcgcgtctgtctatgacccgtgacggcaagccggtgccgtataccgtcacttatgatgataaaaaactcaaagcctggatccactccgggcagctggcactcaatgatacagacagcgaagtgttgctgacagtcagagccggtgtcggggcggccgttccggccaataccacggacaaagatgaaaccttccgcgtgatcgtgccgaaccgctacagtctggatgtgacgggcatcgacagtcagctggtggaatcagatgacggaaaagatcgccgcgctctgattgtgtcattctctgacccggtgaatgaaaaacagatcacaaaagcggttcgtgcccgtctgctgccggaaaaacacccggattataattctgagggtatttatgacgactggaaatcagatgatatcagcgaaaaagtcatcgcattatcagagccggtcacgctgaccccggatgacagcgagcaggagaatcaggcggcattcagcttcagttataacgccccggccaaccgctggctgctggtggaaatcaccggtggtatgagttcggcgggcggttattacctgaaaacatcacgctatctgccggtacgcatcccggattacccgaaaacactgcgttttatgtctgacggggctttgctgtcgatgaaaggtgaaaaacagatcaccgtcgcggcacgtaacttcccgggcctgcagctggatgtgaaacgggtgatcccgggccagttacagcacatcgtctcctttaaggataaaaactttacctcaacggattttaaccgtctgagtgatgaatactttacagaacactttacttaccagacggcgctgtctgccgccaatcccggcgatattcagtacaaaggtatcgacctgagcaaatacctctcagctgacccatccgcaaaacgcggcatattcctgctgagcctgcgggcgtgggatccggctaaaccggcggaagccccggaagcggaaagctatgacgaaggggatgaggattacgaagaggatgcggttctcgactcgcgctttgtggtggtcactgatatggggatcatcgcgaaatcctcccccgacggctcgcgggatgtgttcgtgcagtccgtgtataccggcgagccggtcagtggtgcgaaagtctctgtagtggccaaaaacggcaccacactgctgagccggacaaccggcagtgacggtcacgccgcattcccgccgctgcatgatttccgcaatgagcagatggcggtaatgttcctggcggaaaaagagggggatgtctccttcctgccggtcaacgcctggtatgaccgccagccggatttctcgcgctttgatatttacggcgacgaaaccccggaagatccgcgcaccctcagcagctatcttttctcagatcgcggtatttaccggccgggggaaacctttcatgcaggtcttatcacccgtacctatgactggaaaactccgctgaccggcatcccgctgcgggcggagatccgcgacccgcgtgacactctgatgcattcacagcagattattctggatgccaccggtttcagcgaactgagctacaccacatcggaaaactctccgaccggcgactggaatatctatctctatctggaaggtaaagatgagaatgacctgcgtctgctcggtaccaccaccgtggtggtgaaagagtttgagccggacagcatgaaagtggcactgaaactgacgccggatcgtcagcagggctgggtgaaaccggaggaattacaggcggcggttgatgtgcagaacctgttcggcaccccggcgcagaatcgtcgtatcgcgacaaaaatgaccatgcggccggtttatccgtcattcacgcagtatccggattaccgtttctatgaaaacagccgcagtacggataactttgaaacgcagcttgaagagcgcaccaccgatgaaaacggtgccgcaccgctggcgttaggactggaaaactacgcggaagcgacctatcagttacagctgttcaccgaagcgtttgagccgggcagcggccgttcagtcacggcagcagcgcgggtactggtctccccgcatgactcgctggtgggtatcaaagcggacggcgacacggattacatcagtaaggatgcagtgcggatgctgaatctgattgcggtggatccgtcactgacccgtattgaaaaaaccaatctgaaactggtgcttctggagcagaaatacatttccgtgctgatgcgccagccatccggggtcttcaaatatcagtccagactgaaagaaacccggattgatgagcaaccgctgaccatcagcagcgccggcactgatatcacactgaacacctcgaaacccggccactttatcttacaggcggaagatgcggacggtaatgtgctgaacagaaccgactacaccgtcgccggtaacgcgaacatcacccgctcgctggatcgcaatgcggaactgcagctgacgctgaataaagaggaattcaaaccgggcgaagagattgaaattgccgtcagcgcgccgtacaccggcagcggtattatcaccattgagcgcgacaaagtgtatcagtgggtatggttccgtgcagacaccactaactcagtgcagaaaatccgcgtaccggcagaactgaccggcaacggctatgttaacgtgcagtttgtccgtgatattaactccgatgaaatctttatgagcccgctgagcttcgggtataggaagtataaaccacctttttgctcctcatccgaagtatcttacctgaaattccctcactcgtttaccgctcaagccccaattttaactgccggtccagcctaa

SEQ ID NO: 30088 - DNA, 1542 bp, Escherichia coli
atgtcgctggcaaggaacgccacggcgagtcaatcgcccactcaaacaaacggttacgaacgccaccaacccgaccagacgctgctctaccagctggttgagcagcactacccagccttcaaagcctcactcgaagcccaaggtcaacacctgcctcgctacatccaacaagaattcaacgacctcctccaatgtggccgtctggagtatggtttcatgcgggttcgctgcgaggattgtcatcacgagcgtctggtcgccttcagctgtaaacgacgcggcttttgccctagctgcggtgcccgccggatggccgagagtgcggcgctgctgatagacgaagtcttccccaaggagcccattcgccagtgggtgctcagctttcctttccagctacgctttttgctggctcgccatccccagctgatgggccaggtcttgagtatcgtctatcgtacactctcaactcatctgatcaaaaaagccggttacaccaaagcctctgcacaaactggctcagtgactcttatccaacgctttggctccgcgctaaatctcaatgtccactaccacatgctgtttctcgatggtgtctatgccgaagatgactatggcaagcaacgcttccatcgtgtcaaggcacccacttacgatgagctgaatacgctcgctcacaccctcagccatcgcatcgctcgctgcatggaaaagcgtgggattttggagcgtgatgccgagaatacgtggttgacactggaagagggcgaagacgatacgctgactcaattacatggtgcttcggttacgtatcgcattgccgtcggcccccagcaagggcgcaaagtcttcaccctgcaaaccttgccagggcgtgaggataaagccgactcaagcagtcgagtagccaaccatgctggtttctcgctacacgccggtgtgatggccgaagcgcatcagcgggataagcttgagcgcttgtgtcgctacattagtcggccagcggtttcagaaaaacgtctggcattaaccgccaatgggcaggtgcgttacgagctcaaaactccgtaccgcaatggcaccacccatgtgatcttcgagccgctggacttcatcgccaaactcgctgcgttggtacctaagccgcgagtcaacctcacacgcttccacggcgtctttgcaccgaacagcaaacaccgagttcaagtaacacccgccaagcggggcaagaagcccgacaaatcggaaggtctcgatactaactggcgtgacaagagtcctgcagagcgccaccgcgccatgacctggatgcaacgcctcaagcgagtcttcaatattgatattgaagtctgcgaacactgcggcggtcacgtcaaagtgattgccagcatcgaagatccgaaggtcattgagcagattctcaagcatctgaaacagaaaacagccaaggcgaatgccgccaagcagcgtgagctgccaccagaacgagcgccgccactgactcccagcctgttcgatccatcacagagtcgtctctttgactga

SEQ ID NO: 30089 - DNA, 168 bp, Escherichia coli
atgctctcaataaaaaaagtaaccatgctcttggggtgcctagtcctcacctgctcgatagcatttcaggcgagtgcagctgaaaaattcaaggtcattacaacttttaccatcatcgcagatatggccaaaacgtggctggagatgctgcagaagtctcatccataa

SEQ ID NO: 30090 - DNA, 294 bp, Escherichia coli
atgacaacacgtataacgttcagtatgaccagtgatgagacgctgcgaattgtggatgagtactgtcatacccacaaactttcgcgctctaaggtaatcaacgcattactcagcgccacagcacctgtccttaatgatattaacggttattatcaacttgcaggcgaactgcagtcacgcttattaaatggagtgtatcaacgggatcttcctcgcaaacgcaatgtcgtcagtgcagagaagtattgtctggaaatctgggaaaacaaacttttcaccagaagaatcctgtag

SEQ ID NO: 30091 - DNA, 594 bp, Escherichia coli
atgggctggtgcggacgcgaacgcctgaccgttacggctctgcccgccattaccacttatggcgaaccggaagggaacctgctaacagggccgtggcagcctcgtgtcagctaccgaaaacagtgggcgtgctggcgggtgatgattctgccgatattgctgattctggttgcgctggtagtggaacggggcgtgacgttatggagcgtcagcgaacaggtggcgcaaagccgcacccaggcggagaaacagttcttaacgctattcctggagcagaagcggattgtgaatttacgctctcagatgacgatggcgctgaaaaaatatcgcccacaggccgacgatacctggctgctcgcagaattgtcagcgatcgccagtaccctgaaatcagcgtcactttccgacatcgaaatgcgtggtttcacctttgatcaaaaacgccagacgcttcaccttcagctacgggctgcgaactttgccagcttcgacaaactgcgtagcgcactggcggcagattatgttgtgcaacaggacgcgttacagaaagagggtgatgcggtttccggcggcgtaacgttgcggaggaaataa

SEQ ID NO: 30092 - DNA, 369 bp, Escherichia coli
gtgcgtgccggtttccgtctgggcagccacaacgatatgacctttggtgaaggcacctcatcccgtgcccccctgcgtgacagtgcaaaacacagtgtgcgtgaactgccggtgaactggtgggtacagccttccgttatccgcaccttcagctcccggggtgatatgcgtgtggggacctccaccgcaggcagcgggatgacgttctcaccctcacagaatggcacttcactggatctgcaggcaggactggaagcccgtgtccgggaaaatatcaccctgggcgttcaggccggttatgcccacagcatcaacggcagcagcgctgaaggttataacagtcaggccacgctgaatgtgaccttctga

SEQ ID NO: 30093 - DNA, 234 bp, Escherichia coli; identical to SEQ ID NO: 28524

SEQ ID NO: 30094 - DNA, 780 bp, Escherichia coli
atgatggaactgcaacatcaacgactgatggcgctcgccgggcagttgcaactggaaagccttataagcgcagcgcctgcgctgtcacaacaggcagtagaccaggaatggagttatatggacttcctggagcatctgcttcatgaagaaaaactggcacgtcatcaacgtaaacaggcgatgtatacccgaatggcagccttcccggcggtgaaaacgttcgaagagtatgacttcacattcgccaccggagcaccgcagaagcaactccagtcgttacgctcactcagcttcatagaacgtaatgaaaatatcgtattactggggccatcaggtgtggggaaaacccatctggcaatagcgatgggctatgaagccgtccgtgcaggtatcaaagttcgcttcacaacagcagcagatctgttacttcagttatctacggcacaacgtcagggccgttataaaacgacgcttcagcgtggagtaatggccccccgcctgctcatcattgatgaaataggctatctgccgttcagtcaggaagaagcaaaactgttcttccaggtcattgctaaacgttacgaaaagagcgcaatgatcctgacatccaatctgccgttcgggcagtgggatcaaacgttcgccggtgatgcagcactgacctccgcgatgctggaccgtatcttacaccactcacatgtcgttcaaatcaaaggagaaagctatcgactcagacagaaacgaaaagccggggttatagcagaagctaatcctgagtaa

SEQ ID NO: 30095 - DNA, 1395 bp, Escherichia coli
gtgaccgccgccgctgacatccagcgtaccgtcctgattcaccaccacgttgttacccgcgatttcggtacctgtagagccctgaccatcaacggtggtgttaccgttattgtttacagtggcttcatcgccattaatctgcgtgccggtgccgccgttgctgatggcattgtcgccgtcgttgttgacgatggctttgtcgccgtcgatcagaataccaatggaatccggatcggtaaccgtcataccgcccttgttgtccaccgtggcgctgtcgccggtgatatcaataccgtgaccgccgccgctgacatccagtgtaccgtcctgattcaccaccgcgttgttacccgcgatttcggtacctgtagagccctgaccatcaacggtggtgttgccgttgttgtttacagtggcttcatcgccattaacctgcgtgccggtgccgccgttgctgatggcgttgtcgccgtcattgttgacgatggctttatcaccgtcgatcagaataccgatggaatccggatcggtaaccgtcataccgcccttgttgtccaccgtggcgctgtcgccggtgatatcaattccgtgaccgccgccgctgacatccagcgtgccgtcctgattcactacagcgttattacccgcgatttcggtacctgtagagccctgaccatcaacggtggtgttaccgttattgttcacggtggcttcatcaccgttaatctgcgtgccggtgccgccgttactgatggcattgtcgccgtcgttgttgacgatggctttgtcgccgtcgatcagaataccaatggaatccggatcggtaaccgtcataccgcctttgttatccactttggcgctgtcgccggtgatatcaataccgtgaccgccgccgctgacgtccagtgtaccgtcctgattcaccaccgcgttattacctgcgatttcggtacctgtagagccctgaccatcaacggtggtgttaccgttattgttcacggtggcttcatcaccgttaacctgtgtgccggtgccgccgttgctgatggcgttgtcgccgtcattgttgacgatggctttatcaccgtcgatcagaataccgatggaatccggatcggtaaccgtcataccgcccttgttgtccaccgtggcgctgtcgccggtgatatcaatcccgtgaccgccgccgctgacatccagtataccgtcctgaataactttcccgttattaccggcgatctccgtgccagtggaatctttaccatcaacgatggttttgccattgttgtttactgtggcattatcacccgtaataacaagctcaccgttatgattatattgccacttcgttgcgccatctgcgctcacggtgatgctgccaacttactgatttag

SEQ ID NO: 30096 - DNA, 513 bp, Escherichia coli; identical to SEQ ID NO: 5633

SEQ ID NO: 30097 - DNA, 414 bp, Escherichia coli
  misc_feature (234)..(243): n is a, c, g, or t
atgagtgaaaacaccatcaacaaagccctgcgtaatatgggatataacacgaagcaggacatctgtggacacggtttccgcactctggcctgtagtgccttaattgagtccgggctatggtcagaagacgctgtggagcttcaaatgagccataaggaaagtaacagcgtccgtgctgcttatacccacaaggcaaaacatcttgagcaacgtcgcctgatgctccaatggtgnnnnnnnnnnattacagtctatgctgaatatgatactgaatctttctctatcgctaaaccagcgattttttccagcattatttcccagagtgcgtattttcttttgtgctcaataaacagggattttaaatactcttctgtagaagggattttttcagtccatgtaatatctttactgtaa

SEQ ID NO: 30098 - DNA, 513 bp, Escherichia coli
gtgaccgccgccgctgacgtccagtgtaccgtcctgattcaccaccgcgttattacctgcgatttcggtacctgtagagccctgaccatcaacggtggtgttaccgttattgttcacggtggcttcatcaccgttaacctgtgtgccggtgccgccgttgctgatggcgttgtcgccgtcattgttgacgatggctttatcaccgtcgatcagaataccgatggaatccggatcggtaaccgtcataccgcccttgttgtccaccgtggcgctgtcgccggtgatatcaatcccgtgaccgccgccgctgacatccagtataccgtcctgaataactttcccgttattaccggcgatctccgtgccagtggaatctttaccatcaacgatggttttgccattgttgtttactgtggcattatcacccgtaataacaagctcaccgttatgattatattgccacttcgttgcgccatctgcgctcacggtgatgctgccaacttactgatttag

SEQ ID NO: 30099 - DNA, 642 bp, Escherichia coli
atggtttttcgtgatgatttacgtgttatgccatacggacgtgaagataatgacttttttgaaatcgaaaaaagacgttcaaaaaatgctggtttatatatgttcagtaatagggcatgttttggtggtgtatgtataacgaaagaacataaccccaacctacgagataaagcaggtagagaaggtataattgacaataaagcatctaagttatttagagagatagtcgaaaacattttaatagaaattgcaaaaaggtttattggccgcgcatcaaatatacgagatgaaaagctagaggaaataaatgctaaacatgctgctttgaaagcagacgaagatagaaaaaaattattacgtaaagagcaaagaagaatcaaaacatcgattcaaagagatcgtatttctttagaacatttaagaaatgaattttatgaaatatcacagcttctaagcgacaagaataattttaaagaactagaggagctattacagctcaaagaaaacatcgacgtattggatggtaccctaaaaaacctatctttaggttcagtaccaagaaatttagggagtatagagaaagactaccgtcagtatcgcgatttagagattgatgctaaaagtctttttaaagcagattaa

SEQ ID NO: 30100 - DNA, 336 bp, Escherichia coli
gtgaccctggagccccgtgtcttcggctggatggaccgtctgtgcgaagactactgcggtggtatctggaatctgtacaccctgaacaacggcggggcatttatggcacccgaaccggatgacgatgatgacgaaacatgggtactgttcaatgccatgaacggtaaccgcgctgaaatgagcccggaagccgccggtattgctgcctgtctgatgacgtacagtcatcatgcctgtcgtacggagtgttatgccatgacggtccattattaccggctgcgggattacgccctgcagcatccggaatgcagcgccattatgcgcatcatcgactga

SEQ ID NO: 30101 - DNA, 327 bp, Escherichia coli
gtgaccctggagccccgtgtcttcggctggatggaccgtctgtgtgaagactactgcggtggtatctggaatctgtacaccctgaacaacggtggcgcatttatggcacccgaaccggatgacgaaacatgggtgctgtttaacgtcatgaacggtaaccgcgctgaaatgagcccggaagccgccggcattgccgcctgtctgatggcgtacagccatcacgcctgtcgtacagagaattatgccatgacggttcattattaccggctgcgggattatgccctgcagcatccggaatgcagcgccattatgcgcatcatcgactga

SEQ ID NO: 30102 - DNA, 573 bp, Escherichia coli
atgaatacggttgatttatttcgtgccatgttaccaccggtcagctatgacccgaacgggaaatatatttcagcagaactgaacgcagaagcagccattatggatgaagtaaaagcgtcagctgcacgagtgcttgcatctgtcacaccattttacgcatccatgacgctgtctgactgggaacgagtgtatggagtaataccccgcgacggtgccacacagcaggaacgccgagaaaatattcttataaagatggctgcaactggtgggttatctatcccttattttaaacaacttgcagccagcctcgggtacaccataacaattactgaacttcatccattcagagcggggataaaccgatgtggtgatcgtctctatataacagatgcccgatggatttggcaggttaatgtcacaggaagcagaacgccagcctacagattcagaaccggagtatctgctgccggggagccgttactttcctttggtgcccctgtactggaagaaacatttaaagaccttaaacccgcttttacttattgccatttcacatataaggaggagcagtaa

SEQ ID NO: 30103 - DNA, 1350 bp, Escherichia coli
atgggctgggctgaaaacctgcaaaacgcttcctttcgtggcgtgcagtttgaggtgctgaatactgacgaacaaatcagccgcgaccatgcggtctatgaatacccgtttgttgacggggcggatttgcacgacctcggacgcaaggcgcgaccgttccgcatgacggcgttcctgtggggcgatgactatgaatataaactcgggaaactgaccgccgccctggatgaaggcggcgatggtgaactgattcatccggtttatggctctgtgccgtcggtgattgtgaccggctacaacatccgccatgacgcagaaagcccggacagctgcaccattgacatgagttttctggaaaaccgcaccggtagcgcgttgttcagcaccccgttaccggagctgttcgcgcaacagttgtttgatgaactggacactttacaggcgcggttaagtgatttttttgatgccgttactgcacctttaaataccgttaacagcatgattaaaaaagcccagacagtgcgtgccacactggtgaataccctgctgtcgttcaaaagtgattttgtctccactgtcgataatatcgtgtcactggcaggcgaacccggaaaatttatcaatgaactggcagaggtgctggaaatccacacatcagatgtcgggcaaccggtgcaggttctgcaacgtgttgattctgccacccggaccgggttggcaggagagacgaccgtcgccagttctgcgacagtgatgaactgctggaataaggtcatcactgatatggatgaatttgttgcgttgcctgttaccctggtcagtggcgataaagtagcggaggtggctcttcctgtggatgcctcgccagacgatgtgcaggatgtgaaagcagtttacgcaacacaggccgcatctgaactggccagtgttgcaatggcgatactggttgatgatgcgcagtcagaacagcttataccggcggatatcgggcgactggtcggggatgtgcgcacccgcttacaggctgccatcacgctgttccgtgaacgctatgaaggcgaacgcgaacggataaccgaaaccgcatcaccgctggggctgatgtacccggaaatcattcagagcatgaaaaacgtggcggcaaccgtgcaggatgtcggcctgctggttctgtcacgccgcccaccgctgacgcagaaacaggtgcaggcggacagctgtctgctgttgctggcgtggcagtggtacggcgattacagtcgtgcggcagaactgcaacgcctgaacccgcagttacgtgacccgaacaacataaccgccggggtggtaattaatgcctacgccaaataa

SEQ ID NO: 30104 - DNA, 234 bp, Escherichia coli
atgaacaaaatgaaggttaaggcggctcccgggatgaagttcccgatggaggataacgcccggaaatacatcaccacggaagcggtgatcgttgaaaacaccgcttattaccggcgcgctgttcaggatggtgacctgattctggtggctgaagagcctgaaacggcagaacaggacaccggaccagaaaaagcgaaggtgaagaaagagaaacaggtgggctccgatgagtga

SEQ ID NO: 30105 - DNA, 579 bp, Escherichia coli
gtgcgggaagtccgcacctatgccggtgaactggatgaagacccgggccggattgttcgcagccttccggcagcctgggtgacgttcggcggcatcgcgaaaaccgaacgctattccacgtcacgccagaaatacattgccaccggacgctttgtggttgtggtgggtgattacaacacccgcagcgaacagagcgccagacagggaggcaccgtccgggatgaggtcggtacaaacctgctggttgaatccgtccgtcgcctgctgaccggtcaggatttggggctggagattgattatttcgaacccgggcgtgtcaggacgctgtttaacaccggcgtggcagagcgggcaatgtccgtgtttgcctgtgagtttgatacccgctgggtggagcacgcgctggagaacggcaaatggccggagcgcggtgcagaagcggatatggctttcaaccgttaccacggccgtctgtcagaccccgacccggatttactgcgaattggtacgcaatacggcgcagatatctgtggtctggatgaattaagagagcaacagcatgaacaaaatgaaggttaa

SEQ ID NO: 30106 - DNA, 183 bp, Escherichia coli
atgacgcgtcagcactggacccacagaacgccacgtaaagccgcgcgctgtgttctggccctgtttctggtgatgttgcttccggtgggatgcacagacattaacagaacgggacagctgttagacgtggcggcgcaggtctgccggattattgacggcatccggcagtgttcacagaactga

SEQ ID NO: 30107 - DNA, 546 bp, Escherichia coli
atgaaatcaaaagataaaatttttgatgaagtcctgggcaaagaaggcggttatgtcaatcacccggatgataagggcggtccgaccaaatggggcattacggaaaaagtcgcccgcgcccacggataccgtggcgatatgcgcgatttaacccgcgaacaggcgctggacatccttgaagccgattactggtatggcccgcgatttgaccagatcgccgcattatcccctgatattgccgcagagctgtgtgataccggtgtgaatatggggccaaccgtggcgtccagaatgcttcagcgctggctgaatgtgttcaatctgcgcggcaggctgtacccggatatggacgcagacggacgcatcgggcctcgtaccatcagtgcattgcgcgccttcctgaataatcgcggtcaggacggtgaacgggtgatgctgacggccctgaactgtacgcagggggaccgctatctggaactggcggagaaacgcgaggctaatgaatcgtttgtttatggctggctgaaggagcgcgtggcgatatga

SEQ ID NO: 30108 - DNA, 279 bp, Escherichia coli
atgaccaactatacggcacttggcgagtatacggcctactcagagcaggcacgggatgctgccggacgccgcttcgcttatatgaaaaacctggccaaccaactaaaccgaatggccgaacaaccggatatggttgttcaggaagaagcgttacagtgtgccattgctgacatcatcgccagcgaaaacgagatgcgcgcagcgatggaaaaggcgaacgcctctgctccgctttgtaataaacctcttattacgccggattctctttcccgcttctga

SEQ ID NO: 30109 - DNA, 339 bp, Escherichia coli
atgaaaaaactgttattacttattctgactttatgttttacaggaatatcccatgcttctgattcagaggaagatttgatcaaaaaaacattacagggcgattatcaggcacaacgtaatctggcttattcatacatgaatggctgggatgatatttcaaaggataccatcagaggatgcgctctcaggaaggttattctcttaacacaagcccaagctgacattggcgattatggaaatgaagccatagattgtcgaaaagtgcatccaacagataaccagaaagtatgggagtatgtcagaggatacctggtgttgataaacgagaataaaaaataa

SEQ ID NO: 30110 - DNA, 270 bp, Escherichia coli
gtgagtgaattaaagtgtcgaattaatggccatcagatagaaccgtgtgcggtactggcaaaagcactcgaatatggaaatccaacctttaagagtaaaggcatatttatcccggaacgcgtgaatataaacaccggtgagccaggcttagacattgctcaaattcactccggccaatatgtcggtcgtggtgttgccatgtgtttttgcccgttctgtggtgaaagtctgaaaacatggaaaaaggagacaaccagtgagcaaaattaa

SEQ ID NO: 30111 - DNA, 165 bp, Escherichia coli
gtgagccagcaaaccagaataagcgataagagcctgaccagactgattgccgatgcggacagggtgctggagcggaacacccccgttgccgatgaggaatggtggcaggatttccgggccgcaatgctggaacttcaggaacgtcgtcgggaggagttgaagtga

SEQ ID NO: 30112 - DNA, 315 bp, Escherichia coli
atggtcattgataaaacgataacgatagatgtagccatgaatacaggtctggcgcttatcggttacggctatatcacttttatgtcattcaggtggttgatttcttcgctctttaagcagcgtgaaaaacgtcgttgtaaagacaagcgcgcgaaggcgctaaatgcgtttaatgacgcttttgatattgaccatatgcaacagggcgcccccgcacgtgtaattacccggggagatatcgtgattcttgtgtaccggaatgaaaaaaatgaacaggaggcaaccagtgagccagcaaaccagaataagcgataa

SEQ ID NO: 30113 - DNA, 231 bp, Escherichia coli
atgaaaattgaattttatgaccatggggtcaccgcaactatcactatttcttgctggttctgggagttccaccgttacttcagagttgtagatgctgcgctgtttgttgcaccgggagcgttacatcacagtggaatcggtattgttatgaacactgtcatcagcggtaaaacggtcccgatgttgcgggcgtttaaagtggcaaaacaggaggctggcaatggtcattga

SEQ ID NO: 30114 - DNA, 219 bp, Escherichia coli
atgattgatgatgaaattgcggcagcaattactgctaacaaagctgcgtggagctttctggttaaacagctttcagaaaatggctgtctgaacctcagtgccctggattctgaattacgcaacttccagcgcggccttcaggaacgtggggagtttgttctggctgcggcgctggatgaacatctgctgtcgattgagaactggtcgcaagacgattaa

SEQ ID NO: 30115 - DNA, 192 bp, Escherichia coli
atgaacgcgaagaactttaatcagctatatccggtagggactcgcttcatgcacattgcacatcgggcagtgcgtggtggtcgggtggtaaaaactgttgcacctgccagagattttaaatgtggttgtgtggttgaaattaatgtcgagccttatttcgtaaaagtcgaaacgctgaaagcaccgcattaa

SEQ ID NO: 30116 - DNA, 216 bp, Escherichia coli
atggcggtcaagttagaagtaattatctacaccgatgaaaacggcacgcttcgtgtcaggagtatggaggctattgataaaaaaggatttacggatgaagaggtcggtgtaagacaacggttatgggaggtaatgaatcaaactcttaataaagaatttaacggcgttgatttattttctgttggcgtggacccctgcgcgcataacacacattaa

SEQ ID NO: 30117 - DNA, 2043 bp, Escherichia coli
atgttttattcagccaatgagctggccggtcttcctggtttgcccggtacagttcagggggtgcgctggacgctcaatcggatcacagagacgcacccggaatggaagcgcaagcgtgaaggcaccaaagcattcgagtatcacatcgactgcctgcccgctgaagcgcagaaagttttacgtaagcgcctgacccatcaggtcctggaagatgcgcaactgcccgtcgtagttgaggcgaaggcagttaaaaacgtcgccgttcgcgatgaactggaggtgatggtcaaatgcccggaactggcattacgtgaagttcaggcactgactgacaagcaaaaggccatcgctgatgcgcggatattgctggctactgaagtgcataagctgcgcgagtatgccggaatgaccaggaaggccgctttaaagcacatcgttgatggtgtgcgcatgggggcgttacctgaccgcattatcgaagcagcgaatactgcaaatgcacgtcagggaaagcgaaccggtgtcagcaccggcagcctggatagctggtactccagctgggtgatggcgcgcggtgatgccaatcagttactggcgttactggctcccggtcatcataagggaacaccgtgggagcaggtctggtggttgagcgatttctttatgttctatcgctcatggaagcgcccgactgttgaatatgcgtatcgtgagttttcagcctggtggcatgaaaaacacgcgaatgatgcgggaatgctggcggcactgccttcagttcacgcagtaagacgggtgttaagcagcgtcccggtgattgttaaagagcgtttccgctccaccggttcagcctggcgttcgctcaatccctttgtgcggcgcgactggagcacattaccggttaatgcggtatgggtcggggatggtcactgtatgaaaatgaccgcgtttaacccactgaccggcaatattttccggccagaagtgacgctggttatggatgctgggcagcgctttgttgtgggctggtcactgtccctgtcggagaacgtgatagccgttgctgatgcgttacgttacggcatggcgcagcacgggataccgctgatttattactccgataacgggggcggcgaaaaaaaccgggtgcttgacgccgatattaccgggattttgccccggctgggtgtggagcatcacacggggataccaggtaacccacaggggcgcggggtgattgaaaggcttaacaaggaaattccccgggatgtggccctgagtttccagacgtactgctcaaagggagcagacaaggaaaccgtaatgatgcagcaacggattatgcagtcagccattaaggccacccacaaagggaaagagctgacaaaacggcaggttaaggcaagggatgaagtccccacctttgagcaactgatggcagccatagaactggaagtcagacgctataacaaccggccacacagcagccttcctcgcaaagaggatggcgagcattacagcccggcagcgtatcgccggaaactgataaaagagcagaatgttgaaattgatttcctgtcgccggaagaactgcatgaaatgttcaggccggaagtgacgcgcaaaacatttcgcggggaaattcagttattcaacaatatttattactcgtatgagctggccgcagagcacgggaatgaagtcagggtcagttacgatattcatgatgcaaacagtgtcattgtccggcgggctgatggctcttatatctgcgatgccatctggaacggtaacaaggttgatgccttcgctaaaccagttatcgaacaaaaactggagaaacgcgtcaggggccgcattgcacgggccacgcagaaaatcgaagaggctaaacgcgagcttactccggctattacgcagaagcctgactttaatctgggatatggactggagcgcccggagaaaaaggaaaaagaagaactttatttattcgcatctgaacgcgagcgcaatttaaagaaaaacggcacaaacaaccgttaa

SEQ ID NO: 30118 - DNA, 237 bp, Escherichia coli
atgatggttagaaatgaagtaatgaacaaagactggcaccgcgagtacatcgttgccgctgtgcacaccaaaggttttacattgcgtgaactttctgaacgcgctggtctaaaaaaagactctttaaaaaatgcactgtatcgctcatgccctaaatatgaacgcatcatagccgatgctattggtgtggaacctgcggagatctggccaagccggtatgccagtaaggcggcgtaa

SEQ ID NO: 30119 - DNA, 648 bp, Escherichia coli
atgactagaaatgatgatgctttttcttttgtcgaccagggaaaagaaagtttcagagagcgtttagtaaagctgataggtaaccgtagtgtcagaactgctgcgagtgattggggaatccccccttcaaccttaaacaactacattcataaaggaacagagccttcttttaaaatagcttgtcttatctcagataaagaacaagtgagcttaaattggctcgcttatggtgaggaacccaccgccaaagaaggttctctatcaaatcaaacagcgcagccttctcccgatattacaaacgagctagttaacgagttattgaaaagagcgtccacagaagataaggaacaactgataagtgcaatatgcgatatgggcattaaaggaatcttggaacgcctacagcaacccaccaggcaaactaagcaagccgatagcgaacttgaggagcaaaggaaggccattcaaagcctgaacatcaggcaatcgcttaaagacgctgtttgcatggcattagctggcgatgaggaaaatgacaaagagattttgcgccgcgccaaagccattttctgtgctggaacaccaggtgatcgcgttcccgtcacaccggagcaagaaactaagcctgtaaacaagaaatcagcataa

SEQ ID NO: 30120 - DNA, 405 bp, Escherichia coli
atgaaaactaaagtcattcttagccagcaaatggcgagtgcaattattgccgcaggtcaggaagaggcgcagaaaaacaactggtctgtttccattgctgttgccgatgacggcggtcatctgctggcgttaagtcgcatggacgattgcgcgccgattgcggcttacatctcccaggagaaagcgcgtaccgccgcgctggggcgtcgtgaaactaaggggtatgaagagatggtgaacaacggacgtaccgcgttcgtgactgcgccgttattaacgtcgctagaaggtggcgtaccggttgttgtggatgggcaaattattggtgccgtgggcgtttctggtttaaccggagcacaggatgcgcaggtcgcgaaagcggcagcagcggtgttggcgaaataa

SEQ ID NO: 30121 - DNA, 168 bp, Escherichia coli; identical to SEQ ID NO: 30089

SEQ ID NO: 30122 - DNA, 423 bp, Escherichia coli
atggcggatctgtacagtcatcgctgggaaatcgaactgggatacagggagataaaacagacgatgcaactgagcaggctgacgctgagaagtaaaaaaccggagcttgtggagcaagagctgtggggtgtcttactggcttataatctggtgagatatcagatgattaaaatggcagaacatctgaaaggttactggccgaatcaactgagtttctcagaatcatgcggaatggtgatgagaatgctgatgacattgcagggcgcttcaccgggacgtataccggagctgatgcgcgatcttgcaagtatgggacaacttgtgaaattaccgacaagaagggaaagggccttcccgagagtggtaaaggagaggccctggaaataccccacagccccgaaaaagagccagtcagttgcttaa

SEQ ID NO: 30123 - DNA, 822 bp, Escherichia coli
atgcgattagcaagtcgttttggttatactgcaaaccagatacgtcgtgaccgtccactgacacatgaagagctgatgcaccatgtgccggggattttcggggaagagaaacacacgtcccgaagccagaactatacgtacatccccaccatcaccgtactggaaagcctgcagcgggaaggctttcagccattcttcgcctgccagacccgtgtgcgcgacccgggccgccggggatacaccaaacacatgctgcgtctgcggcgggccggagagataaacggagagcatgtccctgaaattattctgctcaactctcatgacggtacctccagctaccagatgctgccgggttacttcaggttcgtctgccagaacggctgcgtctgtggtcagtctctgggggaagtgcgtgttccacaccggggagacgtagtggagaaagttattgaaggggcttacgaggtggtgggcgtgtttgaccggatagaggagaagcgtgatgccatgcagtcgctggtcctgccgccaccggcacgccaggcgctggcacaggcggcactgacttaccgttatggtgacgaacatcagcccgtcaccaccgccgacattctgacgccacgacgccgggaggattacggtaaggacctgtggagtgcttatcagaccatccaggagaatatgctgaaaggcgggatttccggtcgcagtgcaaaaggaaaacgtatccatacccgggccattcacagcattgataccgacattaagctcaaccgtgcattgtgggtgatggcagaaacgatgctggagagcctgcgctga

SEQ ID NO: 30124 - DNA, 147 bp, Escherichia coli; identical to SEQ ID NO: 8534

SEQ ID NO: 30125 - DNA, 528 bp, Escherichia coli
atggaagttttcttaatcatcgtcggcatcgtgattattaattttgtttttttatttattgcaaaaaaacaaaaaagtaacgatatgcatgtttctacaactgatgatcttacctttgtagagcatgcactgaatgtatcaggatataaactcaccccatacggagctggtgtatcactcatgtctttaagtaacggtttttcaaaagaagaaacattttcacatatagctttgatggctctttctcaacacgccaaagtcgcaggtagtgacgcaattgagcttagtaaagttagcattcgtgcgatgtcgatagctgaaaacttaactaaattattcaggaaaggtcttattcgatcagaaatatataaaaatgatttgaatgctatcatggctgtcagcacaattaatgaaaaccaagaggattggatttccatagttctggaaagcaatagcacatctaacaaggatactattgctttgccgataagtgcagaagcttctttagaagccataaacagccattga

SEQ ID NO: 30126 - DNA, 657 bp, Escherichia coli
atgcgtagaatggaagctgcttggacgtggggtattcatatgaatttaaaaattttcggcataattgtcctttctgctttgatgttcgttttaggtttttttctcggtggttttaattgggaatgggctgataagaattatgcaggtgaggtggcgttgtggagtatgttaggagggtggttatccgcaattgcaactctgtttgccgtgttggtttcattatatatggcgtatcaagctactcagaatgagattgaaaaaatcagggttactcatggagtaagtatgagtgtcactcatgacaatgagttaagttgtaatctcattattcagaacttgagaaatatgaaagtgaatattactggtgtttttttgtctctaggtaaatcatcaggtaagtactctttggataaagtaattgacaatcgtaatataacgctttcatataaaggtgaaacagaaaaggtacaatttgtaatccattctgggtctatttggtggccaatgtataaattattcgatatggataagaacataggttttgaaaagggtaagatctttataacaaccaacctcaatacatatgaatttgatttgccaaaagaatatttaagagcttttgagaaagcttattcggagtatcagacaaaaaaataa

SEQ ID NO: 30127 - DNA, 981 bp, Escherichia coli
atgagtcatcaacttaccttcgccggcagtgaattcagcagtaagcgccgtcagaccagaaaagagattttcttgtcccgcatggagcagattctgccatggcaaaacatggtggaagtcatcgagccgttttaccccaaggctggtaatggccggcgaccttatccgctggaaaccatgctacgcattcactgcatgcagcattggtacaacctgagcgatggcgcgatggaagatgctctgtacgaaatcgcctccatgcgtctgtttgcccggttatccctggatagcgccttgccggaccgcaccaccatcatgaatttccgccacctgctggagcagcatcaactggcccgccaattgttcaagaccatcaatcgctggctggccgaagcaggcgtcatgatgactcaaggcaccttggtcgatgccaccatcattgaggcacccagctcgaccaagaacaaagagcagcaacgcgatccggagatgcatcagaccaagaaaggcaatcagtggcactttggcatgaaggcccacattggtgtcgatgccaagagtggcctgacccacagcctagtcaccaccgcggccaacgagcatgacctcaatcagctgggtaatctgctgcatggagaggagcaatttgtctcagccgatgccggctaccaaggggcgccacagcgcgaggagctggccgaggtggatgtggactggctgatcgccgagcgccccggcaaggtaagaaccttgaaacagcatccacgcaagaacaaaacggccatcaacatcgaatacatgaaagccagcatccgggccaaggtggagcacccatttcgcatcatcaagcgacagttcggcttcgtgaaagccagatacaaggggttgctgaaaaacgataaccaactggcgatgttattcacgctggccaacctgtttcgggcggaccaaatgatacgtcagtgggagagatctcactaa

SEQ ID NO: 30128 - DNA, 372 bp, Escherichia coli
atgcaagtcactatgcagcacgcattgaaactattctggcggccaaaagccattgaattagaagacgatggggtaatgacttacgaaaaagttgaaatcattcgtagaaatgacggttcgatccgctttaacaataagatgccttatcacgttacgctgggttatatcggaacaaatggggtaacgatgttaccacaaacgcaaagcttaatggtaaccccttttagctatgcaaatacgcagtttaaaaatgttccgtcaacttttcaggtgggttatatcaatgactttggtggattaagtttttatgaaataaactgccctgtagtaaataacatttgtaatatttctgtagccaaccgagatcaataa

SEQ ID NO: 30129 - DNA, 180 bp, Escherichia coli
atgttagataaaattgaccgtaagctgctggccttactacagcaggattgcaccctctctttgcaggcactggctgaagccgttaatctgacaaccaccccgtgctggaagcgtctgaaacggctggaggacgacggtatccttatcggcaaagtcgccctgctggatccggaaaaatag

SEQ ID NO: 30130 - DNA, 843 bp, Escherichia coli
atgcgtcatgtcggggggcacgaacgtttcaggaccggtgacggccagctaaatactcaggctaaccgctatgtattgcagctaggcggcgatttggcgcagtggagttgcaacgcgcaggatcgctggcatcttggcgtgatggcaggctacgccaatcagcacagtaatactcagagtaatcgtgtgggttataaatcggatgggcgcatcagcggttacagcgcaggactgtacgcgacctggtatcagaacgatgcgaataagaccggcgcttatgttgacagctgggcgctgtataactggtttgataacagcgtcagttccgataaccgttctgctgacgactatgattctcgcggtgtgacggcctctgttgagggtgggtatacctttgaagcgggaacttttagcggcagcgaagggacgctgaatacctggtacgtccagccacaggtacaaatcacctggatgggtgtgaaagattctgaccatacccggaaagacggaacacgcattgaaacggaaggcgacggaaacgtgcaaacgcgacttggggtgaaaacctacctgaacagccatcaccagcgtgacgatggtaaacagcgtgagttccagccttacattgaagcgaactggatcaacaacagcaaagtctacgcagtgaagatgaatggtcaaaccgtaagccgtgatggtgcgcgtaatctcggtgaagtacgtaccggggttgaggcgaaagtaaataacaaccttagcctgtgggggaatgtcggtgtgcaactaggtgataaaggctatagcgatactcagggcatgctgggagtgaaatatagctggtaa

SEQ ID NO: 30131 - DNA, 246 bp, Escherichia coli
ttgcaacagtgcccgccattcaacatcggcatgatcaccagcgacgactggggcagctatggccgggaggtgccgaaggataagcatctgaccggaaaaatattcacccaacggattgagcgcaataacctgacgctgcgcacccgcattaagcgcttggctcgtaaaacaatctgcttctcgcgttcagtagagatccacgaaaaagtcatcgggacgtttattgaaaaacacatgttctactaa

SEQ ID NO: 30132 - DNA, 1023 bp, Escherichia coli
atggataagagagtgatatttgcggttgccggctcgggcaagaccacgctgctgatacgacggttgagtgaggacaggaggacgctgctcctgaccttcaccgtgaataatgaagcgcatctgcgggcacagattatcagacgttttggctttatcccggaagggatcagggtgatgacctggtttgagtttctgcacggtttttgcttccggcctttcctgcaggagcagctggcatcgcgtggcctgagcttcgaccagcccccacccagaataccgcgcacgaatgcccggcattatcaggatcccgccggacggctgtatcaccggaggctcgcacatttactgacagcccgggggttgctgccggatatccgtatccggcttgcccgttactatgatgaactgcttgtcgatgaagtccaggactttgccggacatgactttaattttctgctggagctctgccgcgcggaaatcactgtgctctgttgcggcgatttttatcagcatacctttgatacaagccatgacggcaacgttaattcaacgctgcacgacgacatcacgcgatatgaggcccgcttcgacgcagcaggtttcgcggttgaccgggacacgctcaaccggacatggcgttgctcagcttcagtgtgcgagtttatcaccgggcaactgaacatccgtatcgctgcccatgggatacatgcctccctgattgaaacgatcgcagatacagagcgctcagccaccctgcacgccgataatacggtgattaagctcttctatcgtgaacatcaccgttacggctgctattccatgaactggggcgccagtaaagggctcgatcactttcaggatgtctgcattgtgatgggatcctcccactggaagcttctgacccgtcaggaactggcaacccttccaccgtcgtcccgtaacaggctgtacgtggcatgctcacgggcgcgcggcaacatttattttgttcccgaaactcatctgcgccgattccgaaactga

SEQ ID NO: 30133 - DNA, 546 bp, Escherichia coli
atgtctctcactaaattactgccggtcattttgttgatgatggccacaggtgtgcaggcctccacccgggatgaaattgaacgactctggaatccgcagggtatggccgtgcagcctgcacaaccggcagcagacacatcagccagaacagaaaagccggctccccgctggttccgcctcagcaacggcaggcaggttaacctggccgactggaaggtggtgctgtttatgcaggggcattgcccttactgtcaccagtttgacccggtactgaaacagctggcacagcagtacggcttttctgtttttccctacaccctggatggtcagggtgataccgcctttccggaagcattaccggtgccaccggacgtgatgcagaccttcttcccgaatatcccggtggccacaccgaccaccttcctggtcaacgtcaacacacttgaggcattaccgcttttgcagggggcaacggatgccgccagttttatggcgcggatggataccgttctgcagatatacggagaggaaaaaggtgcgaaataa

SEQ ID NO: 30134 - DNA, 1815 bp, Escherichia coli
atggttgccaatattaatctcattaaacaagaaagttattctattgttaatttagaaaaacaactaatgagtaatgaatcaccgaagcaaacgctattaaatgatttttcacatcgccttaaaatggaaggtgaggagcaactgtgcgattgtgttaacgaacttaaactcgggttgtcgagtaataataaatatgacttgtttaaaaataaagaaacctcactgtggaaacgcaaagtaccagaaagtgcagcgctggcaatgacgggaacagtatataaattatttggtagtcgcttactcaacgcccgcaatcagttagataaaaatctcctcgaaatggctatgcaaatggtttatggcaaagatatggtgacaaagtccggggatatattgattgatatacaattaaacaaggatggcagccttcagagtaagcactacacatttgatgtaggtgaagttataaacagttataatattgacctctttgtgaatgcttcgagtattaatcaaacttacttacatgataaaaatcctggtgacgttattagcctgtatggcactttagataacattcctcttgtagttaaggaatgcacgggtaaaaatcatcaaattaacgttaaagccaaattgcctcaagaacgaagtgaaaaagttgaggatatgtgtgaaagaatgagaggtggcatctctatgtttaatcacactacaaaaacagctggtaatatagagcataatttgcatctaagttttctcgtggattcacgaccgtcgatcacaaataaatactcagccaaagatgtaggggaagatatacttgcattgcccgtcaacgtatatcatgcagattttaaaattaaaatcaataacgcagtagagaaggcctcgtcaattgtgttatgtgctgtgcaaaaaaatctccatgcagcaaggaaggttcttagcgggataataggaaatgtgccaaaaaataataaaccaaaaacaatcattttggatttacgttttcttagtgcaattaagcagaaggtttttttgggcagtgaaaaaccgttgtttgtaaagcataccgcaatgatgagggaggcatgtgaggaattaccgcagtcagtggaatatgttcctttagcctgtgaagcgcatagccatcgcagcgtcgcccttgccaaaaccgtggctgcgcccatcatggcgacaggtgtgggctcggctttaatgtatgcaacatcatcaggaccgtattatgcgcaaagtctttctggttctccggatatcgagatgataaaaaatcgcatggctcaattgtttacccagttggatgcttctgtgcgcaacaaatatcgcccggcttttgataaatggaatgagctggtagataaattaaatcacgaaagaaatacagttccgtttgcgtgtttgaccaccattttagcgacggcgataaatgaaactcctgagggggatacgaatgttgccgttgtgatggggtgtaaatctgcgaaagatcgcacgatatccattgtccttggtaactcgatgttgcaaacactccttgaaaaacgcctcgccgatggtagagaaatagaaaagctttttgatcaacagggatattttagttgcgattcattaacagccaaagaattaatgatgttaaaagacctttttgatattcgagttcttcatctctctaacaaatttaatgttggattgcaaggtaatatcaacacggatgttttacaagattcgttttttaaaaatgtcgatttcattcatgaatctagctcgtataccgtagggatgggagtctga

SEQ ID NO: 30135 - DNA, 222 bp, Escherichia coli
atgaaaaagtttttgcgtattaagacgtggtttgtgcgtcttttctctcctgacaagaagactctgggagctatcggtgaagacctgcgtaaggtcgccgtaacagccatcggtgtcggtattgtaggggtcgtctcagaaaacggaatctatggtcactcccgtttttgcaacaccgattttgacgacaagttggcttgcttgaatctatccggcgtctga

SEQ ID NO: 30136 - DNA, 867 bp, Escherichia coli
atgacaattgactatcaggtactgcgtgaggcggcagaaaaggcaacaccagacgaatgggtcgcatttatttcgacggatactggtacttatgcggtgcacacgcccggtgatgaacgatgtgaagacgttatcaaatggaccggctttgatggacagaaaaatgcagagaacaacgctcgttatgttgccgcgttcaacccaaaggttgcactggagctgcttggtgaaattaagcgcctggaggacacaaatattgatgctatgtgtcgaattgcagagcttgagactaatctcgcggcgctggcagcggagaatgcggcgctgaaggccggggctatgtatttctcatatggctctgaatttagtttcgagtgtcacaaaactgctgaggaggctatcgctgctgctgaggctgcaattgacgactatagaggcgatgcttgcgatggatggagcgaagaggtcgaaagcatttgctggggggtaattattcagcaggcaaccaaggtcggtgaacgcaagaagaggaaatgcgacagagtatcaccatggattgaaagagtttgtgattatgagcttcgacctaatgtcgaaaccccagccaccgatgctttcctgtctgaaattcgtgcggaagcacgcaacgaggggattaactataccgccagccgtcttgctgctgcgttcaatcacggatttatcaataagtctttgcgtgaagttttcgacgttacacgcatgattttgtcagcgaaagaagagttggctaatgaagcgcatccgattgatggcctgtctggtgaatatgcggagaaatcccttgaagaatgggcggaacagattcgcaaaggaagcagccagtga

SEQ ID NO: 30137 - DNA, 288 bp, Escherichia coli
atggctgacgtacgcattacttgcattaccctctccggctcgcaatcaatccatgagcatattactcatgtgggaagtcctcaatttaatactagcaatgggaaatggactgttgagcaggtaattaatgctattgataataatctccatacattctatgtaacagataatgcaggtaatcgtgtagaagttggggttgttaatcctggtaatggtggaaggcagtttattagaacgtatgcagacaatcgatggaataataatttactatcgctaccagtctgttaa

SEQ ID NO: 30138 - DNA, 1056 bp, Escherichia coli
atgacttatgctggcacacaaacagcagataacgccggggataccatgaaatcgtatgctatttggaataataaaggtggcgtaggaaagacatacttatctttcgctatggcctgtgaatacgcaaggcaaaatccagaaaagcgtattatttttgcagatatgtgcccgcaggctaacttatctgaaatattgctcggcggtaacggtactggtgctgctaacctcgcgaacttaattcaacaacgaaaaactgtcggtgggtactttgacagaagaactcgcagcccccacatgcttaccggttcagaaacaagtttcttaattcatgtctctgaaattaacgggcatgtccctgacaatgtatttttgattgcaggcgacccaagcctggaagttcaggcgcaagtaatcaatcagttaagcagcgtaaacttaccagttgactcatggaaaagcatccacctgtggctacgagatttgcttgttgcatgtgcacaacaacaaggtatcgaagaaaccatttgctttattgattgcaaccccagtttctctgcctataccgaactatcactgatagcagcaaatgcaattataataccttgctcaagtgatggttcttcggctcgagcagtggataacctaagccagttggtttatggcgttggagtacaaaacgattatcgttctgttaacttttacgatcggtgtcaacagtttggtctagcggttcctgtcattcattctctagtttttaatcgttcgacagagtatgacaaacgagcaagtaaagcgttttcggcaatgttcgacgaaatcagggatagagctgaaaatctgcggacgaataaaccaacagcgttccaaggcggaaatttaaaaacgtttactgtgccagataaccattccgtagctatagtatcttcccatctaggaagacctctatttgatataaaaccaggcagatatcaaatccatgacactgagccacaaatcaataatgaaccattagaaagatatggtgcagcaatcgaacgtcttgttcagagtttatag

SEQ ID NO: 30139 - DNA, 1686 bp, Escherichia coli; identical to SEQ ID NO: 25153

SEQ ID NO: 30140 - DNA, 294 bp, Escherichia coli
atgtggcgcggtaataatcatggcggaagccagatgatacttaccgaatatacgttcgaccacaaaaccaataaatcacgttcagtatatttgcttcggcacaatagccgcgtaaggaataccgtgctggagcaaaatctgaccgttgaaatggataatttgggaaacttcaagccaacaatatcgcttgatgattttccgtgtggtttaagcgaaagagaagcaatgctgaaattagcagaatggttacaaagattgagcattgctattgaagataactggattcaaccataa

SEQ ID NO: 30141 - DNA, 231 bp, Escherichia coli
atgaaaaacagaaagattgctatgacaacatttagtaaattcgcagtaattattattttattaattcccctcactgttacagcaggggaacagcaacattgcacaaaagagaatgaacaccctttcatcgttattcaatgcgatgacggaacggtgactgtggttaatgtaagaaatgaccgtgtagctgtttgccgtaaaggcgaaccatgcaaggagataaagttatga

SEQ ID NO: 30142 - DNA, 366 bp, Escherichia coli; identical to SEQ ID NO: 29545

SEQ ID NO: 30143 - DNA, 345 bp, Escherichia coli
atgttaaataaggggctggaaagccttgctgaaggggagaaaccgctgctccacagtgatcaaggatggcattaccggataaaaagttatcagtccgccctggcggacagagggttagtgcagagcatgtcgcgcaagggcaactgccttgataatgcggtaatggagaacttctttggtcacctgaaagaagaaatgtactatcgccgggactacagaaatgtagaagagctggaaaatgccgttaacgaatacataacttactggaatcaaaaaagaataaaactcagtcttgggggactcagtccggtagaataccggactgagcatcaaaaagccggttaa

SEQ ID NO: 30144 - DNA, 1365 bp, Escherichia coli
atgtcaactagcgtttttgactccgttttactaaaaaatctttggtctactgaagaaatgcgtcagattttttctgatgatgttcgcatgcaaatgtggctggactatgaagccgcgttggcgttagaacaggctgaaatggggattattccgcaagcggctgccgatgaaattgttgcctgtgccagaattgaacgtctggatatgggacttgttctggaacaggttcgtctgaccaaacatccactggttccgactatcagggctctggaagatgcctgttcaggtgggtttggagaatatgtacactttggcccaactactcaggacgttatggatacaggcatggtacttcagcttagaatggcccataaaatcatcctgcgcgatataaaggagatttgtcgttctttactggagctgtcagaaaaacaccgaaacacaccaatggccggtcgtactctggcacttcaggctattcccatcacgtttggacataaaacagctatctggctcgcagagttaatgcgtcaccacgaaagacttatacagctggaaccgcgtttatttgttggtagtgttgtgggtgctgtcggaactaaagcctctttcggtgaacgtgctgacgagcttgaagagcgtgtactgaagagacttcaactgggtgttccagaaatttcatggcagccagcccgcgatcgcttttgtgaatacggcatggtactggggatggttggggctactttgggtaagatcgccaatgaaattctgctgttggctcacaatgaaattgacgaagtggcggagcctttcggtaaaggtcaggttggttcttccacaatgccacataaacgtaatccagcaataactgagaatgcagcctgtgtcagtaacacactgaaaggtaatattgcaattttacttgatttaatgaaacaccagcatgagcgtgatggcgctatctggaaaatggagtggaaggttttaccggaaatttgtctaatgctgtctgttattttggataacatgaaatacaccctgactggtttacacgttaaaaaagacaaaatgcgcaaaaatctcgatattctcggtggttttatgctggcagagcgcgtcatgtttgaactatcagagaaaattgggaagcaaactgctcatgaactggtgtatgaagcgtcaatgcaaggtcttgaagaaggagttactttctctcaggcgttatccgaagatccccgtattaacacagcaatgaccagagaagaacttgaagctgttctcgaccccaccacctatgtaggtaatgctccggaacaggttgacaaaattattactcaagccaaatcctgcaactggctcagctaa

SEQ ID NO: 30145 - DNA, 1389 bp, Escherichia coli
atgacctacagcgaaaaactgagccagtttatttactctaaccattttgatgcgattccacctcatgtcatttcccgtgcaaagattcatctgttggatagtctcggtgtggcactggctgggacagtacaaaacaacgctatcaatggacggaatgggctgcataaaatgcccaatacacaaggtaagtgtcgagtatgggggagctcctatacgttttcccccgcttacgccgcactggcaaatggaatagctgcgcatgtgctggactttgatgatacccatacagactccattacacatggcagtgcagttctggtcccattggtgatcgcgcttactgaagacttaaacctgaatagccgggagatgcttgctgcatacgtcactggctgggaaatagcagcgcgtgtagggcttactgcgaagggaactttccacaaacgcggttttcattcaacagccattgctggcatctttggtgcagtcagcggggcggcttcattactgaatttatcgccaatagcttgcgcgcatgcactaggtctggcaggcagtcaagcatcagggattgctgaatatttgacgaatagctcttcagcaaaatgttttcatgctggttgggcggctcattcaggtattttgtcagcctatctggcagaggccgggatgacaggaccactctctgtttttgaaggacgcttcggtctattcgcgacacatggtatacaaagcgagataaatgcagcagatgtctgccgggagctgggtgaacactgggaaattatgcgcgtctcggttaaaccttatccttgctgtcattttgctcatgctactgtcgattgcgctcgaatgttaatcagagacggcatcaagccagaagaggttaagcacattctctgcgttgttgatccgatagcctcagccctaatttgtgaaccaatagatgacaagttttccccacaaacaccttatgcggctaaattcagtctgccttatctcgtagcgtcaggcatgatcgatgatggtttaagcctggaatcattctctccagaacaactgaacaggaccgacgtactggaactggcacggaaagtgtcttatcgctatagcgaagaaggagaaatcccatttcccgcatacttccctggtctgatttctgtaactctgaaagatgggcgagaaatgacaaaacgcctgaatgtaaattatggcaacccagagaatcccatgaaaaatagcgatgttgaacaaaagttccgtaacaacgtcagggggatcctgtccccccaagccactgaaaaggtgatacagctggttgcggacatcgaaaatcacccggtaactgaactgacacagtggctgacaaatactgttaactctagatag

SEQ ID NO: 30146 - DNA, 876 bp, Escherichia coli
atgccatatataaagcgtccgatacctaaccttgaactggatttactacgcacgtttgttgccgttgctaatggtaacagttttgctgcagcggcagaatcggtattccgtactcagtctgccgtcagccagcagatgcagcgcctggaacaattgattggtaaagaattattcagccgaaatgggcgtaataaggcactgactgaacatggtgtaaaaatgctaggatatgcgcgacgtatcttgcggctaaatgatgaggcttgcctatgtctgatgtatgaagacgtggacggtgtgctgcgtatcggttcacctgatgatacagctaatactattcttcccgatttgctttcccgcttttccaaatcctatcctaaactggcgattgaaattgttgtcaagcgtagcccattcctaatggatatgctgaaaaatgatgatgttgatatggctatttcaacggttgattgtgttgactttcctggttttgtactgagaacatcgccgtcattgtggttttgtggtcagggctacaaattaaaccctgatgagccattaccattagtatcactggatgaacccagtacttataggaatatggcgatcaatcagcttgatctggctgggatcccatggcgaatagcctatgtggcaacaacactgtctggtgctagagcagctgttgttgccgggttaggcgttatggctcgttcaattgaacttttaggggatgatattcgagtgttgggagaagccgatggtttacccaagctacctgacattaaatttaatttatacatgcgtcgcaacagcccgcagaaagcagcgaaagtgttgtttgaatcgctgcttggagagagcgatgaggtctag

SEQ ID NO: 30147 - DNA, 2682 bp, Escherichia coli
atggtcacgatttgtgttgacggtgaaaataagactcataaaattaccgactggacgctgtgggctggaaatgacgacagagaggttatgctgacctgtcattttcgcagcgggagaaaatatactcgtccgctttctgtatgtcagataacgccaactgtaaatttgcgaaatgttttcctcgaaaggaaagggaacgctgtaacatcccgggctgaactggttattatatatggtgataaatatgctgctgtttattaccgcgagggtgaacgaccctacatcatgaaaacgaccggccttgactttcaacagtgttcagcatttacagagcatgccgtgtttaattacttgtgtagggtggctaatgaacgtattttttatgcccgtggtaataacagaaatatcgatgagaatatccttaggcagataaagaaaatagttcctcatccggataccgccttgcatgcatactgttcaggacagagtaaaaaacgtgattcgccatggggtttgatttttccgtttggtcttaatgaaagtcagttgctggctgtcgaacgggcattttcctcacagatttcagttattgaaggaccacctggaacaggtaaaacacagactatactcaatattgttgctaatatattaattcagaataaaacagtggcaattttgtccaataataactcagctgtcagtaatgtttatgaaaagatggacaaacagcaactgggatatgtgatggcacgactggggagtacggagaacaggcaacagtttttttcaacgtcgatttcgcgttctgaggaagtcttacctgactcaccgtctgcaaatgcgattgatgatgtacttcaacaagtgaaaaaacacctgaatgccattaaccaggtcgcttcgttaaaagcagaaattaatgagctgaatattgagtataaatacctgcagcaatggcagagtcagaatcttcgaccggaggagcttttttctcacaaataccgattttcctcacaaaaaacaaccgacctgatggcttatattcattacctttctgacaggcggattggattcagaaacagaattgatttgttgttaaacttcatgatactgaaagtcaaaccattgatgattccggagagaaggctggcgctatttacttctcttcagctttcttattatgaaaaaaatatccgggaaaaacaaatttctctgagtgaatatgaggaagtatttaaaaaatctgattttaaaattttactggggcgcctgacatcatggtctatgctttatttaaagcaacatctgcgaagaaatgtttcaacaagaagttcattctcggcagagacatacagggatgaatttgaccgttttataaagcgttttccgattattggtagcagtacgcattcgattattaactctatcggcaagggggcccttcttgattatgttattattgatgaagcctcgcagcaggatattgttccgggcattctgggactgggatgtgcccgtaatgtaatcgttgtaggggatcgtaagcaacttccacatgttcctgtattactcccgaacagcccatctccaccggcagaatactataattgtgagaaatatagtctacttgattcggtttgtatgttgttcaggaacatggtgccagtaacccttcttaaagagcattatcgttgtcatcctaaaatcattcaattttgtaataagcagttttatgataatgctctgataccgttaacggttgattccggtgaagcctcattatctctggtcatcacggcaaaaggaaaccatacccgtaatttttcaaatctcagggagcttgaatctctggaaggtcattactgggatgaagaaagtagcaggggatacattgccccatataatgcacaggttaatctggctgaaaaagtgctgcctgctgattttgtgaaatcgacggtgcataaatttcagggacgggagtgcgatgaaattgtgttttccactgtgctggataagaagcgcagcagccagcacagtcggaacatcgcgtttgttgataatcctgaactggtgaatgtcgctgtttcaagagcccgaaataaatttacgctggtgactggtaatgatgtatttgaacgccacgctggacatattgcggcgctgattcgttacatcaaatactacgctgatgacggagagattttcgagagcccggtcatatcagcatttgatttgctgtacagtgagtatgacaaatcactggaacgactgaatagtagattgaattcaaatgattcacactttaagtcagaacagattgtggcctgcctgttgcgggatatcctgtcgcaggatagttatcggagtatgatgtttcattcacaaatagcgctgaatcagttggtgttgctggagcggggggattttacacaccgtgaacagttattcatgcgtaaccgggccagttgtgactttgttgtttactataaggtcgggaagactccattaggggttattgaagtggatggaggttatcatctgaccagtgttcaggctgaacgtgatgaacttaaaaacagtatactgaagaaatgcggcctgccattgctaagattacgtactatagacagtgatatagaagggaagttgggagcgtttctgtcaggcctgacaggctaa

SEQ ID NO: 30148 - DNA, 486 bp, Escherichia coli
  misc_feature (472)..(481): n is a, c, g, or t
gtgatccggattgaagatggttttatccgctccaacggattggggtctaatttatgtcgaccttcatcactctcgattgaccccgttggaatctattttgatagccgccgtccgagtaagcttgagcagttactcactacgtacgttttagatgcgaaagaagaagcacgcgcagagtcattattagcgcaattacaatcatcacgagtcagtaaatacaatgtggggagtacacaagaatatgagccccctaacgacggacgtgagttgattctagtggttggtcaggttgatggtgatgcatccattttgtgtggtagcccgattatccgcagcaatgaacagttgttgtgggctgtgcgtgaagctaaaccgaatgcacatattctgttcaaacctcatccggatgtggtatctggcaatcgaaaaggtactatttcggcgcgttgtttagcacactgtgttgatagcnnnnnnnnnngttga

SEQ ID NO: 30149 - DNA, 378 bp, Escherichia coli
atggctgttatttataccctcacaaaatcgccactcgtcaagtctggcggtcaattatattgggatattgattcgccatcagaacaacaaccactaaagatcgtcaatggccggattgtacttcgggggtggttagtggctgaaggggaagcagattcccatgttgctgttaaaattgatcatatgacatacagttttcctttcaatacaaagcggcctgatgttatttcagctatactaaaacaaccacctgaaaaacatcaaaaacttcggtgcggatttgatatcagtattccattttctaccaaaataattattgggctggaatcagatggggtgatcacctggttggaagggttatttttttctcctgcctga

SEQ ID NO: 30150 - DNA, 147 bp, Escherichia coli
atggatacaaccaagaaaaatgattttgcctcaatggaagaaattacggtaatagaattcaattatcccatttacaatccactgctacgttatttaatcagccccaaaaagatctctggtataaaccttttcggctacatcgactaa

SEQ ID NO: 30151 - DNA, 288 bp, Escherichia coli
atgaccgaatccagcgattacgaatccgtccaggtctttatcggcgttgatgtcggtaaagatacgcatcacgctgtagccattaatcgttcaggtaaacgcctgttcgataaagcattacccaacgacgaaaacaaactcaggtcgctaatatctgacctgaaacaacatggtcagatactgctggttgttgatcagccagctaccatcggtgcgttacctgtcgccgttgcccgctcagaaggagtcttgtcggatacctccctggactggccatgcgccgcatag

SEQ ID NO: 30152 - DNA, 498 bp, Escherichia coli
atgtttgccaaatttttcctagcacacaacggtaaacggtgcagtctggtctgccagaccgatagatacattacagaacatcctggtcgaggtactggcatgcgcatgttgaaatgttaccttgccaataatcgtgatgggcacattgtgactgctaaagacgcaatgcagtcaccaagcagggtatggacctgctcttcctgtggctgtcagttgatacttcatgcaggttcatctggtgaggccccctggtttgaacatgaccagcgaacagtgacgacgaacgttctgatgcaatgtacccatctcgatcctgaagtgaaagccgaagcccgatgccaaaaaatacgcagtatcatcgggaatctggatgcacccgtaatggtgctgttctggtattgcgtatggtgcggaaatcattacagtgggaaaaagcattgcacttcatgtggaacaggcatctacagtatcgaagaaactgaagcaagaattacgtga

SEQ ID NO: 30153 - DNA, 1404 bp, Escherichia coli
atgataatatatcgaagtgaaaaggattctatgggggtaataaatgtccctgaaaatcggttatggggagcgcaaacccagcgatctctggagcattttcgtatttcaactgagaaaatgcctgtttcacttattcatgctctggcactgtgcaaacatgctgcggctaaggtgaacgaggacttgggattactatctgcggaaaaatctgctgctattatgcgggcagcagatgaggtattagccgataggcaccctgatgagttcccgttggcgatctggcaaaccggttccggtacccaaagcaacatgaacatgaacgaagtactggcaaatcgcgccagtgaattgttgggcggttcgcgcggcgcaaagcgtaaagttcaccctaatgatgatgtgaacaaaagtcagagttcaaatgacgttttcccggcggcgatgcatgtcgccgcattgctggcattacgtaaagaactactaccgcagttgaaagcattcattaaaaccctgaatgagaaatctcattcctttgaggatatcgtcaagattggacgaacgcatctacaggacgctacaccgctgacccttggtcaagaaatctctggctgggtggcaatgcttgaacataatcatacccatatagaaaacagtttgccgcatttggcagagctggctttgggcggtacggcagttggtacaggattaaatactcatccagagtacgcacgtcgggttgccaatacactggcagtgatgactggtgcaccgtttctgacggccccaaataagtttgaggcgttggcgagctgtgacgcactggtacactctcacggtgcattaaagggactggctgtgtcgctgatgaaaattgttaatgatgtacggtggttggcgtcggggccacgttgcggtatcggtgaaatttcaattccggaaaatgagccagggagttcaattatgccgggaaaagtaaacccaacccaatgcgaagcgctggcaatgctgtgttgccaggtgatgggcaacgatgtggctatcaacatgggaggagcttccggaaactttgaactgaacgtttatcgtccgatgatcatccataattttctgcagtctgtacggttattggccgatggtatgaagagctttaatacccactgcgcggtcggaattgaacccaaccgtgagcgtatcggtcagttgcttaatgagtcattaatgctggtgaccgcactcaatacccacattggttatgacaaagcagcagagattgccaaaaaagcgcataaagaagggataaccttaaaagcctccgctatggagctggggtatctcaccgagtcagattttgatcaatgggttcgccctgaattgatggttggaagtgtgaaactatcgcgttaa

SEQ ID NO: 30154 - DNA, 1368 bp, Escherichia coli
atgcttggcgttgttcttgcaattattgtaaccggactggttatttttatgctggcgaaaggatataaacctcagccagtattattattgggtgggttattactgatggggctcacggtggtatttgatctgggaacgttattaccggagaagactactacccactttcaattttttgatatattcaaagtattcagtgatattatgagtacccggttggctgggctcgggttgacgttaatggccatagcgggtttctctcgttacatggatcatgtcggggccagcaaggcactatttgctgtatttgaaaaaccgttgagatcggttcggtcgccttatatgttgctggttgtcgcttttctagtgactcaaatattggttattttcattccaagtcatgctggtttaggtatgttgttgatggtaaccatgtatcctattctgattcgtacaggagttagtcctttatcatctctggctgtaattggaacctgtcaatttatcgatcacggtcccggctctggtaatgtcatcatggcagccaagacggcaggtattgatcctgcaacgtattttgtttatcaccaattacctgtcactgttcccgtaattattgcagttgctatcgcacatttcatcgttcagcgctggtgggataagcgcgaaggctttgtattcacaaaggatacgctggataaaatcgacgataatgatcatgcccgccccccgctgatttatgcattattaccggtggtaccactcgtacttatcattgggtttagcccaatattcaaatcattcattaaaatagatgttaccaccgcaatgattatcagtactatcgtagccttaatatttgaatatttccgcctgaaaagtgcaaaagcagtaatggatagttttatgttgttctttgagggaatgggcaaacaatttgtactggtggtatcgctgattgtatgcggtgaagtctttgctaatggtctgctctatatcggggccgtggacacaatgataactgctgcacaaaatgcaggattcggtgtcggatctatgatcgttgtgatgagttttatcctggcacttgctgctttcttgatggggtctggcaacgctgcatttttctctttcgcagccctcaccccaaaaatagcggcctttctaaaagtggatgtagtcacgctcattttaccaatgcaaatcatgacgagttttggccgaacagtttcacctataacagctgctattgtcgctatctccggcattgcaggcgtgtctccatttcaggtagttaaacgcacggcaatacctatgggtgtcgcagccattgtaaatctaataatgacatttatatatttgggatag

SEQ ID NO: 30155 - DNA, 690 bp, Escherichia coli
atgctggatctgccgaaactgtgcggtattgcccatgcacacaatattccggtagccgttgataatacctggggctctgcttggttatacaacccgctggagctgggggcggatatttctattatcgctgcaaccaagtatctgagcggtcactctgacgtcatgatgggcattatggtggcaaacgagaacgcatggaaaaagataggcgctctccctgaggcaatgggtcagattagtagtcctgacgatgtgtctctcgtactgcgtggaatcagaacactgggtacccgacttgctgctcatggacaaagtgcaatgaccgtagctcagtggttacagaatcgtccagaggtggagaaagtttattttccgggtctagaagaccatcctcgacatgatttgtttaagcgtgactgtaaaggacttaacggtctgttgaccattgaactgaaatctcagtatacccagaaaaatgctgaagccttcattgatgcgctggagctttttggtataggtgcctcttggggcggttttgaaagtcttgtattacctgccaatgtgaagggtgctcgttctgcaactgactggaaccaacatggtcagtttattagattccatattggccttgaagatataaatgatctactggccgatctgacccaaggactaaataaactgaatgcctga

SEQ ID NO: 30156 - DNA, 162 bp, Escherichia coli
atggttgaaagaggtgataacagcggtgttcatcagtatggtccagctgaacatttactcacattatatctgacaaaccgtccccaaaagataagtatgttgcatatgctattaacattcctgactatgaactggcagctgatgtatataatattaacgtaa

SEQ ID NO: 30157 - DNA, 375 bp, Escherichia coli
atgaattattgccttaacgtggttttttacacgattgaacctcgaacccctaaaccaaaagccattgaaagtgaggggacggttgattccattacaaccaatgaaatcaatgagtttttaacgacgttcttcaagctctatcctacagcgacagccagtgaactttcctactatgtgaatgacgggatattaaaaccaatcggaaaagagtacatctttcaagaactggtaaatcctattcacaatcgtaaggataatcaagtcacggtatcgctgacagtggagtatatcgaccagcagaccaaagcaacgcaggtatctcaatttgatttggtacttgaaaagaacgggagtaattggaagattgtaaaataa

SEQ ID NO: 30158 - DNA, 1920 bp, Escherichia coli
atgaaaattattaatattggagttttagctcatgttgatgcaggaaaaactaccttaacagaaagcttattatataacagtggagcgattacagaattaggaagcgtggacaaaggtacaacgaggacggataatacgcttttagaacgtcagagaggaattacaattcagacaggaataacctcttttcagtgggaaaatacgaaggtgaacatcatagacacgccaggacatatggatttcttagcagaagtatatcgttcattatcagttttagatggggcaattctactgatttctgcaaaagatggcgtacaagcacaaactcgtatattatttcatgcacttaggaaaatggggattcccacaatcttttttatcaataagattgaccaaaatggaattgatttatcaacggtttatcaggatattaaagagaaactttctgccgaaattgtaatcaaacagaaggtagaactgtatcctaatatgtgtgtgacgaactttaccgaatctgaacaatgggatacggtaatagagggaaacgatgaccttttagagaaatatatgtccggtaaatcattagaagcattggaactcgaacaagaggaaagcataagatttcataattgttccctgttccctgtttatcacggaagtgcaaaaaacaatatagggattgataaccttatagaagtgattacgaataaattttattcatcaacacatcgaggtccgtctgaactttgcggaaatgttttcaaaattgaatatacaaaaaaaagacaacgtcttgcatatatacgcctttatagtggagtactacatttacgagattcggttagagtatcagaaaaagaaaaaataaaagttacagaaatgtatacttcaataaatggtgaattatgtaagattgatagagcttattctggagaaattgttattttgcaaaatgagtttttgaagttaaatagtgttcttggagatacaaaactattgccacagagaaaaaagattgaaaatccgcaccctctactacaaacaactgttgaaccgagtaaacctgaacagagagaaatgttgcttgatgcccttttggaaatctcagatagtgatccgcttctacgatattacgtggattctacgacacatgaaattatactttctttcttagggaaagtacaaatggaagtgattagtgcactgttgcaagaaaagtatcatgtggagatagaactaaaagagcctacagtcatttatatggagagaccgttaaaaaatgcagaatataccattcacatcgaagtgccgccaaatcctttctgggcttccattggtttatctgtatcaccgcttccgttgggaagtggaatgcagtatgagagctcggtttctcttggatacttaaatcaatcatttcaaaatgcagttatggaagggatacgctatggttgcgaacaaggattatatggttggaatgtgacggattgtaaaatctgttttaagtatggcttatactatagccctgttagtaccccagcagattttcggatgcttgctcctattgtattggaacaagtcttaaaaaaagctggaacagaattgttagagccatatcttagttttaaaatttatgcgccacaggaatatctttcacgagcatacaacgatgctcctaaatattgtgcgaacatcgtagacactcaattgaaaaataatgaggtcattcttagtggagaaatccctgctcggtgtattcaagaatatcgtagtgatttaactttctttacaaatggacgtagtgtttgtttaacagagttaaaagggtaccatgttactaccggtgaacctgtttgccagccccgtcgtccaaatagtcggatagataaagtacgatatatgttcaataaaataacttag

SEQ ID NO: 30159 - DNA, 801 bp, Escherichia coli
atgataagtttatcaccaccgactatttgcaacagtgccctacaatctaatactagtgatcttaagccagatgtcctctcaaccgacacccatggtgttaatcatgttaattatgccttattggatttatgcggttatagttttgcgcctaggtatgctcagttcaccagtgtgatcaatgacctatttaacgtaactgaaagcgacgacggaaacacgcatctggcgctgaaaaagccgataaaaatgaatgtgattgaagaaggctggcaggatattcagcgtattgtgttatcccttcaagaaaaacgcacaacacaggcattgctagtacgcaaattatctggttatccatctagacaccctatattacaagcattaacggaatataataggctcatcaaagcccaatatttacttgattatattgatgatgcaagtctgcgccaatatgttcaacgagcactgaaccgaggcgaagcctggcatttcctcaggcgagctattgcatcggtcaatcgtgaccagttccgtggaaaaaacgaatcagaaatagtcgtctggaacgagtgtgcccgtttgacggcaaatgctattatctactttaactcgatgatcctaagtcatctattactgcactttgaagaagttggtgacgaggaaaaagcagcaataactcgacaagtatcacccgttgcatggcagaacattaatctgagcggcacttatcagttcgctagtaaccgcaaactacctgatttacaggaaataactaggcctattgttgaaaatgaagtctaa

SEQ ID NO: 30160 - DNA, 267 bp, Escherichia coli
gtgatcctggagtacagcaaactggaaaaaatcgaaaagtattacgaaaaatacgcaaacgcaggcaccaatgagtggcacatcgatgaaagtaaaaaagctaccgcaaccatgaatgtagttctgggtgatgaagataggttaaaatccctcgcggaagattttgccagacattatgaaaaacgcgtagccgaaggtttcaccgtaaaaggcaagaccatgtttgtgccagccgtgaaattgcctagggttctaccgtcaccttga

SEQ ID NO: 30161 - DNA, 1113 bp, Escherichia coli
atgaaaatcactaaactcactacctttattatgcatgtaccggtaactaaaaatattatcggtgactccacacacagcattactcattggggaatgccgggcgtaatgatcgagacagataccggccttgtaggttacggttataccggaacccatgcagacattactaccgaccgtcttatcaccaccattattaaagatgccttcggcccgatgttgattggagaagacgccagtgaagttcgctatctccaccgtaagatgtcacgcagctcgaccaatatctgggtgggccgcggtgggttaatgcaaatggcgctttcagcaatcgatatcgccctgtgggacctgaaagccaaaatggtggagcaacctttgtggaaagtctttggcggttctcaacattcccgtgttcttgcctacaacaccgactgcggctggctggttcgtaacacggcggagttagtggatgactgcaagaagatgatttttgaggagggattttccgccatcaagatgaagataggcaagcccgatccgcgagaagatctcaaacgaatcgaagccgtcagaaaagcgataggcgatgacgtcaatctgatggtcgacgcgaatgcaaaatgggacatcagcactgccaagcagtacggtgccaagctggctgatttcgatattacctggtttgaagagccgatgtggcatgatgatatcgcaagtcaccgcacgctgtccgggcatatcagtacgccgattgcgttgggtgagttactctatcagtttgattcctttaaagagtttgtactggccggtgcggtggattatctccagcccgatgccactcgctgcggtgggctgaccgccgtatgggaaatagccgatctcggtcaggcgttcaatctgccggtcacaccacatcatggtgatatgatgcaggcacaattacatctggtaatggcacatccctcttgctctctgttggagtttattccctggacgctgggctgctttgtcgatccggttgaggtcaaagagggatattactctcttcccaccgcgccgggtgccggcactaccttacgcccggaagctcttgagcactttagcgttagatga

SEQ ID NO: 30162 - DNA, 1368 bp, Escherichia coli
atgcccagccataccgatcagtatttatcacttgcaattcaaaaatccatacgtcgcatcattccgatggtcatactaatgtttattctggcctatctggatcgctccaatatcggctttgctaaacaagaatttcaactggataccagtctgagtgacaccgcctatgctttcggcgccgggatcttctttattggttatgccctgttcgaggtgcccagtaatattctgctttatcgcatcggcgcccgtgtctggctggcccgtatcatggtgacctgggggctggtttccgctgcaatgatgttcgcccacactgagaccgtatttattttcctgcgcttcttgcttggcatcagtgaagcaggtttctttcctggagttattctttatcttacattctggttcccccagcacatccgcgcacgcgtcaccggctatttcctgtttggtgccccactagcttttatcatcggcggtccgctttccggctcgctactctcgcttgaaggatcggtactgtcgtttggtctccatggctggcaactcatgttcctcgttgaggggttactggcctctgccgttgggatctgggtgttcttctatcttgacgatcacccagagaaagccaaatggttaactccacaagagaaagcggcgcttagccagactctaaataaggaagagcaggtgaaacttgcacatggtccaaaaggcgcatggcaagcactgctggatgtacgcgtcctctatttatgcctgatctggtttacggtgcaggtatgtggttatggaatttacttctttctgccaacacaaatcgccaccttaatagggacaaaagttggtttattagttggcttcgtcaccgctattccacctttgtgcgctgccatcgcagtgtattacgtaccacgtatatcggaaaaactgcaggaacgtcgttacgttgcatcaatcacatttatgtccggtgcaataggcattgccgtatctggccttgccgatagtattccactggtcgctattgtcgcgctgtgcgttgccgctgcaggacatctggcgatgcagccactgtactggacatttccatcgtcttatctcggcggtgcagcagctgcttccggcattgcgttaattaactcgataggcaatctgggggggtttgtagcgccgaatcttcgcgtctgggcggaacatacttttaattccgcacaggcaggactttacttactggcaatggtaacagctactggtagcctgatgattctgacattacgtcacttcgggattgaaaaaacgccccgtacatcatccacatctccgaatctccctgccagcggggataatctgcatcactctgattga

SEQ ID NO: 30163 - DNA, 744 bp, Escherichia coli
atggttaagatattggccgtagcacaatcacatgaatcgatagtttctatggacgagatcaatagtatccttcttagtagtagttggtttcgggcgctacctgattatcttattgaacagatgttgtccaggaccagcctgtatcaatacaacgatggagagattattcactatcgtggtgctgagccgctcggattatatgcagtcattactggctccgttaaagtgagctcaatttctgctgacggtaaagagtgcatcttccgctatctttcgccggggaactggtttggtgaaataggtatgattgataaatgtccgcgcacacacgatgccagagcgacgggtaaaactacactgttaacgatcaagcctcatgatgttgaatttcttctgaaaaattatccaattctccatcgttttctggcgttgctgctttgcaaagtcgttcgaaatgcctttacgatgttacatgactgtacgctattatctgtttctgcacgcttggcgaagcgtttagtgagtctgtcggaagggtacggcgaaccacacgagcgagggacattaatcaatctttatcttacgcaggacgatctggcaacgataatcaatacgagccgacaaacgatcaacaaacggctggttgaatgggaaaaattgggatggatagacgccagatatggcaaaatcgtgatcatcaatataaatgcactcaggcagttatatgctgatgaagatgagtaa

SEQ ID NO: 30164 - DNA, 186 bp, Escherichia coli
atgctgatgaagatgagtaattggctgtggatgagcctgtttaccattctgtatacatgctttttcttaaaagtgactgtccaggcggtcatcaaattcgataataaattgctattcgccagtccctctgcggcattgtccatttctgcgacgcgaccaggatgccagccatttcacttttactga

SEQ ID NO: 30165 - DNA, 243 bp, Escherichia coli
gtgttgctcttgggcgcggggtcttcacttaatgaagcgatcatcgatgtccatgatgaggacggtgtgattgtgtggagtttcaaaatcggcatcgtgttcgacggcaccgtcgatctgacgctgaatgacgacgacaccaacaagcttcgtgaaactgtgaaggcaatgattcgagaaactggctatctcgaaccattagaactgggaaaaatcaactacaacttctcggagtttgcatga

SEQ ID NO: 30166 - DNA, 570 bp, Escherichia coli
atgacctatcagttggacgtgagcaaaattctgtcgtttgacctggaggccatcgttgctgctactgagaacggcggcatcggttacaaaggtgacctcccatggcgtctacaaggcgatctgaagcgttttcgcgaaatcacccaaggcggtatagtcatcatgggtgcaggcacgtataagagcctcccaagtcctctgaaagaccgcatcaatatcgtcatcaccaagaagtcagagatttcttggacggcttgctatgacgtgcgtgtggtcaacagtccagaagacgctttgcgcatggttggtcgcattatcgacgagaaagaagagcaaggtcgtgatcgacctcgtgtattcgttatcggcggggcttcgatctatcaggcactgatgcctttcgtttctacgctccactggactgaggtgcatgttgaacaactgccagaggaaatcggtctcgatacgtatatcgaagacttcctttctctgcgatgggacttctacaccgaagagaaagtcgaatctggttttaccacccacacctaccacaccctgaaaaggaactag

SEQ ID NO: 30167 - DNA, 282 bp, Escherichia coli
atgatccaagagaaagacaagaaggcgttgctcggactgcgtaaagatctcagcgatcagcgtctcgaagaacgcaaggcgtgtgccaaatccatccgtgaaaacacggagtggacaacggagcgcaacggcaatgtgaagaaggtcatcgtcgtcggtgtccgcaatagcaaggtcgtcttcaaggaagatctttcccgtgcagactcggcgagcctctctgtggagaagttcctgaagttctacaagccgcttcccgaacaagaagaagcttgtgcttga

SEQ ID NO: 30168 - DNA, 402 bp, Escherichia coli
atgttgaataacggcatggtgaaggatattgttactaatctcctgtacttctatgccggtagattcagctcagcgatcgccttggacgacgtgaagaaaaacatcgagttttatcaggatgcgaacatggtcttcttcgaggggacttatggtcgagatggagcgctggtcattgttccagaaaacatctatgaaaagaaaccatacatcacccgagccatttctgcgcgtagagagatcgacaaagacgactcgtactacaccgtccttgctgccttgatcagaaacatcgtttttaatcttcgtacagctccagacgagataatggtgagagaacagcgggttatcaatacgctgccgatagtaatcgtctggcgacgtagtgggtatcgacaagtttga

SEQ ID NO: 30169 - DNA, 588 bp, Escherichia coli
atgagccatcaactcaccttcgccgatagtgaattcagcactaagcgccgtcagacccgaaaagagattttcctctcccgcatggagcagattctgccatggcaaaacatggtggaagtcatcgagccgttttatcccaaggcgggcaatggccgacggccctatccgctggagaccatgctgcgtattcactgcatgcagcattggtacaacctgagcgacggtgccatggaagatgccctgtacgaaatcgcctccatgcgcctgtttgcccgattatccctggatagcgccctgccggatcgcaccaccatcatgaatttccgccacctgctcgagcagcatcaactggcccgtcaattgttcaagaccatcaatcgctggctggccgaagcaggcgtcatgatgacccaaggcactttggtggatgccaccatcattgaggcacccagctctaccaagaacaaagagcagcaacgcaatccggagatgcatcagaccaagaaaggcaatcagtggcactttggcatgaaggcccacattggtgtcgatgccaagagtggcactgttgcaaatagtcggtggtga

SEQ ID NO: 30170 - DNA, 627 bp, Escherichia coli
atgaaaaagatttggctggcgctggctggtttagttttagcgtttagcgcatcggcggcgcagtatgaagatggtaaacagtatactaccctggaaaaaccggtagctggcgcgccgcaagtgctggagtttttctctttcttctgcccgcactgctatcagtttgaagaagttctgcatatttctgataacgtgaagaaaaaactgccggaaggcgtgaagatgactaaataccacgtcaacttcatgggtggtgacctgggcaaagatttgactcaggcatgggcagtggcgatggcactgggcgtggaagacaaagtcactgttccgctgtttgaaggcgtacagaaaacccagaccattcgttcagcatctgatatccgcgatgtatttatcaacgcaggtattaaaggtgaagagtacgacgcggcgtggaacagcttcgtggtgaaatccctggtcgctcagcaggaaaaagctgcagctgacgtgcaattgcgtggcgttccggcgatgtttgttaacggtaaatatcagctgaatccgcagggtatggataccagcaatatggatgtttttgttcagcagtatgctgatactgtgaaatatctgtccgagaaaaaataa

SEQ ID NO: 30171 - DNA, 780 bp, Escherichia coli
gtgatcgccgaagtatcgactcaactatcagaggtagttggcgtcatcgagcgccatctcgaaccgacgttgctggccgtacatttgtacggctccgcagtggatggcggcctgaagccacacagtgatattgatttgctggttacggtgaccgtaaggcttgatgaaacaacgcggcgagctttgatcaacgaccttttggaaacttcggcttcccctggagagagcgagattctccgcgctgtagaagtcaccattgttgtgcacgacgacatcattccgtggcgttatccagctaagcgcgaactgcaatttggagaatggcagcgcaatgacattcttgcaggtatcttcgagccagccacgatcgacattgatctggctatcttgctgacaaaagcaagagaacatagcgttgccttggtaggtccagcggcggaggaactctttgatccggttcctgaacaggatctatttgaggcgctaaatgaaaccttaacgctatggaactcgccgcccgactgggctggcgatgagcgaaatgtagtgcttacgttgtcccgcatttggtacagcgcagtaaccggcaaaatcgcgccgaaggatgtcgctgccgactgggcaatggagcgcctgccggcccagtatcagcccgtcatacttgaagctagacaggcttatcttggacaagaagaagatcgcttggcctcccgcgcagatcagttggaagaatttgttcactacgtgaaaggcgagatcaccaaggtagtcggcaaataa

SEQ ID NO: 30172 - DNA, 1557 bp, Escherichia coli
atgacaagtattcaacaacgagcagaactgcaccgccagatatggcaaattgccaatgatgtcagaggttctgttgacggatgggattttaaacagtacgttctgggcgcgcttttctaccgttttatcagcgaaaatttttccagctatattgaagccggtgatgacagcatctgttatgcgaaactggatgacagcgtaattactgatgacattaaagacgatgccatcaaaaccaaaggctacttcatctacccaagtcagcttttctgcaacgtagctgcgaaagcaaataccaatgacagactgaatgcagatttaaacagtatcttcgttgctatcgaaagctctgcttacggttacccttcagaagctgacatcaaaggtttgtttgctgatttcgataccaccagtaaccgcctgggtaacaccgttaaggataaaaatgcccgcctggctgcggttctgaaaggggttgaagggttaaaacttggtgacttcaatgaacatcagattgacctgtttggcgatgcctatgagttcctgatttctaactatgcggcgaatgccggtaagtcaggcggcgagttctttacaccgcaacacgtctccaagctgattgcacaactggctatgcacgggcagccccacgttaacaaaatctacgacccggcagcaggttccggttcgctgttgttacaggctaaaaagcagtttgataaccatatcatcgaagaaggctttttcggacaggagatcaaccatacgacctataacctggcacgtatgaacatgtttttgcacaacatcaactacgacaagtttgatatcaagctgggcaatacactaactgagccgcacttcagagatgaaaaaccgtttgatgccatcgtttctaacccgccgtattcggtgaaatggattggcagcgatgacccgacgctgattaacgatgaacgttttgccccagctggcgttctggcccccaaatccaaagctgactttgcgtttgtactacatgcgctgaactatctttcagccaaaggtcgtgctgcgattgtctgcttcccgggtattttttaccgtggcggcgctgagcagaaaatccgtcagtatctgatcgacaataactatgtcgaaaccgtgatttctctggcaccgaacctgttctttggcaccaccattgccgtcaatattctggtgctgtctaagcataaaacggataccaaagttcagtttattgatgccagcgaattgttcaaaaaagagactaacaacaatatcctggccgatgctcatatcgaacagattatgcaggtattttccagcaaggaagatgttgcccatctggcgaaatctgtcgcgtttgaagccattgtagcgaatgactataacctgtcagtgagcagctatgttgaaacgaaagatactcgcgaaattatcgatatcgctgagctgaatgctgacctgaaaaccacagtcagcaacatagaccagttacgcaaagatattgatgcgattgtagctgaaattgaaagctgcgaggtgcagaaatga

SEQ ID NO: 30173 - DNA, 471 bp, Escherichia coli
gtggggattgtcgggagtatcggcagcgccattggcggtgctgccagtggtggagcatccgcgtcaggcggtacagccattcaggccgctgcggcgaaattccattttgcgaccgggggatttacgggaaccggcggcaaatatgagccagcggggattgttcaccgtggtgaatttgtcttcacgaaggaggcaaccagccggattggtgtcggcaacctgtaccgcctgatgcggggctatgcggaaggtggttatgtgggcggtgccggaagtccggcgcagatgcggcgggctgaaggcattaattttaatcagaacaatcacgtggtgattcagaacgacggtacgaatggtctgccaggtccacagatgatgaaggcagtgtatgacatggcccgcaagggtgcccgtgatgaaattcagacacagatgcgtgatggtggcctgttctccggaggtggacgatga

SEQ ID NO: 30174 - DNA, 1227 bp, Escherichia coli; identical to SEQ ID NO: 24498

SEQ ID NO: 30175 - DNA, 687 bp, Escherichia coli
atgattaatcctgcgaatggcaacacaaagccgatgtttgttggtcagggcgatcagatattcatgaacgaagtgttcctgaaacgcctgacggctcccaccattaccagcggcggtaatcctccggcattttccctgacaccggacgggcgactgacggcgaaaaatgccgatatcagcggtagcgtgaatgcgaactccgggacgctcaacaacgtcacgattaacgagaactgtcgggttctgggaaaactgtccgcgaaccagattgaaggcgatctcgttaaaacagtgggcaaagctttcccccgggactcccgtgcaccggagcggtggccatcagggaccattaccgtcagggtttatgacgatcagccgtttgaccggcaaattgttattccagcggtggctttcagcggtgccagacatgaacgggagaatagcgatacttattcgtcatgccgcctgatagtgaagaaaaacggggctgaaatttataaccgaacggctctggataatactctgatttacacgggtgttattgatatgcctgcaggcagtggcgtaatgacactggagttttctgtatcagcatggtgggtaaatggctggtatcccacagcaagtatcagcgatttgctggttgttgtgatgaagaaagccactgcaggcatcacgattagctga

SEQ ID NO: 30176 - DNA, 687 bp, Escherichia coli
atgattaatcctgcgaatggcaacacaaagccgatgtttgttggtcagggcgatcagatattcatgaacgaagtgttcctgaaacgcctgacggctcccaccattaccagcggcggtaatcctccggtattttccctgacaccggacgggcggctgacggcgaaaaatgccgatatcagcggtaacgtgaatgcgaactccgggacgctcaacaacgtcacgattaacgagaactgtcgggttctgggaaaactgtccgccaaccagattgaaggcgatctcgttaaaacagtgggcaaagctttcccccgggactcccgtgcaccggaacggtggccatcagggaccatcaccgtcagggtttatgacgatcagccgtttgaccggcagattgttattccggcggtggcattcagcggcgctaaacatgagcggaagaataacgatatttattcgtcatgccgcctgatagtacggaaaaacggtgctgaaatttataaccgtaccgcgctggataatacgctgatttacagtagtgttattgatatgccagctggtcgcggccacatgacgctggagttttcggtgtcatcatggctggtaaatgactggtatcccacagcaagtatcagcgatttgctggttgtggtgatgaagaaagccaccgcaggcatcagtatcagctga

SEQ ID NO: 30177 - DNA, 429 bp, Escherichia coli
gtgctcatcatactgccactgctctgccgggtcgccgttcaccgtccggtgcgtgatgcggtctgcttcatcgtagtaccactgcgtgacctgcccctcatcctcgctgcggatgagctgccctgtggcgctgtaccggtaacgctgtgtcctgccatcaaagccgcgctgctccgtcaggcggtccagcacatcgtaggtaaattcactccggctgccgttctcgttggtcagcgtggtgacacgtcctgccgcgtcatactccatactgcgcgtcagcccgccctgcgtggtgctgaccgcttttccccacgcatcgtactgtgtctcgctccggttgccgtccggggtgataacggcagtcaggtcgcctgcggcgttgtactcatactgcgtttcacggccctgtgcgtctttcaccgaggttaa

SEQ ID NO: 30178 - DNA, 492 bp, Escherichia coli
atggtcatttcacctataacgctgaaagcggcgcaggaatttatcgcacagcaccaccgacacaataaaccaccagtggggcataaattcagcattggtctgagaaataatgccggagaattgataggtgtggcgacagctggtcgacctgttgcacgacatttggacgatggattaacgcttgaagtaaatcgcacatgtaccacaggagaacgcaacgctaacagcgcgctttatggtgctgtctggcgggcagcaaaagctatgggttatcaacgttgtattacgtacacccaggcagatgaatcaggagcatctcttcgcgcagctggttttgttcgtgtgaaagagcttcctccaagaaaaagctgggcggaatcaagcgtcgccctgcggagtaaacgcgatccggtcggaaacggtggtgttcctcgtgtgctctgggaaatcaggagaatgagtaccactggcattcgcatcaaaggagagtga

SEQ ID NO: 30179 - DNA, 480 bp, Escherichia coli
atgaaaatcgtacattacgaagcgaatgcaccatggataggaagaatgaaatgcccaaacccaaagtgtgggaaggaaactcctgcctggcaatcgagcggcatgagcgacagttgcccgcattttttctgtgatacttgctcgaatgtaatccatagagagcaggaccatgcattactgtatgaaaatgaaatcaatcaagagctcttggatcgaatagcagcaactcttccagattgcccttgcgggggtaggtttgttcctggtgcaaacccaaagtgtccgagttgcaagaccgagtacgtgcaccaatgggatgcagtgaaaaggttgaatgtaccttttatgccaatcttggatggttcctgcttgattcgagataggctgtattcgtatgaagtatgcattggttctaaaccaaaatactggtggcgtttgttcacaaatgccttaacaagtttaggcaagggacgctcctga

SEQ ID NO: 30180 - DNA, 201 bp, Escherichia coli; identical to SEQ ID NO: 5078

SEQ ID NO: 30181 - DNA, 339 bp, Escherichia coli
atgcagttcctcatgattattagccatgacgatagtttccggcctaccgaatccttgattgaaaatattcatgcttggatcgtcggcatggagcagaagggcattcgtgtatacggcaatccgctccagccagcttccgatgcagtaaccgtgcgaattcgtaatggtgaggaaaatatcgccactgggcctttctctgactccaaagagcaaatgtgcggctatgaactgattgaatgcaaagaccttgatgaagcagtcagacttgcatcgaagcaccccatggcggaagcagcgacgatcgaggttcgacccgtctgggctcagctagcaaagtag

SEQ ID NO: 30182 - DNA, 348 bp, Escherichia coli; identical to SEQ ID NO: 6026

SEQ ID NO: 30183 - DNA, 423 bp, Escherichia coli; identical to SEQ ID NO: 4705

SEQ ID NO: 30184 - DNA, 180 bp, Escherichia coli
atgcgcaattctacaaaattgcgcatttcactactagtctggagtcggcccggatatgagccgcaactattgcaaataaagaaattaagctggaaggcatcacgcaatgaggaagattgccgggtgctgacggcaaaaagcaatcgtaaaatcagcggcaagccggaagggttccggtga

SEQ ID NO: 30185 - DNA, 216 bp, Escherichia coli
atgtctatgccattaagcaatgcccttcagagtcaaattattacagatgctcacttccttcatcacccaatagtcgacagtgagtttacacgtaaattaaaatatgcacgcatggattcggaaaacatctatcttccgcctcttactcgtggcaataaccataattacgatggaaaaagcgttgtcgaaattagaaaacttgatattagtaaatag

SEQ ID NO: 30186 - DNA, 282 bp, Escherichia coli
gtgactcaccatctcggtcagccaatccgggttgattacctcgacatcattattgaccaagccgataatggcccccttggcgtgacgaacgccaaagttgttgatggccgagtagttaaaggggtggtcatagcgcaatactctgacccggctgtcttcctgctggatctgggcaaagaaatcgagagtctcctgctccacgctgccattatcgagaatcaggatctcgaaatgggtatagatactgcgatcgatgatgctacgcaccgcagtttcggttag

SEQ ID NO: 30187 - DNA, 720 bp, Escherichia coli
atgattcgaaaaaagattctgatggctgccatccccctgtttgttatatccggggcagacgctgctgtttcgctggacagaacccgcgcggtgtttgacgggagtgagaagtcaatgacgcttgatatctccaatgataacaaacaacttccctatcttgctcaggcatggatagaaaatgaaaatcaggaaaaaattattgcagggccggttattgccacccctccggttcagcgccttgagccgggtgcgaaaagcatggtcaggctgagtaccacaccggatatcagtaaacttcctcaggacagggaatcactgttttattttaatctccgggaaataccgccgaggagtgaaaaggccaatgtactgcagatagccttacagaccaaaataaagcttttttatcgcccggcagcaattaaaaccagaccaaatgaagtatggcaggaccagttaattctgaacaaagtcagcggtgggtatcgtattgaaaacccaacgccctattatgtcactgttattggtctgggaggaagtgaaaagcaggcagaggaaggtgagtttgaaaccgtgatgctgtctccccgttcagagcagacagtaaaatcggcaaattataataccccttatctgtcttatattaacgactatggtggtcgcccggtactgtcgtttatctgtaatggcagccgttgctctgtgaaaaaagagaaataa

SEQ ID NO: 30188 - DNA, 1605 bp, Escherichia coli; identical to SEQ ID NO: 16925

SEQ ID NO: 30189 - DNA, 213 bp, Escherichia coli; identical to SEQ ID NO: 11009

SEQ ID NO: 30190 - DNA, 570 bp, Escherichia coli; identical to SEQ ID NO: 11008

SEQ ID NO: 30191 - DNA, 732 bp, Escherichia coli; identical to SEQ ID NO: 16923

SEQ ID NO: 30192 - DNA, 654 bp, Escherichia coli
atgaagaaagaagatggcatctcaaaatataagctcaacaaaatagccaccgaatcgttaagaaatactatacgacttcattttgactctattttactctatagaaatggatcatatcccagcgcatttcagctttccgtgttagctcttgaagagttttcaaaggctaactgggtggatcactatatctggacatctgaaacaaatgaaggctatccaaaagcagattttgagcaggaatggcttaagctcctatatcaacatcctaaaaaacaatggaattttgtagcaagagaaacaaatgattattcaccaaaatttatatcattaatacaaagtagaaaactggaagaaaaaaaacaaaactctatatatgttggactatctcgtagcaaggggaaaatagatacagacagtagaatatccactccttggagaataaaacaaggagatgcaaaggaaattatttcaataatcaatgatgagttaataaaaatatgtaaaagaattgaagaagatgaattctactttgaaggagggaaaaacatggacgatgtattcgattacaaaatttataacaacctattaaaatggccacacaaaagtggaataaaaaacgaagggtggagaaatagaaatttcccacaaaaataa

SEQ ID NO: 30193 - DNA, 897 bp, Escherichia coli
atgccggcctttgaatgggttcatgtgcagctccatcagcaaaaggggatgataagtttatcaccaccgactatttgcaacagtgccggtaaaaccaacctctgtgttgccgtccgcgaaacccagggcaaaggcgtgatgccggacggcaccagccgtttttcgtataacggtcagccgctctatcactatatgggctgctcgacattcagcgaatataccgttgtggcggaagtatcactggcgaaaatcaatccgcaggccaatgcggagcaggtttgcctgctcggctgcggcgtgaccaccgggatcggcgcggtacacaataccgcgaaggtacaggaaggggattctgtggcggtattcggcctcggcggtatcgggctggccgtggtgcagggcgcacgtcaggcaaaagcggggcgcatctttgccatcgataccaatccatccaagtttgagctggcaaaacagttcggcgccacagactgcattaatcccaatgattatgacaaacctgttcagcaggtgctggtcgaaatgaccaaatggggtgtggatcatacctttgaatgtatcggcaatgtcaatgtgatgcggtcggcgctggaaagtgcgcaccgtggctgggggcagtcggtaattatcggggtggcgggtgccggaaaagagatttcaacccgtccgttccagctggtgaccggccgggtctggaaaggcacggcgttcggcggcgtgaaagggcgtacccagttgccgggaatggtggaagatgccatgagcggcaaaatcgagctggcgccgtttgtcacgcacaccatggaactggataaaatcaatgaagcttttgatttgatgcacgacggcaaatccatccgcacagtcattcattactga

SEQ ID NO: 30194 - DNA, 798 bp, Escherichia coli
atggaaaataaaatatcaaacggcaagccagctccagctccagctactgtagagatttgtgtcgctaaagttgttattactaataaatttaaagagatgatattacgagcacacaaagcccaagaaaaagttcttgagattcgcgaacgttctcttgagggttgggataagggggggaaggaaaaagagataagcgagttttataaaatatttggcaccaaaggtgataaattgataggagatgatgatgaaactaaacagactgcattgttaataatgcaagatggtatcaagaggattaaaacaattcataatcaaatgttcagatatgatgaggatggagtgttcacttgctattatattaataatacgatatgtgggaatttcactgccagagttaatgaattcattgataaagattatcatatttttatagctggaaagtttaaggacaaaccattgtgtggtgttgattctcaggtttcaacgctgtgtcatgaaatgtctcatttttgtaagaccggcgcaggtggtattggtggtggaatgagcacacatgatatgaatgcgcaagggaaaccggcatttatgagtagtgatgctcatttggctgctgcaaaaaaaatggttagtcaacacagtcaggccgttttcaggagtgcttataatgttgagaaatattttcagatagctctgaatgaagagattctaatagatataaataaatctgtggaagaggacatgagtaaggatttaaaaattaaaattgataataacccccccccaccacccaagtaa

SEQ ID NO: 30195 - DNA, 861 bp, Escherichia coli
ttgtatacatttagtaaatttattaattatgcaattttttgtttcttattgctgttttcacttaattcaattgccgatgacttactgatttttaagaagtatggttatggttatggggaaagtagaatagtaactgactcaccttttttttatccattacgtgatgatgagaagtatgttttcctctcaccaggatacttattagatgataagaaaaataaaaagctacagtctgaaaccaacatgtttatccgtttatttgcagagcaaaaatctaaaaaagaagttgtaatgactatagagcttgaaaataaaagccaccattcattctatcttcctgatatttttctgactttttttaaaaaaaataaacaagacatggtatatacctcatcatgtaaacaagactttcttattattactgataactcaagactggattttctgggttcattttgtaatggctatgatgatgatcctgattcaggaaactggttcgagattaaatccggggaaaagtatgttgtcagtatttatttgaataaatctttatatgcttttccgccgggtttacggcgttacaaggtaggtactcttgaatatccgtttgtcaatgaacaatggcttgttcggcagcgcatctataaaaaaatgtttaatctattgagccagaaatacacatgcttctttaataaagataatagccacatcgaaccagataattcatgcttaggtgataataacgacgatggaattaaaggattactgctaaatcttgatatgtcgggtgaaaaacctgaagataaatttaacattagatccaatcaggtttatattgatattgatactaacaagtcatga

SEQ ID NO: 30196 - DNA, 312 bp, Escherichia coli
atgctaatcatccaaaaaactactgtttccccagactccttgcctgatgcaaaattaggtcagagttactatgcaaaaatcgagatttcaggaggagttgggcctgtacctttttttccattgaaagatttcaggcctgagaattcgggtttgactattgatgtttgtgagccagaccaaaatagttgccttattgttcagggtatccctgttgtaaaaggggcgatagtcattgaaatcggaggattctccataggtggtggtggcagaggacggtttggaaaaatatataccataaatgtatcagagtaa

SEQ ID NO: 30197 - DNA, 621 bp, Escherichia coli
atgaagaaaaaattgatcattatcggagctggtgggtttgctaaagcggtaatagatagtttggattatgatgaatatgttctcgaggggtttattgattctcttaaatcaggaatgcatcaaggatatcctatagttggtcattcattaagtgatattcgtttgccaactgattactactattttattgccattggtaatcctgacgatagagcattgtggttaagacaaatacaagatctaaatcttgacaccataaatgttattgatagaacagcaattgtttcaacgagatcctctatcggaacatgtatttatattggtaaaatggctatagtaaattgtgattcacaattagaagatggtgttgttattaataccagagccttgatagagcatgggaattatatctcatattgtacaaatgtttctactaatgtagtccttaatggtgatgtatatgtcggggagaaaagttttataggtagttgtagtgttgtcaatggacaaataaaaataggcaagtcaactattatcggctcggggtcagtggttattcgtgatattcctgataatgtagttgttgcaggtacaccaacaagattaataagagaaaggtaa

SEQ ID NO: 30198 - DNA, 1041 bp, Escherichia coli
atgagtaaagtatatattgtggcagagattggttgtaatcataatggtgattataatcttgcaaagaaaatggttgaagaggcaaaaatcgcaggggttgatgcagttaaattccagacatttaaagcagaacaattaatttcgaagtatgcacctaaggcagaatatcagataaaagttacagggaatgaggaatcccagttagaaatgacaagaaagctcgaattaccttatgaagagtttatagagcttgaagagtatgcaaaagaattagggcttgatgttttttcaactccatttgattttgaatcgattgattttttggcatcacgaaaccaaaagatgtggaaaattccttcaggagaaatacttaatttaccgtatctggaaaagatttgtcgattaccaatagaagataaaaaaattgttctttcgacaggaatggcgacgcttgatgaaataagaatatgtttagatgttcttaataaaaatggagtgttgccagaaaatataacaatattacattgtaatactgaatatcctacaccatttgaggatgtaaatttaaactcaattcatgggttaaagaaagaatttaaagaatataatattggattttcagatcattctcctggatttttcgctggaatagctgcagtgccctatgggattacctttattgagaaacattttacgctggacaagaattttgaagggccagatcataaagcatcagtaagtcctgatgaattacgcctcctatgccaagggattcgtgaagttgagaaatctcttggtagctatattaaattagttactaagtctgaacgaaaaaataaaatcgtagctagaaagtctatcgtagctaagcggaatataaaaaaaggtgatatatttacaattgataatattacgacaaaacgaccaggtaatggaataagtcctatgtattggtatgaactattgggtaaaaaagccgagagggatttcgatgaagatcaacttatcatccattcaggttttgttactcaagaggtataa

SEQ ID NO: 30199 - DNA, 1263 bp, Escherichia coli
atggcaaatcgattggctattattccggcacgttctggttcgaaaggattagctaataaaaatatactaatgttgatggggaaacctttgattgcttatacaatagaagctgccgtaaactctaaatgtttctctaaggtaatcgtttcaacagattctatagaatataaatatattgccgagcagtacggtgctgaagttttgatacgtaatgagcggcttgcaagtgatactgcaacgtcttttatggtgatagaagatgttttaaaaaaatatagaggttttgattatttcgttttgttgcaacctacttcaccatttcgaaataccaagcatatacaagaatctattgacttatttgagtcgaaggagggaataaatttcttagtgtcggtaacagagagtaataagaattcagaattaattaaaccattagatgaactgcacaggttaacaaattttggaagtgatttcagtaactatcgacgacaaaatgttaaagaatattcgcccaatggagcaatttttattgggcgtaatgatagctatttaaagaaaaaacatttttttggttctgacagtatcgcttatataatgaataaagaagattctattgatattgatgaccgaattgattttgaaatagcgatcgcgttagcaacaaaaaaactgaaacaggaactgctaataaaaaaaattaagcatcgtattgctgaaaaatttagcaagataaattctggtgcacctattacattaatcggtcattctctatttgataattgggaaattgatagtttagcagggaaaaaagttaataactatggtatcgcaggaataaatagcgagcaatactatcagtttgttttaaaaaatggaattatatcagagcttggagatgttgtttttttatactcgggtacaaatgatattgtactcgagaattggactgtagagtatactatttattggacaaccaaaataattgaagagttaaagaagataaattcgaatgttagagtttatctcttagctgtacctccagtaaatggacgagttgatcgtaacaactatattattaatgagttgaatcatttgttgttccgacatgtaaaatgcttaagtaatgtatgttgggtaccactgtcaaaagcattttatgatgaatttggtaaccttaagcattcatttactagcgacggattgcattttacaaaaaaagcatatgagcaacttcaacgagatttagaagaggtaatgaaatga

SEQ ID NO: 30200 - DNA, 213 bp, Escherichia coli
atgacgggcaaagaggcaattatttattacctggggacgcataagagcttctgtgcgcaggacgttgctgcggcaacaggtgtgatagtaacctgcataaatcaggcagcggctaaaatggcgcgtgcaggaatcctggtcattgatggtaaggtctggcgaacacggtgtattaccgggttgctaccagggaagaacgggaaggaaaggtga

SEQ ID NO: 30201 - DNA, 513 bp, Escherichia coli
atgatgacgtggatatatgccgctgttgccagtgcttgcgtgctttcttattggattttctgtagaaaaaacgccctaaaacaccaagcaaaagcggttgagatgcttagtacattccttaatgatgaaaatttatcagacaaggaaaaaaataaaatgtacctaaattacaagctaatgcggatgtggttcgcattgccattgatgctcatagcttctccattcattatcgtgttttatttagcctccagcaaaaataaacccgaggatattatcaaggagaactctgaggaatttgaccgctttttcgcagttttaatgcaaatgtacatggcaaaaaaccctataatttcaatgatatccatgacattattcggatttattttagctatatttctagttattggctctgttttgaacaaagcatcaaaaatccctaattacacgatgctgctttccggagtgatcacaaaaattgttgcactaaaattaaaagaaaagcacgctcactga

SEQ ID NO: 30202 - DNA, 1359 bp, Escherichia coli
atgcgtcagagagagcttgcagccacagctaagtccttcatgttggataggcctgatgtctcgctacaggagcttacagagcacctccggtctatggctgagcagttcctgacagacgctagtgacgattactggaatggacttgaggtcgctactttggtggacgagaagtccaacctgaaggagctagccgctacgcaagccttaagtctggaccagcagaagggcataaggttagcgcttgaagtcctgaccgcagcacagcagagggtagacactggtgatacctctggtctgattaagctgattgatgataataaccatactgattactcaactataggcgactctacgtcaattctgaagaatgagcagggggatagaccagcagttttcacacaggagccccaacctgaggtcactatcgctgaccaaccagctatctgtagtttttctgagctagtgtcctcgctgctggctgagaaggtccagaccctgaagtcatccagctacaaggacctgtcgtcctcactgaataccgtctctcggttcttacctgaagacatggacctgatgtcccgctctgagtggctggctgtcagggacgctatgctggcttctgaggtgagaccgtcgacgattaacaagctgctgactaaggcgaagatgtgtcttgactacggtctgatgaatgggcaacttgagggccgcaaccctattgaacggatgaagctgaccaaggatatcgactccaagcgcagagcgttcacagacgaggagctggagagacttctggtccgtgttgaggctgagtatcagttcacacgacacacggctcacacgacctctgaggcccgtagatgggcgtctctggtgtctgtagttactggcgctcggtctgctgaggtctgccacctgactaaacgtgacattgtaaccttagacaatggactggtctgtatcgacatcaacgaagatggggacggtaagtctgtgaagaacaagcattcagtccgacttgtgccgttgaccgatggggcctgtggtcttgacctgaagtccttcctcgaatgggtagacatgcagcctgacgagggtcctctcttcgggatgactccaagcgcatactctagctggtttaactctagggtcctgactgaggccctaggagactctcaggatgtctctctccacagtctgaggcattggctggcgacccgcatgaaagagcgtggagtcaatctggtggatgctcagggcatcttaggccatagcagtcagtccattacgtatgacctgtacgggaaaggacacgctgttggtaggctggctgaggtgctgaagacagctttactttaa

SEQ ID NO: 30203 - DNA, 171 bp, Escherichia coli
atgattattatcaccctccctaacttcagtcagacttcagtgacccaaggtctcaaccatcaagccgtatatggtctcccaccttgggtctccctacttaaagtaaagctgtcttcagcacctcagccagcctaccaacagcgtgtcctttcccgtacaggtcatacgtaa

SEQ ID NO: 30204 - DNA, 369 bp, Escherichia coli
atggcacgaccaatcgcaactcacgacaacacgttcaccaaagcctacttgcagcagcactgcggggacctgctgtcattcgatggtcagggtgacttgagtggctggctggatgatgtccttactggtgctggtcgcctgagcgaatcaatggcaagcaataccaagcctgtcagcccatacttgattctgacccaactactaacgcacgacacattaactgtaagcgctgtgcaggagtccctgagccgtaagcgtgttgccttgggtgaacctatggtttcaactcgctacgctcgctacgtctatgctgccgtcgtcagcgccagtaaatccgtccagtaccacgccagtaaagctggttcatga

SEQ ID NO: 30205 - DNA, 177 bp, Escherichia coli
atgcaccccactcctgccatgcaggcattaattgagcagatatatcatatttttcgtcgttatccggcgccgaagcaatttgtggtttgttgtgaatattgtctgagtcaacaggaacaaaaagcattacggaatacatcgttgcgagcgattccttattccttaatcaatgcctag

SEQ ID NO: 30206 - DNA, 549 bp, Escherichia coli
atggctaaagagatcagcagtgaacttctgaacaccattcttacccgggtcggcggaccgggaaatatcgccagttgtggtaactgtatgacgcgcctgcgtctgggtgtacatgacagttcattggttgatcccgatatcaaaacgctggaaggcgtgaagggcgtcattttgaccagcgatcaggtgcaggtggtttttgggccaggcaaagcgcatcgtgcagcaaaagccatgagcgagctgctgggcgaggcaccggtacaggatgccgcagaaatcgccgcccagaataaacgccagttaaaagccagacaaacttccggcgtgcaacaatttctcgccaaattcgccaccatcttcacgccgctgatccccggttttattgccgccggtctgctgctggggatagcgacgttaattgccacggtgatgcacgttccggcagatgctcagggcacgctacccgatgcgctgaattttatgaaggtgttcagcaaaggcctgttcaccttcctggtaattctggtgggctataacgcggcctag

SEQ ID NO: 30207 - DNA, 594 bp, Escherichia coli
atgaatgagaaaaaaagacaaaaatatctaaagataatgtttgaatgtcaaaagcgacttgaaacacttcatgctttatcatctggaaggattgatggcatttattttcaagtgttaattgaaatggaggcgttgcagcttaggaagctactagagctcattgcattttcatctctaatttcacatgaaaaagcatacgagaaggttacaaagaagattgatggtgtatggaaggcgaagaatatatttaaagagttggaaaagataaaccctaacttttatccagtaccaatatcaggagtaaccaaaacgggctggacgaaactaacgggaggttttttgacgaaaaaacagtttatcaagctatatgatgaatgctcaaaacatattcacgtaaggaacccatatcgggttagggaaaactcgctggggtttcataaaaaagttccagagtatttatcaagaattgaaactctactgttaaagcacattgtttctcttgccgggaatgaagaacttcttcttgtagatgtgcctcattatgaagactctgtaacagctataaaaatgagccacctcgttaaaatggggtga

SEQ ID NO: 30208 - DNA, 225 bp, Escherichia coli
atgcaaaacaaatacagtccatctatgaatacgttctttatggctgaatttatgcgtcgttacgaacaagctggtacattgcctgatgatgcaatagagatacccgatgaagtatttaaagaatacacaggggaaccaccggacggaatgatgagggttgcgggtagtgatggtctacccgcatgggcagaaattatttacactcaggaaccatcggccagatga

SEQ ID NO: 30209 - DNA, 1104 bp, Escherichia coli
gtgacggaatcgcttaagacggcccgtaatgcattaaccagagctgaacaacagctgacgcaacagaaaaacacgcctgacggcaaaacgatagtttcccctgaaaaattcccggggcgttcatcaacaaatcattctattgttgtgagtggtgatccgagatttgccggtacgataaaaatcacaaccagcgcggtcatcgataaccgtgcaaacctgaattatcttctgacccattccggtctggactataaacgcaatattctgaatgaccggaatccggtggtgacagaggatgtggaaggtgacaagaaaatttataatgctgaagttgctgaatgggataagttacggcaacgattgcttgatgccagaaataaaatcacctctgctgaatctgcggtaaattcggcgagaaataacgtcagtgccagaacaaatgaacaaaagcatgcaaatgatgctcttaacgccctgttgaaggaaaaagagaatatccgtagccagcttgctgacataaatcagaaaatagctgaagagaaaagaaaaagggatgaaataaatatgataaaggatgccataaaactcacctctgatttctacagaacgatatatgatgagttcggtaaacaagcatccgaacttgctaaggagctggcttctgtatctcaagggaaacagattaagagtgtggatgatgcactgaacgcttttgataaattccgtaataatctgaacaagaaatatagcatacaagatcgcatggccatttctaaagccctggaagctattaatcaggtccatatggcggagaattttaagctgttcagtaaggcatttggttttaccggaaaagttattgatcgttatgatgttgctgtggagttacaaaaggctgtaaaaacggacaactggcgtccattttttgtaaaacttgaatcactggcagcaggaagagctgcttcagcagttacagcatggacgttttccgtcatgctgggaacccctgtaggtattctgggttttgcaattattatggcggctgtgagtgcgtttgttaatgataagtttattgagcaggtcaataaacttattggtatctga

SEQ ID NO: 30210 - DNA, 291 bp, Escherichia coli
atgaaaatagaacttaatacaacagagcagtttatcagtgaagcagagtgttgtttcaactgttatatgaataaacgactgcgaaaccagtctgcgcatttctaccacatgctaaagaataaggaggatatgaatgaagtgattgaaaatattatccagataacaaaggtccgtttttatggagctgaaggtgaacaaaaagcggaacggatctccgggagcgttaactatgcgagagtaaagcaacatcttcgtcagctttggattgtctataagtgtgtataccgctaa

SEQ ID NO: 30211 - DNA, 258 bp, Escherichia coli; identical to SEQ ID NO: 18164

SEQ ID NO: 30212 - DNA, 270 bp, Escherichia coli
atgaaagataaaaatttcagtagatctattagcttgcagtgtcctacttgcggtactaccacactactcaatgaccaagacattgagcaagttcgctgtgctagatgcggcagagaaatgacaatgaaccgtctgatagaggagaatagcgaaaatattcattctcacgtaaatgagatacaaaaagatctagagaaagaattaataaaaaatctttctgataaattaaaaaaagccttcaaaggtaataagaatataaggattaaataa

SEQ ID NO: 30213 - DNA, 468 bp, Escherichia coli
atgacggcatctctgggtgatgtgtttggtggtttagcattttttctctcaatatatgcaacaataaaaaccatcaagttcaatgaaagacaaaaggcattaattgaagcacaagaaaaattaacaaaccttcagcttactaaagaagcaaatgaactggaaagctctaaaagagctgatgtaagcgcaaacatagtcaacattggaaataacaaatataaacttaaagtatttaataaaggtaaaagtccagcgaaaaacgtaagaatcgaatttcctgacaataactcaccagtttcaatgagtgacgttgaaagtaaattcccttttgaatctcttgttgcatatcaatcagttgacctcattgcatcaggggagttaggtagagcaagtaagtttacagtaaggctaatatgggatgacgactttcaagatgggaatgaaagcgtcgttcatgtaacatattga

SEQ ID NO: 30214 - DNA, 372 bp, Escherichia coli
atgaagaatcaaatttataaccgtcatggcatatatgaaataatcagaaatcactatataaaaaactttccttatacggttcagtttgaagctcttaatgcaataaatgagcatattagtcttattattgatgatgcatcaatacaaaaaaatgaagataacaaatacatatttataaataataacactaataaagaaactcatgacccatttgaaagtaaagaaagaaaccttgctgcttacctgtcaagatcaagtggtatcgaagcactgttccaagatgtgaatgcattacaaaaatggttgctccaatttggttttatcagtggtggtatagcgactgaaaaaatgctgattacaaataaattgtaa

SEQ ID NO: 30215 - DNA, 1140 bp, Escherichia coli
ttgcgagtactttctttacttcacgataactacagcgactttggaccaacgcttgccgcagaaaaattgcgcgaacgccataacatcacggtgtctgttgaaacgctcagaaaatggatgacggctgatggactctgggtcccatactcgcgtcgtaagccacgtgttcatcaacccagataccggcgtgactgcctcggagaacttgttcagattgatggttccccgcatgactggtttgaaggacgtgcgccgaaatgctgcctgctcgtctttgttgatgacgctactagccgcctgatgcacctgcgctttggtgagactgaatcagcctttgattacatgatggccactcgtgagtatcttgagcaacacggcaaacccctggcgttttacagtgataagcacggcattttcagggtcaataatggtggttccaccacgaccggtgttacgcaatttggccgcgtactttctgaactggggatcgggctgatttgtgccaacagtccacaggctaaaggtcgtgtgaagcgagcaaatcagacacttcaggacaggcttatcaaggaaatgcgcctcgaaggcatcagcagcattgaggaggccaatgcctggctggataccttcatcgctgacttcaatcgtcgcttcgcaagaccagcaaaataccccaaagatctgcaccgccccgtggctgaaagcaacgatgagctggatgatatttttgcctggcaggaacagcgtaagctgcctaaaacgctgacgttccgctatgacaaaatgatatatctggttgaacctacagaagaaaatactcgcatcgctggcgaaaaaataaaagtctacgactatccagatggcacgctggcattcaaatacggttaccattcactcaaatatcaggtgttcgacaaactggaatgtgtcgaccagggacaaattgttgataacaaacgtcttggtgctgttctgaagttggcgcaaagcaaaatggatgaactcgaacgcgatggtaagcgtgatcggagcaaaaagatgcctaaacgacgcgcacaagccagggttcaggagcaactcagggcaattaacccggttttggcaaatcccgaggaattcagggccagcctaaaacgctga

SEQ ID NO: 30216 - DNA, 2265 bp, Escherichia coli
atgagttttatcgctattgaaagtaatgctgtacgtaagattgtgtcagaaagaatgctgcaatcagctgattatgaaaaaggtcaaatacttgctgatgtattaaaggagcagaaaaaaggtgatttcagtatagatgtgaaagtagtaactacagcatcaggaatttatttactgactaaagaaccagataaaaaaagaatgcttgtttttgatacatctaatttcaatggttttaaaagaaacagcaatgaggtcattaccattcttcaaaaatcatgtaggctagctattaaattatgggataagattggtcatagcccctgcgaaaaaataatcagcggctcatcgctcattgccttattgcccttttcgtttacgacaggaaaatcgtataaggtcattctcgacaaagcgccagataaagaacgtcaggaaaaaagaaatgagagtagtttcttgattttttctgatggttatgaaaccactaataacactccggtattatctaacttccgcaaggctaaagacgcaataaatagtattgatacagaaaatctatttaccagtcctaaaaaagatgaagaaaaatcatcatatcttagagtaaatgaaaccgatgtatttgaaaaatcttctaacccacacatgggactggctaactggattaaaaaactgaccgaaagccaaaaaaaattcgtttttagtaatagctttggtcctgatattctcaaaggtgcagcaggttcaggtaaaaccctaagcctgatattaagatgcgtagtacaattaaataaagcccaaaaagaagataaaaaacttaaagctattttcataacgcacagtattgcaacaaaggataatatagaaaatctaatagcctcaaatggtggagttgaatatattaatagtgaaggccaacagtcagttgaagtgacaactctacaggaatggtgtattaaaaaccttggtaacaggattgaaacaactgaatatcttgacaatgatgctttcgaatcaaaacaacttcagcttttgtatatagatgaggctattgatgacttttttataaatgattatgctggtgcagtagaatttatctccccagagttaaagaagtttttcaacaatgatcgctgggaaatatcgatattacttcaagaagaaatatcgacctacattaaagggcgggctggagaggatatgaatatatatatgtcactcccaagaagtaaaaacgtattacctttgaagacagaagatgattataagactatattttccattttcaataaataccaagataaattaatttcattaaacctctttgatagtgatgatatcactttatctgcactcaaagaaacctcaacgccaatatggaaaaggaggcgaatgagcaatggatttgatataatgtacatagatgaaacacatctattcaacattaatgagcttagtttgtttcataacttactaaaaccaaactcaaatcacattatatttacaatggatcgcagtcaagcacctggtgacaacacaataaccaaagatgatgtcgctaaagaattagatgcaaccttggctcatgaacacggtttgaatgctatattccgctcatctgaacacattataaatctcgctagttgtgtattagcatcgggggcggctctttttcaagggcttgaaaaccccttagctgaatcaatgagtggtcatacatctatcgttgaagaaagatgcaatgtaccatttattatcagcaagcaaaattcacatgaggtatataaagctacatttgctctagctgactatatgtctgaaaatataggcattcaaagaagcgatgttttaatagttccatgtacagataaaatattaatggagctaaaagaatatgcattaaaagcatcgaaagaatacattagtatcgaaaaaagaggggataacattgctgtatcaaaagcagcagaagataacttatacatcattggtggtatggagtatattggagggcttgaattttctgctgtcataataatcggtgcagatgctgataagtttccagagaaaaggaattatgatggtgaatcactacactttattaactattcatcattcaataaactttatgttgcgattacaagggctaaatatcaggttgcttttgtgactgaaaaaacccagaaaataagcccattacttgaaactgcatgcgaggaaggtttgattagatatgatgatgatttagcgaacatcctgtaa

SEQ ID NO: 30217 - DNA, 777 bp, Escherichia coli
atgatagatgttactaatgataagcttttgacccaagggacgatctttaactgcgcctacaattcttcgtatcctgatgatgagacgttagggttaattattactgcccggtgtgatatttccaacaaagacaaagtgagtttttataattatataccagccatcccttttaatatttggaaagaaaaagaactattaccagtcttaaagaaaaaaacatataaggatctaagaagtaagtatttaaccttgcttcgtgaaggaggtttttccgaaagcaaccttaaaacatatggatatgaaagaattattgatatcatcaaaaataaagcatctttgccaaaatgcaaactaaaatctttacagacccaacatgaaaaaatcgaatgtttcgaaaaaaaacaaccatatgccaaactacttagttatttcaataaagagatcgaaaagtgcttgactgatattattgaaaataaaaatgcggattatttttttattgactatatttcaggttacggtcctgcaattgtcaatcttagagagatttacgaactaaatatatccacagccttaaaaatccctgatggtatagagcttaatatagaaaaaacttatcctggattgaatacatcaatagaaaatcaattctgcagtatcgttggtcatttgagatctccattcatagaacttttaatgcagcgattttcgaataattttgttcgcattggtgtagataatcacgaccataaactcttaaccaatattatggagaagtga

SEQ ID NO: 30218 - DNA, 231 bp, Escherichia coli
gtggcggttatcaccctgcaggctcagcgtcagcagcaggtctgcattgtaaaagtgcttgtcaaacagcctaatagggttatccgggatggcggcgagtatggagtgagccagcacggtttcgctccgccggtaaggcatggtcacaacattcagcaaaatgtggcttcccagattcatcaatgttaccagacgcataatcaggtaggcgctatgccgctcagtggatga

SEQ ID NO: 30219 - DNA, 144 bp, Escherichia coli
atggccttcttccgcaatgagccaattaccgatgttgttcgccgtctgaagctgagcgcggatggcaaagcggggataaacctgctgacccgcagcgtggtcacccaggcacgtcagcgcgtgggggccgccccggtggaatga

SEQ ID NO: 30220 - DNA, 153 bp, Escherichia coli
atgaatggtgttggcatttttctgatggttgtggccgtgtgtttttgtatctcgctggtggttatcgctggtgttctgtggcgcatcttagtggcgcagagagcttttcggcgtaagcgggagcaattattgattgataaatttaggcagtaa

SEQ ID NO: 30221 - DNA, 408 bp, Escherichia coli
atgcgcaccgatctagattatctaaaaaagatgctgactgtgtttttggattcagaaagcacgttcataacagtaaatcaactaagagatgcggggtttgatatagcctcagaaaagggcatgtttcattatatgcaattgattgagcaaggttttatcagcaatatgaagatggaaacgcgtgatcctctgcgtcttggctatgttaatttttttgcaggaatgaggactgttgatgtagatattagattgactacagagggacaggattttgcctgtgcactagagagcaaagatgttttcgctagactaaaagaaattagcaatgagccattggctgttatgaaggatgttggtgtagaacttctcaagtcattggcaaagaagaagtttggtttatctgattag

SEQ ID NO: 30222 - DNA, 1503 bp, Escherichia coli
atgactcaaactccactattacttgcaatcatatttttattggttgttcttgttctatatatagctgcaatcaaacgcatcaaaaaaatacaattagaattaagtgatagcaatcaaaaaaatgaagaatacaaatctcgctttgcagattattttaatgtggaagaggaatgtaagaagcttattgaaaaaacagagcaagaatgctccattataaaagaagagtcccaaaaagtaaaagaaaatgccaataatgaactaacaaacaccattgaaaaaatggatggtatcaataaacaaatccaagaactaagaagaacttataaagagaagaaagaaatatatgataaactagtaaagcaaatttctatttattcagaagatgttgaactaaccgaactaggattttacgaacctcattttaattttgaagattcagagcaatttaaaaacaaaataaaatccatcagggatgaacagaaattaatgctgcgggataaaacccactctggtgcagtatattgtacaacccaatggactgttgaaggctctcgagcagagggtaaaaaaatgacagacagaaatattaggctaactactagagcatttaataatgaatgtgatgctgcaattagtaattgcacgtggaaaaatatcactaaaatggaagaacgcatcacaaaggcatttgaggccataaataaactaaacgagcaaaatcacatatatataaatactaaataccttaataaaaaacttgaggagttgtggcttacccatgaatatcgtgagcaaaaacagaaagaaaaagaagaacaggcagaaataagggcacaaatgagagaggaggagcgtgcacaacgagaaatagaaaaggcaatgcaagacgcagaggcagaagagcgccgttataaaaaagcaattgaagctgcaagaaaggaaatggaaaaagttactggtgacatgaagcagcgcctcgaaaatcgcattgccgaactagaacagagtttgtcgcaggctgaatcaaagcatcaaagagcattatccatggcacaacaaaccaaacaaggtcatgtttatattatttcgaacataggttcttttggggagaatgtttataaaataggcatgacacgacgtcttgatccacaagaccgtgtaaatgagcttggtgatgcatctgttccttttatttttgatgtgcatgccatgatttattcggaggacgctccatcattagaaaaaaaactacatgatgtcttcgataaaaagagagtcaatcttgtaaatcgtagaaaagagtttttctatgttactctggatgagatcaaagaagctgttaaaaaacactctgattcagaaattgaatttattgagacagcagtcgcaaaagactttaatgagtcattggccattcgtaatcatgaaaataaaaaaagcgacaacagcaactcatcaattatacttgagcgaaaagtcccagagtttgcagatgcaatttaa

SEQ ID NO: 30223 - DNA, 786 bp, Escherichia coli
ttggattcccgggggaacccgaccattgaagtcgatgtcatcacccagtgtaacacttttgccagagcttccgtaccttccggagccagtaccggttcgcgtgaggccatcgaacgccgcgacgatgataaaactcactttggaggaaagggggtactcaaggcaatcgagagtgttaatacagagattaatgacagccttaaagggcatgatgtgcgcgatcaacgtggcattgatgacattatgattgccttggacggaacagaaaacaaagcacgcctaggagcaaatgctattttgggcgtatcattagccacagcgcgtctcgcagctcagttatctcatacgcctttgtaccgatatcttggcggcattggagctaaccttctgccagtaccctgcatgaatattatcaatggcggagttcatgcccgtgggcagggagctgattttcaggaatacatgattgccccttgtggagcaccgacattcagggaagccgtgcgctggggtagtgaagtatatcactcgctccgtcaggttcttctggaaaaggggatgctgacgggggttggagatgaaggcggttttgcacctgtcgtttcttctaatcgtgagccgctggaactgatcgttctggcgattgagaaagcagggtaccgtcctggtgaagacattgtcatttgtatggacccggcatccagcgagttctatcgtgatgggaaatatcatctgcgcacagagaataccgagttgacctcgcaggaaatgacgaattactactag

SEQ ID NO: 30224 - DNA, 1839 bp, Escherichia coli
atgaagagccgctttgactccgttgctgaacaaaccgggatgttttccggagatggcggcttcgatatcacggtcggcaaccacacccagctcgatggtgcggttatcgcttccacggcgacggcagataaaaacagcctcgataccgggacgctcggcttcagcgatattcacaacgaagcggattataaagtcagtcacagtggaatcagtctgagcggtggtggcagcttcggggataaatttcagggtaacatgccgggtggcatgatatccgccggaggtcacagcggatatgcggaaggaacgactcaggccgcagtggcagatggcacaatcaccatccgggacagggacaatcagaagcagaatctggcgaacctgagccgtgaccctgcgcacgctaatgacagtatcagcccgatatttgacaaggagaaagagcagaggcgtctgcagacagtggggcttatcagtgacattggcagtcaggtggcagatatcgcgcggacgcagggggaactgaatgcattgaaggctgcgcaggataaatatgggcctgttccggcggatgcgacggaagaacagcggcaggcatatctggcaaaactgcgtgatacgccggaatacaaaaaggaacaggaaaagtatggcactggcagtgagattcagcgaggtatacaggccgcgacagccgcgcttcagggactggcgggtggtaatttagcgggtgctctggccggagcttctgcaccggaactggcgcatctgctgaaatcaacagaaaaagacccggcagtaaacgccattgctcacgccattctgggcggtgcagtagcggcaatgcagggtaataatgttgctgccggtgcagcaggcgcagcaacgggagagctggcagccagagcgattgccggaatgctgtatcctggcgtgaagcagtcagacctcagtgaagagcagaagcagacgataagtacgctggcaaccgtttcagcagggctgaccggcggtctaaccggaaacagcaccgcatcagcagcagtgggagcacagagcgggaagaatgctgttgagaataactacttgagcaataagcagatagatgcctggtccgctgaaatgaagtcctgtcaggcgaaaggcggtgactgcggcggtattatcaaaaagtacgaagagttgagtacggcacagcagaagcaactgatccgtgactgtgctgccagcccggcaacctgccagcagaaatacggtgatgtactgacgaacagtctggcggtgaagctggcaatagatcgtgctctgggtgaagatatcccgatcaagatggtctacgatctgacggcaacttttgcgcagcaaatgcaggccgaaggggttgtcgcaaccaacaaagtctcggaagcactccagaaagaatacggtctggatgaagttcaggcgggaatagtcgcgagcgctgcggcgtcagcatttgggggaattggtaaggctaaagggaattcccagcctaaaattgaacaaatcctcaagccagagaaaaactgggaaactgctcgaaacaaggcattggatcttgtaggtaatttaggagcggactctaagccagttatcggacgtttggaagtcagcgctggtaatgggaaagtcatagggcggcaatccagcgacggaaaagttggttggcgtgttgattatgatcctgaaaaaggcacacacatcaatatatgggattactcacagggtaaaggccctggaaaagcggtgaagcaagtcataccttttgaaggcaatgaaaagtcttttgaaacaatattgaaacagctaaacaggtag

SEQ ID NO: 30225 - DNA, 318 bp, Escherichia coli
atgattggtcttacggcagatatgaagccggaagaagttcaggcgatggggcaggcgatgcttgttaccggaacggccaccaaccagtttgcatctgatattcaggccgctcagggttttctcgtcgctgctgggcaggattataaagaggctcaggcgaatctactaactattgggcgaacagctacagctactggctctgatatcctcgatgtctcgaaagcatcatttacattaagtgactcattgaagattgatccatctcaaatgaagtctgcaatggggattctggttcaggcagggaaagagggaaactaa

SEQ ID NO: 30226 - DNA, 198 bp, Escherichia coli
atgacccgactgcaggacgagctgcgcacggaatctgtccgcgctcaggcccgtgaacagtttaccggtgcggtggaccggatatttgacacggcggagagcgtctgtattgcctctgttgcacgcacggttctgcatgccgtccgtgccaccgtggtctctgttgcccgcgcggtatggaactggattttcttctga

SEQ ID NO: 30227 - DNA, 972 bp, Escherichia coli
atgagtcagccaaatccgctttgtgtgggtattgatgtttctaaaacaactctggacattgctactgctaacaacgagtttgctcagtttactgctggtaacgacaccgatggttttgagctcatcattgctgaattgagaaagcattcggtggcgctggttttgatggaggctacaggtgggcttgaagctgctgtagcctgttcacttcaggctgaaggttttgatatcgcggtcatcaatcccagacaggccaggaatttctctcgtgctatgggatatctggcaaagaccgacaggattgatgcaaaagtgttgtctcaaatggccgaggtaataaaccgtcatccagaacgggagcgctttatcaaagctatacccgacgccgaacggcaaattcttgccgctatggtggtacgtagacgccagttgataacaatgttggttgcggaacggaacagacttcaccctgcacatcctcagaacagaaagagtatcaataccatcataaaagccctggaggatgaactttcccgaattgacgaggcgatgaataatcacattaaaactcatttcaaagagcttgcagctcgtttgagcagcattaagggggtaggtgcaatgacagttgccacattgctctctgaagtacctgaactgggaagtctttcacgtcgagagattagtgcacttataggtgtggctcctgtaaacagagactccggaacaatgcgtggtagacgaactatttttggcgggagagctggcgtaagaactgcgctttatatggctgcgcttgtcgcgaccagatttaatcccgtaataaaagatttttatacgcgactcattacagctggaaaagtgaggaaagttgctcttgtttcctgcatgcgcaagctgttaaccattctgaatgcaatgatccgaaagaatgaagaatggagtgattcataccacaagttttcattataa

SEQ ID NO: 30228 - DNA, 1554 bp, Escherichia coli
atgatagttaaatttcatgccaggggaaaaggtggtggcagtggtccggttgattacctgctggggagggagcgtaaccgcgaaggcgcaacggtgcttcagggtaatccggaagaagtccgggaactcatcgatgccacgccatttgcgaagaaatacacgtccggtgttctgtcgttcgcggagaaggagctgccgccgggaggacgtgaaaaagtgatggcgagctttgagcgtgtactgatgcccggtctcgaaaaaaatcagtacagcatcctgtgggtggagcaccaggacaagggacggcttgagctgaattttgtcattccgaacatggagctacagaccggaaaacgcctccagccgtactacgaccgcgcagacaggcctagaattgatgcctggcagacgctggtaaatcaccattacgggctgcatgacccgaacgccccggagaaccgcaggacgctgacactccctgataacctgcctgaaacgaaacaggcgcttgctgagggcgtcacgcgaggtatagatgcactttaccatgccggagagataaaaggccgtcaggatgtgattcaggcgctcactgaggcggggctggaagtggtcagggtgacgcgaagcagtatcagcattgcagatccgaacggcgggaagaatatcaggctgaaaggagcattttatgagcaatcttttgcagacgggcgcggagttcgagaaaaagctgaaagagagagccgaatctacagagaaaatgctgaacaacgagttcaggaggctcggcgaatctgtaagcgaggctgtgacatcaaacgagacgaaaatcagagacgctatagccctgttcacagcctcgacagaggaatcgctggaaaaacaccgggaaggggtgaaagaggcgatgatgcagcacaggagggacgtgttaaagctggcagggaatacgggcatgatgttactggggatagtctttctcctgtttaccgcgagtggcgggacgctctggtatcttggagggaggatacaggcgaacctggaagaaatcaggaagcaggaagagacattgcagaaactgaacgcgaagacatggggcgtggagtttgtgcaggacgggaacaggaaattccttgtccttccgtacgggaaatcagcggaggtgattccctttcaggggaaagagtgggtacatctgaaggagtgacacagagtgacagagctggaaacacatttgctgaacgccttagagcagctgcaacaggactatatgcagcggctgagcgaatgggagagcgccttcgtggaattgcagaagatgttttcgcttacgcaacgggacaacgcgatgctgaacgagcgggtcatgcagttgagtcagcaggtgcagcacttgagcgagcagacagaacgcttgagccagttatacagcgagaactggagataagagaggaacggctgatacaggagcgcgaacatgtgttatccctggaacgggagcgtcagccggaaatacaggaacgcacgctggatggcccttcgctgggatggtga

SEQ ID NO: 30229 - DNA, 261 bp, Escherichia coli
atgggatacaccagaaatcagcacatgctctcacagtggtttctcaggaacttccgcagtgatgatacggcacagagtccgaaggagaagcaacgggtctgggcccacgttgtggttcctacggcagaaggcaaaaatgacataaaggacatcccgctaccgatatccagcgtggccgtctgtaaggactgctttcgtcttaccgacggtgacacagacgaggtttttgatatcgagcatgagctcagtgattatgaatag

SEQ ID NO: 30230 - DNA, 702 bp, Escherichia coli
gtgattgtctatgatggacctattggagaagagttgaattctgttgttacatatttttctaatttgttgcctatagaaatagtacgtattccacataatgttggattggggcaggcgttgaatcgtggtctggagttttgtcgaaatgaaattgttttcagaatggatacagatgataaatgtgatcggttgagatttgaaaaacagttggatatgttaaaaattcatcctgatattgttcttatgggcggcgctgttgaagaatttgatgaaacaatgacaaaatcacttggtgttagatatacagtggagtctcatgaacaaataaagtcatatgtaaggaaacgtaacccgtttaatcacatgacaattatgttcaaaaaatcaataattcaaagtttgggtggatatgagcatcatcatttgatggaggattataatttatggctaagagtaattgctgcaggttataaaagttataatattcctcaggtacttgtttatgttagggctggcaggggtatgttaggtagacgaagggggattttgtatgtgtttagtgaaattaaattagcgaagctaaaatataagttaaaaacagataatatatatggggtggttaagtattcatttattcgtattttgccacgtctacttcctgtttttatattaagacacttgtatgcaatgttaagaaaatag

SEQ ID NO: 30231 - DNA, 567 bp, Escherichia coli
gtgatattggatcgtaatacttggttagggcatccaatttttcgtccgaataataacgatactatcgccttttgccacgaagggccccatgacctggtggatgcaagaatgtggatgattaaccgtgatgggacaaatgagcgtaaagtgcatgagcaccaacttggtgaaagttgtacacacgagttctggatccctgatggatctgcactggcttatgtttcctatatgaaaggacagcaacagcgttatattcgcaaatataatcctgatactgatgaagattcattagtgatggaaatgccggcatgttcccatttaatgagtaaccataatggtattctctatgttggtgatggttcaggtagtccggttgatgttaaagatacctgcagtttggtgaaacataatagttcctggagggtacagaaaggagaccggcaggtaacgcacccgcatccatcattttctccagataataagtacgttttatattcttgcgatgccgaaggtgaaccagcactatatatggctaaaattcctgaggaaatcttaacccagcaataa

SEQ ID NO: 30232 - DNA, 501 bp, Escherichia coli
  misc_feature (464)..(473): n is a, c, g, or t
atggctaagggtgatattaaaaagttgaagtttgaatctttctacgatagtgaatcgaataacgaagttattcgattaacgccaacagatattctttgccatcgcaattatttttatcaaaaatgttttacaaatgatggtaaaaaattgattttcgctgctgagtttgattgtaaccggaattattatcttatggatttggtaactcagacagcgaaacaactcactgaaggagctggagataacacctttggtggcttcctgtcccctgatgataattatcttttttatgtgaagaatgaaaaacatttgcagcgtgttgatttgaccacattagaagaagttaccatatacacagtaccggataattgggtggggtacggaacatgggttgctaatactgattgtacggaaatcgtcggaatcgaaatcagtaaaactgactggacccctcttagcgactnnnnnnnnnnggaaaatatttctggaattttatcataa

SEQ ID NO: 30233 - DNA, 2547 bp, Escherichia coli
gtggcgtatctggaaaagcgccgccttaaccaccctgaactggtcgccgcctttaaattaggattcgccaaccgcacgttgccttatcgtttgcccgctgttaaatcacgggcaggcgagaagatccgcgccaggcttaagaccgcaggtatcatgcgcgagtccgggcatgagcacttcaccgggtcgctggttgtgccggtgatggatctgaacgggcagatccgcgagatgtacgggcgcaagatcgagcgtccacagcgtggcctgcccgcacacctgtatcttcccggcgctcacggcggcgtgtggaatgaacaggcgctgatcgggtcatcaacggttgtcctgtgcgaatcgctgatcgatgccatgtcgttctgggtggccgggttccgcaatgtcacggcggcttacggggtgaacggcttcaccgatgagatggatcaggcgttcagaaaacacggcgtcaggcaggtactgatcgcctacgacaatgatccggcgggtaatgaggcggcggtgaaacaggcttcttccttagccgctgacgggatcgtcacgttccgcgtactgttcccggcgggcatggatgctaacggttatctgtgccaggtggcagagccggaacgggcgttcagtctgttgctggatggcgcggttccggtggctgacgtcgtgggtgcggagagtatcgcgccgcaggccagcgcggagcctgcacacctgacttcattagctgccggggttgcggccttacccgcagccgccgcgcctgcaccgggcgtcagcgtgaaagcgttgccggaaggtgaactgatgatcgccttaccgggagaacgctggacgatacggggcttaagccgcaaaccgaacgcggcggcgatgaaggttaacgcgcaggtgctggacaccgacagcggtgtggtgttcgcggatgcggtggatatgatgagcgcccgcagtcgcggcggttatgcgcgggccgccgtcgcagagcttggcctggcagaaggcgatctgcgccgctcgttaggaaaagtgctgctggcgctggaacactggcaggccgcaccggagccggagaacaccgccccggagatgagcgacacggatcgggaggcggcgcttgagttgttgcgcgatgagtgtcttgccgggcgcatcgcgtcggatatggcggcctgtggcgtggtgggtgaatccaccaaccttacggcggcgtatctggcggcggtgtcgcgcaaactggacaggccgctggcggtgctgatccagtcatcgagcgcggcgggtaagtcctcgctgatggatgcggtgctgaacctgatcccaccggaagaacgcttacagtacagtgccatgaccgggcagagcctgttctaccttggtgaaactaacctgcaacacaagatcctcgccatcgcggaagaggaaggtgtgcgccaggcggcctacgcgctcaagctgttgcagtcggacggagaactgaccatcgccagtacgggcaaggacgatgccagcggcaacctggtgacaaagcagtacacggtaaaaggcccggtgatgctgatgctgaccaccaccgccatcgacgttgacgaggagttactcaaccgctgtctggtgctgacggtgaacgagtcgcgggaacagacggaggccatccacgcggcgcagcgttacgcgcagacgctggaaggcctgctggcgtcgaatgaaaaaagttacatcactcagcttcaccagaacgcgcagcggctgctgcgcccgctcaacgtggtgaacccgttcgcgtcacagttgaccttcatgagcgacaagacgcgcacccggcgcgaccatatgaaatatctgacgctgatccaggcgatcgcgctgttgcaccagtaccagcgggagatcaaacgcgtggagcatcgcgggcaggtgctggagtacatcgaggtgacgcgggaggatatcgcgctggccaaccatctggcacatgaaatactcgggcgcacgctggatgagatgccgccgcagaccagaaagctgttgctgctgatccagacaatggtcggtgaactggcagcggcgcagcactgcaaacccggcgaggtacgcttcacgcgccgggagatccgcgacttcacacagtggagcgacaaccagttgaaggtccactgcatgcgccttgcggaaatggaatacctgttgatccacggcggcagccggggtcacctgctacaatacgagttgctgtgggacggcagcggcgacggctcgcacctgtgcggcctgatcgaaccggaggataatcaggtgcatgactccggcaagttggggcatgatgcaggcaagttgcccttaagttgcccccatgttggggctaagttgggagcggtgaaatcgcctgtaagccgcgccagtgctggtacggatgtgccgcaagttggggaagatgaaaaaacactgttcccggcagccaggaaaacatcacatcgtaacagtaatacgccggaaagccgcccgacaccccatgacggtgcgccagcggtatga

SEQ ID NO: 30234 - DNA, 1056 bp, Escherichia coli
atgaccagacctatccctccggggccggaggagctttatcttagccgccagaacctgacgcagcgccagtatgtggtggtgtggctggaatacctgacggcacagaactacagcgcggtcagcgtaagcgactaccgcgagcgggtgttaccgttcgtgacgtggtgcgaggagcgcgggctgatgtacgcgccgcaggtcagccagccacagcttgaaagttatcagcgccaccttcacggctaccgtaaggcggacggccatccgctggcggtcagtggtcaggtgggccggagcagcgcgataaaaatcttttaccgctggctgctgaagcggcatgtgatcctgtacaaccccgccgatctgctggaactgccaaagccggacaaacggcttccggcgcaggtgttcagtgaggacgagacgcggcaggtgttgcagagtctggatgtgagcactcccgttggcctgcgtaaccggacgatccttgaggtgctgtggagtaccgggatcaggcggatggagctggctaacctgatgctgtgggacgtggacgccgggcgtggcgtgatgaacgtgcgccagggtaaggggcgtaaggatcgggtggtgccggtgggccatgtggcgctggcgtggctggcgcggtatctgaaagacgtgcggccacagatgacgcgccagcgggacagcggtcatctgttcgtgacgaaatacggcagcggcctgaaacgaaatacgctgacgtggctggcaggcaccgcgatccgggaaacggcgcggatcgacaaaccgggcgcgtgccatatcttccggcactcgatggcgacgcagatgctggacaatggcgcagacacgcggcacatccaggcgatcctcggccatgagaagctggagacgacgcagatctacacgaaggtggcaataaagccgttgcagaaggttcatgcgcggacgcacccggcagagaagcggcgaacggaaacgcgggggcagcagccggagagcacagagccggacggagccaccgtgtcgccggacaggctgaaaagttag

SEQ ID NO: 30235 - DNA, 906 bp, Escherichia coli; identical to SEQ ID NO: 9037

SEQ ID NO: 30236 - DNA, 498 bp, Escherichia coli
atgacaattaaagatgtttattctaaagagtgggcctctgtaaaagaggctgaaaataaatttttatctagtaaacattactttagaaaatcaaatgattttttcgagcaaattttattggctattaataatctatcagaacaggggactgcattaaggtttatcagggatgatgattttgatgattcggagcttgaagtattaatacccgtaattattgatatagctgtagatggtaatgttgataacttgccttttgctaaggaaatattaatcaagaacgctaataataatgttgttagaaaaaaattgacatctatttttgatggcttgcttaattctcaggatgaatatatatatagaagagttgcagaattattggtttttttaaattacaatgatttaagaaatagattgatggacaaatgtaagaatagcgaaaatgaggacatagtagaaatttatactgattttatcagtcaatataatatttgttag

SEQ ID NO: 30237 - DNA, 291 bp, Escherichia coli
gtgcgttgtaacggtacgcctgacagcagccatccggctctacccgtcgtgctgtcagcacagcatcttcccaaccgcagtgatacactggtgatcaaaatcagcgccaaatggctgagagaagcgggatttgagatcgggacgggcgttaccgtgaagatctcggaggggtgtattgtgctgatggctgacggtaatgagttgcaggagctgcgcgagcagctttatcagactaaacaggtggttaaggggatgcgggacgggatgtttagtgtgctgaacgagagttaa

SEQ ID NO: 30238 - DNA, 420 bp, Escherichia coli
gtggagcatagcgggcaggtgctggagtacatcgaggtgacgcgggaggatatcgcgctggccaaccgcctggcacatgaaatactcggacgcacactggacgaaatgccgccgcagacgcggaaactgttaaccctgatccagcaatgggtgagcggcagcggtcaggcgcgtgaggcgatgctgttcacccgtaaacaactgcgtgacgcggtgcagtggggcgacacgcagctcaagatccacctgtcgcggctggtcgaaatggaatacctgctggtccaccgtcgcgggctgacgttctgctatgaactgctgttcgacggggacggtaacgcagacgccgcgcacctgtgcgggctgatcgacgtaccggaaacgccgtatgacgtcgcccggtcggggcaacggcggcaatag

SEQ ID NO: 30239 - DNA, 1101 bp, Escherichia coli
atgacaaagcccaaatcaccggggccggaagccctttatctcagccgccagaacgaacacacgacgcagcgccagcacatgctcgcctggctggaaagcctcgacgccgcaggctacagcgcgcgcagcgtggaaggctaccgcgaacgactgttaccgttcatgacgtggtgcgaggcgcgcgggctgctgtatgcgccacagataagcctggcggtgctggaagcgtaccagcgccacttacgcagctaccgtaaggccgacggcaacacgctggcggtcggtggacagcttaaccgcctcagcgcggtacgtagcttctaccgctggctgctgaaacgccacgtcatcctgtataacccggcagaaatgctgacgctgccgaaggaggagaaacggcttccggcgcaggtgttcagcgagcaggaaacgcggcaggtgctgggcagtctggacacggagaagccgctgggcctgcgcaaccgggcaatactggaagtgttgtggagtaccgggatcaggcgcatggaggtggcgaacctgatgctgtcagacgtggacttcacgcgcggcgtggtgaacgtgcggcagggcaaggggaagaaggatcgggttgtgccggtgggccatgtggcgctggagtgggtgatgcgctacctgcgtaacgtccggcctcacctgacgcaacgcgccgacagcggtcacctgttcgtgacgtaccacggcaaaggactgaaccggggaacgctgacgcagatcggcggggaaaccatccgtgaaaaagcgcggatacagaaacccggagcctgtcacatcttccgccactcaatggcgacgcagatgctggacaacggcgcggacacgcggcatatccaggcgatcctcggacatgagaagctggaaacgacgcagatctacacgcgggtagccatcggtcacttacaggaagttcacgcgctgacgcacccggaagagcaggacgagacatggcaggaacgacgtggcccgcaggtggcggcagagccgcagacgcggcgtgagcgcaaccatgcggagatggagcgggcgctggtcagcaggaagcgcagccggagacgctga

SEQ ID NO: 30240 - DNA, 123 bp, Escherichia coli; identical to SEQ ID NO: 3258

SEQ ID NO: 30241 - DNA, 300 bp, Escherichia coli
atgcttcagggggacagacgccatgcgggaacgccggaagatggtgttatctcccgggagcaaatcgcccaggttcttgtaacagctctgagcaacgatgcggcaaaaaataaaacgttcgaactggtcgcagagcgaggagaagcacagcaggatctcactcctctgtttgcagagctgcggaatgataatccacaaaaaaatgatggggttttcgatatagacaatatgccccttactgaagaacctgagtgcgttattaacgacctgaatctgtattcgaaaaattcaaaaatctaa

SEQ ID NO: 30242 - DNA, 888 bp, Escherichia coli
atggtggaagtgacgacagcgcgggagacataccggtatgtgtacgatgcgctggggaggcggacggaaaaacagcacatcagccctgacggtaaaccgtacaaccggacaaaatttttatgggacggaatgcggctggcgcaggagagcaggccggagggaataagcagcctgtatatctacagcgacccgggaagttatgaaccgctggcgcgggtggataaggcggggaaagagggaccgaaccggatactgtattttcacacggatgtgaacggtgcgccggaagagatgacggacagcgacgggaaaatcgtgtgggagacggggtatcaggtctggggtaacacgatacaggagaaggaccacggcggggtggagcagaacctgcgataccaggggcagtacctcgacagggaaacggggctgcactacaatctgcacaggtactatgatccggatgtcgggcggttcatggtaacggatccgatagggctggcggggggattaaacttatatgcttatgcgcctaatccgctggggtggatcgatccgttaggtttaaagtgtgggcaacctgaatggacaaatcatggatacaaacattttcctccaaaaaacaaatcatggaaggatataattaaatcaacaaaatcaggcccggcaaaatattctccagatattgatattaaaacgctggaatacgatgtttttaatacaggcacacctgttaccaacggtaaaccatggaaagtaaaagatatgggcaaagttattggggccagtgagggtaaagaatctcaatgggttcgagttgaacttagcggtgggacaatacatggacatcccatatcacttgatgaattccgaaggctaacaacaccatga

SEQ ID NO: 30243 - DNA, 294 bp, Escherichia coli
atgaacattgatttcttaggaaaaaaagggaatgtggtttttaatgacttttccctgaaacaaagcatccctcttaatgaacagcgagatgaacttaaggaagatatgctccaggttgaatatcctggtgggtatcttttggatgttggatggcgaccatctttcaatataaatgggaagttttatatttgtttaataaaggattttgattgggatgctcccatttataatggttctgcgaaagatattgtctcattattatttgaaattaaccaagctataaataaactttaa

SEQ ID NO: 30244 - DNA, 330 bp, Escherichia coli
atggctgaacacgatattacgccagaagtcaccatttccaaaacacagcgccgtcttaaagtcggctatgtcggtatctcccacaccaaccgtaaaaccaaagttcccaccggatattcgcgcagccccagcctgcaccttaagggcaactggctggcagaggcgggatttgataccgggcggggtgtcacagtgaagatttcggaggggtgcctgaccatcatcgctgacagtgacgagatgcaggaactgcgggaagaactttatcaggttaaacaggcggttaaggggatgcgtgacgggatgtttagtgcgctgaacgaaagttaa

SEQ ID NO: 30245 - DNA, 1083 bp, Escherichia coli
atgaatgacatttctgagcatgaaaaattgataaaaagtatggctaatgaaatttcagagttaaaaaatgcattaactatcttgtgtgataataaaagaaagaataacgagttagattatatcaatgaattaaaaaaactcactgaacgaatagatacacttgaaataaacacatctcaagctagcaaagtgagtgtcaccaatagatttacaaaattccatgaaatagcgcactatgaaaattatgaatatctttcatcctccgaagacatatctaatagaatttctttaaatttacaggctgttgggttaacaaaaaattcagcagaaacattggctagattgacattagctaccttcgtttctggacaaatcattcaattcagtggctctttggcagatattatcgcggatgcaattgccattgctattggtgcaccacgttatcacatatggagagttccagttggtattatttctgacatggattcttttgattttatagagactatagctgaatcatctcgctgtctccttttgaaaggggccaatctttcagcatttgagatttatggagcggcaattagagatatagttgttcaacggcaaatacatccaacaaattatgaccatctggcattgatagctacttggaaacaaggccctgctacattccctgatggaggaatgttggccgagttgggaccagttattgatactgatacattaaaaatgcgtggtttatctgctattttaccccaattgaaaccaggttgtcttgccaaggataaatggacaaatattgatggactacagcttgatagtgttgatgattatgtagatgaattaagagcattactggacgaagctggatttgatgggggaactttgtggaagagaatggttcatattttctatacttcactcataagagtccctaatggaaattatatttatgatctttattctgtcttgtctttttatactcttacatgggcaaaaattaaaggtggccccgtccaaaagatagaagatattgccaatcgtgaattaaaaaattatagtgcaaaaatatcttcttga

SEQ ID NO: 30246 - DNA, 330 bp, Escherichia coli
atggctgaacacgatattacgccagaagtcaccctttccaaaacacagcgtcgccttaaagtcggctatgtaggcatttcccacaccaaccgtaagaccaaagcccccaccagatattcgcgcagcccaagcctgcaccttaagggcaactggctgaaagaggccggattttataccggacggggtgtcacggtgaagatttcggaggggtgcctgaccatcatcgctgacagtgacgaggtgcaggaactgcgggaggaactttatctggttaaacagtcggttaaggggatgcggaacgggatgtttagtgtgctgaacaagagttaa

SEQ ID NO: 30247 - DNA, 246 bp, Escherichia coli
gtgccgttttatagcatcgatatacggacagctggtgcagatatcatccagttcctttcccacaatacacctcacctgctcttcccacatttgcagattttaagaaagcaaacaaaaacctccgtacatgatgtacagaatgtacagaacaatctggcaggtactggcgtcagaagagctccgggccgcctgcactttccggaatgcgccggttatgaaaaaccggaaattcagtctctgttgtaa

SEQ ID NO: 30248 - DNA, 306 bp, Escherichia coli
atgcccgcccggcgtcgtctggctgcggcggctcgtgccacgcaaaaggccgcgcgtcactcgttcccgcctcgccagcttccgctgcccgccccggtccggcgtggtcatgcaaaggcaaaccccggtcaggcagcggtgccacagagcgccgttccgtcgcttgcggactctctgccgcccgcacccgcagaccccgcgccgtggccccgccatgccgccggaggcggcctggcggccccccgtcacgggttgccggaaacggacttagtggaaagcggaatgacagatccgtggcggtggtga

SEQ ID NO: 30249 - DNA, 426 bp, Escherichia coli
atgcaatatgcgaaacctgtcactctgaacgttgaagagtgcgaccgtctgtcttttctgccttacctgtttggccaggattttctgtatgccgaagcgtctgtatacgcgctggcgaaacaaatgatgccggaatatgaaggcggattctggcacttcatccgactgccggacggtggcggttacatgatgccggatggcgaccgttttcacatggtgaacggtgcaaactggtttgaccgtaccgtgagtgctgatgccgcaggcatcatccttacctcccttgtgattaaccgccagttgtggctgtaccacgacagcggggatgcaggactgacccagctttaccggatgcgcgatgcgcagttgtggcgtcacatcgaatttcaccctgaatgcaacgcgatttacgcagcactggactga

SEQ ID NO: 30250 - DNA, 426 bp, Escherichia coli
atgcaatatgcgaaacctgtcactctgaatgttgaagagtgcgaccgtctctcctttctgccttacctgtttggcaacgattttctgtatgccgaggcgtatgtgtacgcgctggcgcaaaaaatgatgccggaatatcagggaggcttctggcacttcatccgcctgccggacggtggcggttacatgatgccggatggcgaccgtttccacatggtgaacggtgcaaactggtttgaccgcacggtcagcgctgatgcctgcggcatcattctgacttcccttgtgattaaccgccagttgtggctgtaccacgacagcggtgatgcaggactgacccagctttaccggatgcgcgatgcacagttgtggcgtcacatcgaatttcaccctgaatgcaacgcgatttacgcggctctggactga

SEQ ID NO: 30251 - DNA, 141 bp, Escherichia coli; identical to SEQ ID NO: 14405

SEQ ID NO: 30252 - DNA, 228 bp, Escherichia coli
atgaatgatcgaacgcagatgacatttcttggtggtcaccaacgggaaaccttcctgcaagttgaaacgcatctggtggccgaaaatcgacaatgtgccagtgccggtacggtcggctttaggggtgccctcggcgagcaccttgttcatcaaatccagatactgtttcatttgtccctcacgacagttgttgctgcgggcgacgacggtacgcccaaatcatcataa

SEQ ID NO: 30253 - DNA, 405 bp, Escherichia coli; identical to SEQ ID NO: 1309

SEQ ID NO: 30254 - DNA, 153 bp, Escherichia coli
atgctcatcacaacaaaagaaggtaacaataataaatgtccgatttttttgaatcttacaaatgacaatgacaataaaagccggttgttgcatgcattttcattctttatcaccaataaaaaaataaatttttatttaacattaccccattaa

SEQ ID NO: 30255 - DNA, 1344 bp, Escherichia coli; identical to SEQ ID NO: 10305

SEQ ID NO: 30256 - DNA, 354 bp, Escherichia coli
atgatggactattcacagttaagtgattttgaaattaacagaatggtaggagacataatttttaaaggactttgggcgtgtaaaccggaaacatcagggaataacaccaacaaatggtattacggaaatactgatacaacttttgagccattaaaccctttacctgactactgcaataatccatcggatgcatggcctattattgttgataataaaatcagtctaacctgccaccactctcgcggtgagtggtcagcagtttttaatgccgacaacatttgctttcatgcgaataatccactccgagccgccatgattgtatttctcatgatgcaggaaaatcagaatggctaa

SEQ ID NO: 30257 - DNA, 1014 bp, Escherichia coli
gtgaataaagtttattctcttaaatattgccctgtcaccgggggacttattgttgtctctgaacttgccagcagggtaataaaaaagacatgccgaagattaacgcatattcttctggctggcattccagcagtctatctgtattaccctcagatatcccaggcgggcattgtccgttccgatattgcctatcagatttatcgtgatttcgctgaaaacaaagggctttttgtacctggtgccacagatattccggtatatgataaggacggaaaacttgtggggagactggataaagccccaatggccgatttcagcagtgtgagctcaaatggcgttgctacgcttgtatcacctcagtatatcgtcagcgtaaagcataacggaggatatcagagtgtgagctttggtaatgggaaaaatacatattcccttgttgaccgtaataaccactcttctgttgacttccatgctccacgtctgaataaactggttacagaagttattccctcagcgataacatcagaaggaaccaaagccaatgcttataaagacactgaacgttacaccgctttttatcgggtgggtagtggtacgcagtacactaaggacaaggacggaaatttagttaaggttgccggcggatatgcttttaaaacaggaggaaccacaggagttcctctgatatctgatgcaacaatagtctctaatcccgggcaaacctataatcctgtaaacggacctttacctgactatggtgcccctggggacagtggttctcctttgtttgcttatgatgaacaacaaaaaaaatgggttattgttgctgtattaagagcatatgcaggtattaatggtgctacgaactggtggaatgtcataccaacagattatctgaaccaggttatgcaggacgatttcgatgcccccgtggactttgtttccggactgcccccccctgaactggacatacgacaaaacatcaggcacaggcaccctgagccagggcagtaa

SEQ ID NO: 30258 - DNA, 198 bp, Escherichia coli; identical to SEQ ID NO: 8970

SEQ ID NO: 30259 - DNA, 396 bp, Escherichia coli; identical to SEQ ID NO: 9097

SEQ ID NO: 30260 - DNA, 354 bp, Escherichia coli; identical to SEQ ID NO: 24141

SEQ ID NO: 30261 - DNA, 384 bp, Escherichia coli; identical to SEQ ID NO: 10122

SEQ ID NO: 30262 - DNA, 336 bp, Escherichia coli; identical to SEQ ID NO: 9180

SEQ ID NO: 30263 - DNA, 792 bp, Escherichia coli
atgaaaaaggttattgttgtttcagcgcttgctatggcgggcgtattttcagcccaggctctggctgataggggtaaaacaggcttttatgtgaccggtaaagctggtgcttcggttgtgactcagactgaccagcgcttccgtcaggactttggggatgatgtttataagtataagggcggtgataaaaacgatactgtatttggtgcaggccttgcggtgggctatgatttttatcaacattacaatgttcctgtgcgcacggaagtggaattctatggccgcggagctgcagactcccattatacactggatacatggcattctccgatgggggatggtggtcgggaagacacacagaacaggctcagtgtgaataccctgatggtgaatacgtattatgacttcagaaacagcagtgcattcactccatgggtgtctgttggactgggttatgcacggatacatcataaggcaacatatactgatacctcctggaataaatctggtgaggtgagcgatatttctgcgttgcattactcgggatatgataacaatttcgcatggagcattggggccggtgttcgctatgacataaccccggatatcgctcttggatttgcccctatatttccagacatctgttatcacttaacccattacaagcccgctgccgcagatattcccgtggcgagcgataacccagcgcactatgcggatgccattcgttataatgctcgaacgcctctgcaaggttctttgctgccgttaacccgtctggtttgggcatga

SEQ ID NO: 30264 - DNA, 474 bp, Escherichia coli
atgattgttacgcacaataaatatcttgagttaggtttgaaaaaattattgagcaggcattctattactattggtgctgatttttttataccagataatcgtgagcatataataaacaataatatttttgtcattctctgtgataaaaaaaacagtatgttaatgaattatatttttaacggttatagattttacttattaccagtagaatcaataagtagcctgtcatcgatttatgaatgtatgtttagtggcaggttgttgtttgggaactctccacataaattaaccatgaatgagatgattatactattctattatgttttccatgggtggaatgtagcaagtattgcttatcagtttggtatgagttcaaagactgtgtatactcatatatataaagcaaagaaaaaaaatggaatatcaggaaaaaatctcaaatataaatgtgcttatgaaaggcttgtctgttaa

SEQ ID NO: 30265 - DNA, 2238 bp, Escherichia coli
gtggactggcttcttgatgtttttgctacctggctctacggcttaaaagtaatcgcgataacgttagcggtcattatgttcatcagcgggctggacgatttttttattgatgtcgtctactgggtacgccgcattaaacgcaagttgagtgtttatcgccgctacccgcgaatgagttaccgcgaactgtataaaccagatgaaaaaccgttagcgattatggttccggcgtggaatgaaacgggcgtcatcggcaatatggccgagctggcggcgaccacgctcgactacgaaaactatcatatctttgttggcacctaccccaacgaccccgatactcagcgtgatgttgacgaagtgtgcgctcgcttcccgaacgtgcataaggtaatctgcgcgcgtcctggccccaccagcaaagccgactgtctgaacaacgtgctggacgccatcacccagtttgaacgtagcgccaatttcgcttttgctggttttattctgcatgacgccgaagatgtgatttcaccgatggaattgcgtctgttcaactatctggtcgagcgtaaagatctgattcagatcccagtgtatccgttcgaacgcgaatggacgcacttcaccagcatgacctacattgatgagttttcagaactgcatggcaaagatgttccggtgcgtgaagccctcgccggacaggtgcccagcgcaggcgtcggtacctgtttcagccgccgcgccgtgaccgcactgttagctgacggtgacggtattgctttcgacgtgcagagtctgactgaagattacgacattggcttccgcctgaaagagaaaggtatgacggaaatttttgtccgttttccggtggtggacgaagccaaagaacgcgagcagcgtaaatttttacagcatgcgcggacgtcaaacatgatctgcgtgcgcaaatatttccccgataccttttcgactgcggttcggcaaaaatctcgctggatcatcggcattgttttccagggctttaaaacccacaaatggacctccagcctgacgctgaactactttctctggcgcgaccgcaaaggggcaatcagtaactttgtcagcttcctcgcgatgctggtgatgatacagcttttgctgttgctggcgtatgaaagtttgtggcccgatgcctggcatttcctttctattttcagcggcagcgcatggttaatgactctgctgtggctaaactttggcttgatgattaaccgcatcgtgcagcgggtgattttcgttactggctactacggcctgacgcaggggctgctatctgtcctgcgtcttttctggggcaacctgattaacttcatggccaactggcgcgcgttaaaacaggtacttcaacacggcgatccacgtcgcgtcgcgtgggataaaacaacgcatgacttccccagcgtgactggcgatacccgctcgttgcgtccgttaggtcaaatcctgctggaaaatcaggtcatcactgaagaacaactcgatacagcactgcgtaatcgcgtcgaaggtctacgcctgggcggttcaatgctgatgcaggggctgattagcgccgagcaactggcacaggcgctggcagagcaaaacggcgtggcgtgggaatccatcgatgcctggcagatcccttcctcgctgattgccgaaatgccggcctccgtggcgttgcattatgcggtactgccgctgcgtctggacaatgatgagttaattgtcggcagtgaagatggtattgacccggtttcgctggcggccctgacgcgtaaagtcggacgcaaagtgcgttacgtcattgttctgcggggacaaattgtcaccggattacgccactggtatgcacgccgacgcggtcacgatccgcgggcaatgttgtacaatgcagttcagcatcagtggctcacggaacagcaggccggtgaaatctggcggcaatatgtgccgcatcagttcctgttcgccgaaatactgaccacgctcggtcatattaatcgttcagcaattaacgtgttgttattgcgccatgaacgcagttctctgccgctcggcaagtttttggtcaccgaaggcgttatcagccaggaaacgttggatcgcgtcctgacaattcaacgcgaattacaagtttcgatgcaatcactattactcaaagcaggtttaaacactgaacaggttgcacaactggagtccgaaaatgaaggagaataa

SEQ ID NO: 30266 - DNA, 708 bp, Escherichia coli; identical to SEQ ID NO: 19407

SEQ ID NO: 30267 - DNA, 222 bp, Escherichia coli
atgaaaatcatcacccgtggtgaagccatgcgtattcaccaacaacatccggcatcccgtctttttcctttctgtaccggcaaataccgctggcacggcagcactgaagcgtataccggtcgtgaagtgcaggatattcccggtgtgctggccgtgtttgctgaacgccataaggacagttttggcccgtatgtccggctgatgagcgtcaccctgaactga

SEQ ID NO: 30268 - DNA, 486 bp, Escherichia coli
atgacaaccgtctcgcataattccaccactccttctgtttccgtaaccgctgcatcagggaatgaccagcctcagctggttgccaccatagtccctgatgaacagcgcatcagcttctggccgcagcattttggcctcattccacagtgggtgaccctggagccccgtgtcttcggctggatggaccgtctgtgtgaagactactgcggtggtatctggaatctgtacaccctgaacaacggtggcgcatttatggcacccgaaccggatgacgatgatgacgaaacatgggtgctgtttaacgtcatgaacggtaaccgcgctgaaatgagcccggaagccgccggcattgccgcctgtctgatgacgtacagtcatcatgcctgtcgtacggagtgttatgccatgacggtccattattaccggctgcgggattacgccctgcagcatccggaatgcagcgccattatgcgcatcatcgactga

SEQ ID NO: 30269 - DNA, 519 bp, Escherichia coli
atggtagataaacgcgaatcctatacaaaagaagaccttcttgcctctggtcgcggtgaactgtttggtgctaaaggcccgcaattgccagcaccaaacatgctgatgatggaccgtgtggtcaaaatgaccgaaacgggtggtaacttcgacaaagggtatgttgaagcagagctggatatcaatccggatctgtggttcttcggatgccactttatcggcgatccggttatgccgggatgcctgggcctggacgcaatgtggcagctggtagggttctacctcggctggctgggcggcgaaggtaaaggtcgcgcgctaggcgtaggtgaagtgaaattcacaggccaggtgctgccgacggcgaaaaaagtgacctatcgtattcactttaaacgcatagttaaccgtcgtctgattatgggcctggctgatggtgaagtgctggttgatggtcgtttgatctataccgccaacgacctgaaagtaggtctgttccaggatacgtctgcattctga

SEQ ID NO: 30270 - DNA, 1341 bp, Escherichia coli; identical to SEQ ID NO: 2084

SEQ ID NO: 30271 - DNA, 1116 bp, Escherichia coli; identical to SEQ ID NO: 2083

SEQ ID NO: 30272 - DNA, 1191 bp, Escherichia coli; identical to SEQ ID NO: 2082

SEQ ID NO: 30273 - DNA, 1545 bp, Escherichia coli; identical to SEQ ID NO: 2081

SEQ ID NO: 30274 - DNA, 891 bp, Escherichia coli; identical to SEQ ID NO: 2080

SEQ ID NO: 30275 - DNA, 411 bp, Escherichia coli; identical to SEQ ID NO: 2079

SEQ ID NO: 30276 - DNA, 159 bp, Escherichia coli; identical to SEQ ID NO: 20912

SEQ ID NO: 30277 - DNA, 738 bp, Escherichia coli; identical to SEQ ID NO: 2077

SEQ ID NO: 30278 - DNA, 639 bp, Escherichia coli; identical to SEQ ID NO: 2076

SEQ ID NO: 30279 - DNA, 243 bp, Escherichia coli; identical to SEQ ID NO: 2075

SEQ ID NO: 30280 - DNA, 1650 bp, Escherichia coli; identical to SEQ ID NO: 20917

SEQ ID NO: 30281 - DNA, 1350 bp, Escherichia coli; identical to SEQ ID NO: 2073

SEQ ID NO: 30282 - DNA, 273 bp, Escherichia coli; identical to SEQ ID NO: 2072

SEQ ID NO: 30283 - DNA, 873 bp, Escherichia coli
atgctgcccgactcatcagtccgtttaaataaatacatcagcgaaagcggaatttgctcacgccgcgaagcggatcgctatatcgagcaaggcaatgtgttccttaatggcaagcgagccaccattggcgatcaggtgaaacccggcgacgttgtgaaagtaaatggtcagttgattgagcctcgggaatccgaagatttggtacttatcgccctgaacaagcccgtcggtattgtcagcaccaccgaagatggcgagcgcgataacattgtcgatttcgttaaccacagcaaacgcgtgttcccgattggccgcctggataaagattcccaggggctgattttcctcaccaatcacggcgatctggtgaataagatcctccgtgcgggtaacgatcatgagaaagagtatctggtgacggttgataaaccgattaccgatgaatttattcgtggtatgggggcgggagtaccgatcctcgggacggtaactaaaaagtgcaaagtcaaaaaagaagcaccgtttgtcttccgcattaccctggtgcaggggctgaaccgtcagattcgtcgcatgtgcgagcactttggttacgaagtgaaaaagctggaacgtacgcgcattatgaacgtcagcttaagcggcattccgctgggtgagtggcgcgatttaaccgacgatgagttaatcgatctctttaagctcattgaaaattcctcttccgaggcaaaacctaaagcgaaggccaaaccgaaaacggtaggcatcaaacgtccagtcgttaagatggaaaaaacggcggaaaaaggcggtcgcccggcgtccaacggtaagcgttttacctctccggggcgcaaaaagaaggggcgttaa

SEQ ID NO: 30284 - DNA, 948 bp, Escherichia coli; identical to SEQ ID NO: 2070

SEQ ID NO: 30285 - DNA, 807 bp, Escherichia coli; identical to SEQ ID NO: 20922

SEQ ID NO: 30286 - DNA, 408 bp, Escherichia coli; identical to SEQ ID NO: 2068

SEQ ID NO: 30287 - DNA, 495 bp, Escherichia coli; identical to SEQ ID NO: 2067

SEQ ID NO: 30288 - DNA, 798 bp, Escherichia coli; identical to SEQ ID NO: 2066

SEQ ID NO: 30289 - DNA, 825 bp, Escherichia coli; identical to SEQ ID NO: 2065

SEQ ID NO: 30290 - DNA, 1230 bp, Escherichia coli; identical to SEQ ID NO: 20927

SEQ ID NO: 30291 - DNA, 690 bp, Escherichia coli; identical to SEQ ID NO: 2063

SEQ ID NO: 30292 - DNA, 1632 bp, Escherichia coli; identical to SEQ ID NO: 20929

SEQ ID NO: 30293 - DNA, 321 bp, Escherichia coli; identical to SEQ ID NO: 2060

SEQ ID NO: 30294 - DNA, 3684 bp, Escherichia coli; identical to SEQ ID NO: 2059

SEQ ID NO: 30295 - DNA, 825 bp, Escherichia coli; identical to SEQ ID NO: 2058

SEQ ID NO: 30296 - DNA, 1725 bp, Escherichia coli; identical to SEQ ID NO: 20934

SEQ ID NO: 30297 - DNA, 1305 bp, Escherichia coli; identical to SEQ ID NO: 20935

SEQ ID NO: 30298 - DNA, 708 bp, Escherichia coli; identical to SEQ ID NO: 19407

SEQ ID NO: 30299 - DNA, 357 bp, Escherichia coli; identical to SEQ ID NO: 23174

SEQ ID NO: 30300 - DNA, 261 bp, Escherichia coli
gtgcgcctgaaaaatctcgcacgttatgctggtatgacttcggtgttcaatattgccaggatgtcaccgcagaaaaggatggcggttctggttgcctttgtccttgcatgggaaacgctggcgctggatgatgcattggacgttctggacgccatgctggccgttatcatccgtgacgccagaaagattgggcagaaaaaacggctccgctcgctgaaggatctggggtcggttccggctgagggcgaaatgacaccctaa

SEQ ID NO: 30301 - DNA, 2016 bp, Escherichia coli
ttggcgctcgccagcgcatgttcgtacctgctgaaagaagaaacaccggacgaatcgattcgtgctgaggtgttcagctacatcccaaggcaaaagctggctgaaatcatcacgcttgtccgtgaaattgcccggccctcagacgataattttcatgaagaaatggtggagcagtacgggcgcgttcgtcgtttcctgccccatctgctgaataccgttaaattttcatccgcacctgccggggttaccactctgaatgcctgtgactacctcagccgggagttcagctcacggcggcagttttttgacgacgcaccaacggaaattatcagtcggtcatggaaacggctggtgattaacaaggaaaaacatatcacccgcaggggatacacgctctgctttctcagtaaactgcaggatagtctgaggcggagggatgtctacgttaccggcagtaaccggtggggagatcctcgtgcaagattactacagggtgctgactggcaggcaaaccggattaaggtttatcgttctttggggcacccgacagacccgcaggaagcaataaaatctctgggtcatcagcttgatagtcgttacagacaggttgctgcacgtctttgcgaaaatgaggctgtcgaactcgatgtttctggcccgaagccccggttgacaatttctcccctcgccagtcttgatgagccggacagtctgaaacgactgagcaaaatgatcagtgatctactccctccggtggatttaacggagttgctgctcgaaattaacgcccataccggatttgctgatgagtttttccatgctagtgaagccagtgccagagttgatgatctgcccgtcagcatcagcgccgtgctgatggctgaagcctgcaatatcggtctggaaccactgatcagatcaaatgttcctgcactgacccgacaccggctgaactggacaaaagcgaactatctgcgggctgaaactatcaccagcgctaatgccagactggttgattttcaggcaacgctgccactggcacagatatggggtggaggagaagtggcatctgcagatggaatgcgctttgttacgccagtcagaacaatcaatgccggaccgaaccgcaaatactttggtaataacagagggatcacctggtacaactttgtgtccgatcagtattccggctttcatggcatcgttataccggggacgctgagggactctatctttgtgctggaaggtcttctggaacaggagaccgggctgaatccaaccgaaattatgaccgatacagcaggtgccagcgaacttgtctttggccttttctggctgctgggataccagttttctccacgcctggctgatgccggtgcttcggttttctggcgaatggaccatgatgccgactatggcgtgctgaatgatattgccagagggcaatcagatccccgaaaaatagtccttcagtgggacgaaatgatccggaccgctggctccctgaagctgggcaaagtacaggtttcagtgctggtccgttcattgctgaaaagtgaacgtccttccggactgactcaggcaatcattgaagtggggcgcatcaacaaaacgctgtatctgcttaattatattgatgatgaagattaccgccggcgcattctgacccagcttaatcggggagaaagtcgccatgccgttgccagagccatctgtcacggtcaaaaaggtgagataagaaaacgatataccgacggtcaggaagatcaactgggcacactggggctggtcactaacgccgtcgtgttatggaacactatttatatgcaggcagccctggatcatctccgggcgcagggtgaaacactgaatgatgaagatatcgcacgcctctccccgctttgccacggacatatcaatatgctcggccattattccttcacgctggcagaactggtgaccaaaggacatctgagaccattaaaagaggcgtcagaggcagaaaacgttgcttaa

SEQ ID NO: 30302 - DNA, 192 bp, Escherichia coli; identical to SEQ ID NO: 13711

SEQ ID NO: 30303 - DNA, 282 bp, Escherichia coli
atgttctccgtttatctctccggcccgccgcagacgcagcatgtgttttgtgtatccccggcggcccgggtcgcgcacacgggtctggcaggcgaagaatggctgaaagccttcccgctgcaggctttccagtacggtgatggtgggaatgtacgtatagttctggcttcgggacgtgtgtttatcttccccgaaaatccccggcacatagtgcatcagttcttcgtgtgtcagcggacggtcacggcgtatctggttcgcataaccaaaacgactggctag

SEQ ID NO: 30304 - DNA, 282 bp, Escherichia coli; identical to SEQ ID NO: 8584

SEQ ID NO: 30305 - DNA, 141 bp, Escherichia coli; identical to SEQ ID NO: 6191

SEQ ID NO: 30306 - DNA, 252 bp, Escherichia coli
atgcatgaaatctacgcaactgagctactaccatacaagtataaagatcaaaaaaaagccggagtgatcacaaaaaaaggcgtatatttgcgccgtgaatggttgacaaaagatgaaatagaatatcttttgtcagctgacacttacttgtatcttattgataaaatggatttatgtccttacgcgcgcccccagcccgcaacaatgatcaacatgccgcaaagcgcaatcaacgcccccgtccagtcataa

SEQ ID NO: 30307 - DNA, 762 bp, Escherichia coli; identical to SEQ ID NO: 25643

SEQ ID NO: 30308 - DNA, 639 bp, Escherichia coli
atgctcaactatgctgccttacaggaagggcgtaacggtctggctgtctttagcgaagggctacgtgaattcgaagtcatcggtgaagagaagaaaacctttgccattacgttgctgcgtggcgtgggcttactggggaaagaagatctgcttttaaggcctggacgtccttcgggtataaaaatgccggtgcccgattcacaattacgtggctcctttagctgccgtctgagcttatttagttatacaggtacgccttcgaccgccggtgtagcccagcaggcgcgtgcatggctgacgccagtacagtgttacaacaaaatcccgtgggatgcgatgaagttaaataaagccggattcaatgtgccggaaagctatagcttgctgaaaatgccccctgtgggatgcctgattagcgctcttaaaaaagcggaagaccggcaagaagtggtattgcgactgtttaatccggcagaatcgacaacctgtgaggcaactgtcgcgttcagtcgtgaggtgatttcatgtacgcaaacgatgatggatgaaagcatcagcacagcggaaagagataatttaaaggaactgggggcatttttaccggggcagtcacggacatttagctaccgccttggctga

SEQ ID NO: 30309 - DNA, 330 bp, Escherichia coli
atgaaaacatttcgctggaaagtgaagccggatatggaggtgaactcgcagccatcggtgcgtgaagtgcgttttggtgacgggtactcacagcgtatggcggcagggctgaatgctgacctgaaaacatacagggtgacgctttccgtgacccgggaggaggcccggcatctggaagcgttcctggcagagcacggtggctggaaggcatttttgtggaagccaccctatgcataccggcagataaaggtgacctgtgccgggtggtctgcgcgggtcgggatgttgcgcgttgagttcagcgcggagtttaagcaggtggtgaactga

SEQ ID NO: 30310 - DNA, 426 bp, Escherichia coli; identical to SEQ ID NO: 18912

SEQ ID NO: 30311 - DNA, 264 bp, Escherichia coli; identical to SEQ ID NO: 25905

SEQ ID NO: 30312 - DNA, 561 bp, Escherichia coli
atgacagagcagaaacgaccggtactgacactgaaacggaaaacggaaggggaaacaccgacccggagccggaaaaccatcatcaatgtcaccacgccaccaaaatggaaggtgaaaaagcagaaactggcggagaaggctgcccgggaagcagagctgacagcaaaaaaagcgcaggccagacaggcgctgtccatttatctgaacctgcccacactggatgaagccgtgaacaccctgaaaccctggtggccgggattatttgacggtgacacaccccggcttctggcctgcggtatccgggacgtgttactggaagacgtggcgcagcggaatatcccgctctcgcataaaaaactgcgcagggcgctgaaggccatcacccgttcagaaagctatctgtgtgccatgaaagccggtgcctgccggtatgacacggaagggtatgtgacggagcatatttctcaggaggaagaagtgtatgcggcagagcgtctggataaaatccgccgccagaaccggataaaggcagaacttcaggccgtgcttgatgaacaataa

SEQ ID NO: 30313 - DNA, 642 bp, Escherichia coli
atgaacaccgaggtgctgaataaccgcaccacggatgtgataaacaaccatgccgaaaaaataggtaacaaccaggcgatcaccgttaccaataaccagatccagaacattggcgttaatcagatacagacggttggtgtcaaccaggtggaaacggtaggcagcaaccagattgtcaaagtgggttcaaaccaggttgaaaaggtggggatcattcgtgcgctgacggtgggcgtggcttaccagacgacggtaggcggcatcatgaatacctcggtggcgttgttgcagtcctcacaggtagggctgcataaatcactgatggtgggaatgggctacagcgtcaatgtagggaataacgtcaccttctcggtgggcaagacgatgaaggaaaacaccggacaaacagcagtttattctgccggtgagcatctggaactctgctgcggtaaggcaaggttggtgctgacgaaggacggaagcatatttctcaatggtacgcacattcatctggaaggagagtcggatgtgaacggtgatgcgccggtgattaactggaactgtggtgccacacaacctgtaccggatgcgcctgtgccgaaagatttaccccccggaatgccggatatgcggcaattttga

SEQ ID NO: 30314 - DNA, 570 bp, Escherichia coli
atgcagccggtactccgtccgccgtcccgccgcatccgtctgcgccttcagcctccccgcctcatcatactcgctgcgggtgatgctcccgtccgcatgttccttcttcaccacccgcttcaggccaccttcgccttccgtgtacagcacctcccgcctgttcaggctgtccgtgatgattacccggctctctccgtactcaaagcggtagtccagcccctccgggttgacctgctccgtcacccggccggtatcatcataccggtagcggctctccggcctccccgcataatggtgcgccaccatccgcccggcgtgcgccacatcataagtaaacccgcgcacctgcgtcccgctgcggtcatacaccgcccgcagttctccgctggccgtgtacgtgtagcgcgccagcggcgcagtcggctgttcatccgggtatgccgggtcgtgtgtcagccacaccgcctccagccggataccgttatcggcaccgtattctgtaccggcgggcagcgtatcggggaaaacctgagaagaggaaacagaacggggaccggcaggggaagataa

SEQ ID NO: 30315 - DNA, 1134 bp, Escherichia coli
atgcattcggaaaatattgcagcttacatcgggctggatgtacataaagaaacgttggcggttgctattgctgcacctgaacggcttggcgaagttcgttattatggtacgattaacaacgaagcccaggctgtacgtcgattatttcagaaattgcagggactttacggaaacattctttcctgctatgaggctggcccctgtggttttgggctatatcatcaactcacagcgatgaatataaaatgccaggttattgccccttcccggataccaaaatcaccgacagacagaatcaaaaatgatcatcgggacgcaatttctcttgccaggttactgcgggctggtgaacttacccctgtctggatccctgacctgactcatgaagctatgcgggatctaatcagagcccgtgcagcagctaaacgagacagcagagttgcccgacagcgaattctgagcatgctattgcgaacagacaaacgttatgcagggaagcactggaccggcaaacatcgaacctggttagctaatcaatcatttagtcagccatctcagcagattgcttttcaacactattgtcaaagtctggagcagattgaagatcgcatacttcaactcgaccaggaaatatctcgcctgttacctgagtggtctctgtgcaatctggtctgccagttgcaggctctaaaaggtgttggtcagctaattgcaataaccctggttgctgaactgggtgatttttcgcgattttccaatcccaaacagctcatggcttttctgggactggtgccaggtgaatattccagtggaaacagtattcgtcccagaggaataacaaaagttggaaacagcgaactgagacgtctgctttacgaagccgcctggtcttatcgtacacctgcaaaagttggtgcatggcttatatattaccgaccggactctgtaacacaatattccaaagatattgcatggaaagctcaacaacgattgtgttctcgttaccgaactctgacagcaaaagggaaaaaatcacaagtagccattacggcggtggctcgtgagttgactggatttatgtgggatattgcacttgctgcccaatcatcattcagtcagcagaagcaaaattaa

SEQ ID NO: 30316 - DNA, 438 bp, Escherichia coli
atgggcactgtatgcgcccaaaccgatcgccattcagtttcatgcatagtcatgcaacgcgctgaaaacgttcctgacgcatttttccggtttatcctggggaaaacatccctttttgcggtgttcgcggcagaatcgcgttcagcgcgttttagcggtgcgcgtaacaagtccttacaccacgcgccccaccccgcggtcgttcccgttccgtacagccatcgccaccgacgcgccaaattctggcgaccggacagcaaatcattttgccgtttttgtgccgcagccgttccgcgtgatcgacaaactggcagtcagggaatctcacgaagtgcgcacttatacaaacttcacttcgtttcgtttgtcgtgcggtctgcgacgctcaaaaaaaccgagaaacggagggaattttcgggacaggatgtgcaattgtaa

SEQ ID NO: 30317 - DNA, 1128 bp, Escherichia coli
atgaaaaatattggtgttattggttgcttacctgaacttccagtcgatttcccacttttgatgcctgaaaactcgggaaacatgattcatgctgaagccccattaagaatgtttccgagggcagttcattacaaagatagccgatttattttatcaggcgaaacaagctttagaaattttgtaaataaaacatgttctcatttgattattacccttgctaattcactttcattagaaaagccaaatccggagaaatataaaaggcttcttgattctcttaagcagtatgatgtacctattattgtttttggcctaggtattcaatcgagttctcgagatataaataaagcagagctttgtaaggaagctattgagttgcttgagtttttatctcttaaatcaacacttcttggtgtaagaggtgagtttacaaaacaggtgatagaaaagtgtaccaatataaataatgtgttcgttactggctgtccatctttattttcagacccagaggcattacgtgacctttataaaaaatgttctctaagagattttaatgtagcatctataaatgtgacaaatttgtcacgaatatcagagaagaaactttttgagagagcagtgttaagcaattcattttttattgaaccggtaaataaacgcactcatcaatattacattgatctcattaaggggaaagaaaactcagacgtgccatactactttaatttaatgattaataataatgaattttcactaagcaaagaaaaattaaatttgtacataaaaacaaaatatagattatttagaaatacaaaaccgtggtatgagttcaatcgagaatgtgtagattatacattcggaacaagatttcatgtgaatatggcctctgttcttagtggtgttcctgcattatggctaactcacgatgcgagaacacaagaattgacagagttttttaatctacccagtattgacttagatgctattaattccatgtcattaagtcaaattaaatcatatataaattatgacagattctttaaaaatataaatcaattgtttaataatttcaacgaatatcttgaagtcaatgggttgccaaaaattaaaacatttgaagaagtttaa

SEQ ID NO: 30318 - DNA, 243 bp, Escherichia coli
atgtcaaatatcaccttttctcatgctttattctatcaaaaatcgctcatttttactttttttaccataatgttacttagtggcatcggcaatttacataacttacatgttgttttttatatcctgaaaaaacagatagatagtgtgcacactcgaaatgatattggtaacataaatagctttattcgtgacaaaattcatttgatcaaggttatcaccttatggagacgttacgtagaatga

SEQ ID NO: 30319 - DNA, 426 bp, Escherichia coli; identical to SEQ ID NO: 10824

SEQ ID NO: 30320 - DNA, 528 bp, Escherichia coli; identical to SEQ ID NO: 15035

SEQ ID NO: 30321 - DNA, 348 bp, Escherichia coli
atgaattatgacgagtatcttgataaattatttcaaacaacagctattcttgaaattgttcaaccgggacaaggaggtctgacaattagaacattggaagccctattctataataaaaagttaataacaaataacgaaagtattaccgaatatgatttttataatgcagataatatattcatatataaggagcaggattgtaatatcgatgcgttaaaatcatttttaaaaaaaaataatgtaattatagagcaaaatatacttagaaagtatgatattaatcatcttattaatgaaattctacagtcaccatattcgagtaatttgaatgaacgaaaatcaaattaa

SEQ ID NO: 30322 - DNA, 141 bp, Escherichia coli
atggcgctggcaggcagtgaaatgaagcgcctgtatgccgtcgggagtgagaacgggggcgacggtgacgcattcgtcagggaagaacgcgaagcaatggacgttgtgttacaggcgctggacggggagcacatgtcatga

SEQ ID NO: 30323 - DNA, 192 bp, Escherichia coli; identical to SEQ ID NO: 5763

SEQ ID NO: 30324 - DNA, 258 bp, Escherichia coli; identical to SEQ ID NO: 25290

SEQ ID NO: 30325 - DNA, 168 bp, Escherichia coli
atgcacttccgggtgacaggtgaatggaatggagaaccattcaacagagttatcgaagcggagaacatcaacgactgctatgaccactggatgctgtgggcgcagatagcgcatgcagacgtaaccaatattcgaattgaagaactgaaagaacaccaagccgcctaa

SEQ ID NO: 30326 - DNA, 351 bp, Escherichia coli
atgtcagaccaggtggttgaacttctcactacgctaagctccatcactaaaccagtatcagagtttgtttttgccgggcgcaacgataagaagaagccaatctgcgagaatgcggtattgcttgtgattaaacaaatcggctatgagggtctggaaagcggtcacggattcaggcatgaattcagcacgattatgaacgagcacgaatggcctgctgacgctattgaagtgcaacttgcacatgccaacggcggatctgtgcgcgggatttacaaccatgctcagtatctagataagcgcagagaaatgatgcaatggtgggcggactggcttgatgaaaaggtggagtga

SEQ ID NO: 30327 - DNA, 639 bp, Escherichia coli
atgaaaaaaatagatatatatagcgatacatcagcctatgtcataggctcattgggttttttaattttttttgtttggcagtaccagtcactatctccaggatggcgatttttggggatgtctttgatatcacttggtgcaggaatagcaacgcaggtgttgatgtatctctttaatggatggctctcaaaaagagttgagaaaaaaagagctacttcaatatgtagaatcctagctattccagaagactctacagatcaggatgatattgcaaaatgttggcggtatatgattgcaagatactcaaatgagttactggcaaacagactgtccgacttaatcgggatcgtagttacctctgttggaacaatcatcagtatagggatatcaatttggtatgtcgggatgattgtctattttgtttggaatagagacttcaatgaaccttcccttctttttatacctttatttttcagggtattagcattcatatgtgagttattgctctcttttttctgcaatgttttgttcaacagatacccaggtgaagcaagaaagtttaataaaaactatgatgagttaaggagaacagatccttttctatcaagcaaagagttccgcgattccattcgcaattaa

SEQ ID NO: 30328 - DNA, 411 bp, Escherichia coli
atgtacgcaaaagaagaaggcattattcacaacctgaatgaaatcgcagatatgcaaggtgaagtagcaaaagaagccatggcgaatggccacatggacaccgcaactctctcattaataatcgcaaaaactgctactgaagccgcaaaaatcatcgaagaacagggtgcggaacttacgcttttcaaaactcaaccagtcaccggactggatttatctaacaccggacgccttatttacacaattggctcagagccacagcgatacaccattatcgccggattacaggacaaatacctgatcactccttaccccataagggaatcagcgcttctgacaaatctccacctgatagagcgctctcaggtcgcattcattgatgacgcccaacacaccgtatttaacgcatag

SEQ ID NO: 30329 - DNA, 441 bp, Escherichia coli
atggcaacaccttcaaatattgatgtttttaatgaaactgttggtaaaacttttgcgtttctttatgagtcatttccccgaaaagtaaccattgatgtttgtgctttaaccggtgtttccgctccaacgtttgaagagaaggacccggcagtcagaaagcaaaaacatgaagctcttgttcttcgttattactccattgagtggcttattgctgctggttatgtatctgctgatgctgttccttttgaaagtttcgataaggcggtacttacggctaaaggacttgaattattgaaacttgatccagagtcacttaagcaatcgcttggagataaacttgtcgatgcaaccaagagtggggcgatagatgcaataaaaagcaccgcctcatctgcacttactacaggtatctcctttgcttttaaacacttgtttggctaa

SEQ ID NO: 30330 - DNA, 735 bp, Escherichia coli
atggcactgcaaaatgagaaaaatagtcgttatcttttacgcgactggaaaccagaaaatccggccttctgggaaaataaaggaaagcatattgcacgaagaaacctctggatatcagtcagttgtctacttcttgccttctgtgtctggatgctatttagcgcagttactgttaatctcaataaaatcggttttaattttactaccgatcaactctttttattaaccgcattaccctccgtttctggcgcattattgcgtgtcccctactcctttatggtgcctatattcggtggacgccgatggacggtttttagtactgcaatcctgattattccttgcgtctggctcggaattgccgtgcagaatccgaatactccttttgggatatttatcgttatcgctttgctatgcggttttgcaggtgcgaactttgcttcgagcatgggcaatatcagtttcttctttccaaaagccaaacaagggagcgctcttgggattaatggcggattaggaaacttaggtgtaagtgtaatgcagctggttgcaccgctggtcatttttgtccccgtatttgcctttctcggcgtcaatggcgtaccgcaggccgacggttcggtgatgtcgctggcgaatgccgcatggatttgggtgccattactggcgattgccacgatcgccgcctggtcagggatgaatgatatcgccagttcacgcgcctcaattgccgactag

SEQ ID NO: 30331 - DNA, 930 bp, Escherichia coli
atgagtgaatttggtggtcagcaacccgcaccccaacaagtactggacttaggtgttagtactgagggggtttttaacgaaatagaaatgggggttcttcagaacgggatctcctaccttacgcaaaatgggctggccaggatttgcggggtgcatcgcagtaatatcgcggatatttctcgagagtgggaagagagcttccgccacggagttttcgctcgagggcgtatggagtttatcagctcatatttacagcgtgagcaatataatgagccgactctttatatcccaatcaacaaagatgggtcagtccattatgcgtacccagaagtagtctgtatggctattctggagttctacgcatttgtatctcaaagtgctgcaactcctactgcgctacagtttttccgcgagctatcccgtgcgggtatgcgtggttacatctatacagcgcttggctacatacctgatgacccttggcgtcattaccactctcgtgtgtcaatcatgcatggggcaaactcggttcctgctggacacttcattgtattcaatgaaattgccggtttaatggtagacctcatccatgctggattagcagtaaaccagtacactgtaccggatatcagtgtgggccagcactgggctcgctactggtcttcttccaactacgatgcgacgattggcccaagacaacgctgccagcactattaccctgaagaattcaaccaatccgcaagtaatccccaaatggtctatgcataccctgataatgctttagctgtattcaggcactggcttcgtgcggtttatttaccaaccaaattccctaaataccttctgagtaaagcagggctattggctggcggacaaacggcggcgttgcaaattattgataattttaataatcgtgcattacctaacccataa

SEQ ID NO: 30332 - DNA, 1482 bp, Escherichia coli
atggaaatccaagagtttgtaagtcactataaaaaccaccctgttctattcattggaacaggatttagcctacggtacctagaaaactcatttagctgggatggtcttcttttgagtgtcgcaatggaactaaccggtaatgctgagttttactacgatttgaaagctgaaagcctagaaggtgacgactatcgatatgatatcttagctacaaaacttgaagatatttttaataaaaagctggcagaagatcgtaacggtaagttcaaagacatcaatgatgttttctatgagcacatgaaaaaaggaaaaaaactaagtcgattcaaaatttatttaacttcaatacttaaagacctaaagataaaagagtcaatgatggaggaaataaacagcttaataaaaacaagaaaaaacataggctccatcattacaacaaactacgaccaactcgtagagaacatattcgaatttaacccactgattggtaataacattcttttaagtaacccatacggttcagtttacaaaatacatggctgtgttagtgatcctaacaacataattatcacaggtgaagactacgcaaacttcgacaataaatatgagttaattcgcgctcaattactctcaatattcatacacaaccctatcatatttatagggtatagtattagcgataaaaacattaagtacttattaaaaaccatattctcatacgttgacttaaataccgaacttgcaaaaaggataaaagataattttcttttggttgaatacgaaaaagacagcatgtcaactgaaattacggagcatgacatagatatagaaggcatgtctatcataagaataaacaaaataaaaacaaacaattacaaagctgtatatgatgccatctcgggactagttttgccagtatccgcaatggacataagaaaggttcaaaaagtttggagtaccatcaaaagtggtggtgagataaaggttaaaattacagaaaatttagatgaacttcgcaatgatgaaatggtcattgctgttggttcagaaagaaccgtacaatatgtttatcaaacaaaatctgaaatgatacagaactattttaaaatagttgacgaagcaaactctcagcttatcgcattactgaataagcaaaccatagctaatagcgaacactttccaatatacgcttttagttctatctgccctgaactagaaaataccgagacatacagaaaacggcagctagataaaatcattggtaacctttctcgaattaaaacatgtaagagtgaggctgtgtctattgatgaaatactaaaagaaacgaaagagtataaagttgctaacacgattatgtattgcgtactaaacgatactatttcattgaaacaactacgagattatttaacaaaaccagggcataaaattgatacccaatacaggcgacttttatgcttgtatgattatttatcatattaa

SEQ ID NO: 30333 - DNA, 732 bp, Escherichia coli
atgagtttagcgcagccaaaatcaggagaactgttagatcttctgactccttcattaactaagggtgaaaaccttctgagtgagtttgaaatccatcgaatcattcgtgaagcgaagaaactacctgaacgttatcaggggttatcaattgaaggcttagctaagcttgttcttggtgaaatagatgaaggatgttcactctgtgagcgggggttgagaatagcgcctaacgatccagtttctttttgtaactatacgattgcgctgcgtaacttaggtttgcatgctcgccagtatgtgatgattcagaaagcatctgattcacttaatccaacgatattggctgaggttgctacaatttctgcatactgggttgatatcgatttgcttgaaaaggtgatgccgatgctaactgcaatggaagtaccgcgccctgaagatatgggcaaatggtatgacacgctcaattatctgcatacccaaaaagatcatgctcaggagctaaaaactattgggcggctcatgatgaacgttgcagaaaagtaccgcgctcgtcttgctggcgctcatgctttttatgtaatgtcagaacttgatacgctgttcgttgaagtcaaaacagacgatccagtgcttctttcgcagatgaataatgccttggctgatgagattattattgcggggcttgcggattcagaatgcgtcggatgctttgaagccggggaactctaa

SEQ ID NO: 30334 - DNA, 429 bp, Escherichia coli
atgtcggttgagcatacctgttttcttgaattggctaagcattccctggctctaaacggtgagatgtggacgagaaatgctattagccgagcatactatggtatgtaccattccgccttacggatcaccaacaatctggtaccgaccgctacacaagatggtgaaaaactaaaaggtggagttcacatgcgagtctatacggccttttgtagtggtgaggcagctgcacttaacgatgttgatgttaacgcagtaaagaaaatcggcgttaaactgaaaatgacgcatgcccaacgtgttaattctgattacaagcttgagcggaaaatcaaccggattaccgcgagaagtgtaattctggatgcggaagaggtcgatgcaatcgttaatcaattactgaagattggtgatgactcgttaactgcataa

SEQ ID NO: 30335 - DNA, 480 bp, Escherichia coli
gtgaacgtagctccgttgcactgtaaccagcctgctggcggtgtggcggtgggccatggaaccggtacaccaacaggcaatgcagagccttcccccaaaccaaggttttcgagagccgtttccaccgtgccatccgatttgatatcaccaaacggattcttgcggctcaggtattcaacagcaaaccccgatcccagcaattcaacaaaaccgggcagatcaccattatcaagcacatcccgttgcgttttatcacttacaaactgggccagagctgcagcaataaagctggcctgccgaataaccttattgacttgcgcactggaggctttccctgctgtaaatccagataaaagcgcgggcaacgcttcccattcctcctgcgatataacattggcatttcgatccgttgcaaacgctttaaagtcatttttcgccatcagagtaatactccccatgctcctacatcaaaaccactga

SEQ ID NO: 30336 - DNA, 456 bp, Escherichia coli
atgaagataatcgcaaaggcttttcatcatgtatttggcaaagtatccgatttgccatctgtaataccgatgaacaacagaagggagatgctgcttgatgtggttgtgttcccatacatagacctttctgaaccaatgaaagcaactcttttcagaaagtatcttggcgactttaaacgccgttttacaggcgttaacgggatggttgatatctgctccatcagagatattgttgaacttgcagggattaatttgtggggagaagcggcagcagcatacaaatggcttgaacgcctgcactgtgtttcattcagtgacatgagtgctgatatcgctttaatggttcctcacaaaatcaatatggtctttgctggtggcaattacacttatccatggaaccaggaacaaagagagaacaggaaagctcacgccatgaagagtaatgcgactccataa

SEQ ID NO: 30337 - DNA, 2118 bp, Escherichia coli
atggcagcaaatgtaatcttaccggaaggttttgtgctcgatgaacaacctgataactcacagtttcctgatagttcacagcttcctgatggttttgtgcttgatgcccaaccagaacagcagcaatcacctttggtttcaccagaggaaaattccagacaggaaaatgttgttaataatgctaacggtttcgaccgttttatgtatggcgttctcagtggattgatggatgttggtaaaggtgttggcctgtttcaggatatgacaccagaagagcaagccgcaattcagtctctacagcagaagttagcggcaaaaccatcaaccgcacaagatgttggtgagttcgttggacaagcagcgccatttgttagtggtggtgggattatttctcaggttcccaaaggggcggcaagactggctgccgccgcagggcttggtgctggagaaggggctattgtagccaatggaacaaatagcgatgttgcttccggcgctgctattggcgctgtggctggccctgtagccgaacttgctggccctgcaattaataaaatagctgggaaattaaccaagaagaatgtttcttcgattccagatattgaggggattactcctgccgaagagaaaattcgtaagttatctgcacaaggcaacccaaatcttgcctcttcgcttgaagggctagatctaaaacctcagaaagaaattgttgaggctgcaaataggcttcatgttgattcagttcttccttctcatttatcaggaaatgagcaataccaagctgtagagcaagccctaaagtcacggacaggatcagcgttaaaagctcaagaagataaagcaataagcgaattagcctctagtgctggcaagataatcgatgatgttgctggtgcgccagatgcgttagctatgagcgaaaaatatatttatcagataaatagtagaatggaagcactaaaaaaccgtagtgatcagttatataaacgtgttgattccgctctatcaccaagaacaaaagtcgaagcaaataacacaagcactatgctggaaaaaatcgctgatgatttaggagggtgggataatcttgacccaatagaaaagcgagtttttacagcaataaaccccggcccagatagcatcctaacgtatgcaaatttaaacaggcaaaggcgtttagttggtgatgccctaaataaaaagcaggggccatacaaagatgctgataaagaagcgctatcaagactatatggagctttagctgaagaccaaaaatctgtcttatccaatactggatacttgcgagatttcgaagtcgcacaacgccttgtagctatgagaaaaaacttagaaaggcaaatggtaaatcttcgcgggaaaacacttaatggggatatagcgtataaagtaacgaattctcttcaatctatggcaaaaggtgatgcgagagggtttcgtgagattatgcaaaatactccatcaagaacattgcgaagggagctagtaggaacagcattaagagatatgctttcctctgggaagcgtggggccgactttaatccatctggctttgcagattggtggcaaaacttgcaacacagtggacagctaaagactttggctgaacatttgccaaaagaaacaatgagcggactatatgatgtatacaaagttgccagagcaataaaaaatgctaaagcgcatgaaatatctactggtaagctgaatgagtttgtaaacagatttaatcgggtaacagctccatacgaactagcagcaaaacacattcaaaaaataggcacgatggtaggcgctcattttggatcgcttggagccattgctggggctgatattggagcaagattggcgagtaaagctcgattagctggtggagcaggggcggctgatgctgcggataaattaattgcctcgccagccttccagagcgcagtaaaaaatctacacggaaaagcgcctgggcacattgttgattcacgtatcaggcgctcccctcaatggaagagtttttttaactctcttcctgaacaggaaaaacggaccatcgccagactgggcatcattacttggctatctaatgatccagataatgactag

SEQ ID NO: 30338 - DNA, 273 bp, Escherichia coli
atgcgtagcgccgctgtaattaacaacggcctacggagatatgtcgcttactcgatattgaatctgtttgtagagtattggcttcaatgccgcattgtagctggtttcttcctaatgcgatttttgattacgtacacccttatgtacacggttttttcgggtgctttggtcaaaagccattgtctacatcgctcacgatcgaggtgtgtaaccctgttcaggcttgttgtactgcgcacgcgtattgctcgtgaaattgattgtgagaggtaa

SEQ ID NO: 30339 - DNA, 381 bp, Escherichia coli
atgattcgcacgatgctgcagggcaaactccaccgcgtgaaagtgactcatgcggacctgcactatgaaggttcttgcgccattgaccaggattttcttgacgcagccggtattctcgaaaacgaggccattgatatctggaatgtaaccaacggcaagcgtttctccacctatgcaatcgcagcagaacgtggttcgagaattatttctgttaacggtgcggcggcccactgcgccagcgtcggcgatattgtcatcatcgccagcttcgttaccataccagatgaagaagctcgcacctggcgacccaacgtcgcctattttgaaggcgacaacgaaatgaaacgtaccgcgaaagcgattccggtacaggttgcctga

SEQ ID NO: 30340 - DNA, 750 bp, Escherichia coli
atgcatggaaagaaaggaaatgacctgaacgcaggaaaaaacctcctgttcaccggcaataatggcgaggtcgttctgcagaattccgttaatcaggggggcgggtatctgcagtttgccggcgattacagggggtccgccctgaacggccagacatggatggggggcgggattatcaccgataaaggaacccacgttctgtggcaggtgaacggagttgccggtgataacctgcataaaactggcgaaggtaccctgacagtaaacgggaccggtgtgaatataggcggactcaaggtaggggacggtactgttattctcaaccagcaggcggatgctgacggaaaggtacaggctttcagctctgttgatattgccagcggtcgtccgacagttgtgctttctgactcacagcaggttaatccggataatatttcgtggggataccgtggtggacgtctggatctgaatggtaataacctgacctttacccgtcttcaggcggctgactacggggccatcatcaccaataacagtgagaaaaaatcaacggtaacactcgactttcagacattaaaagccagtgacatcaatgtaccggttaatactgtcagtatctttggggggaaaggaacgccgggagacctgtattatgacacctctaccgggcaatattacatcctgaaagtgcagcagttcatgcacacggttcgacggctagtcattgatcttcataattacctcgcgtaa

SEQ ID NO: 30341 - DNA, 306 bp, Escherichia coli
atgcaccggctgggggaaatcagagaccggggactggaaaaccagagctaccgggccagcgggctgacattgctgactgcggcgatctcactgtggaatacggtatatatagaaagagccatagattctctgaagcgaaaagggatcccactaaatgaacagctgatttctcatctgtccccgctgggatgggaacacatcaacttgagtggagattacgtctggcgaacaaacctcaagctggaacagggaaaataccgttcgttacgctcagtagatagcagtctgtataaaaaacaggcttaa

SEQ ID NO: 30342 - DNA, 777 bp, Escherichia coli
atgaaatttcatcagatccgtaacgccactgcaattattcattatgcaggaaaaaaaatcctgattgacccgatgttatcagcaaaaggttcattccctggttttccattgacgatgaaccgccatttacggaaccctcttgttgacttacctcttccggtatcagaggttattgatgtagatgctattattgttactcatacgcatgatgaccactgggatgctgctgcccgggcgctgatccctcgcgatatgcttatttttgtacagaatactgaagacaaaaacgaactggcccgcgatggatttattaacctacaagttcttgataatgaaattgaatacgccggaattcgcttaattccaactcactgtcaacatggtagtgatgaggcattccgcaaccccgctgcggcagagctattaggtgaagctatgggggttattctccagtctgatggcgaaaagactatctatatagttggtgatactatctggattaatgatgtagagcaggttatgcataaatatcagcctgatatcgttatcctgaatacgggatatgcgcaggtggaaaatctggggcctattatcatgggtaaagaagatgtgctaaggacacataacatacttccaaaagcacatattatttccacacatatagaatctgtaaatcattttggacaaacccgaaaagaaatccgtgagtatgtagatcttaataagattactgaccaggttagtatccctgaagatggtgaagtcgttaatctttaa

SEQ ID NO: 30343 - DNA, 201 bp, Escherichia coli
atgaaggctggaaagaattttcattccttgtcgaaacaagcagcttctgcagagaagaatatggatcttgctcttgcttttgagctctggaaactggcctctttattctgtaagaaaatagagaacatagagtggtgcatgaatagagcaatgttttgcgaggcttatataagcagaaatcaggacggtcagaaactgtag

SEQ ID NO: 30344 - DNA, 405 bp, Escherichia coli
atgtccagcgttaatattcattgtccccgttgtcagtcagctcaggtttaccgccatggtcagaaccctaaaggccgtgacagatttcgctaccgtgactgccaccgtgtgtttcagctcacttatacttatcaagcacgtaagccgggtatgaaagagctgataactgaaatggcctttaatgagccaggaatgatgctggcccggatggctcgtttacatggaattcagccctgccagttgtttaagtggaagaaacaatacctggaaggaactctcaatgctgttgctgctggtgaagacgttgttcctgcttctgaactggccgctgcgataaagcagattaatcaggttcagcgtttactgggcaagaatctatggtccccaccatttttgcaacactga

SEQ ID NO: 30345 - DNA, 825 bp, Escherichia coli
atggctcgccggattgctgatttaggtcatgaagcaaaattgatttctccgcagttcgttcgcccttttgttaagagcaacaagaacgattttgtcgatgcagaagccatatgcgaagcggcatctcgtccctccatgcgatttgtgcaaccacgaacagaagctcagcaggccatgcgggcgcttcaccgggtcagggaatcattggtcagtgataaagtcaaaacgaccaatcagatgcatgcttttttgctggaatttggcatcagtatgccgacaggagtcgcagtggtaaaacgactttcaacagtacttgcagagaacgaacttcctccctatctggcgcagttactgatgcgcttacatgcccattatatttaccttgtcggacagatcaccgagcttgaaatcgcactggagcaggaactgagtcgtgatgaggtaggacaacgtcttcagacaatacccggtattggtccgataaccgccagcgtactgtcatcgcagctgggagacggtaaacaatatagctgcagtcgggactttgctgcttcaaccggtctggtaccccggcagtacagcacaggtggtaaaaatacccttttagggataagtaaacgtggagataaaaatctgcgacggttactcgttcagtgcgcaagatcctttattcagagaatcgagaatcagtcaggaaggttggcggattgggtcagggcgttgttggcaagaaaacactccagcgtagtatgttgcgcactggccaacaaattagcccggatagcgtgggcaatcacaacacagcagactgtgttcgaaaggtaa

SEQ ID NO: 30346 - DNA, 153 bp, Escherichia coli
atgcaaaacattacgcttattggtatagatcttggcaagcattcctttcacattcactgccaagataagtcaggcaaggtattgctgcgtaaaagtttacccgtaccaaacttattgagtttctggcaggctgtgcctcgtctaccgttgtga

SEQ ID NO: 30347 - DNA, 261 bp, Escherichia coli
atgggaatgaacaacacactccccgacgacatcgagcaactgaaggccctgctgatcgcacagcaggctgttatcgtccgtctgtctggtgaaataaccggctatgcccgcgagatcagctcactcagagcgctggtcgctaaactgcagagaatgttgttcggtcgcagcagcgagaaaagtcgcgagaagatagaaaagaagatcgcgcgggcagaaacgcgtataaccgagctccagaacaggcttggtgaggcgtag

SEQ ID NO: 30348 - DNA, 678 bp, Escherichia coli
atgaattctcagacagcaaaagatatcaccggctttcgctcttatttgccagacgcattacgtctaagattcgacgagcaattatctgtccgggctatcgccctgcagttaggtctcagtcattccaccattcataatctctttcaacgatttaatgcctccggtattacctggccattacctgaatcactttcagtcgcccaactcgatgccatactttatgccaatagaaagaaggaattacctgatgatcctcaaatcagcgaaagcacatggcgaaaagaacgacgaacctcctacagtcgtgaatttaaaatcaggctggtaaaacaggcattacagcctggtgcagtcgttgcacggatcgccagagagcacaatattaatgacaatctgttgtttaactggaaaagactgtatgaagagggcttactgaatgatgaggatctccaggaatgccaggccgttccggtggcaatcactgagactcctgaccccgtcaaaccggtgacaaatcctttctggcgaaacaagtctgatgaaagccagaatgacactaccgtagactcaccacagtgtgagctgcatcttaaatcaggtgtggtaaaactgtttgcccccctcactccggaacttcttagggtgctcattcgcgaaatgaaaggagggatccgatga

SEQ ID NO: 30349 - DNA, 402 bp, Escherichia coli
atgtccagagcagaattactgcgtgatattgaagcaattatttctggggcaggctttgagctaagtaactcagaagctccgatgacgtttaaaaaaaatgtcagttatcctggtctgatcgcgggaaagaatgaaatagcccacttcctgttgttcactaataccggtaccgttcaaataacggctaaatggcaggaagtgagtggtaccgcaatagagaagctaggccacacagttcttgatgcacaacacacacaacatcagagttatttcgttgtctgtggcggaggaaagctggtaacaagagccattgattacttaaacgcccatcgaacattagctcctcgtcttagagcaatgcaagtaaaagaactggaatcagcattggaagaaatcatctaa

SEQ ID NO: 30350 - DNA, 1266 bp, Escherichia coli
atgcagcagaaaacgtatcgcgaccctgatgcaggaagacggggtgaagcccctgacgccggttctcagggggctgaaaccgtgcaggcaccgacgaccagagaaagtccatcgtcaacagcgtggctgatggaagccatctgcgaaccagtcaacctcaggcatgccctgaaaagagtgaaggccaataaaggtgcggcgggagccgacggcatgagcgtaagcgaactgccggactatctgagacaccactggccggaactgaaagcgcaactgctgtccggcagctaccgcccatcccctgtaagaagagtgactatcccgaagcccggcggcggcgaacgtctgttgggcatcccgacggtggtggatcgctttatccagcaggcgatgatgcaggtgttgcaggcacagtgggatgcgacgttcagcgacagcagctacgggttccggcccgtacgctcggcgcatcaggcagtgaagcaggctcagaaatacatcgagtcgggctacagctggggggttgacctcgatctggaaaagttcttcgatcgggtgaatcacgatgtactgatgagccggatagcgaaacgagtatcggataaacgggtgctgtcacttatccgcgggtacctgaatgcaggtgtgatggaagcgggtctggtaatgccggtgacagaagggacgccgcagggcggcccactgtcgccactgttatcgaatctgctgctggatgacttcgataaggaacttgagaaacgcggcctgaagttcgcccgctacgcagacgactgtaatgtgtatgtgaagagtgaacgggcaggcaaccgtatgatggcggggctgacgcactggctgaaccggaaactgaagctgaagctcaacgcgaagaagagcgcggtagcgcttccggagacgcgtaagttcctgggttacagcttcaggaggggcagaaaggtgtggtgtgtggtgtcgccggaatcggtgaagcggttcaaaacccggataagagaactgacggggcgtaacacgggcaaaagcctagagcagcttatcgaaccgttaaagcgatatctgacgggatggaaaagctactatggactgaaccagtggcaaacgctgatgagagatctgaacaggtggataaggcgaaggttgcgaagtgttgtggaaacagtggaaaacgggcagcaagcgcttcaaagagttgcgcagacggggagtaagcaaagaccttgcagcgcaaacggtagggagttgccataa

SEQ ID NO: 30351 - DNA, 123 bp, Escherichia coli
atggagttcttggtcataaatatagtatctgacaatgtcaatggcatgcataaatgtcgttattataatgacactatggatgtcattgataataaaatagagcctatttatcattctgtgtaa

SEQ ID NO: 30352 - DNA, 522 bp, Escherichia coli
atgaaaaagataagtatcattgcgagtctggtattcagcttgtacagtgggttatctatagcagcaacagcaaatccaacacctggttctttaactaatacagccaaaggtaaaactattgtttcatcaactggaactattactattttaaattcatgttcattatctattagttcgcctgaacctgtaacatatactattccaactgataaagtagataaatatataaatttcaggttagatattcctgagcctagatgtaaagagttaggaggaactgtttatttttggggggcagatactagagatggaaagcttgtcatggtaaatggcaatgatagatatactttaatgacgacgtacggtggagttacacagcaacaacgaggaagtggttacggatattatcgtgtatctaaaggaactcccgcacaaactatttctggtgtagtatctaaaaacgttggttacaaacccggacaatataccgtaacattgactggattcttcagcttaaattaa

SEQ ID NO: 30353 - DNA, 441 bp, Escherichia coli
atgatgaaaaaggggatagtgtcgctatcctgtggagcttgtctgatggtagtgagtagcctgtcagcggctgcggagattaacttggttagccacagaaacacagaaagccagttacgtgatggtatgaaactggcaactggacgaatgacctgtcgggaaactcatacggggtttcatgtatggatgaatgcccgtcaggatggaggacgtccggaacattatattgtacaaaacagcaaagggatccaacatgaactacgggtcaggataggtggtaatggctggatttcctcttttggagaggctcaacggggaatatttaggctgggcaaggaagaacaggctatatttgatgtgatagttgatggagatcagaaggttattcctggcgaatatatgctttcaataagcggtgagtgtatagttttgggaagataa

SEQ ID NO: 30354 - DNA, 2256 bp, Escherichia coli
atgcgttatggggtgaagacagagaaataccctaaacttttcctctcgcattatggaaaaaaagatgaaagacaatgtgcagatttatctgtaattcctcaagcaaccgaagagtttctgtttgaagcgcagaaattagtgcttagtatccctcaagtagcaattcgttcaccattgagaggagttgcttccgacctgatatgggaagacggaatatcaacttttttgctaaattggcaggtagaggcaggacattcagaatttcaacattatgagaaaacaacgtcagataatttctgggtcagtttggaaccgggaattaacattgggccgtggcgtatcagaaacttgacaactttgaataagtcttctggtcaagtgggaaaatgggaaagctcatacatccgtgcagaacgtgggttgaataatataaaaagtcgtttaacactgggggaagactatacccctgcagatatttttgccagtgtcccttttaggggggtgatgcttggaactgatgagaatatgataccttataatcagcgtggatttgctcctgtaattagaggtattgcacgtactcaagcccggattgaaatacgtcaaaatggttatctaatacagagtcaaactgtagcagcgggaccttttgctttaacagatctacctataacgggatccggtggtgagtttcaggtgaccatatttgagtcggatggagccatacagtcttttaatgtaccatttactacaccagccatagctctgcgtgaggggtatctaaagtataatataagtgccggacagtatcgttcatcggatgaatctgtagaaaaagcatatctatggcaagcaacagctatgtatggcttaccacgggcattgacagtctttggtggagttcagactgctgaacattatcaggctgcagcactaggggttggtttgtcgctaggaaatatgggtgcagcatcattggatacgatttattcccgaggccagcaaaaaggatatgattttgatacgggaaacagttggcgcatccgttatgacaaatcctttaaactgacagacactagtttttcagctgcgagttatcagtattcaaatgaaggatatcatgaactatcagatattttggatacttatcgcagtggagctaactttgtatttaatgatactgatagaaaaaggcgcaggattacaataaatataaaccagtctcttggtccatggggatttataggactaagcggggggagggatgaatataaggggggggacagacaggattatattggagcatcatatagtatgtcatggaaagatatatctttctcagttaactggacacgcaatcgcaatattggggactactttagtaatcgaacctttaatgaagacactgttggtatgtggatgagtatcccattgaagcattggctgggaaaaaatgataatgatgtaaatgccactgcacaaatacagcattccacgagacaaaacactcgttatgaaatgggactaaacggacgtgcctttgaccagaagctatactgggacatccgtgaacagatagtgcctggtagcaagtatgatgcagatacaagccgattgaatatgcgttggtcaggaagctatggagaactagtggggatgtatagttacaatagtcatactcgccagatgaatgcagggatgtcaggaagcatagctatgcatagtgaaggtataacatttggtcagaggttcggtgatacgatggctttgattgcagcaccaggtgtacggggggcttctgttggaggctggccgggcgtttcgactgattctcgtggatatgcattagtgagttatataaccccatatcaggaaaatattattacactggacccgacaactttccctgaaaatgcagaggtgcttcaaactgatactcgtgtcgttccgacgaaaggagccgttgtacgggctaaattcaagacccgagtgggtaatcgtgcagtcgtgaggctggctcgtgcggatggaacacctttaccatttggtacagtcgttaccttagaaggaaaaacggaagtatcaaattctacagggatagtggatgacaaagggatggtgtatctgagtggattgtcagaagctggcaaactgaaggcacagtggggaatgaatagccattgctatgcaaactaccgccttcctgtaaaaaaaggaccagcagggctctatcttactagtgcagtatgcatatag

SEQ ID NO: 30355 - DNA, 903 bp, Escherichia coli
atgacaaaatctgtatcaaccagcaaaaaagcgtcaatacggtgctctattaactcttactatcaatgtatgatatttttttatctcacaataaattggcgcactatatactctatattagaaatgcatatgactaccctaagaaaatatatgaaaatacgaacagctttgctggtaattagtttaccgctatgtttttttgtatctgcaaatgcaaaaacgtttgaaaacgagggaaataagacccaaatgttttctctgcatttgggggctactcgtgtgatttataacattttttcctctggagaaacattaacaattattaatgatcatgattacccaatgttagttcagtcagaggtattattagaagaccaaaaaacaccagcaccttttatcataacgccaccgttatttcggcttgatgccttacaatccagtcgtcttcgtattgttcgaacaggtggtgattttccgaaagatcgggaaactttacaatggatttgtgtgaaaggaattccgccaaagtctgatgaaaaatgggctgagagtaataaaaatagtttaaacaatgtaactttgaatgtgcaagtctcattaagtacttgtatcaagatgtttgtccgtccgtcaagtgtaaaaggacatcctgaagatgttgccggagaagtaaagtggcagagggttaacaataaattaaaaggagtcaacccaacacctttttatataaatttatcagagttgcgtgtggggggggaagaaatatctgaacatcattatatagctccgttttcctcttttgaatatccgattcctgtgagtaagagtagtaaagtacaatggaaaattgtaactgattacggtggggttagtgagttttttgaaactgatataaatttataa

SEQ ID NO: 30356 - DNA, 357 bp, Escherichia coli
atggttaaactggctttacaactaggagcctctgttgcccgtattgcccgggaacacgatatcaatgataacctgctgttcaaatggctcaggctctggcagaatgaagggcgtatatcgcggcgtcttccggtaacaacctcttctgacactggcgttgaattattacctgtggagataacgccggatgaaccgaaagaaccggtggctgctcttactccgtctttatctactcagaccacagtcagtgccagctcctgtaaggttgagttccgtcacggtaacatgacgctggaaaatccttcaccagagctgctcacagtgttgatccgtgaactgaccgggaggggacgatga

SEQ ID NO: 30357 - DNA, 1551 bp, Escherichia coli
atgactgcatcattaaatacagaactgactgtatttaagaaggataaaattattatgtctgaaaatataaaagtaacgggcagatattcattaagccctaggttaaaaggcattgtaatactgattataggtctggttattttctatataggaagccacggtagcagtgaactggaaagttcgcatgttattggtggtctgcttgttgccattgcagccctgttgtttatgatactgaaaacccggatatccacctttcccgctctgattatcgccgccatcattacgggttcattaggagggatgaagagtgacctgatgattcagtctattacgaaaggatttggcggaacactgggtaatatcggcatcgttatcgggtttggtgtgatgatgggggctttgcttcagctcagcggcgcgtccagaaaaatggctcagacctttatccgggtgctgggtaaagagcgtgaagaactcgcacttgtcctgattggtcttattgtttcaatggccgtattctgcgactcagcatttgttgttctgacaccgcttgttaagtcgctttcacgtaccagtggaaagtcaattgtcggcctgggagcaacactggcagccggcttggttatcagccacagtatgatccctccggcggtggggcctttcggtgtagcctctcagtttgatatgccgatagggacattcatgctctggagcatgctggttgccattccggtcacgctgtgcggatttatctataccacatggctgggaaaacgcatttttattgtgccaacggaagatggcgaaggctttacccgtgaatggcaggctgttcccgtgctaaacccacaggaagatgagcaacttcctggcacactgatttccttcgcgcctttgtttgtgccgattattttgatcctgctggcgacattcttccgggaaagcggcattgcagatacatgggctggtcactggcaggggacggtatcaagaatgttcatcaccatcgggcacccggtcgtggctgtgggatgtggacttctgattgcggttattggcctcggaagtcattacgcgcgagaagaagtgacccacagtatggacaatgctatccgatcggctggtatcattttactgctgattggaggaggtggtgctctggggatggttctgagggattccggtgccgccaatatgattgcaggttatatcgttaaaattggcgttcccggtgtactgttgcctttactcctgtccacgcttatccgccttatccaggggtccggtgccgtggcgatgattaccgcggccagcatcaccgcgccgatgatcggtacactgggtgttgatccaatcattgccggtcttggctgtacgattggttctttcatgttctcctattttaacgatgcctacttctgggttgtaaaccgttctctgggggttaccgaagtacaggaacagatccgggtctggagcataacctcaaccatattatgggcgtcaggtacagtcacgctgctgattataaatgcagtatttttctga

SEQ ID NO: 30358 - DNA, 999 bp, Escherichia coli
atgaaaccgttgatcgctattccaatgggggatgcggctggcatcggcccggaaattaccgttaaaactattgcatctgaagaggcattcaaatatgccagaatgattgtggttggaaataaacgcgtgctggaaactgcgtgtaaattttctgatattaatctgaagataaacccgataccgagcatcagagatttcaatgatcaacccggcgttatgaacctgattgaacggggtgatattgatttcagtacattccgacagggtgaaattcagggccagtgcgggaaagctgcgtatgactgcattgaagaagtcgtcagaatggcaatgtcaggggatgtggatgccgtggccacaacgcctataaataaagaatcgctgaaagcgggtcatgttaatttcattggccacacggaaatcttcgggcaactgactgacaccccagatcccctgacgatgttccaggttcgcgatcttcgtgtcttctttctgacacgccatatgtcgctggtcaatgccattcggagcctgactccagaaaaggtctgtgattacgccatccggtgtacccacgcattagagaagctggggctgaaagagccccgtatgaccattgccgcgattaacccacacggtggcgaacacgggctgtttggcacagaggatgatgatattctgctgcccggtattgaaatggcgaaggcccgcgggatttcaattacaggtccaaaaccggctgacagcgtatttcacttcgcgcttcagggaaaatacgatgctgttttgtccccctaccatgatcagggacatatcgcgaccaagatggtggattttcatcgcacgatatctatcaccaatggtatgcccatcctgcgtacgtccgtcgaccacggtactgccaatgacattgcaggaaaagggatcgcagaccctgtcagtatgattgaagctgtccggctggcagcgctatatgcaccctgcttcagcaaacagtaa

SEQ ID NO: 30359 - DNA, 1302 bp, Escherichia coli
atgaaagtagccattattgctgatgatttaacaggagcaaatgccaccgcagcattattaagtacccagggatttacgacattaacctgcctcgataatcctgaatatgccgaagattatgatgtcgtgtctttttccacagactccaggtcggtctcataccaggaagcttatgcgcgggtatcccggtatcttgagattattaacccagaaatcacgacaatcagtaaacgtatcgattccactctgcgggggaatctgggggcagaagtggatgcggttattgaccgttttccgcaactgatggcgattgtcgtccccgtctatccttccagcggccggatttgcgttggcggctccctcctggtggacggtattccattgcagaatacagcaatgcggaatgatccaaaaaacccgatgacagaatcgtctgttatggagctgtttcgcaaacagaccaataaaaatctgggatatatatcgctcagctcagttctggcgggagtaaacaccctggtacgtgaactgaaaaccctttaccacaaaaatgtcagaattgtggtgatagatgccacgacagatgaggatattcatcaaattgctacggccgttctgaaaacaaaagtcccgttcttttgcgtggacccgggagtcttcactgcacagctggcgtatcttcgctattcaagtggtagaaagagaacgaataaaatctttgttactataggcagcgtttccgaactgactcagcggcaaatcaggaaactccgctatgaacggcaggtctgtatcgaaaccttacctgcagagacgctgattgattatgcgtttcacccggagactgcatctgaactggttgcgcatctgaccagtaaaacagatcaatatgatgtggtgggtattgatactgtagagcttcctgaacatatctgttgtctgaaaacgctttccgctaaatattccattgatgaaaatgaagtaacctgcctgataaataaaggccttgctgaaataacagcccaggtactggaaaaggaaagttctcctttcagcgccctgtacagcagcggtggtgatgttgtggtcgctattaccaaaagacttcagggtaatggtgttattttaaaagatgaagttgagccattaactgtttatggaaacctcaccggaggttcctgttgtgaaataccgataatcacgaaaggtggatttgtcggtgatgataatactctcgtacattgtatcgattatctttcagcaaaagtttcaacgcagagaaaagaaacagcagtaatgtaa

SEQ ID NO: 30360 - DNA, 708 bp, Escherichia coli
atggcaaggtacagcaaaaacgacagagtgaaccgtatcattgagatggtcagcaaagatgacaatgtcaccatcagttatcttgcagattacttttcggtgtcacacatgactatccgcagggatgtggaggaacttcaaaataatggtgtggtgaaggttatttttggcggacaaatcgttaaaaacttcattgaaaacagcccggaatacagtaataaatcccgagagaacacggattataaaaaagcggtggtgctcaaggcatacaaattattacgaccccaacagactgtattcatggatggtggtaccacggtaaaacaattgtccggcctgattgatatgccactgaccgtgctgacaaacgatatcagtacagccggtctgctcaatgaaaacgaacttatccgggtaattctctgcccgggggaaattgcgagggaaagtttatcggcctacagcagtgaaacactacgctttctctctgaacattatttcgatattgccttcattggtgctgatggtttcagcaaagaaaacggtgccatgacgacaagccaggtgaaggcagactgtaaatggatggcggcaaaccgggccattcagtctgtattactggtcgaccacagtaagaaaaatgttttctgcaaatataaaatagccgatcttgaattctttagtgaagttataaccgatgatgactga

SEQ ID NO: 30361 - DNA, 999 bp, Escherichia coli
atgccatcagtacaacacgatgcctctgcaggcattatcacacaggccaggaatatactggccagcgaagcacagagcctcctggaggccattccgacgatcggagaatcctttgcaagagccattcgtttactggttgataccagaggacgtgtgattgtgacgggtatgggaaagcccgggtacattgcgcataaaatatctgccactctggccagtacaggtaccccctcgttttatctccatccggcagaagcagcacatggggacctggggatggtgacatcatctgacgtcattctggcgttgtccaacagcggggaaacaccggaaatactggcgttgctgcctgtgctgaaaaggattggtctcccgattatttcactctgtggtaatgaaaactccacccttgcaaaacacagcgatgtgtttctcagtgcggctgttaaacaggaaagttgtcccttaaatctggcacctacaaacagcactaccctgtcactttctctgggagatgcgatggcagttattctgatgaatatccgaaagttcaaaaaggaggattttgcgttttaccatcccggcggagcattaggtaaacggctcctgacgacggtccgggatattatgaaatccggagataactgttgtgcagtggatcaatcaacatcaattctggatacactgttcgccatgacgtcatgtaagaccggtgctgcttcagtgatggatgctcgctgtgagctcactggcattgttaccgatggtgatatcaggcggtacgtgatgtacaacaacctgttccttaataacccggtgactgaagtcatgacgtcatcaccggtctggatttatgaagatgaactggtagaagtggctatcaggaagatggagcaaaacagcccttctccggtctcggttctacccgttctgaacagaaaccggaaggtgaccgggataatcaacctcgccgatatgctgaaaagtggctttctgtaa

SEQ ID NO: 30362 - DNA, 219 bp, Escherichia coli
atgactaaaaatacacgttttcccccgaaatccgtcaacgggcagttcgtatggttctggaaagtcagggcgaatatgactcacaatgggcagcaatttgctccattgctccaaagactggctgtacgccggagactctgcgtgtctgggttcgccagtatgagcgggataccgggggcggagatggagggctcaccagtgctgaacgtcagcgtctga

SEQ ID NO: 30363 - DNA, 504 bp, Escherichia coli
atggtggcccggggatttacaggcagtgaaaccatcgtcagggatgcggttgccaaatggcgtaaaggctggaacccaccggttactactgccgtcagacttccttcagtgtcccgggtaagccgctggttgatgccctggagaataaccagggatgaagaaaattatgcttcccgatttattagtctgatgtgtgaaaaagaacctgagctgaaaatagcgcagcaactggcactcgagttctaccgtattctgaaaacccaaaataaatcacagctaagcagttggttcactcgagtccacgaaagcggttcagcagaatttcggcgcgtggcggcggggatggaagctgatgctgcagctatatgtgaggcaatcagtagtcgctggagtaatggtgttgtcgaaggtcatgtaaatcgcctgaagatgctgaaacgccagatgtatggtcgagcaggatttgaactactcaggcagagggtaatgagtccactggcatga

SEQ ID NO: 30364 - DNA, 600 bp, Escherichia coli
atgcgtaaattatgtgctgttattctatccgcagtagtctggctggttgccgctggtacgccagcgagcgcagcagagcatcagtccacactaagcgccgggtatcttcagacccatactgatatgccaggcagtgatgacctgaagggcattaacgtgaaataccgttatgaatttacggacacgctggggctggtgacgtcattcagttatgccaatgccaaagatgagcaaaaaacgcattacagcgatacccgctggcatgaagattcagtgcgtaaccgctggttcagcatgatggcggggccatctgtacgcgtgaatgaatggttcagtgcttatgcgatggcaggtgtggcttacagccgtgtttcgacgttctccggggattatctccgcgtaactgacaacaaggggaaaacgcacgatgtgctgaccggaagtgatgacgatcgccacagcaacacgtctctggcgtggggagctggcgtgcagtttaacccgaccgaatccgtggccattgatattgcttatgaaggctccggcagtggcgactggcgcactgacggtttcatcgtgggtgtcggttataagttctga

SEQ ID NO: 30365 - DNA, 174 bp, Escherichia coli
atgtcacgtttattgcccgaagtccctttctcacgcgagcaggctgttgtcatcacaacagcttaccgcaatgtgtttatcgacgatgaccagggaactcatttccgtcgggttatccgcaacgcagagactgacgccggaaggttcgccagtgacggtcttctcagacaataa

SEQ ID NO: 30366 - DNA, 465 bp, Escherichia coli
atgaaaactgtggttctgcaacgtgacgcatatcagaccggtcagcaccggttccatccttcgctgtggcagttcggcaaggagatgggcttctctccccgactgtgtcgccccttcagggcacagactaaaggtaaggtggaacggatggtgcagtacacccgtaacagtttttacatcccactaatgactcgcctgcgcccgatggggatcactgtcgatgttgaaacagccaaccgccacggtctgcgctggctgcacgatgtcgctaaccaacgaaagcatgaaacaatccaggcacgtccctgcgatcgctggctcgaagagcagcagtccatgctggcactgcctccggagaaaaaagagtatgacgtgcatcttgatgaaaatctggtgaacttcgacaaacaccccctgcatcatccactctccatctacgactcattctgcagaggagtggcgtga

SEQ ID NO: 30367 - DNA, 261 bp, Escherichia coli
atgctgatggcggggattcagttcaccgctggtgagcatgagttccagttgtttcatcagcagcggaaaggcctggtccaggtggtacgcatctgcatcgctgaacaggcctctgataccggcgcggtcggcaaggtaatgcaaccggttaccctcctgcaccagacgtgccccgaaacagggcgtcacggtgcagggcagtccccaccagaggcggtcgttatggtcgtcgggataatttgtctcatggagtttgtctga

SEQ ID NO: 30368 - DNA, 165 bp, Escherichia coli
atgttcccacggcagacgaagcaggatccgccgtacccgggagcaggactgttcacgcagcgcacggttgagaacaccgatgattttgttctgataagacggccagaagggcgccaggctatagtcgaaatgagggataccattcataagatatgctccatatag

SEQ ID NO: 30369 - DNA, 300 bp, Escherichia coli; identical to SEQ ID NO: 21721

SEQ ID NO: 30370 - DNA, 426 bp, Escherichia coli
atgacgcagacactgaatccggtcatcactgtcaccgtgtccggtcctgtgggcagcggtaaaagttacgtactggcgcggatagaagagatggtgaaacaggaacccggaaacagcgtcattgtcgatgctgctgacgtggagaatgagcgccgtatgagtggggatgatctgagcacatggcagaaaccacgggcaggtacaattatccgactggaagaatacactgagcgggtaactctatcatatagtgaagagcgcatttgcctgacgaatgcactgctggaagttatatgtcccgaaggcaagagcccctggatactgcccgatgctgtacatgccgcaattgctgcattgttcgtattatacgatcaggagctggttttaatggaattatgtaaggttattaaatctacagaaaagtaa

SEQ ID NO: 30371 - DNA, 495 bp, Escherichia coli
atggatacaaacgctttattaacagctcttggctatatcagcagtactgctcagaaaataataaaagagcgtgatcaaataaaacaggccgctttgaccagtgaattacagagtaaaattattgaagcacaggggcagttctttgaggtaacgagcaagctaggagaacagcaaaaaaccattaccaatctggaagagaaaattcgctctctggaagaccttcttaactttcgcggtaattataaactgacgttactgagtgaagaaaaaggcttctatgcttatcgttatacgggaaacgatgaaactgaacattatatttgccagacttgttttgattccaaaaacctgaaaagtatcctgcgtatacggaaagacagtttttgcatgtgtccggtttgtggtcaaaacagtgctgtatggttgaaaggagagccaaatccagttcgtatcaggtctcgtaagagggatgacttctatgatggttttatctag

SEQ ID NO: 30372 - DNA, 1011 bp, Escherichia coli; identical to SEQ ID NO: 4825

SEQ ID NO: 30373 - DNA, 387 bp, Escherichia coli; identical to SEQ ID NO: 12817

SEQ ID NO: 30374 - DNA, 198 bp, Escherichia coli
atggttaaatttctaggtgaagttatgagttcatccgctactgtaaccgtcataactggtgttctcggtgtttctgtgactggcggcaatatcgcgctccgggctggaaaacaacccatcaaaaacgttattgccagacattgcgaactcaccaagtttgattattggtactgttttttcataagtgccgtgaaataa

SEQ ID NO: 30375 - DNA, 1026 bp, Escherichia coli
atggctaagtcaaacgttacgaaattttctcacaatgggcatacttatgagcttcactttggaggatggttaaatcataggtacagtgatgcttctgaggctttgtttgagatatacaccaatgatattcgtctctcggatatgactgttggcgaatacaaatccgccaaaaaagcagagtatgaagccttggaaaataaacgtgatatgacgtttatgaagtttctaaagcaatcctttaaggatgaatatggttatgactgggatgagtccatcaagaggataaaaaaagctatcaacgatagctgtatcccataccttcttcgtcagaaaaaggatgcttctgtaaacgaaagatcgatggctctgtttcgtgctgctgataacggccatgttgcctctacctatttcattgctactgcgctaagtgatgacaaagaagagaaatacttatcgtggttaactttagctcataatcgagggcatgttggtgcagcatacgatatggcagtctatttcgatcagataggaaatactgtcgactccttacgttgtctaatcatttctgctgatagtggctctgacattgcttataagaatctcttcagcatggatttgctgaagaaagtgctaagtatacaagaaggttctaagcttgattctatgttaaacgagttgattgatggctcttataattcctgcgctcgatacttcaaagcagtacgtcttttggtaggagacacgccagctgaaggtgttagccttttaaagatgttccgacaaaatccgaagaaaaagcctgcggacaaagatattgatgatgtttattacaatcaggtggcttttgcagaaaaatttgtagatgcagttctgagagatattagtttaaaaaagcttcctttagtgtctttaatggagagatctcttgagttcgcaaaccctgaccgtgtaaatgagggtcaatcaattacggttggcttcaatgatttcagagaattagttggagttgttgaaaaagaaatttga

SEQ ID NO: 30376 - DNA, 222 bp, Escherichia coli
atgtctgataaaccaaaattcctcgttcctgcaaatcgcaaaattaaaggccgcgcccttacacgcatcgatcaggaacagaaaatgatcaattctggtcctttaggctctgaacgccttctcatcaacgttgctcttgatttcatggaaaagcatccgggtatgtcctgggagcaggctttggttgccgctatgggttactgtgaacgtacttatagctaa

SEQ ID NO: 30377 - DNA, 198 bp, Escherichia coli
atgtttacgtcacgcctattgcgaatgacgattaaatatctgcgcatgatgaaggctgaaactgaccagctcccgctgattattcgcggcgagcgtgattgcctgcccgtgcgcacattcgtcatggttgatgaaacaaccgaagttgagaagaacattgattacggcacagttcctcgtgttccactcaaagaatga

SEQ ID NO: 30378 - DNA, 1002 bp, Escherichia coli; identical to SEQ ID NO: 4952

SEQ ID NO: 30379 - DNA, 372 bp, Escherichia coli
atgtaccccaaactggcaaaagcctaccccaccaataaattaccggatttacgcggagagtttattcgtggctgggatgatgggcgaggaattgatgcggcacgcgctttattgagcattcaaaacgggatgttggaaaaacaccgtcatattgttgtagctaacgatggatatgacacaaaagatgaatgggagttggctacgattttcaaaaaaacatatacacaaggcagggggcttgatgccacaaatacaggagggagtttgactccatcaccaacgcttcattcacgagggagtatcggtaacactggtggtagtgaaactcgcccccgcaatattgcatttaactatatcgtgagggcggcttaa

SEQ ID NO: 30380 - DNA, 261 bp, Escherichia coli; identical to SEQ ID NO: 7695

SEQ ID NO: 30381 - DNA, 309 bp, Escherichia coli
atgaaaaattcatttgagctgataagtaccgacccggtgaaattcaacacatggtcgataaaatcaaaactcataataataatcagaaagttaatgatcgataacaattggtctcaatctgaagcagctgaaaagttaggtatcagtcagccccgagtaagtaacatgctgaacgggaagctagacaaattctccatcgacacattgttagaaatggtgttcaagatgggttacaagctagatatggatttcaacccattaaaaacagaatcaccactcacaatggttgtaaaaaaggcgatggtgtaa

SEQ ID NO: 30382 - DNA, 333 bp, Escherichia coli
atgtcaaacgacgacactgaatatacgttcaaacctgttaatgcccaggctttaaaggcattgagatcactccctgagtgggttcaggttgcattcgtgcacgcattggattcagttttctacggagtggatccggggatgcccatcgtgcacttgacgtccatcggacccggtgttgttgagttgaaaatcaatggtcgccctgcttatcgttgcgtttatcgcagcaaagctccaggtcaagtggacttgctgcatgcgttcgtgaaaacgtgtcaaggacccgataagaagaatatggcaaccgcaacatcacgctacaagttgttgtaa

SEQ ID NO: 30383 - DNA, 312 bp, Escherichia coli
atgactgagtaccagttaagtcttgagggtaatctgcggctgttttttgcaatggcaatcattgtctgtggttacggctatgtaattatttgtgtttttataaaagatatgcttgcctatattttaatgttacttggccttgcaggtctcagttttttattttctttcatgtcgtttaatgatgacaatatgtggggcggttctcctgatttgacgctatcagtaataaatggttcttttgcggccacagttatcttttatatgttttatttcttgagttattccttttgtcggatgggggaaggtgaatag

SEQ ID NO: 30384 - DNA, 237 bp, Escherichia coli
atggtcacagaatataaagggaatatcggagatactcagaatagtattcatggcgaagaaaatattgtagacagacaatattcagagttaaaaaataatcacaaacaggaagaaattcaacaaaacaacagatataatgaagaaaataaacgacagaaattaatgccaacaccgtctgaagatgcattaaaacagatggtggatgataagaaagaacgattgaaggggccattatga

SEQ ID NO: 30385 - DNA, 210 bp, Escherichia coli
atgcgcattgaggccggactgagcacgtatgagaaagagctggcgctgatgggcgaggattatcaggacattttccgccagcaggtcagggaatctgctgagcggcaaaaagccggactctcacgtccggtgtggatagagcaggcgtatcagcagcagatagcggagagtcgcaggccggaagaggagacaacaccacgtgagacgtaa

SEQ ID NO: 30386 - DNA, 324 bp, Escherichia coli; identical to SEQ ID NO: 5250

SEQ ID NO: 30387 - DNA, 327 bp, Escherichia coli; identical to SEQ ID NO: 4991

SEQ ID NO: 30388 - DNA, 501 bp, Escherichia coli
gtgaatgcgaactccgggacgctcaataatgtcaccattaacgagaactgtgtcatcagagggaaactgtctgcaaaccagattgaaggcgatctcgttaaaacagtgggtaaggctttccctcgtgactcccgtgcaccgaagcgttggccatcaggaaccattaccgtcagggtttatgacgatcagccgtttaaccggcagattgttattccggcggtggctttcagcggtgccagacatgagcgggagaacagcgatacttattcgtcatgccgcctgatagtgaagaaaaatggtgctgaaatttataaccgtaccgcgatggataatacgctggtttacagtggtgttattgatatgcctgctggtcgcggcgacatgacgctggagttttctgtatcagcatggtgggtaaatggctggtatcccacagcaagtatcagcgatttgctggttgttgtgatgaagaaagccactgcaggcatcacgattagctga

SEQ ID NO: 30389 - DNA, 357 bp, Escherichia coli; identical to SEQ ID NO: 12270

SEQ ID NO: 30390 - DNA, 432 bp, Escherichia coli
atgccagtccatcaactcaatgggctgacctgccagtgcccctttcacatggggtacaaatttgtagaaattaaggatgtgctgtgcacggggttcactgaaataaatcccccgctcttcgccgtacttcagatcatcaagaaaacgctggcaggccagacggacaaattcgccagcaacaatttctcctgcaacaacacgttcggcgtagcggatcccgtcagccacttttgccatcagtctctcgcttttaaaagctctgccagcggatcaacatcatccggtccggcggtatttactttcgcccggcttgccggtgacataccaaactctgcaagcatcgcccgaatccgcttccaggcatcagccttcatcgcagcagccgggtgtgccttgatcagcacatcgccattctgcgtttccgtgcggtag

SEQ ID NO: 30391 - DNA, 201 bp, Escherichia coli; identical to SEQ ID NO: 20869

SEQ ID NO: 30392 - DNA, 387 bp, Escherichia coli
gtgggctttgatgctaatggtgacgccattcaggcaacaaaagcggctgcggcaatccgtaaaatcacgattgaagcaaaccagaccgctgattttgaagataatgacttcagcggcaaacgctccctgatggaatctgtcgaagcgaagaccaaagacattatgccagtggcatttgaatttaaatgcgttccgtttgaaggtctgaaagaacgtccgtttaaattacgcctcagcattatcactggcgatcgtcctgtactggttctgcgcattattcagctggaagcggtgcaggaagatatggctaacgaatttcgtgatctgcttgttgagaaattcaaagacagcaaagtagaaacctttattggtactttcaccgcctga

SEQ ID NO: 30393 - DNA, 387 bp, Escherichia coli
gtgggctttgatgctaatggtgacgccattcaggcaacaaaagcggctgcggcggtccgtaaaatcacgattgaagcaaaccagaccgctgattttgaagacaatgacttcagcggcaaacgctctctgatggagtctgtcgaagcgaaaaccaaagacattatgccagtagcatttgagtttaaatgcgttccgtttgaaggcctgaaagaacgtccgtttaaattacgcctcagcattatcactggtgatcgccctgtactggttctgcgcattattcagctggaagcagtacaggaagaaatggctaacgaatttcgtgatctgcttgttgaaaaattcaaagacagcaaagtagaaacctttattggtactttcaccgcctga

SEQ ID NO: 30394 - DNA, 306 bp, Escherichia coli
atggtgttactgaacgcagccgtcagttacggcattgtcagactgaacgcaccggtgactgtcgccttcaacatgaaacagaccgtggatgcgttttttgacagcgtcagtcagaaacaactgtcagaagcgcagtcaaaagccctttcagcgcgttttaacacggcactggaagccagcctgcaggcgtggcagcagaaacaccacgcggtcattctggtgtcgcctgctgtggtacagggggcaccggatatcacccgggaaatccagcaggatattgcccggcgaatgagggcggaaccatga

SEQ ID NO: 30395 - DNA, 195 bp, Escherichia coli
atgaacaagcagcagcaaaccgtactcaacatggcaggattcataaaaagccagagcctgacgctgctcgaaaaactggacgcacttgatgctgacgaacaggccgccatgtgtgagaagctgcacgaactcgcggaagaacttcagaacagcatacagacacgctttgaagcggaaaatcgcaccgggatataa

SEQ ID NO: 30396 - DNA, 168 bp, Escherichia coli
atgcatcagcgcaccacctttaccggtatttttttgcgtgacggcaacaaagcggtcgccccatttgcgtttgacttccgccatgaccgcttcggtattgtccatggagccgtcgttaacgcaaattacccggcaaaaataagggttacgcagcagattatccagtga

SEQ ID NO: 30397 - DNA, 174 bp, Escherichia coli
atggggcttggcttaaatgcattgagtgctcttaccgttgtgatgaagtgcagctctttgaagcaaccagaagataagcatctggcttcacaacataaaccgcaggaacgaccaataaacggtagtccgtatggagaacaccccgttgaggaagaggcctggccggaaccgtaa

SEQ ID NO: 30398 - DNA, 1011 bp, Escherichia coli
atggaaaaaccttggccgggcatgcacattagaacatcttgtctggaggatggtttctttagagcaacgcaaccaaagtatcttaatgatccgtcgagtgagtcgcgacttcttccattttttaataaattttcaccagccgattacgcatgggctagaaatgaatttaagaaaatgcaacgagatccatcttatgtcccatctatacaagagttagagtattatttaaaaccttgcgggaaacgatacggagaggattttccacacttgttaatcaatgaaggttttacctcaatggattcatatgatgaatctaaactccaagaaatagtaacgtaccttaacgattatttagtagaagccgtaagctgtcatcttggtgtattctctctatcaaaaagtgattgcaatctacacatgtggactcattatgcatcgataggaaaggggtttgctgtagttttcgatgaaacacacgattttttcaaaatatataggccgtgtgatgttagttataatccagaagatagagcatctataacctattataaaggcgctgtgcgatttaatggctatcctgcgccatcgaggaatatagatataaagaataaagataatacattgcatgggatcttaaatcgagattcagttcgcgagctttttattaataggctcctttatacaaaaggtgaagagtggcttcctgaaaatgaaagtagaattatttttcctttagctgattgcgagagaaagataggaagtattgtctctccatcgattgatgattgcctattaaatgagtatcctgatgtttttcatgactatcatgaaattaacttaaagaaaattcctttttctgcattcaagcaaattaccttagggtataacatgactgaaaaagataaaaatataattttagataaagttagttcgaataaagaattgtctcacgtcaacgtattacattcaaaacttgatatatacggaaaggttgtggttaagcccatgtaa

SEQ ID NO: 30399 - DNA, 642 bp, Escherichia coli
atggataagagaatatgcgttgtttcgatgagcgtcggcaaaccggcgtcaatgactgcggcatggatcaataacgagctgataatggctgagcggaccagctaccctgaacgccgccgcgatatggaactccagctgctgcgcgaattgcgtgaaaaagaggaaaagggttttatcgtgctggtggaagaggaaaacagctttattactggtcgagttggccagcgtgtaaggttgcgcgatcccttcatgaacggcaggccggtactaattgaggcaatgcagatttataaggagctggaacgccagaaagcaatcaagttaccgcgcaaggaatccggcaaatacatcctccaccaaagcatcttcgattccgaacacgataaaaaaggcgatgaatttttcaacatcaactggagcgaaataacgacagagcatgttctgacgttactatgttgctttgcgacggaatacaacaacgttgccagcgccgactacatcagggcaatgacttgtgaagtggatagtcgtgatgactcatcgctgatagcgtcatatataaacatcatcaagaaaactcaaattatgggatgcgctagagttcctcaaggaatactcaccggaaagaataatattctataa

SEQ ID NO: 30400 - DNA, 195 bp, Escherichia coli
atgcttatcaggcacctcattaaaacgggtgccgggattgagaccccggataatgcaaaaggcgacacagacgccaaaagcgtcttttttttgtgtcatgccatcgcacagccatacgtagcgtttagctcagagatcaatggtagtgctggctgggctgccgaaaggcaggccggttcccttttgcgccggtag

SEQ ID NO: 30401 - DNA, 216 bp, Escherichia coli; identical to SEQ ID NO: 5262

SEQ ID NO: 30402 - DNA, 207 bp, Escherichia coli
atggaaaaaatcacaacaggtgtgtcatacaccacgtcagcggtgggaacgggctactggttcctgcagttgctggacagggtttccccgtctcagtgggcggcaataggcgtgctggggagtctgctgtttgggctgctgacatatctgactaacctgtatttcaaaatcagagaggaccgtcgtaaggcggcacggggagagtaa

SEQ ID NO: 30403 - DNA, 345 bp, Escherichia coli; identical to SEQ ID NO: 4961

SEQ ID NO: 30404 - DNA, 324 bp, Escherichia coli
gtgacgataatcgaggctgagagctttcttaacctcgaacccgcgcctgcggtaagaatgaatcagccattcggcctgttcttcagtacatgggggatgctggaaccagtcagatttgaaagtgcgggaacgccgcccgtgcctgctggcaaagacggcagaatcatcagaattgtgaaatttggttttgtgcgccatctgttttctctgctggcgcagcaggtgtcaggtgttcaggctgacgtgcgaattgtaaaccagaatgccaggaaaaaacaaaacccgccgaagcgggttacgtgcgggtgcgttgaggatgcctga

SEQ ID NO: 30405 - DNA, 555 bp, Escherichia coli
atggacgggctggtatcaaatatttccgatgcactggccgggaatgttgtggactggaggaactgggggagttcagttctccgggaagtttcaaaaattctgatgaatgcagccattgttaacggactgaaatcactctccggtgccggagggtggcttggtacggtcggcggatggatttcgggggcagtggcaaacgcaaaaggtggtgtttacacatcggcaaatctgagtgcgtacagcaacagcattgtggacacgcccacgtactttgcgtttgcaaaaggggccgggctgatgggggaagccggacctgaagccattatgcccctgacccgggcggcggatggctcgctgggcgtacgcgcggtgggcagtatgaacggcagtgccggtctggtgtattccccggtctaccacatcgccattcagaatgacggggctaacggacagatagggccggaggcggcaggcagtcttgtgcagctgattgaccagcgggtgcaggcggtgatgctgtccatgcgacgtgacggaggaatgctgagtggctga

SEQ ID NO: 30406 - DNA, 324 bp, Escherichia coli; identical to SEQ ID NO: 5250

SEQ ID NO: 30407 - DNA, 261 bp, Escherichia coli
atgatggatgtaaaagagaaggttttgcaggtgatgcgttcccgggctgccctgcaagataaagctctcggcggggaatatccattcaggatggcaacctggaatctgcggttggcaatggagaaggaatttcctgatgaagaatggcgttcggcagatttgcgcaaaattcttatggagatggctaaagatggaacagtatccaaagatacccatgccagccggattggtcaggcggtatggagactggaggtgagataa

SEQ ID NO: 30408 - DNA, 471 bp, Escherichia coli; identical to SEQ ID NO: 28884

SEQ ID NO: 30409 - DNA, 408 bp, Escherichia coli
atgagtttgaccaaagaagatttagtatttgacctttactacgcatccagcactgacgaagaaggcaataaactggcccagctgaccgttcagttccgtgatgcatcggctgttccgcatgtgactacccagctggcccgcacaactcttaagcgagatcgctcgaaggtttatgccgtcggcgagcaatccgtgaaaaatggttcagacactctgctggccgccattgaagcctattatcgaacagacccgaagaccattttcgaaaacctgatggcccaggttcaggatatgatcgagggcaaccttggcgccaacaatacctgggttggttcttacggcatcaccattgtgtctggcggctctctggaagagtatctgcctgagtccgtctacaacgtccagtaa

SEQ ID NO: 30410 - DNA, 282 bp, Escherichia coli
atgaccgatttcaccatctccccgaaagaagaaaacgtatggctggaatcctggcttgacctgtcgccggccgagcagaaagaaatggatcacgtcgaaccggacgaacaaaccagctcccgcttcttccattatcaggatagcgtttatgacattgccgatttcatgcgcgatgaccgcttcccggaatggcacgccggctatccactgaatgccttcgctatgctgatgatccgcgtgacagattcaggcgacgccatcgacatcggattacttcattga

SEQ ID NO: 30411 - DNA, 141 bp, Escherichia coli
atgctggtggccatcaattaccacctgctttcccgcaggctaaaaacacccacctcttaccgccaggctaccgaagcacccacctgttcccgtccggctaccgcaactttccactttgacgccttattcgtacaacgataa

SEQ ID NO: 30412 - DNA, 1479 bp, Escherichia coli
atgacagagcaatgcagcattcctgaagcgtttgaggaatacctgcagccagccagattcaaggtagcttatggcgggcgaggttccgccaagacgcgaacgttcataacaatcctcctcaataacgtcatctatcacggatggaagcttatctgttttcgtgagtacatgaagtccatcaaggaatcatgctatgcggaaattgttgaagagattaaccgccgaagcctccactcactggtgactatcaataagacagagatatttgccaatagcggcggacgtatcagtttcgacttcctgcgccttaacgtggaaaatatcaaaggttacgcaaacttcgatgccgcccttgtagaggaagcagaaaacgtatcaaaggactcatgggaaacgcttatcccaacggtacgtaaagagttctacagcgctgagtatggtcgagtggttgagtcggaaatatgggttgcatacaacccgaagaacagactcagcgatacacatcagcgctttgttacgaatcgcatataccccgactatgacgaaaacggtaatcgctactgcatcgtcaagcagatcaactacacagctaatccatggttcccggaaactctccgcagggatatggagattatgaagaaggctaatcacgagctttatcggcatgtgtatcttggtgaaccggtgggggcatcagaaatggctattatcaagtttgcatggttagaggctgcaacagacgcccacattaagctcggatggaaagctaaaggtgcagtgattgcagcgcatgacccgtcagacaccggcccagatgccaaaggatatgcagtgcgacatggatcagttgttaagcgcgtatgtgaagggctgctcatggatataaacgagggtgctgattgggcatcttcattggcggtaatcgatgatgttgatcatttcctgtttgatggagatggacttggagcagggcttcgtcgacagataacagactatttcagtggaaagaaagtcaccgtaacaatgtttaaaggtagtgaatcgccattcgacgaagatgctccatatcaggctggggcatggactgatgaagttgtgcagggtgataacgtccgcactattggagatgtattccgaaacaagcgagcgcagttctattacacgctggctgacaggctttatcgaacataccgggcggtagagcatggtgaatacgccgaccctgatgaaatgcttagctttgacaaagaggctattggagagaatatcctcaacaagctattcgcagagctaacgcagatccaacgcaaattcaacggcaacggaaagcttgagctgatgaccaaagtcgaaatgaagcagaagctcggtattccatctcctaacctggctgatgcgctgatgatgtgtatgcattgcccggagtcggctgcgcaacccgactattccagttactcaattccttgtggtgtaggttga

SEQ ID NO: 30413 - DNA, 444 bp, Escherichia coli
atgcttacttgttttgatgtcgccgactacttcctgtcgcggtgtgacgaggatagcggtgacgcaatctctaatttaaaattacaaaagcttgtttactatgctcagggtttttcattggcgttgcttggcgagcctctttttcagaataagatggaagcttggatgcatggccctgttgtccctgagctttatcaccgttataaacaatatggtaatggtgctatcccttctccagagtcttttgatgctgaaaaattcagcgaagaacagttagagctattagaagaagtctgggatgtttttgggcaattttctgcctggaaactgaggaacatgacacacgaagagtcaccatggagatcaaactatattgagggtgttggtggttctgaaattagttctaaggagatggcagagtactttgcaactcggattaactaa

SEQ ID NO: 30414 - DNA, 483 bp, Escherichia coli
gtggttctgaaattagttctaaggagatggcagagtactttgcaactcggattaactaacgagatggcaagaaaatctaaaaggattatcccccctgctgaatctacaggtaagttaaagttagggccgcagtcaggggggaattcagatcaaaagaaaccgaaattttcattctgttacatccaaagctctcactgcataacgaaatgccaaaaagatgagaaagctggcttagctgataaattatacagattaagtcaactaacatgggcagatattaagcagcaaggtaggcataagcttggatttgagaagattgcaaggggtgcaattaaagcaggtatccccagtcatataacggaagacgtagatcatttcttggcttttagatttgatgatttgaaagccatggttggttatcgtcttggatcgacattttttgttatatggcttgatagagagttcaacctatacaagcactaa

SEQ ID NO: 30415 - DNA, 555 bp, Escherichia coli
atgacaacgattgttgcaggcatcgatatcgagtctacgggactggatttccttgctggtcataaaattattgaaatcgcaattacccgctatgaactggagacacagacaatggttgatagttttgtaatgcggttcaacccgcgtcgcagtatcgatccgaaagcgcaagcggtacacggcatcagtcttgaagatttagccgccgagccgttactagccgatcacgcttcatctgtcgcttcgtacctctcttcttccgatatttggatagcccacaacggcgaagcgttcgatattccgtttattaggcatgagctgaaaagttacggtttttcgcttccagacatcccattgattgacactctattttccctgtgggccacagaagacggtaaacgtcctcgccttgaagaattggccttctctcttggctttatatacgatcatgccaaagcacatagtgccttatatgacacaaacttaatgatgcaatgcttctttaaggcacgtaataaatacggattttttaaattaccctctgaaattgtgtaa

SEQ ID NO: 30416 - DNA, 726 bp, Escherichia coli
gtgaatgagatttactacctgacgttacgtgaacgttattcaccaaaaccagcgcctaaatgctctgtttgtgacgaggaaatgtcaatacagcgcatatctggagcacatgttgtttatgcctgttccggtgagggtgatgacggatattttaagatagggcgtacttttgcagacgaacattatgaaaaatcacgcgtaacagtagttgatgatagtgatcccgatgtgattgcactgctggacgaactggataaaagacagcaacacatccgacgtcttgagcaggagaacgtagagatggccctaacgcttgagaaactgcgtgttgagctggagaccgttaaacagcgggaaaaggatctgtttatggaaaatgttcgacttaagtcaggtatagcaggtctgatacacctcggtattcgatatgcggatgtcgaagtcatgaaaatagctggtgatgcccagctttctactccctgtactgacagcatcataaacagtattgcatcaggcgttttcaccaaagaggtcagcattatgagaacagtagaagttcgcgctgaagatgtaaccccaggtgatgtggtcataacatctaaaggcaaacgatgtgcggttaaatctttctggatggaaggtgacaaagtgactctgttcggtacggatggttccgaaacggattatgactacgacgaattacttgttgttgagagagctatctaa

SEQ ID NO: 30417 - DNA, 696 bp, Escherichia coli
atgaccaccgttaacaataagaaatgctacccaagcgagcaatatcttaatgagctgatcaccaacatagagtttgctgcaaggacacctgttgaagtcgtgagagcgatggcagcagagctacagaagcggcgcgaagctgatagtgcagaacctgtaagccaaacttacaagttgccagttaatacaccttgccaagatgcgccagcccatatctggctgcaaacggctggagtatggccagaagatagcgagttaagcgaattaacgtggtgcagccacaatcagcaccatgatgacacgctatatgttcgagctgaccttgtgaatggcaactatccggatattccggatagttcggtgccagcgccaggaaagggcgtcaccggtgaacgtatccgcattaagccgcatgtttatcgcgaactggttaaccgcctccacgatacagcgatcaagtgtgctggcacccagcaattacgagaaaaaattagccgtgttttgggcgacgttattacgccagatcatcataaacaagccgagaaaagtgacctggaaaggtgtcaccttgaggcggcattaaatattaagccgggacatacgcttggcattatcgatgctctgttggttcataagatggccagggctttattgccgctggtggatgctggcgatacaagcgagggtgaagtatga

SEQ ID NO: 30418 - DNA, 1407 bp, Escherichia coli
atggcaagtatttcatcgctgggagtcgggtcaggcctggatttaagttcaatccttgatagcctcaccgccgcgcaaaaagcgacgctaacccctatttcaaatcagcaatcgtcgtttaccgctaaacttagcgcctacggtacgctgaaaagcgcgctgacgactttccagaccgccaatactgcattgtctaaagccgatcttttttccgccaccagcactaccagcagcaccaccgcgttcagtgccaccaccgcgggtaacgccatcgccgggaaatacaccatcagcgtcacccatctggcgcaggcgcaaaccctgaccacgcgcaccaccagagacgatacgaaaacggcgatcgccaccagcgacagcaaactcaccattcaacaaggcggcgacaaagatccgattaccattgatatcagcgcggctaactcgtcgttaagcgggatccgtgatgccatcaacaacgcaaaagcgggcgtaagtgcgagcatcattaacgtgggtaacggtgaatatcgtctgtcagtcacatcaaatgacaccggccttgataatgcgatgacactctcggtcagcggtgatgatgcgctacaaagttttatgggctatgacgccagtgccagcaacaacggcatggaggtctcggtcgccgcccagaatgcgcagctgacggtcaacaacgtcgccattgagaacagcagcaacaccatcagcgacgcgctggaaaacatcaccctgaacctgaacgatgtcaccacgggcaaccagacgctaaccatcactcaggacacctccaaagcgcaaacggcgattaaagactgggtgaatgcctataactcgctaatagataccttcagcagcctgaccaaatacaccgccgtagatgcgggagctgatagccagagttctagcaatggcgcactgctcggcgactccacgctgcggacgattcagacgcagttgaaatcgatgctgagtaataccgtcagttcttccaactataaaacgctggcgcagattggtatcacgaccgatcccagcgatggcaaactggaactggatgccgacaaactcaccgctgcactaaaaaaagatgccagcggcgtaggtgcattgattgttggcgatggtaaaaaaaccggcatcacgaccaccatcggcagcaacctgaccagttggctttcgacaacaggcattattaaagccgctaccgatggcgttagtaagaccctgaataagttaactaaagactacaacgccgccagcgatcgcattgatgcgcaggtcgcgcgctataaagaacaatttacccaactggacgttttaatgacctcgttaaatagcaccagcagctacttaacgcagcagttcgaaaacaacagtaattccaagtaa

SEQ ID NO: 30419 - DNA, 684 bp, Escherichia coli
gtgagaataataacagcattactgatgtcattttttattttacctgttcatgccggtgtggtcatctatggtacgcgcattatttatccggaaaaaagcagagaagttctcgtacagttaatgaatcaaagtaaaaatgcctctttgattcaggcatggatcgatgatgggaacaccactatcgcgccagaaaaaattcaggtcccatttattctcacaccgccagtaagtcgtgtagcaggtggttccggccaacaacttaaaataagaaaaatgccaaacaatttgcctcacaataaagaaagtttattttatctaaatgttctggatatccctccaaacaacccacaaaatgcaggaaagaacaaaattaaacttgcattgcaaaaccgtataaagttactttggcgtccaagcggaatagctccggtagataaaaaaagcctttctcaattaaatatcaaaaagaaaaacaacgccatctcaataaacaatgaaacagccaactggataacagttacaactatcaaagcacaaaacgtgaaagttaataatgaaagtatcctactgcctccattttcgaataacgacattacattaaaaaataacaacgcctcagaatatgaactaacggtagttgatgattacgggaataacatccatagtaaaatcgccgcacgataa

SEQ ID NO: 30420 - DNA, 261 bp, Escherichia coli
atggcagcgacgcacacactccctctggcgtcaccgggcatggcacgcatctgcctttacggggatttacaacgatttggccgccgcatcgaccttcgagtgaaaacgggggccgaagccatccgggcgctggccatgcagatcccggcatttcgtcagaaactgagcgacggctggtaccaggtacgcattgccgggcgtgatgcaggtgaaaccgaattgtctgcccgtcttaatgagccgctggaaatggtgccgtga

SEQ ID NO: 30421 - DNA, 1095 bp, Escherichia coli
atggcgaaacgggtatggcggcgggagcgtgacctgacggggtggatgtcgctgtcgcgtaaaccggaggtgacgtggtacggctgggacggcgaccacctgacgacggtgcagaccgacagcacacgtatccagacggtatacgagccgggaagcttcacaccgctcatccgcatcgaaacagacaacggcgagcgggagaaaacgcagcggcggagcctggcggagaagctccagcaggaagggagcgaggacggacacggcgtggtgttcccggctgaactggtacggctgctggacagactggagggggaaatccgggcagaccgcgtgagcagtgaaagccgccagtggctggcacagtgcgggctgacggtggagcggctggcgacacagatagagccggtttatttacctgagcgaaaaattcatctttaccactgtgaccaccgggggctgccgctggcgctcatcagcgaagacggcaatacggcgtggagcggggagtatgatgagtggggaaacctgctgaatgaggaaaacccgcatcacctgcaccagccgtaccgtctgccagggcagcaacacgatgaggagtcagggctgtattataaccggaaccggtactacaatccgttgctgggacgatatattactcaggacccgattgggctggcggggggatggagtctgtatgcgtatccgctgaatccggtgaatggtattgatccattagggttaagtcctgcagatgtagcgttaatgcgaaaaaaagaacaactaaaccatcaaagagcatgggatatattatctgatacttatgatgatatgaagagattaaatttaggtgggactgatcaatttttccattgtatggcattttgtcgagtgtctaaattaaatgacgctggtgttagccgatcagcgaaagggctgggttatgaaaaagagattagagattacgggttaaatatgttcggtatgtacggcagaaaagtaaagttatcccattctgagatgattgaagataataaaaaagacttggctgtaaatgaacatgggttgacatgtccatttacacaagattgctggtaa

SEQ ID NO: 30422 - DNA, 486 bp, Escherichia coli
gtgatcgctgttggacgatttacagagcaaaagaattttaatgagttgattgaaatttggcatgaggcaaatatacctaattggacgttatatatcattggtgatggccctaataaaaggattcttgaaaaagccatagctggaatgtcatctatcaaaatgtttaaaacaacagatgaaatttgcaattactataatgctgccaaaatatatgcgatgacttcgttatatgaaggattacctatggtgttgattgagtcccagagttttggaatcccgagtgttgcatatgattgtccaactggcccggcagaaattattactgataatgttaatggttttcttatcccttttaaaaacagagagctttttatacagaagttaagaaaattgacttctgatgataatttatcaaacatttttagtactacttggaatataaaatatggtaagagaaactgtttcgataataatgcctgcttataa

SEQ ID NO: 30423 - DNA, 276 bp, Escherichia coli
gtgcgcgtccagcaggtcagcggcgctggcttttttgatattaaaaaaatcgtccttcgtcgccacttcactgagcgggataattttaatgccgtcagctttcccctgcggggcatagagaaacaggtttttaaagttgttgcggcctttcgacttcaccatgttttcgcgaagcatttcgatatcgttgcgatcctgcacggcatcggtaacgtacatgatgtatccggcatgagcgccgttttcgtaatacttgcggcggaacagcgtggctga

SEQ ID NO: 30424 - DNA, 315 bp, Escherichia coli
atgttaaagcttgaagaattattagagtatgctgagcaacttaaggatgatgatgcggcgaaaatatcgttgtatttcattactagacatcttaaagcgggtatgagtagaaccgcaagagttgttgataaattcgattttaaaatcattaaagctccaatcgctccagatattgctaaattttttaagtatactttatcaaaccagattatttctcatgcttcgaaagatgatattgtgatgaaaaagtatactgttattgatgatgctgtctcttatacacatctgacgctgccgacgaatagagaggtgtag

SEQ ID NO: 30425 - DNA, 219 bp, Escherichia coli; identical to SEQ ID NO: 12770

SEQ ID NO: 30426 - DNA, 8052 bp, Escherichia coli
atgtccctgaccctgaataaaatccttgtgttatgcgcattgctgataagcgcaatgctgcctgggtggtcatgggcagaatctgcatggcaagactcttcagatacggtcggcgaatttaacggtaccgtgcctactgccgacagcgccagcatacccgtctaccagggcagtgtctttctcgatcctgcaaagacgcatgatgtagcgtttaccgctaaaccgagtgaattcagcgcggatgttagcgtctctaaattgctcgtcaccaatccgcaagacagagaaggcgatatcattgccaccccacgttgggaaaaccaaacgccaccggcaatatctttagtttgggcggatgccgcgacgccgggcaccttactggacccacagccagtcgcagatcgctcgttttgcgctcagggccttgccgggcgttcgctggtcgcctgggcgcagcctgatccccagcagaccatgccgctgttatatttactcacctcgacgggctatccctatgaaagtgttctgacgctcgccgatcagaaagtgacgctgaagattgcgcccgcgcagggtgaccttatttccgtcagcgctgcgggctatgacgaatcctcaggtgcggcgaaaatgacggttggcggcagtatcacgttaacggtcaccaccaaagattgcgtcggtaatgttgtggggaatattccttttgttatcaaacgcaaagatgctgaaaaccgccagggtgtggtgaacaatactgcgcctgtaaaactgggcacgaccgaattaaccaccaccgcgacggaatatcgtggtactaccgatgcgaatggtgttgccacggttacggtcacccaggccaacggccctggtgtaaaaacgccgttggtcgcgagcctcgcgggtattgctcaggccagtgaaacggcagtgatctttaccgtcctcaccagcccggatgtcccgcaggctacaatgtggggtcatatgcccgatacgctgaaggcccgtgattacacttttagtcgaccaaaactggcggcggaagtcgataatgaagacggtacggttaacgatcacaatgaaacctggtccacctttacctggagcggcgcggataaacattgcgacattttgcccggaatgcgtcagttcggtgcgctggcgacggtggtgccaacgtcagtgcaggatgtggctggttggccgatgcagggtaatttctactggtcatcactggcggggatgagcggccagcaccatgcggcggatgtttcgaaccgcagcgaagcgcaaaaaccggacgatacgacgtttattgtgagctgtgtcgataaagaagcgcccgatgttgaaccgaagctggtactgacgccgggcagctatgattcgacgataaaagcgatgaaagtaaaggtgggggaagaggcttctttacgtctgacgattaccgatagcaagaacaacgatcagccgctggcttactactacttttcgctgcatctggatgacggcattaaccgtaagaatcaaactgacgccgcgtgggagacgcatccggtacaaattgatggcggcagtaacgttcgcaaagttgacgcccatacctatgaagggatcactgatgctaacggagaggccactctgacgctgacccagccaggcggcgtgggggtgaaaactcacatcaccgcgagaatgcgcagtgattttactgcctcggatgagaaagacgttatttttacggtgatcaccagccccgataccgacaaagcgcggatgtggggccatatgttgggcattattgaagcgaacaatatctttaaacgcccacggctggcggatgaaaccgacaacgaactgggatcggtgcgggaaaataacgaagactgggcgctgtttgatcagaatagcagtatgcaggctgagtgtggtttaggtcatattccgagccaaagttcattgcacagtttgtttgccgctcatccagccaatgccatcggcaccgaatatggctggccaacgttgcaaaaagcgtatcttagtgcggtggaagagacgtcgcacgcgtcggtaaacctggccacgggcaacatcgacacctattccggctttaagcaaaactatctctcttgttcgggcaatgagatggtcgccaagattgccgcgaccaccgatcgtgatgtttccgcaggcagcagagcgcaggccaaagtgggtgacacgatcaccatgacggtacgcacctttaatgccttgaataatgcacccgtgccgtataccgcgttcaccatcactaaagatatggggaaaaatcgtcaggggcagactacaggttttgatgatccaacccgcggcgcaatcgagatgaatggcacactctacggaacatcgcaaccgtctttagtctatgccggtactacggatgcgcagggttttgcgactgtggaaattaagcaatcgcaaggtgtgggcttatcgacgccgctaaatattgtgcctgtgaactcctatattcccaatactgttaattacaatgtgattttcactacgctcaccagtccggatgcggttggcgcgcagatgtgggggcatatggatgagacgattaccgtcgatgctttaacctttgcccgaccccgactggctgcggaagtgttcagtccggacggcacattaacggaaaataacgaagtctggtcgcgagtcagccaggccaacgcctccagcaccagtaaaggtggctgtggcgccaatatgctcccacgccgttctcagcttagtgcgctctatgatgccaataacggtaacggtgtacagacagtacacggctggccaacgcagcgtcagccctactggagcagttcgcccgcagatcaggtaccgcattattacaccatagccctcaacgatggggcgcggaccgttggcggtagcacggcggtttatgtcagttgcctgacgacggctaacaatcctgccagcagcattacgctggaagtggtagatccggcgcagtggaacgcggctgcaaatgcggcgaagctgaaaaaaggcgaaacgctacaggtaaaggtgacggtaaaagatgcgcagggcaatccattgggtgatataccctttaccctgaaacgtggcgatggttatacccgctcagaggaaaaacacgttgctggtagcggtgatgcgctggttgcgccggttgtggtcaatggtggcctggcggacgaaacttcgcttaataataccgctgcagcatacagcgccataaccggcagcgacggaactaaaattctcactattacccgcccggatacccatggcacgaaaacgtcgctgaccgctacgctctattcagatacaacgaaaaaagcgaccctcgataccatttttaccgttgtaaccagtccggacagcgataaggcgaaaatgtgggggcatatgcctgaaacagtgacggctgcagatggaacggtctttaaacgcccattattgttgaaagagttatccagtacgtcgggtcgaacagcgattgcagaagagaatgaagactgggcgcaatttacccaaacccaggctataagcacatcctctaatggttgtggtagtgaatatgttccctcccaggccgggctggagtcattgtatgaagccaaccgcggcaatgcgatgaaaacggttcagggctggcccgtcgcctcaagttacctttccagcacgacaggtagtagtagcctggaacagcgtgacttcaaggccgtcaatctcagttcaggcaccagttcgataattccatctgccacaaaagaactgcttacctgccagacgacgccgattgttaaggcaagccaaattgttcttgaagctgcagaccccacaaaatttgacagtacgaataatgttgtcaaagcgaaaaaaggcgaagaagccgtattacgagtgaccactaaagatgcgcagggtaaccctgtgggaaataccgcatttaccctcaaacgaaacaccagcgtgaacagggccaatgtgtcaactacgacgtcgattgcttcgctggcggtaacggatgcctggggaaatactcaagatgattttctttcaacgaccctggttatttatggcgtgacgggggctgatggcatcaccactttcacattgaagcaagaccagactaccgggctaaaaacagaactcacggcagcgttggattcctccagcagcactaaatcgacgcttcccgttgtctttacggtgcttaccagcccggattcgccaaaagccaaattctgggggcatatggctgaaacggcgacaggcgatgacggtcttatttatcgaaggcctttactgagggacgagaatagtgctaccaccagtatcggtaccctggtggaagagggggaggcctggtctacgttcccgtcgggccaggctaacgatacctcgataaatggttgtggcgcggagtatgttccaactgacaatgaacttagggccatttatgcgcaccaggggagtagcgcattacatgatgctattggctggccagtgtcgaggttctatatctcgaataccgttgcagatacgttcactcaaacctttacgtatgatgtcgtttcgctgaagacaggagatgaaacgcagatgccctcatctggtggtgcattactgagctgccggaccacgcctgtcgccgttgccagtcagatcattgttgaggcgaatgatacggcgcaatttgtcaaagttgacgacaccttgagtgcgttgaaagtgaaaaaaggcgaagacgcggtgattcgcgtggtgactaaaaatgcgcagggaaatagcgtgcccaatgtcccctttattctcagacgtgaaggctcgaagaaccgtcaaaatgccgagatgataaataagtcgattacggtaattaacgcggcaggcgcttctgcgaggatgaatagttcttcaagcctgctttatggggtgactggcgcggacgggactacctcctttacggtaaaacaagatgattctatgggcctggtaaccaatatgtacgcccagttgtatcagctgacgatagaatccaacaaattaccggtcatgtttaccgtcataaccagcccggatacgccactggcaagttactgggggcatatgtctgaaacgtttactacccggtcgggaattgcctttaagcggccattgcttactgccgagcatccagcgggacagtcaaccatggctaataatgaatcatggctttctttgaatacggcagcaaaaaatgatgtcagcaaatcagactgcggcgaaccttatcaaccgttattaagcgaatttcaagagttatacagtgaacatcctaatggtgcgatagggaccgatttaggccttccgctgactaacacctggtgggcttacgataaaattgcctacgcgaacgtctggtacgatcagtctattaatttatcgaatggatcaagctccagggcattatcaaacaccgtggcatttgtgtcctgtctggtaaaccctcatgcagtggcagcttctataaagatgacctccacggcactggatgcggagaaaacggccagcaacgatggtcgccctagtgcaacggcggcgaaaggtacggcgatccggatgacggtgattgtgcgggatagcggaggaaatctgttgccaggcgcaaactttaatctcatacgcgggactgcgttggatcgtgcaaaaaacaggctagattctacgtatgatgatcttactatcgtgccggtcacccctgccggagtaaacatgtcactctataataatggggcacaggcacttctgacgacaggaagtgatggtaaagcgacttttgatgtgacgcaaaacgagacttatgggctggcaactccgctcactgcaacattgatgcgcgacaccacaaaaagtgccacgatggatgttattttcactgtgataaccagtccgaactcaccgaaagcaaaatactggggtcatatgcccgacacgtttaccagtagggcgggggtgacctttaaacgaccgctactggcagcagaagcgaccttggggtcctcggtaagtaataataatgagtcgtggtcataccttttttataccaataaagttacgccggattgcccggttgagtatcagccgcgtctcaatgagttacaggggctatataatgatcatccaggcgggacaatactgacagatttggggttgcctataactgccggaagtggaaattggtggacttatgaaatgagcaccactgacgcgttgacgtggtattacggcgtcattaatttgaaaacgggacaatcgacgacgactattaatggatacgctttaatgctctgtctgacgcagccacattcggcaccagcaagccttacgctgtcatcgactgcctatgatgagggccgaactgccagcaatggtggtacccccacgtcatctgtgaaaaaaggtgagatgcttcccatcgtggtgacgatcaaagatgccaatggtaatcctgttggcggcgaaggtgttacgctcaagcgcgtgcaggcgaaaagccgttcagggatctctgtatcctccaataccgtagatgatctcattttagatgaagtcaccccgacatcggcgcgtatctccttcaaccagaatacgtcggcatggagcggcttcaccggcagtgatggcacgataacgttcaacgttacccaaaataacaccgttggtctggtaacgccgtttacagcttcattggcgcgaaatccgcaggttacggctaatcaggacctgatattcacggtagtgaccagcccggattctgcgaaggctaactactgggggcatatgccagcaaccttgacggcagtgaatggtgcggtatttgaacgcccgaaattgtggagtgaactgacatcgacttctggcgtcggcaagatcaataacaataatgaagactggccgtactttaccccaacacagaaatcagatgcgagtgtgagcccttgtgaagtagcaaggcagccactattcaatgatttaagttcgttgtctgcgcgttatccgaataacacgtttgtcactgaaactggctggcctgcgtattacacctggtgggcagaggataaatccgccgatggtaaagaccagtcggttgatttgagaaatggcacgctgtatacgggttcaacaaaatcatttcagccttgcctggctaacgcgcgttcaaccgtttccagcgtcacactgacctcaacagcgtttgatgctgacagccaggcggcgaaagtgaaaaaaggcgaagccatgtccgttaccgtgacggtgaaagacagcgccgggaatacggtgccgaatgttgaatttactttgaaacgtggtgaggcatcgccgcgtaacgctggggcaacgttgtatggcaatgtagtggcgatggacgatctcatcgttcagccgttatctggttcggctattacgctgagtgaaagcggtaataccattagtggcatgacaggcgcggatgggacggcaagtttttcgctccgccaggataatacccctggttataaaatgccactgacggttactctggctaattacgcttccgcgacagacacgctggacgctatttttacggtgccaaccagcccaaatgtttcatcggcgcacttttggggacatatggcagacacggtagtggtgaatagtaaatcgctacatcgaccgttgttaacgacggaattgccgtccggggctaatcccgtatcctcaccgattattaactacgaaaactgggcttctgcacatatcattgatgccagtaaatgggatatcgcaaggcagtgtggcagcatagaaaatgcaccgacatacaatgaattagagttgttgcatactgtttttaattcactgggatggccgtcttcacccagttttccttatttgtcctctcaacagtgtgggatggacgaaggtaccggagcacaggattgtagtatcacgctaataaataaaccgggtctggtgacctgcttccagtaa

SEQ ID NO: 30427 - DNA, 219 bp, Escherichia coli
atgcgtaaagcccgttttgctgagcatcagatcatcgctgtgattaagtcggttgaagccggacgaactgttaaagatgtctgccgggaagccggtatttctgaagccacctgctcaactggaagtccagatacgggagtatggaggcttctgatattaaaaagatcaaggaccttgaggacgagaaccgacgtctcaaacagatgtttgccgacctga

SEQ ID NO: 30428 - DNA, 246 bp, Escherichia coli
atggatccttttgtggtccactacaacctgccgccgcagaacctggaagagattcggaaattcgtatcgtgggtatcgctctgccactgcctgcagcgcggcaataacggggtcatcacgcgtggtatccaggcggtaatggtaaaccgttctgctcaggttcagactacggtaggcctgacggatactgagtccaaacgtcgttatcagatgagtaaccagctcacgcttaaaggctggttttaa

SEQ ID NO: 30429 - DNA, 303 bp, Escherichia coli
atgcatgatgccctggtctgtaaccgtcgttttcgcacgttcaatgtcgtcgatgactttaaccgtgaggtgttgtcgattgaaatcgatctgaatctgtcagctttgcgagtggtatgtgtactcgacaggatcgcgacaaaccgtggctatccggccatgcttcgcatggataacggaccggaatttatctctctggcgctggctgaatgggcagagaaatatgcagtaaaactggaatttatccagccgggtaagccgacgcagaacgctttcattgagcgctttaaccggacatactga

SEQ ID NO: 30430 - DNA, 537 bp, Escherichia coli
atgaacatccccaatatctttaacatgaaagttgaactcaccgccggacaaaaggcagaacttgaattcctccatcgtgcatgccgcgataagagagaatgcgatcgtattaaagctatccttctggcttctgaggactggagcgtccccatgattgctcaggctcttcgtcttcatgagaccactgtgcaacggcatatcagcgagtacctgaacaagggtaaactgatgcccgaaaatgggggttctgacagccatctcagtgaggcgcaaacggctgaacttactgaatatctgacgaataaccttatgccaaccactctggccatcattgaaatggttgatgagtggtggggcgtccgctataccgttgcgggtatgaccaaatggctgcaccgcaatggcttcagctacagaaaacctgttggcgttccacataaatgcagtacacaagcgcagcaggcgttcgtggaaacgtacgaaaagctgaaacaggaagccggtgacgatgaacccatcctgttcattgttcattga

SEQ ID NO: 30431 - DNA, 558 bp, Escherichia coli
atgaacccatcctgttcattgttcattgatggtgttcacccgacgcagggaacaaagctggcgtatggctggatgcccgccgggaagaaagcccaggtagtggaaaccacgggcagtcgtacccgcctgaacatcatgggagccctgaacctgaacgacatcggcagtacggtgatcagggagtatgacaccatcaacagcctgagtatctgtcagttctttatcgccatccgggaagcgtatccagtaacgcagaaagtgcatattatccttgacggcgcaggctatcaccgtgcggaactggtacaggactgggcggtagtgatgaatatagagcttcactggctgccgccatacagccccaatcttaacccgatagagcggttatggaaggtaatgaatgagctggtgagaaacaattattacttcgccacggcaaaggaatttaaggagaatatacaccacttcttcagtgataccttaccgggacttgccgggagcctgtcgtgtcgtattaatgatcacttccagaagatgaaaaatgcatcttcaagttaa

SEQ ID NO: 30432 - DNA, 2511 bp, Escherichia coli
atgactgaaaaaatcattcttaatcttgatgcacctgaatatcatgacgcatttaatccaggtgcaacacaaagtaatgagcgtgagttatggcaagttcaggcaaatagcaagctgattgaaaacctgatcagaatgggttttgactcgcggaaatacaaagaacatcttaaacaaaataattatgcccgcctgactagctaccatcatgctatttttatcagcggtgcacgtggggcagggaaaacggtttttctgcgtaacgctcaagccgtatggaatgattatcgggaaaaattcccaagtagtccaaaattacattttattgatgtaatcgatccgacactgttagatatcgacgatcggttttccgaagttattattgcctctgtctatgctgcagttgaagataatttaaaacatcctgatatcagacaaaccgtaaaagacgattttttccatgcgcttaaaacattgtcaggtgcgttgggaaaaccgcaggaaattgatgaactacgcggtatcgatcgtattcagaagtaccgttctggcattcacctcgaacgctactttcacctgtttttagttgccagcgttaacctgttagattgcgatgccctagttttaccgattgatgacgttgatatgaaaatcgataacgcctttgcggtgctggatgatattcgttgtttattatcttgcccactgatcctgcctcttgttagcggggatgaagatctctatcgttacgtcaccacgcagtccttctctcagggttacggtagaggctacggcgctggcaccatttccgaacagttatcaaaatcgtatttaacaaaaatatttcccgggcattcccgcttgccgctacagccgattaatgaattgctgaacaagctggtgatccgctatcaggatgaaaacaatgaagtcaggcaagaaaaaagcatctcattttcacagtatgaaacacagctaaaagagaaattttatgcgctgtgcaatggccaagaacgcagcacacagtggccacagccgatcagcgcgcgtgaagccactcagttgattcgcacacttccgcctaaattattatctgaagagacacccaatgagattgatgtctggcgaaaatatttaagctgggcagaggaacatgaagatggtgtgtctgccaccaatatcgaaagctatttggcaattctgggcttccagtcagccacacaatttgattttacaaagctgattgccttcaatcctaaactgcaagctgatcgctatagctgggcggaaaaagatctcctcagtcagcaattagaaatgatctcgaagatgaaagcccatgaaaccaattacgatatacttaattcactgaatttagtgggaatattacgcagcatgcccccgcttgagttcatcatggagccgatgtacattcgtacgccggttgcaagtaatcctcaggacagcgctatactgctggcactatacacacatcacgactactacagccgtcaactaaaccggcgctatcacgtcttttttagccgcgcctttgaatttttgtcatggtcattactggcggttaccggcaaccttccagagacatttttcgaaaaagagaaattcaaaggcctcttcagaaatctgttcttccgagcgcctttttactctattttttcaatgaaccacactaaagagatcaatgaagaagagggggagacgcactatcaggataatccggtcgattacacggctgagattgataagcttatcaacgaaacatatgcgtgggtgaaagaacgccaggtgatggagcttaagggtaaaaactttattccgttactcagcgtggtctttaataaagtgttttcgcagttgtccgttttacgtatcaatttgacggacaggaaaatggccagagaagagtttctgtccgatttatcacgccgctttgaatatatcttcatcaatgctctgctcacgtttactaaagatgggttggtggtgaataccaacgttgcgaccggcgcccgcgcgtctatcgtgcgcagctttagcgagttttctaaatatgaccggacgttatcacgaaatatggctggcgttatgaacgttgagatagaggaggggaaggttaatattatccagtcaggcaatagtccggttgcgaaactggctgtcgcgatgtggtgccatcctatctttaatattaagacagagaaagcgtatccgattggggatgcggccagcagtttagccaccgacgataatatttttctacatatggattttgaagaaatgaaagatttctattttaaaaactccggtaatagcacgataagaatggccgaagtacgggagtgggccactgcaaatcggcaaatggccagctctatgcaacaccagatgcttgccaatcccaacatccgtcctttggttcatggcacatcacaaattgcccggctgtatcgtggattggaacaaggcaccaaccagcaggcggataactaa

SEQ ID NO: 30433 - DNA, 2565 bp, Escherichia coli
atgtacaatcaggatccgcattggttgatacccacggtctacatggcgtctgaccgattattttatcaccatattactcatcatattgatgccggaaaacgtgatgttgaagcatcatcgggggaagaagaaagcattgctcgggccgcattggattatcagttttatttcggcggacgtttgcgtaaagaagatattgccaacagcttgcaatgctggcgcgcaggtgccagcgaggaaccacatcgttttgttatcaagaaattagtacagcgttttctggtctggcggggcaatggcttcgaggtaaaacgtgagcaattagagtcctggctgatgctctgttccgtattcgatcccgcatggatcatcgcagcgggctacgcggagttatatcacagtagcgtgctgtctgaacgcgacgtgacggtcttgttaaccggtaatcaatgtccgtttgcatttccagttgaaaacaacgatgtccattatgcagataaccacgtacactttaacggtcatgggtatacttcgttatccatgctgagctttattgaacgttcgcacgttgtgcatgacggttttaaatggccttatcgtcaggaatatacctatttcgaaagccagcgcctgcagaaagaaaaccttccacattggctttgtgcttatacctcatcgttgttaaaactgatatttaaccatcaagcatctattgaccacggccaattatcattagatttaagcagtcatctaaccggcgaccagctattaacgctggacgatataaaaagcttctatcaacccgccacggctcagcagcggattctgtctttatcgacggataatgacctgacaggtcatgctaaatggctgctgttttgcttcggcttaatggtgggaaaagaacaacccagctatcagttagtcctgaataatttgatacgtggttgtaatattctacgtaattatatggttgtttcttcgttgggcctagggcaatttatggatttttttggtgcagcgcgcatgggggtgcagcgcgagaaaaaatttaacgatacggtgaattttgataacaagccgtctgtttatcgagagtatcgcgttggctctgactttttagttggtcgaaagaaaaaaccgaatatttaccaccatcagttgacggattttttcactcagcatgatgcaattaataaagccgaacatgcacacattgtagtgcatttcagtaggcgcttggctggtgctaaacgtaccgataaacgtgtcgaagcgacgcgcgggaaattgttccaactggtcagggaatttgaaaaattctctacctcattaagcatgcaacatacggtctatcaacctgacataaccgcgccgggtaccaatattgacgtgcgtaaattggtgcgcggttacgatgtcgcaggtaatgaaaatgatttgcccattgaagtgttcgcgcccgcgctccgggttttgcgtgcggcgaaatattcagccggtgagcattggtcgatcaggctgccaaggccgtttattacagtccatgctggagaagattatggacatttattgtgtggtttgagggcgatcgatgaagcggtagaattttgccaactgggcgaaggagaccgcattggccacggattagccttaggtgtcgatgccataaaatgggcgcgtgaacaaaaacgcgcctacatcactgctgggcagcatatcgacaatcttgtttgggcctatcatcaggcggttaagctgtcacaacatacggcggcgcacatccccgtaatgcatgaattgcgcgataaaattcatcactggtcgcagcggatatttaaagatatctatacgcctaacttactttatcaggcgtggctgctgcgccgcaattggcctgattatgctaacttggagtccgtcagcgcgaataggctggaatgggcccctgactgggatgcgttgcaggaagatcatacgccgtcagtgaaaaatgtcactgcttatcgtttatggcaacgctatctcaacagcggtttgcatgaaaaggagcccgccaaccggattatttgcattaactgttgtcctaacgatactgagagctatttgtcgcccctgtctgaagatgaggatttcatttctcagggggagcttaagctgtatgaagccattcaggattacctaaccgaaaaatacagccgtcttggtttagtgtttgaagcctgcccaacctcaaatatttatattggtcggtttgagaaatatcacgaacacccgctttttcgctggaatccacctaatccagaatggttggcgaccggcggaaaatttaaccaatacggcctgcgcagcgggccgctggcggtgtgtttaaatacggatgacagcgccttgatgccaactaccattgcgaacgaacaccggctgatacgtgaatgttgtatccagcattatggcatcaactcgtggatggcagatttgtggattgacgctattcgacaaaaagggatgatggtctttcgagccaaccatctcatgcaagatgatggcaaccacaccgcctga

SEQ ID NO: 30434 - DNA, 315 bp, Escherichia coli
atgaagaagcatattattaccgcactgctcatcacaacagtatccgctccggcgctggcagcgtacccggtaagccagcctgctcaggccgcagaagtgatggtcagtatatgccagcagcagcgttcgggtatggacaagaaccaggccatccgtaaagtctatggcaccgtaagcgactggcccatagcttcaacaactgaagttgctgctgcgatggatgaaggatggaattttgctgtacaaaatccagagataagttgcgacaaaattcatcccatgatgattgacatgctggatgggaaaaaggattga

SEQ ID NO: 30435 - DNA, 519 bp, Escherichia coli
atgaggaaaaccgctgccatgttgcttctggcattttcaggttgtgccggggcaaaaacactccccgcagaaaatttgcaggggctgtatgaggcttatgccaccctgaatacctgccaccagtatggttacactggcgatgaggccttaactgcactggacaaacttatccgcagcaatcgctatcaggataatagcggcaacatcatgacattaacgaaggacaatattaactattaccattcccttcaggaccgctttattcttgagcagcaattcaaaagcgaaggaataaaccagagcggtatccggctccagataaaaaccctctgcgaccagatgaacgccgctgttggtgggaagttgggtgtgaaaacccgtgttatttcaccggatgaccttcccaccagcgcaaaacctgtttttgacaaaccggtcactaacagtgccccggcaattccggaagaccgaccgatgacatgggacaacagtccggtccagggtattccggttcagtga

SEQ ID NO: 30436 - DNA, 528 bp, Escherichia coli
atgtcgaccaccattactgaagtaacggaatgctttgagtacctttttagttccctttaccggaaagcatttgtcaaaaccctgcgccttaacgaatgcagtgaacgggagttgctaccgctggtacgctgctacctgctgggttggtttgccgacagcgtctcaccggaagtccgggggaaactgcccggcagtatctccgggcatggctatattgatttcgtcattgacgatgtggcggtggagttcgccgtccgtaagccaggagccgcccgttctgcactgtcagcctcagtcaacagcacggaggtaaagaaactgatgaagtatgacggcaaagccctgctggtactgttcgatttttctgacacgccctataccgaagaacagattgaatccttcagaaactggccctccctgggccgaggcaaccatcgtaaatccgcgttcaatgttgcgtatttctttgtggaaaaacgcagcccgctgacacccaggaaaatcaccagaaatatccgcatccgttaa

SEQ ID NO: 30437 - DNA, 489 bp, Escherichia coli
atgacgtttatcgcaagtgatcgtagcggtcattatcagacgctggagccggttacccgcgaacagattatccggtttgcccattcattgctgacccgccagtttcgcaatcgccgaaaaatcacctcatctgaagatgtacgtcagtggctggtgatgaagctggcgcttgaaaaccgtgaatcttttggtgtgataatgctttcacagcaacatcatattctcggctaccagacattgtttatcggtacgctgagccagacgatggtttatccccgcgaaatagtcagcttggcactgacgcacaacgctgctgctgtgatactggtgcataaccatcccagtggtgagcctgaaccgagccaggccgataaactcattacccaaaaaattacagacgcactggcgttgctggatatccgcgtgaccgaccatctcattgtgggaggcgacaaagcctggtctttcgctgaacacgggctactgtga

SEQ ID NO: 30438 - DNA, 432 bp, Escherichia coli
ttgaacatcaatgccgttattcagccggcaggctttatgctgcctgtcagtctgcaactgtacgaactgctgatggcagaggcgggcgaaatacccgcccataaacatcggatcaccgccgtgacattcaacttccgggacccggactacagtgtggagcgggggggttatcacccggtggagatccggctaattcatcagggcgatgagtggtgcctggactacgccaccgattttggctatgtcggcacggtctacccggagctggagaaaatcatcgatatcagttggtcgcagggctatgtctggcactactgtacgggggatttgcctctaacggaagtaagggcgctttacagcctgtgggagcgtaacttcctgagctactacgccagcggggtctacaccacgcgcgtgctgtgggaaagctga

SEQ ID NO: 30439 - DNA, 360 bp, Escherichia coli
atgacagatctgaaagactacgatacgccacccacacatctgtgggggctacagtgcaacgtgacgccatgcttcggggcgcgtctggtgcaggagggcggctgcctgcattttctggctgaccgggctgaattcaccggtacgttcagcgacagagacgcacgccatctggaccagatatttccgctgctcatgaggcagatggaaagcattctgctgtccggtgaactggacccgcgcagggcgaaggggatcacgctacaggtagaagggctgatctgcgaggctaacacgctcggctcctgtggctacgtgtatatcgccatttatcccatggcttcccggtcttcgggacagtag

SEQ ID NO: 30440 - DNA, 618 bp, Escherichia coli
atgaaaaaacaaccggtctcaccaaatcggacactatcgtgctgcctgtcccctgctgatgtctggcacactctgctggcttacttgctggagaagcactacggactcactctcagcgacacgccgtttagcgggaaaggtgccattcaggcatacattgatgcagggatatcactgacggaggccctgaattctattgttgaaaagtacgacctggtacgtacagaccagggtaatgccagctttatcccccagtctccgcacattacctccattgatattctccgggcaaggaagaccactggacttctgaggcagggcagttaccaagccgtcagtcacatcacacagggacggcattcacgtcctgaccgcgcagcaccagagcccacaatacagacgccacaactgcccccggattcgtttactcgtttggaagcagaggctgtggttgcgacgtataacaatgtcgccattgaggatgaccagcatacccacttccggttggtgatacgcgacacagtggggcagcttatctggcggacatggaattttgagactggcgctggtcggagcctgaatcgctaccttcagcattatggtgtgaaaaaacgctga

SEQ ID NO: 30441 - DNA, 948 bp, Escherichia coli
atgaccacgagccgcaatggtaaacgcgcggcatctatccacccgcaaaatgccctctccatcaacccagcattgctgtggctggcaagcctgacgccagccgggcgcagggggatgcaaagcttactccgacgatgtgccggtatcctccgtccgggggcgaagcccgacacctacccctggcatacgttggactacacgagcgtgatgcgggtacgctcggtgctgctggatgagggctatgctgttgccacggtgaacatggcgctgtcggcgctgaaatcggttgccggagcggctttcagtatggggattctggatgctgacagactgacgcgcatacgttcagtcaggcgtgtcactggcagtgccacccgcttgggcagggcgttggacaggaccgaaattcgggccatgctggcggcggccggaaaggctgacgctgtacgttgccagcgtaatcgggctattttgctgcttctgtgtggcgcaggtctgcgtgccgccgaactggtagccctggacgtgggagatatagatgtagccacggggatcgtgattgtcaggcagggaaaggggcgcaaaatccgggaaatccacctttccggaaaagtctgcatgcaactgcggcgatggctgaagctccgggggtatcatgccgggccgctgttcagtcgcatcagtcgtgcggggcagccaggacgacaacggcttaccaccacgggtcttacagggctgttggcgcagttacgcgaagctgcaaaagtggattacttcaccccccacgacctgcgacggacattcatcacccgcctgctggagcagggagtggacattaatgtggtgcgccagttggcaggacatgcggatatatccacgaccacacgctatgactgtaggggcaggcaggctgtagacagagcctccagggcgctatgttgctggtaa

SEQ ID NO: 30442 - DNA, 447 bp, Escherichia coli
gtgaaggtttacctggatgaaaccactctgcagttactggggttacttcaggaaaatatgtcagaaggtgatatgaagggtgatgaggtcaatatgttccgtagcatggctataacggccagtatccacaccctggcaaaagaacgactgggggaacaagaagtatcgcatatggtgatcaagaacctcggtgctgactgcccatccgacgaagcgacaaaaaacccacgtaagtttcttctccggacgatgattaaccacctgtatgataatggcacacacaatccgcaccgccgtcgattgtcagaagtggctggaattatgaatgaaagcagtttcaggaacccgaagaacaaaaaagggggatggagtgaaaatgatatcagtcactatgtcagcaatgacataaaactggaaaatgatacctcggttgatgtaccgggctaa

SEQ ID NO: 30443 - DNA, 195 bp, Escherichia coli
atgaatgatatgaaactggtcaaaattcaggctgtactggaacgctgtgcggtgagccgcgccacactgtaccggatgattgaaaaagggactttcccacgccaaaaatccctgacaggaggacgagcggtggcctggctggaaagtgaagtcaatgagtggattgcttcccgtgggaccagaggaggttgctga

SEQ ID NO: 30444 - DNA, 873 bp, Escherichia coli
atgtttggtacaaaccgtattgcgcgagcagtgtatgcatcactgacagaagaagagcgccaactggaaaagttagctcttaccattccgggttttgaaacccgggagcaaatggagaaggaacgcctgtaccgcataaaagcaatacgaaaggctgtgcggcagaacaggaatgataatcaggatgagagcaaagaagtcagaaaagcacacaaaaagtggcgagggcggatgtttcggttaaagagaaaactggagggctgtatgccagaacatcaatgtggtagcgcggcctgcccacagtgtttccgcctgcacaggttacgtaagctgactgaattgctcccactgagggcctctaagggcgcgtacagagtggttacgctggtttattacgatgccatgctgaaagaagacgagatcagccgctgggatcataagaagttccgggagcgggtctacaagatgataaaaagagccggatttacgggcaaaatagtgggtgactacgagctggattttcacaccgatatccagcgctggatgcctcacctgcatctactgatgccgagagagacgggggcgctcaaaacgctaagaaaggcgatgaagagggataaaaatatgcgggccagagcggggataatcagtcggccgatgaaaagccagaagctgaaggattttgacgagcaggtaacatactgcttcaaggggatgtggctggaagtaagaccttatcctgatgaggcaggaaaacgccgtacccccaaacacaggctgccacctgttctgttggcacgggcgttatgtaagcaggatgagatggggtttactggactgacatttacctctggggtgagaacccgtaagtag

SEQ ID NO: 30445 - DNA, 990 bp, Escherichia coli
gtgagagcattactgacccctgaaattgccccgcgtatggggatcgtattgttcaggcccggttcagagctgatgcccctgtttatgcaggggcgtgtcctgctggagcctgagccggaacgttattcatctttcgccagtggtgccgttccggcggcatcacaaccgctggcggatgatcctgccgttcgggccgtgttccgcaatgaggcagtgatccgtcgtgctggtggcgtggaatgtcttgaaagctggttacttcgtgaaaaaggctgccagtggcctcattccgactggcacagcgagaacatgacaacaatgcgacacgctccgggcgcaatccgtctgtgctggcactgcgataaccaactgcgcgatcagttcacggaacggctggaatcaatggcaacggataactgtgcccgctgggtgttgtctgttgtgcgtcgggatctcggttttgatgacagtcacgttgtgacaatgccggaactgtgctggtggctgattcgtaatgacctggcggatgccttaccggaaagtgcagcccgtaaggcactgagattaccgaatcctgttgtgccgtctgtcacccgggaaagtgaccttgtgccttcggttcctgccaccagcatcatccaggataaggcgaaaaaggtgctggcgctgaaagtggatccggagtcgccggagtcttttatgttacgcccaaaacgtcgccgctgggttaatgaaaagtacacgcgctgggttaagacacagccgtgcgcatgttgtggaaagcctgctgatgatcctcaccacctgataggccacggtcaggggggaatgggtacaaaagcgcatgacctctttgtgttgcctttgtgcagaaagcatcacgacgagctgcatgcggataccgtggcatttgaagagaagtatggctcccagctggagctgatatttcgttttatcgatcgtgcactggcaattggcgtactggcgtaa

SEQ ID NO: 30446 - DNA, 141 bp, Escherichia coli
atggaatgtcaaaaccgttctgataaatacatctggtctccccatgacgcctacttctataaaggactatctgaactgattgtggatatcgacagattaatttatctatcgctggagaaaatcagaaaagatttcgggtaa

SEQ ID NO: 30447 - DNA, 1377 bp, Escherichia coli
atggcaagtaacgcgaattttatcagccagttcgtcatgggcggcgatccctgtacgtataaggaatccggtgaactgcaggctgaaatgagtaaactgactcacccggcccggccagacgtggactggcgccaggtggaaaaactcagcctcgcgctgttccggcaaaatggcgtggaactacagacgctggtctgttacgtactggcgataaccagacggcaggggctggcagggatggcagacggactcggttcactggatatactgctccagcgctgggctgacttctggccggtacaggtacattccagaatatcactgctcggctgggtcacagaaaaaatgcagcaggcactgagaacgctggatattcagtatcaggatctgccgcagatctaccgttgtgtacagcatctttccgccatcgaaaccacgctgcaacagtgtgaactgtggcatatgacgaaactggatctactggccgggcagtttcgcaataccgcattgcgtctggaacggctggcgcctcagggagcggaaaccactatcactccccctgaattaccccgccgggaaatgaatcaaccgaaaaagtcagaggaaagtccacagccggtttttgcaaccagatccgttcagcaaaacgataaggatgccagtccacccgttccatcccctgaaatctcccggcagcggacatggccgatatttatggccggaatggttgtgatggccggtctcggcggaacaggattatggggctggtcgcagcttaatcagccggacgcgctaatccagcgaatacaactgtctgtcatgccgttgccgctgtcgctggagagcggcgaactggcaaagctggatgtaaaggataaggcgctgctggctcaggacagaacaattgcggcaagtcagatgcaactggagcagttaaacaaattgcctgcccgctggccactggagcagggatatcgccagctacgccagcttgatgccctgtggccggataatcctcaggtcagggcgctgaacgcgcagtggcgcaaacagcgggagctgagcgccctgtctgctgaggcactgaatggctatgctcaggcgcagagccagctacagcgcctgtcggcgcagctggatgcactggatgaacgtaaggggagatatctgaccggttcggaactaaaaacggcggtgtacggcatccggcagtcgttaaaggagccgccgctggaagaactgcttcggcaactggaagagcaaaaacagaccggagaggtttcgccaacgctgttgacgcaaattgatacccggttaaatcagttgttgaatcgctatgtcattttactggatacgaaggtggaacaaagtcagtaa

SEQ ID NO: 30448 - DNA, 1032 bp, Escherichia coli
atgaagtcagtggatacgattgccagggtgcgccgcgcctttcacgttcagggctggtcggtgaagcggatcagccgcgagttgcatgtgtcgcgcaacacggtgcgcaagatccttcgctcgggcgagacggtgtttggctacgagcgggagcgccagccgaagccgcggattgatccctggcgcgcgcagctcgacggcttcctgagcgccaaccgcgtgaagccggagcgcgagcgtctgacggtcatccgcatcttcgaggagctttgcgaactcggctacgaaggcagctatgacgcggtgcgccgctacgcgaagagctgggcgaaggcgcagggttcggcgacggcggatgcttacgtaccgctgttcttcgcgccgggcgaggcctaccagttcgactggagccacgagatcgttgtcatcaatggcgtgacgacgacggtgaaggtcgcgcatgtccggctctgccacagccgcatgatgttcgtgcgcgcctactcgcgcgagacgcaggagatggtgttcgacgctcacgagcgggccttcgccttcttccgtggaacctgtacgcgcggcatctacgacaacatgaagacggcggtggagacggtcttcatcggcaaggaccggcagtacaatcggcgctttcttcaaatgtgcagccattaccttgtcgatcccgtcgcctgcacgccggcgtcgggctgggagaagggtcaggtcgagaaccaggtcggcctggtgcgcgaacgcttcttcacaccacggctgcgcttcaggacctatgacgaactgaatgcctggctgctcgaccgctgcatcgcctgggccaaggcgcatcgccatgtcgaacaacctgagcgcacaatctgggaggtgttcgaggaagagcgcggtgcgctggtgccgtatcgcggtcccttcgacgggttccatgcgctgccggtctccgtcgccaagacctgcctggtgcgcttcgacaacaacaaatactcggtgatgtcggtaatgactccaacttattga

SEQ ID NO: 30449 - DNA, 3003 bp, Escherichia coli
gtgccggtcagcttcctcaccgaggaccaggtccggcgctacggtcgtttcgcggacgagccgacctccgaccagttggtccggtatttctatctcgatgacgccgatcgcgcgtttgtcgccgagcatcgcggcgatcgaaaccgcctgggcgtcgctgtccagctcggatcggttcgcctgctcggggtgtttctcgatgaccttgcgacagccccggcgtctgccgtggggtacgcggcagagcaactcggcctcaacgatccgggcgcgattttcgcctatgcgaacgaccgggcgcgctggcgacatatcccgcgcatccgggcccgctacggctatcgctctgtcaccgatcccggcgtgtcgtttcggctgagccgttttctctacgccctttgctggaccggcaccgaccggccctcggcgctgttcgatagagctgtttcctttctgctcgctaacaaggttttgctgccgggactgtcggtgctcgagcggacggtctcccgcgttcgcacgcgcgccaatgcccgtctgttccgctgcctcgtcgacgaggtgacacccgaacagcgcgagcggctcgacgctctcgtcgtggtgccggaaggtgcccgccagagccccctcgatcgccttcgggacggtccttatatccagagcggtcccgagatcagccgggcgctggcgcgtctcgacgaaatccgcgtcatcacggaagggttgccggagatcgaccggctgccgcctggtcgcatcaatgcgctcgctcgctttgcatccgccgccaaggcacaggcggtcgcccgtcttcccgacgatcggcggaccgcgacactgctggcgtttatccgcacactcgaggccagcgccagcgacgacgtcatcgatctgttcgacgtcgtcaccacaacgatcttttccaatgcgcaagcgacatcgagggaggcgcgtctgcgcacgcttcgtgacctcgatgccgcggcgctgaagctgcgcgatgctgccgccgttttgttcgacgaggcgacaccggacgccgaggtacgtgccgtcatcttcgagaccgtaggtcgcgacctgctgaaaatcgcctatgacaaggtgggtgcactcgcagagccgcccgacgacgtctatttcgccgaactcaggaaacacagggggcagtttcgcttcgcaccggcattgctgcgggggctcgacctcgacgcggccccggcgggcaggtcgctcctcgatgccgtcgaacacgtgcgcgccgttcaagatggcagcaaacgctccggccccgcacctgccgcattcgcaccgaaggaatggattggccaactgaaaggggccgacggcaagatcgacctgttcggttatcggctttgcgtgcttgaccagctccggcgcacgatccgccggcgggacgtctttgcgtcccggtcgcttcgctacgccgatccgcgcaaaggccttctgtccggcgcagcgtgggaagcggcccgccctgccgtttgtcgcacagtcggggtctcggcgtcggccgacgaggaactgacccggctttcgacacgcctcgatctcgcctatcgggaaaccgccgatcgcgcgcctgccaacccggcgctgtcgatcgagacgacggccggcggcgtcgatctgtcggtcgcgcagctcgataagatcgaggagccgccgagcctcgtggcgcttcgcaccgcagtcgagacccgacttccgcatgtcgatctgcctgaacttatcctcgaaatacaggcgcggactggatttgccgagcattttacccacgcgagcgaaggtggttcacgcgccgacgacatcgcgacgagcgtcagcgcggttctcctggccgaagcctgcaatactggcttcgagccgcttgtccggcgagacagcccggcgcttcgccgatcgcggctgagctgggtgaaacagaacttcctgcgcgccgagacgctgaccgccgccaacgcagcactggtggcggcacagaacgcggttcaactcgcccgatcctggggcggcggagaagttgcctcggccgacggcttacggttcgtcgtgccggtgcgcaccattcattccggccccaatcctcactacttcggacacgaacgcggcgtcacctggtacaatctgacgtccgaccagtacaccggcctcaacgcaatcaccattcccggaacgttgcgcgatagcctttatctcctggccctcgtcctggagcaggaaaccgagctttctccgaccgagatcatgaccgacaccgcaggctacaccgacacgatcttcggaatcttccatctcctcggctaccagttcagtcctcgcatcgccgacatcggcggctcccggttctggcgtgtggacaggaaagctgattacggcctgctcgacgaacttgcggcgaaccggatcaacgtgcgcctcatcgccaaccactgggacgatctcctgcgcctcgccgggtcgctgaaactcggcgtcgtgcgggccgccgggctcacgcgcaccctccagaccaacgatcgcccgacgaaactggcccgtgcgctccaggaactggggcgcctgatcaagacgctctacctgctgcggttcatcgatgacgagagctatcgccggcgcatcctcatacagctcaaccgcggcgaaaatcgccacaggctggcgcgcgtgatcttccacggcaagcgcggcgaactgcgccagcgctatcgcgacggtcaggaggaccaactcggctcactcggcctggtggtcaacgtcgtcgtgctatggaacacgatctacatggacgctgccctcaatcaactgcgcgctgaaggatacgaggtgaagcctgaggacgtcgtccacctctcgccgttgagctttggccacatcaacatgctcggccgttacgccttcaccctgccggaaatcatagcgcgtggcgaactcaggccgctgcgcgatccccgaaccgcaggaatcgacgacctgtag

SEQ ID NO: 30450 - DNA, 417 bp, Escherichia coli
atggtgtgcaatctgccgcagggattccggacaccggtgaataacggcggagccgatctgtccgcaggtcagcgccagttgattgcgctggcccgcgcgcaactggcgaatgctcacatcctgctgctcgacgaagccacgtcatgtctggatcgcacatccgaagaacgactgatgtcatcgttaacagatgtcgtgcatgccgggaagcactcggcgctgattgttgcacatcgtctgaccaccgcgcaacgctgcgatctgattgccgttattgataaggggttacttgcggaatacggaacccacgaacagctgttatctgcaggcggcctctatacccgcttatggcatgacaacgtcagcagtactgcgctccatcgccagcacaacatgaaggaggaaaccccgggatag

SEQ ID NO: 30451 - DNA, 690 bp, Escherichia coli
atgcacaggcacgggcaaagtcaacaagcaccctgcaggagaaagtctccggcctgcgcgtcgtgcaatcgcataatcagcaggaactggagggcgtcccgctgcgcgcgttatcggagcgcttccgcgcaactgcgtattccgctctattcgatcgaggattggcagcagttatcaaggattgtcaacgcctggcagcaggcgacagccagcggcaaacatattgatgaactactggcgacagaaggcactgaggacctcgggtcctcttcgctcctccccgtcaccggtgcactgcatcttgatgaggtcacgttcagttatcccgccagtcacgagccagctctgaacaaacttaccctgacgatccctgagggaatggttgtcgcggtcgtcggtcgcagcggtgcgggtaagtcgacgctgattaagctgattgccgggttgtatttccccacgcacggcaacatcagaatcggtgtgcaaatgctcgatgatgcctcgctcactgagtatcgtcgccagattgggcttgtcgatcaggatgtagcactgtttagtagtgatattgcagaaaacattcgttattcacggcatccgccaccaatgaagacgttgaaattgcctcacagcgggcagggctgtatgagatggtgtgcaatctgccgcagggattccggacaccggtga

SEQ ID NO: 30452 - DNA, 354 bp, Escherichia coli
atgaaagcgctggaaatggcatgggaaacccgtggtaagcccgtcggggtgatgttccacagcgatcaaggcagccattatacgagcaggccgttccggcagttactgtggcgataccggatcaggcagagtatgagccggcgcggaaattgctgggataacagcccaatggagcgcttcttcagaagtctgaagaacgaatggataccggtggtgggttacgtaagcttcagcgaggcagctcacgccataacggattatatcgttggatattacagcgcactaagaccgcacgaatataacggtgggttacccccaaacgaatcggaaaatcgatactggaaaaaactctaa

SEQ ID NO: 30453 - DNA, 582 bp, Escherichia coli; identical to SEQ ID NO: 29735

SEQ ID NO: 30454 - DNA, 1380 bp, Escherichia coli; identical to SEQ ID NO: 11788

SEQ ID NO: 30455 - DNA, 1398 bp, Escherichia coli
gtgaaaattctgtctaaccatcgagctacacctgaacaactacccatagtcagtcgaaatacgccgggtattgtggttattcgaggtgcagcaggcagtggcaaaactacaagtgcattacttcgacttacagcaatagtcaatgctttaacgtatcgaagaaatctcaataatgatactacaccgatcaaaacattagtactgtcatttaatagaactttagctggatatattgagggtttgatcaatgatagtattcaagctaaggcgatacctgtagtggttgaaaatgacacatttgccaattggactcgaaggcatataaatacgcgcttaataagtgatgtcaatcgcgattcttatcttctacagatatgttcatctctgggacttgatcaaaattttgtgctcgatgaaatagattatttccgtggtagattccgtcatcatgaattggataactacttaacagtcgagagaacgggtagaggattgtcacctcaagtaaccagacaaactcgtcagtctttaatagatgctgttcgctcttatgtgcaataccttcaagataatcagttagatgattggcactcacaatgtgagaaaatgatagctaacgaatgtttaggctatgacataattgtagtcgatgaaacccaagatttttctgctaaccaaattagagcaatactgaatcacctaaatgacgattattatttaacatttgtcattgatacagttcaacgtttatatccacgaggcttcacgtgggtggaaactggattagatatgcgaaatgcgacctactttagattaggggaaaatcacagaaatacggtggaaattgcggcatttgctgcgtcaatcactcatggattaacaattgatgatgatggaagcatcagcgactttacaaaagccacaagacatggtcctaaacccattgtttgcaaaggcctatattcacagcaagttaaatatgcgattgatcatatcaaaaataatgttgacttgcaaaatgaatcagtagcatttcttaaacctaaaggcggccaatggttttatgaaattaaaaaacaactaactcatcataaccttccttacgttacgattacgaaaaacaaggtttggtcaagagggcctgaaaatatcgcgttatcaacaatgaactccgccaagggactagaatttgatcacgtaataatattaggtcttagtactgcaaatatgcaacatcaacaagatgaaaatgatgataaattgcagcaattaagaagattacttgcaatggctattagtcgagccagaaattcagttgttatcggatataaagaatcagaaaaatcagatttggttaagtattttacccctggcactttcgacgagatagatttataa

SEQ ID NO: 30456 - DNA, 666 bp, Escherichia coli
atgactattgaacaatatattacggataatggtataaaagagattctacatttcactactgaaagaggattaaccggctgtgcgagtactggcgtagttttatctcgtaaagcattaaatgtagatcaatatttaagttacattgcatcacctgtatcaagtgaacgaagagaggcccaagatacctttaacaaagatgaagattggttagattatataaacctatccataagtgaaataaacacaagttatttcaatgcagctaagcgctggttcagaggtgaagatcgatggtggtgtattatggcttttgaccccattatactgactcacccaaaagtttattttacaactacgaataatatatatacatctgtaataagagctcctggtcttgcaggacttcagtctatgtttgcagatacgattacaaggtggagaggaaatacggtaagaagaaatgatcgacctcaaagattgactacctgcgagcaagctgaagttctgtacccaaacccacttgatatgaaatttcttagaagcgtttatgtacaggaccaagagcaggcagcatctatacacggaacattgagtagctttggttttcattctgtaaatgttattatttgtccagaaaaatttttaggcgtgcctaacacattctaa

SEQ ID NO: 30457 - DNA, 1032 bp, Escherichia coli; identical to SEQ ID NO: 4033

SEQ ID NO: 30458 - DNA, 477 bp, Escherichia coli
atgaccctggttaacaaacctgacgcagtctcttttttacttgatgaaataaaggccaatgctctggtacctgaacaaatcatcgttgaatttactgaaagtgaagtcatatctcggtttgatgagtttgccgaagcggttaaatcgctaaaggcggccggtatcagtgtagcaattgatcattttggcgcaggttttgctggtttgttactcctgtcacgcttccagcctgacagaattaaaatcagtcaggaattgattaccaatgttcataaaagcggaccacggcaggcaattattcaggcgatcatgaaatgctgtacatcacttgaaattcaagtctctgctatgggcgtggcaacaccagaagagtggatgtggcttgaatctgcaggaattgagatgtttcagggagatctgttttccaaagctaaattgaatggtatcccttcagttgcgtggccggagaaaaaataa

SEQ ID NO: 30459 - DNA, 2115 bp, Escherichia coli
  misc_feature (537)..(546): n is a, c, g, or t
ttgattggtagtaagtcttttgacaataaatatgtggcagaaatcatttctcatttacatacaaaaaattttggcactgaactggctggttgtagtgagaaaattgaaaccattataagaaacaacgcaagaatcgctgcagtattactggatttggatgattcgaatgatattcttgacaaaattcgcatgctgaatgaacatctgccagtcttcttacttaagaccgatgatgttgccattaaaaaattttgttttgattcattcgacggaaatgtacatcttattgattgttgcctttattctgttgacgaaattgttaataaaatccagaaaataattaatgactatattgatgcaatattaccacctttaacaaaagcattatttaactatgtgaaggaaggtaaatatactttctgtacgccaggacacatgggaggaacagcttaccagaaatcgcctgcaggtagtttgttctatgatttttttggtgaaaataccatgaaatcagatatttcagtgtctgtcggagannnnnnnnnnctgcttgatcactcaggacctcattcagaagccgaaaagtatattgctgaaacttttaatgctgacagaagctatattgttacgaacggaacgtcgacagctaataaaattgttgggcaattctccgtacctgcaggatgtactgcactgattgacaggaattgccacaaatctctcacacatatgttgatgatgagtgacatcatcccgatatatctgaaacctacacgaaatgcatatggcattctgggggggatccccagaacggaattctcttctgattcgattaagcagaaaatggctgttacgccaggtgcaacatggccagttcatgccgttatcactaactctacttatgatggtctgttttataataccgactggatcaaagaacatctggatgtaaaatctattcattttgattccgcatgggtgccatataccaatttcagtccgatttattctggcaaaacgggtatgggtggcaagcgtattgaaggaaaagtaatatatgaaacgcagtcaacgcataagctgttagccgctttttcacaggcatccatgattcatgttaaaggtgatattaatgaagaaacctttaatgaagcctatatgatgcaaacctccacctctcctcattacggtattgtcgcctccactgaaatggctgcggctatgatgaaaggcaatcctggcaaatgtcttattcaggaatccatggaacgtgctctggcttttcgtaaggaaatccaggcccgctttgaaaacagtgacacttggttttttaaagtatggcaacctgagaacattaatgaggtagattgctggccattggataaaaacgatcaatggcatggattcaaagatattgatcaagaacatatgtatcttgaccccattaaagtaactttattgacgccgggtcttgataaatacgggaaaattgaagaacaaggtatacccgcagcattagtttcaaaattcctagatgatcgtggtattattgtcgaaaaaacaggtccatataacattttgttcctgttcagcattgggattgatgatactaaggctcttagtcttctgcatggtttgtatgaatttaaggagcggtacgatcgtaatgagctggtcaaagatattctgccagggatctgggccgaatcgccagctttttacaacaatatgagaattcaggagctggcacagggaattcataatctgattcgcaagcataatctgccggagttaatgttccgggctttcgatgtcctgccagaaatggtaatgaaacctcagcaggctttccaggcagaacttcgtggtgaaacggaggaatgtttcattgaagacttggtagggaaaattaatgctaatatgattcttccgtatccaccaggagtacctttagttcttcccggagaaatgattacagagagcaatcgtccggttctggagtttttgttaatgctttgtgaaattggtaaccactatcctggttttgaaaccgatattcatggtctgtatcgaaaggcggataacaggtatactgcaaaagtcattaaaaaataa

SEQ ID NO: 30460 - DNA, 336 bp, Escherichia coli
atgcagggggaatcctctctgtcgacgctgaatcaaccggaattttatgatccagaaattgtcttctttgcagataaactggacgcttacacagatcagccagagtttcgcatgatcgctcccgatggcactacgtttgttactcgtttctccagtgctgaactaaattatgtgacacgctggatcctttataacggcgagcaacaggtagccgcctttgcattaccagcaacctgtcgacctgaggggtatcttgccgcgcaacgtaatggcacgctgattcaggttgcaccgcagcaaacgcgcacttttacagtcaccacaggtattgaataa

SEQ ID NO: 30461 - DNA, 1521 bp, Escherichia coli
  misc_feature (1005)..(1014): n is a, c, g, or t
atgagtacttaccgtgacattgactctgatgatgatttttatcagcagttatttgtgtcattacttcgttttggtctgatagaaaacattacccgacaaagtgctgttcaggattatctgcatgaattaaaaacagacactacgttgtttacatacatacgacccgatgagattgcgtcattcagcataaaattaaaagagctcaatattgtattcgatagcgtcaatgaagctaacgatgaaagtgaacgtacgttggtgaagtttatcgcagagaattttctgtatgtatttaatattaataacctcactgcactgtttaatgcgtactctaataacagaaagaatgttgaggaactatcgcgcaatccatataccttaattatgagtgaaaaagtcccatgcttaattgaggctgtaaatacaaaccttgagatgtttatcgtggaatatttcattcattctgaggaaagcgttggatccgttatttcactaattaattcagacgctactgagcgttccaaagaaattataattgaaaacatggattttgaagttcagcagttgtcgacagttgaaaatatcaggctatcggtagttgagggtgcgtcattcactgtttatgacctcttgtttaaacatgggcgtgtcgctgccaactgggataacatatttaactacatgtataccgatgtcgacgatgagatattgtgggcgttttttgctcaccatccagaggtgctttcaggccataaggtcagtgttcctgaggagtctattgataatgttgtgaatcacatcatttcagcagcggataagccagacgcgttatatgcacagttgatcagcgtgctgcctgtaagtatcgacaaggtaatcagtgacctgccactgacaaaatttaaagcactttgtgagagcaacagagttttgctgtcagaagcgctctatgaagacgtactcagcatttatgagggacaacgtcgcaagggcctcaatgagtgnnnnnnnnnnattagaaacaaccttgctgtttttgaaaataatattgagttttatctgcaagatgacgaagatttcgataatgaacttattgagcttgtgctcaatgatgacgatatagagttgacgactaaagtttcaatcatcaatgttctctggccgcactataccaatagtttcttcgaccatataagcctaaatagtaaagtcagtatagcactccttcttaatgtttcggaagatgacactcgacttgtgtttttgaatcatcttttagagtgtgaagaactgccttttgaatacatcaatcgtgcgcttatggccttcgtgtcggaagaatataatttgattgcggataaaaccaaacgagcaaaagttcacaaaactgaaggtaatgagatcctgctaaagtatttaacacattgctactttatcagtagttacaaagacaaggggaaattctttgaagtgtatcattaccgtaagatgtatctgggggaatcaccagaagatatttaa

SEQ ID NO: 30462 - DNA, 201 bp, Escherichia coli
gtgctgaccggtctgatatgcgtcacgttgcagaaccacagttttcatattgtcatacaacacttcgcgcggcacaccaccaaagaagcggaacgcattacgatggcaggtctccagcgtgtcataacgcatattgtcagtgaattcgatgtacagcattcggctgtatccgagaacagcaacgaacacgtgaagcggtga

SEQ ID NO: 30463 - DNA, 630 bp, Escherichia coli
atggctcgcggctatgtttctcctgatctgtgggaagaaggaataaatgccgggctactaaactatagttttaatggtaattctattaataaccgtagtaaccataatgcaggaaaatccaactatgcatatttgaatttacagagtggcatcaacattggtagttggcgactgcgcgataactcaacgtggagttataacagtgggagtagcaattcatctgacagcaataaatggcagcatatcaatacgtcggctgaacgtgacattattccgttacgctcacggttaacagtgggtgatagttataccgatggcgatatttttgacagtgtgaactttcgtggccttaaaataaattcaacagaagcgatgttgcccgatagccaacatggtttcgctccggtgattcatggtattgctcgtggcaccgcacaagtgagtgtaaaacagaatggatacgatgtttatcagactactgtcccacccggcccttttactattgatgatatcaactctgcggccaatggtggtgatctgcaagtaaccataaaagaggcagacggcagtattcagacattatatgttccttgttgtctaataatgctgatttttttatgccaagactga

SEQ ID NO: 30464 - DNA, 276 bp, Escherichia coli; identical to SEQ ID NO: 8395

SEQ ID NO: 30465 - DNA, 276 bp, Escherichia coli
gtggcttctgtttctatcagctgtccctcctgttcagctactgacggggtggtgcgtaacggcaaaagcaccgccggacatcagcgctatctctgctctcactgccgtaaaacatggcaactgcagttcacttacaccgcttctcaacccggtacacaccagaaaatcattgatatggccatgaatggtgttggatgccgggcaaccgcccgcattatgggcgttggcctcaacacgattttacgtcacttaaaaaactcaggccgcagtcggtaa

SEQ ID NO: 30466 - DNA, 489 bp, Escherichia coli
atgtatcatattgtcgggttaggaaaggttacaccattaaaactagaaggctggaaaactaaaagtcatgagtggaaatggatgcaactcgaatatggtcaaactgttttattgaagagtaaaattggcgatgtaaaaattgctgatccagctcaacttagagagaacgatctaccgctcaaaaatgatattgtgtcggaacaaccacttgtatctaaagaaccttcacgacaaaatgagttaagagctaattccctgcccgtttctaatcaacataagtttgaacaaaatagcttcgattatggctatacagatcctaaaaacttaaatctcgatgacataacaacaaatttgatcaaaaatggttttagtgaacgggaaataggtcattaccttattcaatttgctgataaaaatggccttgattcgtgcattgctttcgctgcgatcataggcaaggcatttattacaagaaagaaaaaacagtaa

SEQ ID NO: 30467 - DNA, 531 bp, Escherichia coli
atgatctgggcattcgtaaaagcatactggaaaccactggcagcactgctgctagtggctgtcggtgtgctgctgattctgtgggctggctacagcattgccgataggtcttggcaggctaaatggcaggctcgtgaccaatatgacctacaggccaaactggaattcacagaacaacaacgccgcattgaactacagcggcaaggggctatagatgcaatccaggaacaagcacagaaggacattgctacagctcagcgtaatgctgccattgctgctgctgagtctaagcgcctgcaagacggtatcgcagacgccatcgccagactacaggcagatagcgggaataccggagttaccatcagtagcaaggcaagggccagcaccagcagtttgcttgccgtcctgtttagagaaattgacgcagcggcgggagagtatgcagcagaggctgacagggcaaggaaagcaggattaagatgtgaagctgcttatgatgcggtgaggaactctaatgatctcacaaaatga

SEQ ID NO: 30468 - DNA, 507 bp, Escherichia coli
atgatctcacaaaatgaattgaagaagttgacacactacgatcctgaaaccggtattttcacgtggattgttaatggattgaatcggcgcaaaggcagggaggcaggtaatgtttgtccttttcacggctacgtcagaataggaatcaacagaaaattatataaagctcagcaccttgcgtatctttatatgactggtgaatatgcagaaaatgtagatcacagaaatggaattcggcatgataaccgctggtgcaatatcaggaagtgcacaatacagcagaacaacatgaacatgcctattcgctctgacaataagagtggcgctccaggtgttaactggtatgaaaatcgtaaaaagtggcgggttactttaaggattgatggtaagtttaaaagtcttgggtactactcagactttgagttagctgctttggtttcggaagaggcacgggataaattctttggtgacttttcctcatcgaaacggggtactgatttccggtga

SEQ ID NO: 30469 - DNA, 312 bp, Escherichia coli
atgcgtctgccaactgccggtggactttatcactgggagtttgaacgcgaagggaaaccgtttcgggtcagagttgatgggcaactgacgtttaatttgctgccagaaagaattgatgccgcattatccggatttggtatcgcctgtgttcccgaaaacgcggttcagcattatgttaagtcaggcgagcttattcaggttttacaggagtggtgtccaacttttcccggatattacctttactatcccagccgtaagcagcatccgcctgcttttgcgctgttgattgatgcacttcgctacgcggaataa

SEQ ID NO: 30470 - DNA, 192 bp, Escherichia coli
atgcgcaatatgcacaaaatatgtaagggcagaacggttataatcattgctcatcgtctgtctacagtaaaaaatgcagaccgcattattgtcatggaaaaagggaaaattgttgaacagggtaaacataaggaactgctttctgaaccggaaagtttatacagttacttatatcagttacagtcagactaa

SEQ ID NO: 30471 - DNA, 213 bp, Escherichia coli
atggagatggttcgtataatcaactcccggacggaacttatgtttccgaaaagggcggtgatatttatcaaattcgcagccagatatctgactatgcagaccgactatctaggtatcgcgcgtctgtttttgtttgcgaattcagtcaatgcgcatggtatttataccctgccaagacccggtgaatatcctgcacggccttctgctttgtag

SEQ ID NO: 30472 - DNA, 204 bp, Escherichia coli
atgaacgagacagaattaaaacacgttatcgctctactcctggaagatgcaaaacgcctccagcaactggagccaaatgcaggcactggggcacgcatctggctggctaaagaagcactggaatctggcgattatgatagcgaagaagccttctacaaagcagaaggccgtgcaggatattcaccgggtcttggcagggtataa

SEQ ID NO: 30473 - DNA, 465 bp, Escherichia coli
atgagaagaaaacgcgaagaaatcgcatcgccagaagctacgcagcgtctacgcggaatatgggatgcaaaaaaaagagagctcaaattgactcaggagcttgctgccgagctaatgggctttgagacgcaatctacggttagccactatctcaacggaaaggctccacttaacactgatgcggcattaaaattcgcagtattgctaagagttaagcctgaagacttgaggcctgatttagctgatctgatgaattacgtccgttcctctggaacttatgacgaaagtttcgaaggcgaagggtggcggatggttaacaagcaacaagctgatttactggatctttttgatatcctccccgaatcagaaaaagcaaaactaatcgaaaggcttaaaggccagaatgaactctacaaagaagcgtttgaaaatatgctggcagctcagaaacgcatgaagaaatag

SEQ ID NO: 30474 - DNA, 276 bp, Escherichia coli
atgacattagatgaatatttgaaaaaaaatcgtgtacgacagtcttgtttggccgcgctggctggttgttcgcaatcaatgattagcctcgttgctactggacgtagtcagttaagccctgaaaaggtattgcgtatcgcagaggctacgaatttcgaggttacacctcatgaactccggcctgatatctacccgaatccgaccgatggtttacctgttggatgtaaggctaacacacaaaatgcacaggagttgattcatgaaaatcaggcatga

SEQ ID NO: 30475 - DNA, 174 bp, Escherichia coli
atgaaaatcgaagaattgcgtgaaatttttagtgaaaatggcctctatgctgtgcgcgttgagaatgggaaagttgtctacacaacgttaatccctgatgatcatgtaattttatctatcgaggcattcattgaataccttgaaaggctcggtttcaagatggttcgcgaatga

SEQ ID NO: 30476 - DNA, 543 bp, Escherichia coli
gtgatttacccaacgaatacaggaaaaagcggagaacaccttcgtctcaccacgctggaaagtgtctggattcagggaaaactacgtatgtgggggcgctggtcgtatattggtggcggtaagacggggaatatgttcaaccagttgctggcatccaaaaaattgacgaaaacagccatcaatgaagctctgcgcagaatgaaaaaagcgggaatagagaagccagagctggaagcatttttgcgtgagatgatcgacagtaagcaaaaaagctggctgtcccattgcactgatgccgaggcgttatgtattgaccgggtaattagtgaagtgatggcagagcatcctggattgatttttatcctccgacaaagatatgaagggcgggggatgagtaagctgaaaatggcacaacagttaaataagtatcgccctggctggagcttgaaaacttgcagaaatcgcattgatgcatggttgggtgttgctgaacacattctgtatataccaatgaaattagcgttatgcggagaaagccaataa

SEQ ID NO: 30477 - DNA, 324 bp, Escherichia coli
atgaagatgccagaaaaacatgacctgttagccgccattctcgcggcaaaggaacaaggcatcggggcaatccttgcgtttgcaatggcgtaccttcgcggcagatataatggcggtgcgtttacaaaaacagtaatcgacgcaacgatgtgcgccattatcgcctggttcattcgtgaccttctcgacttcgccggactaagtagcaatctcgcttatataacgagcgtgttcatcggctacatcggtactgactcgattggttcgcttatcaaacgcttcgctgctaaaaaagccggagtagaagatggtggaaatcaataa

SEQ ID NO: 30478 - DNA, 408 bp, Escherichia coli
atggctgagattacgtttctttcggttgatgaggttattgcgattcagaaaagtacgctgccgaacagcgggcagcctgatataggtaagctcgaaggtgccctgaacagggtgcataatctgcacatatatgaaggctgtgaggatttatttaaatttgccgctatgtatatggtagcaatagcgaagtctcacgcttttaacgatgccaacaagcgaacagctttccaggccaccagcattttcttgctaatgaatggctatgaacttaacacctccatggagttggtgaagttgactatctttgctgctactggagaagctgattgtgataatactgcactggcactaaaactcttgtcagattataagaatgagctgctggcagacacgattactggatactga

SEQ ID NO: 30479 - DNA, 414 bp, Escherichia coli
atgaaaaccattacttatacacaaatgcgttcggatttatctgccacgctggaattgttacgctcaggtgagagtgtaacggtaacgcaacgggggaagcctgatactgttatcagtgcaaaaaccgttgataaggtggtgtctggaaaagaaattaagccacaaaacaaaacgatagatgcgcatcttgcacagttaatttcatctaatttatccccacaggtaacggagggagtcatgaagtttactaagcaattagatgtccttctgcagtctgatgaggcgcgccaggcaatgatgaaggctgccaatgctgcacttgccctgcagggcgtatcagagtcatttattaaagctttgcaacatactcagactaagcatgcggaaattataaaaaaactggaagataaataa

SEQ ID NO: 30480 - DNA, 1734 bp, Escherichia coli
gtggacgctgcgcgatcttctctggaaaacctctcccggtttattcgtaacaatcccggggcagatggatttctgaatcgcctgggcgttcagacacgggatgccagcggcaacatgcgtgacatggccgctatttttacaggtgtaggccagaagctcagcggtatgccgtattaccgggctaaccagtatgcgcagatgctgggcattgacgaaaataccctgatggccatgcgtcgtggtgtggggcagttcagcgctcagtattcagaaatggtgaaagcgatcggatttaatgccgatcaggctgccttatcgtcaaaccggtttatgacctcgctgaaatcgctcggtgaaatggccgggatggcgcgggacaaaatcggatcgaatcttgcggacggactggcggggcagattgataacctgcgcaaaaagataattgaaaattttcccaaaattgaagtcaccatcacaaaggtcataaaggggatcctctggctgggtgagatagtcgggcgggtagcattccggatagtcgatggtgtcggcgatattatcgagtggtgggggaaactggatgccgaaacgaaaaccctgatagaggttatcggcggtctggttgtcgccatgcggatacttaactctactttctggatgtcacctatagggctgattactggtctgatcgtggctctcggtctcttgtgggaagactacaaaacatggaaagaaggcggtaacagccttatcgactgggaaaaatggcaaccggcaatagataaagcgaaggatgcgatcacctggcttcgtgatcaccttctggaactaaaagatggtgttggcggctggcaaaatgcactggaaatcctcggtacattcatcgcgggtgtctgggtatccagggttctgggggctttcggaaaaatatcaggtttaccggtcccaccctggcttaaattgtgggcgctttacgcgggctatattgttagtgacagagaaaatattgccgatagcgcaaaatcttcactgaggtatacgaagcgaattatcggcgacacgctggctgccattggtataaaaacagatatcggacgcagggatgtcagtgaggtccgtgaatggcctgcgtggatggactggttgcacgggggacccggtaaagttatccggcagggacagagtaacggtgtagtgcatggctccaacgtccagcccgacatccccggcggcggcactcttgctgatcgcaacaataaccccgggaacattcgcccggtgagcggtaaagggttccggtttttcgaatcagcgcttgagggctgggaggcgatgaaaaaccagctcatgcgttactttaccgggaaaacaaccggacgggcattacagactattcaggatattgtcagtacctgggccccggcaggtgataacaacgatccgaaaaagtatgcacaggatgttgcgaaatggatgggagtatcaccgaatgcaatattgaatcttacagatccccggactatgggagcattgatgcagtcgatggcgcgcaaagaaggttattcaaactggaacagcccgctggcgtatcaggccgccgctggcagccttaaccagcagactgttataaatgttcatggagttaacaaccctcaggaggcggctaatctgattgctgacaagcagggggctgtaaatgccagggcggtacagcaattgaaagggcctgcgtga

SEQ ID NO: 30481 - DNA, 501 bp, Escherichia coli
gtgaatgcgaactccgggacgctcaacaacgtcacgattaacgagaactgccgggttctgggaaaactgtccgcgaaccagattgaaggcgatctcgttaaaacagtgggcaaagctttcccccgggactcccgtgcaccggaacggtggccatcagggaccattaccgtcaggatttatgacgatcagccgtttgaccggcagattgttattccggcggtggcattcagcggcgctaaacatgagagagagcatactgatatttactcctcatgccgtctgatagtgcggaaaaacggtgctgaaatttataaccgtaccgcgctggataatacgctgatttacagtggcgttattgatatgcctgccggtcacggtcacatgacgctggagttttcggtgtcagcatggctggtaaatgactggtatcccacagcaagtatcagcgatttgctggttgtggtgatgaagaaagccaccgcaggcatcagtatcagctga

SEQ ID NO: 30482 - DNA, 477 bp, Escherichia coli
atgcaacagatttcctttctgcccggagaaatgacgcccggcgagcgcagtcacattctgcgggccctgaaaaccctggaccgccatcttcatgaacccggcgtggccttcacctccacccgtgcagcacgggaatggctgattcttaacatggcgggactggagcgggaagagttccgggtgctgtatctgaacaaccagaatcagctgattgccggtgaaaccctcttcaccggcaccatcaaccgcacggaagttcatccccgggaagtgattaaacgcgccctgtatcacaatgccgctgccgtggtgctggcgcacaatcacccgtccggtgaagtcacacccagtaaggcagaccggcttatcaccgaacgtctggtacaggcactgggcctggtggatatccgggtgccggaccatctgatagtcggtggcagccaggttttctcctttgcggaacacggtctgctttaa

SEQ ID NO: 30483 - DNA, 447 bp, Escherichia coli
atgacgcccggcgagcgcagtctcattctgcgggccctgaaaaccctggaccgtcatcttcatgaacccggtgtggccttcacctccacccgtgcggcacgggaatggctgattctgaacatggcgggactggagcgggaagagttccgggtgctatatctgaataaccagaatcagctgattgccggtgaaaccctcttcaccggcaccatcaaccgcacggaagtccatccccgggaagtgattaaatgcgccctgtatcacaatgccgcagccgtggtgctggcacacaatcacccgtccggtgaagtcacccccagtaaggcagaccgccttatcacggaacgtctggtacaggcactggccctggtggatatccgggtaccggaccatctgatagttggtggcagtcaggttttctcttttgcggaacacggtctgctttaa

SEQ ID NO: 30484 - DNA, 153 bp, Escherichia coli
atggtggggtctgttgtttctggcgtggcttcaaaaatcactggtgctgttgagttcttggggagcgttaaggctaacggcaagccaatcgatgatacgcacactcatggcggtgttcagcgcggtggaagcagtaccgacggggtaaactga

SEQ ID NO: 30485 - DNA, 147 bp, Escherichia coli
atgaagcgtgaaggactgcattatgtcgtggttgagcgggatgaaaagtacatggcgagttttgacgagatggtgccggagttcatcgaaaaaatggacgaggcactggctgaaattggttttgtatttggggagcaatggcgatga

SEQ ID NO: 30486 - DNA, 147 bp, Escherichia coli; identical to SEQ ID NO: 29360

SEQ ID NO: 30487 - DNA, 246 bp, Escherichia coli
atgaaaaaagtattagctctggttgttgccgctgctatgggtctgtcttctgctgcctttgctgcagagactgcgaccacacctgctccgactgcgacgaccaccaaagcagcgcctgcgaaaaccacacatcataaaaaacagcataaagcagcacctgcccagaaagcgcaggcggcgaagaaacacgccaagaaacacagccatcagcaaccggcaaaacctgctgcacaacccgcagcgtaa

SEQ ID NO: 30488 - DNA, 234 bp, Escherichia coli
atgatgaagggaacagggtggccacccgggctgttactgtcgccagtgagagttcctggtgacgggacgggcatttttctgtggcattccattcttcagctgaagcggcgcacgaaaaacgcgaaagcgtttcacgataaatgcgaaaactttagctttcgcgcttcaaatgaaacagatgtattaattactgctttttattcattacatggggatcacttagggtatggctga

SEQ ID NO: 30489 - DNA, 360 bp, Escherichia coli
atggctgaacaagaacaacatacggtgtcggatgatgaacaaaacccagatttcgaaacaaaccagaaagacacccctgttaataaccaggataaattctttggtataaccggttttatgctggtcggtaatctgatgattaagctgattgaaaacggtgttatcaacatgcacgatgcttatgacatcatcagaaatacacaggccagctataagaaccgaaaaacgttcgaagaactggattttgaggccgatgagtatgttgatctgctgctcaataagctctgggcttcaaggcaggatattgttaatgccgggaacctctcatcagagcacacagatactgacgctgtggaataa

SEQ ID NO: 30490 - DNA, 291 bp, Escherichia coli
atgaataatgaaactaaatttacgcctaaagacctggatgaagaactggtgaaagctaagatgcttgagcgtatgcgcgatgttattgagactgcaatcagtaaaggcttttctgcgagagaggcccttgaaattatgacacgggaaattcatctcatacgcgacgaagttttgttgcataacaaaaaagcccacaacaatattgtttgtcgtgagcttggcgttgatgattcagcggttattccacagcgtcagtatctgtgtgctctgatgagaggttcccggcattaa

SEQ ID NO: 30491 - DNA, 264 bp, Escherichia coli
atggcaaaagtaattattgaaattaaaaatacagtatatggaattaaaggacggaatttgcgcaccagcattgcggtggacggtagtgcggaactggacggtgatgagggtacacttgctggcatggtggcgttactggtgcttaacaaaagccagaaaataattaatgagtcagctcatgaagccattgagattttgaaaaacgatggtgtcatcacaggtggcagtgtcactgaaatggctgttgaaaaaacatgtcactga

SEQ ID NO: 30492 - DNA, 213 bp, Escherichia coli
atgatggtgataaacattcacgataatctgggaatcagtaagttaatcaaccttgataatatcaatgtaatggaaacgactgttgagggcggtgttgcttttgaatttgttggtggtcacaggctggtcgttcatgtcggcaaccatcatcacgcagaaaatgtgctttgtgaacttaacaaaatcacaaatgcaacgcccgttaatcaataa

SEQ ID NO: 30493 - DNA, 219 bp, Escherichia coli
atggcgataaagaaaagtaaatgtgaagacaaaagtagatacgacattgttgctgatctgcgcaaaagaggaaaaagcctagcagctcttggtcgtgagaacggtctctctatctctacggtaaaaaatgccttggataaaccttaccctcggggggaaagaatcattgccgatgcattgggagttgagtcacgagacatctggccttcgaggtattga

SEQ ID NO: 30494 - DNA, 516 bp, Escherichia coli
atgacacaagaatggttttcagctaaagagctacaaggggttgctggtcttccgtcttcagcaagtagtattagccgcaaagcaactaatgagggatggaaaaagagacagatcaaaggagtaaagggtgttgcttatgaataccatatcagctcattacctgatgccactcaggcagaattaggaggggcgcagttattagataacgataagtcagcttataagttagcttctgtgttaatggctttggttgcagagttagaaccagaggaaatccagagggcattaaagctacttagtaaaggtggacttagtgcactaatgccaagtatctttgatcagactcaaatccaatctctgcacggcgtatcgcgtgagtgcatacaactcgcccaaatgctagaaactttaccagcagaagagcgcaaagagattttgtcagagcatggtattcatgaacaggaaggtcttgtagctccttcgcaagaaccacaagatgtaaaaaaagccgtataa

SEQ ID NO: 30495 - DNA, 306 bp, Escherichia coli
atgggaatgggtgttcgaaacgcaacttcacgcctgctgctctccattacaagtccaagtacaatgatgaccgggaatgtcacacaactcacaattgacataattaattatttccaaataccctcgactgaaaaccacaccaaactaataaagtcaggttcttcagttattggtttccttgccggagccgggttaggcactcttggatatatattaatgggatttttctccgtgctaattccagttataatgatagttgccgtaatttataaagaggtaagttatgtcctgataatgagaaagtga

SEQ ID NO: 30496 - DNA, 357 bp, Escherichia coli
atggcagctgaaaatcagcttttattggataaacgttggcggcattacagagagcccgcattattggcagcatccgctggagcaatagatactattagtttcatcacattgtttgggctttttaccgcccatgttacaggcaaccttgttgtggtcggtgcgtttttagccggcgaaaacgagggtattgtgatcaagcttctggcaattcctgtctttatgatttctgttgcctttaccacactgattattaaaaccagaaaatgtatcacccccacttttcttgtcgggttgtttatgtccgaagtgtttctgctgttgctctttgcttggttatatgtggtcaccttttgctga

SEQ ID NO: 30497 - DNA, 903 bp, Escherichia coli
atgcatttagaagatatacgaatttttgtaaccatcgtgaatatggggagttttacagcagcagccgagcatcttcagttgtctaaacaatatgtcagcagaaggatggctgcactggagagaaagatatcagcccgtttactggtacgaaataccaggaagctgtcagttaccgatacaggacaagttttttttcatcatgccaaacgtatactggaggagctttatgaagctgagcagaatattttagctcggcagcagaaactggctggctcttttagagtcagccttcctatgacatatggtattagacatcttgcgtctctgataattgaattccagtctgctcatccagaactggttgttcatattgatatggatgacagatatgttgacgttgtgggcgaaggttacgatatggtattgcgcatcggtaacttagaggactcaaccttaattgcccgttgtctgggtaaactgcctatggtaatttgtgccagcccgagttatctacatttgcacggaacacctcagacaggagccgaactgataaaacataattgccttctgtatgggcgggagggccaatatggctggaaattaaacactggaagttcacttagtacatttgccgtacaaggtaacctcagcagtaataacggagaagtgatccgtgaggctgctaaaaaagggaggggtattgctcttttaccattatttattgttgaagaagcactgcagcaaggcgctttaatccagatattaccgaattactcaccgccgcctctgactatcagtgccttgtaccctcaacatcgtcagcacagtgcggtaaccaaaaatttactgccatttcttgcaaagagaatcgccggaattatagatcccccagaaaaagaataa

SEQ ID NO: 30498 - DNA, 678 bp, Escherichia coli
gtggaacttattagcgcgctgaaagaaatatttttcggaggaatccccccggaaaatccgaaaccagaggagaaaacatcaatgaaattgttagtactttaccattcaatgtacggacatatcgaaactatggctcagcaggttgctgaaggtgccagaagtgttccaggcgtggaagtcaccttaaaacgtgttcctgaaaccatggctcctgaagcctttaaagccgccggcggtaaaacagaacaatcagcacctgtcgccactcctgctgagcttggtgactatgacgccatcatttttggcacacctacccgtttcggtaatatgtccggccagatgcgcaacttcctcgaccagactggtggtctgtgggcaaaaggcgcactggtaggtaaagtagccagcgtattttcttcaaccggtactggtggcggtcaggaaatgaccattacttccacttggaccacactggctcaccacggcatgatcatcgttccgatcggctacagtacgccagccctgtttgatatttctcaggtcagtggcggtactccatatggtgccacaaccatcgcaggtggagacggttcgcgtcagccagacagccgagaactggatatcgcccgccaccaaggcaagtatgtagcagagattgcgctgaagctcaagtcctga

SEQ ID NO: 30499 - DNA, 372 bp, Escherichia coli
atgacattctcacaacgtctgacgcaaaccgtccgcccaatactcggggcggcaacattccggtggattggttatcttggtctatgtgcagcctacctgcagggagggatcaataaactcctggactttcagggggcgattgtcgagatgaaccattttggactctcccctgccccgctgtttgctgtcctggtgattacactggagttgggtgcatcccttatgatcctgattggctgccagcgctggcgggattcactcttatcgccacatttctggccctgcgtttctgggaactacctgacggcatggagagattcagtgccgctaactcatttttttaacatctgggtcttgtcggcggttttctga

SEQ ID NO: 30500 - DNA, 1896 bp, Escherichia coli
atgacacaacacgttgtcgcagacgttattctgcatcatggtctgttcaccacccttgataaaagcaatccaaccgcaagtgctgtcgccattaaagacggtaaatttattgctgttggtggcgacgccgaagtaatggctttcgccggtccgtcaacgaaagtcgtcgacctgaaaggtaagcgggtattgcctggcctgattgataaccacacgcatgtggtgcgcggtggtcttaattacaatatggaactgcgctgggacggcgtacgttcactggctgatgccatggagatgttgcgtcggcaggtggccattacgcctgctccccaatgggttcgcgtggttggcggttttactgagcatcagtttattgaaaaacgattgccgactattgaagaaatcaacgcgatcgcaccggatacaccagtgttcctgctgcatctctatgaccgtgcgctcctgaatgcggcagccctgcgcgcagtcggatataccagggatactcctgaacctcccggaggagagataacccgtgatgctaaaggccacccaaccggtttattgctggcaaaacccaatgcggggattctctatgcaacactggccaaaggccccaaactgccatttgattaccaggttaactcaacccgccattttatgcgcgaactgaaccgtctgggcgttaccggtgtgatagatgccggggggggattccagaattatcctgatgactatgctgttatccagaaacttgcagatgaaaatctgatgaccgtgcgtctggcctacaatctcttcactcagaagcccaaagaagagaaagaagacttccttaattggactcgttcagtcacctataaacaaggtgacgattatttccgccataacggtgccggtgaaatgctggtattttcagcggcagactttgaagactttcgccagccacggccggatatgcctcctgaaatggaaggtgagctggaagaggttgtccgcattcttgcggagaatcgctggccctggcgtttgcatgctacctacgatgaaaccatttcccgcgctctggatgtttttgagaaggttaatcaggacattccacttgaagggatcaactggtttttcgaccacgcagaaaccatttctgaacgttcaatcgatcgcatcgcagccttgggcggcggtattgcggtccagcaccgtatggcctatcagggggaatatttcgttgagcgttatggcgtcggtgctgcagaagccaccccaccgattgcccgtatgcttgaaaaaggggtaaaagtctcagctggtacagatgccacccgcgttgcatcctataacccttgggtgtcactctcttggatgatcaccggtaaaaccgtcggtggtatgcagctttatccacgccggaactgtttggatcgggaaacagcacttcgcatgtggacagaaaatgttacctggttctccaacgaagaaggtaagaaagggcgtattcaggccggtcagttcgccgatctcattgttccggacaaagacttctttgcttgtgcggaagacgaaatttctttcctgacatcagagttgaccatggtgggcggaaaaatcgtctggggatcaggtcctttcgagtctctggatgataacccggtcccaccggcgatgcctgactggtcaccaacacgtacttttaaaggctatgcagcctggggcgaaccggaaggcgcaggaaagaattctcttgccttacggcaaaatgcgatggcgtcctgtggttgctctcacagatgcaatctgcacgggcacgatcatgctggcgcatggacatccagcctgccggtttcagatctgaaaggattctttggtgctcttggttgttcctgctgggcagtgtga

SEQ ID NO: 30501 - DNA, 279 bp, Escherichia coli
atgaaaatgtatattctttcactgggcgcaggacttcttgtcggcattatttacagcctgctgaatgtccgctcccccgcacctccactgattgcgcttcttggcttgcttggaatgctggtaggagaacaaattattccggtaggtaaacaacttctgtccggcacagccttttcctcagcctgtaccaaaacgcataccatcagccacatcttcggacagctccctggtcgccaggctgcggaagaagaccaatcctcagaggagaaacgctcatga

SEQ ID NO: 30502 - DNA, 681 bp, Escherichia coli
atgtctcattatcttgatgtcctcaccccgcagaacagtcagctgatttttatcgaccagcaaccccagatggctttcggggtgcagtccattgaccgccaggtactgaaaaacaatgttgttggtctggctaaagcggcaaaactgtttaatattcccaccaccataaccaccgtagaaaccgatggtttttccggcaacacctaccccgaactactggccgtttttccggaaaacaaaattctggaacgtacttccatgaactcatgggatgaccaaaacgtccgcgatgcactggcggcaaatggtcgtaaaaaagtaattgtttccgggttgtggactgaagtctgtaacacgacgtttgccctgtgtgcagctaaagagggggattatcaaatctatatggtcgttgatgcttctggcggcacttccgttgatgcgcacaaatatgccatcgaccgcatggttcaggctggcattgttccggtgacctggcagcaggtcattctggagtggcagcgtgactgggcccgcaaagagacttacaacggcatcatggatatcgtgcgtgaacattccggtgcctatggtatgggcgtcgactatgcctacaccatggttcataaagcgcctgaacgcgtgaaacacggtgaacgtatcggtccgaacccggctaaataa

SEQ ID NO: 30503 - DNA, 612 bp, Escherichia coli
atgcttttcctcaacaactgggtatttattcttgttgccatatgttgccccgtaatccccgttttgtgtgtatggtgtgatgttgtaatattaggagctgttctgaacgagtgttcagtaacagagattgtgcaggagattcttttgacagttatagtcatcatccatatgttacttattattaagtataatgaagtgcgtcaatgcaatatacttattgctggatttttctctgctatgctgttcagagaactggatgctgtttttgatttaattggccacggaagttggatatattattcaatgactgtttcttttctgtctttaagttatgccatatataactggcgtaaaacattggctcagttgttcagttatatgtgtactcctcactatggaattatgctgtccggaatattgtgcacactggttttttcccgattatttggaatgtctgtcttatgggaatctttactgaaggataattatctgcgaacagtaaagaatattgtagaagaggggacagagacatttggctattgtctctgtttattatcttctgttatgtgtttttttcacttggctcgatcgtttagaagatcgtctttctga

SEQ ID NO: 30504 - DNA, 180 bp, Escherichia coli
atgaagtatgggatgaatcttaccatcaggctaacccgtaatttcattggtcaagacagttgcttttttattctgaaaagaatatatcatcatgccaaactggtgctcgaatgtgcgacacgaagccgcctgaagcgtggttcggctccgccagggaacctgatgttccgtcatcagtag

SEQ ID NO: 30505 - DNA, 873 bp, Escherichia coli
atgcaacagcgtatcgaagatatattcacacaagcgcattcagttcgtgaagaactatctgttggtgaatttatccagatttgtcgaggtgagtttctgattaactgtgatttaggtattgaagaaaagcaagctgcggggctaaaaattgtggctatccaccagggggcaatgagttgctgcaatagtgcgggacaaaatattaaggttaattcgccttccttgattttattgggtagccagcaaaattatttattgaataatcagttttatggtcaacagactatgaaatatactataatttatattcatcctgaatggttagaaatgcagcaaataagtttgtcagatatttgctatcagccaagttccccaaagctattacagttggttattcctccgaatatactagcagtcattcatcagttatttgcgtgcccaacccattcatcattacgccaactctatttaagtgctaaagtgtctgagattacggcgttatgcttacatcattcgttattttatgctacgaatacggaagttattgacgtattacgccagcgagacattgatagcctgtatatggcaaaaaacatattgattcaggaaatggaatctccacccagtttagatgaattggctaaacgattagggatcaatacccgcaaactcacacaaggcttccgtcaattattcggtaatagtatttatggctggttgcaggagatccgtttagaaacggcttttcagctgttgagtatgaatgatgtgaatatctcaacagtggcttaccaagttggctatactccggctcatttctctgttgcatttcgcaagcgctttggtatctcaccctgtcaactcaaaaaatga

SEQ ID NO: 30506 - DNA, 2130 bp, Escherichia coli
atgctttccgtttatgacattaaatcacgcagaaaattctgtttaacaccttgtacctttttatgtgcgtctgtgatggtcaatgcagcacctgtgcaaccgaaacaggatgttatattagtgacagcttcctcagcggttgatgatgactatgttgcaccgggtgtgacaacactcggcaaaatagcacttaagtcacgggaagtggcgcaatctgttagtgtgattgatagagaacaaattgaaaaacaaaacttacaaagtcttgatgatgtaatgcaacgtgcaacaggggtaaccagtgcgccttatgtgaagttaacaacagcttattatgtccgtggcttccagattgactcatttgaaattgatggtgtgccggctttattagggaacgtggccagttctcctcaagatatggcggtatatgagcgggttgaaattcttcgggggtcgaacggccttttacatggtatgggaaaccctgccgcaaccgtcaatatggtaagaaaacatgcgccaaaagaaaatatcgccaggctgagcttaagtgcaggaagttgggatcgttatcgtggagaagtggacgttggggggctactgaatcaatcaggttcagtacgtgggcggtttgttatggcatgggaagataaagactatttttatgatgtttctgaccaaaaaacccgtttgatgtacggtactgttgatatcgatgttactccagatactttactgcgtatgggggcgcatttccaaacgattgattctgttaccaatatggcaggtgttcctttcggtaaagatggcaatgatttacatctaccacgtaaaacctatttagatgtggattggaaccgcttcaagtgggacacctcccgttcatttgcgggtattgaacataaaatcaatgatgattggcaatataagcttaacgcagagtatcaacatgtaaatgcccgattattgtacgcaggagcatggggaaatatcgcccctgtaaccggtgatggcgcaatgttaatggggggagcgtataaattccgtaacgaacaaaccagcttagataccagtttaaatggtaaagtaaacgcatggggattaacccatgatgtggttgtcggtgcaagttactctcatgccagtgaaaagcaatatagcgcagatttagatcccgctttaaatgtgccagtgaacgtgtatcgttgggaccctcacagtgtaccaaaacccaatgttggcgcttatagttccgcagggccaaccaaaacgacgcaaaagggtctatacgggatgggacgtatcaaagtgatcgaacctgttactgttattgcgggggtacgtgatagctggtggaatgtcaaaacaccaacagcaaacttcactgaaaatggccgccttactccttacggtggtgtgatttgggattttacgccgcaatggtcatggtatagcagctattcaacagtctatcagccgcaaacagggaaaacgtggagcggaaaaatgctcaagcctgtcgaagggcaaacgcttgaaacgggtgtcaaaggagcgctattcaatggcggattaaacctatcaggtgctatttaccaaattgatattaaaaataacccgcaaattgaccctgcacacccaacagggggctttaataactatttcattagtggtggtaaagttcgtagccaaggttttgaactcgaaggtattggttatctgaccccattttgggatgtatcggtgggttatacctatacggatacgaaataccgtgatgacagccagcaccaaggggagtcttacaataccttaacccctcgccatatgttacgggtatggtctaactatgatttaccgtgggatgagcgcaaatggagcttgggtggtggtatgcaagctcagagtgcatactaccgtaaaggtaacggtaatgtgattttacgccagggtggatatgcgatttttaatgtccgcttagggtatcaaatcgatgaaacctggacagccgcggttaacgttaataacttatttgaccgtcgttattattcagggttgttctctccacaatggaataaccgttatggcgaaccgcgcaatgtgatgtttacattgaaggctgatttttaa

SEQ ID NO: 30507 - DNA, 252 bp, Escherichia coli
atgaaattagtgagttgcctcgcggtcatcggtacgttgatcggtggtattgtgttatcgatgttgatagcacgtttttatccatcagcagatccgctcgaacgcttatatagtgcaatatttttaagtgttagcaccacgatggggttcttggtttataacctcagtgcatcaaattggcgacaaataatagtacgcagctatagctggtggccattgccgctttttttaatgatggggggatggatatga

SEQ ID NO: 30508 - DNA, 1440 bp, Escherichia coli
atgaagaataaacgatctctttccctcactcgtcgtttagaccaattacatcgcagtgcgggggcactatttggcgtttttttgtttgtgatcctatttacagggtgttggagcttaggcagtgatgcgttgagattatggggtaacaaggtgccactttcaggtgagttactaccacttgaacagctccttgccttacaaccaagagcaaccatgatccaactgcctgagcagcataatccagtgatcactttttgccaagacatgggaaaaagtgaattaagctatagcgcgattaacggtaaattggttgtattagatagcccgacaatgtggctagtgacattacataaaaatttatttatggattttcctggacgcatttttatcagtttatttggttttgtgttagccgtcctgttaatcacagggctagtgatacagcgtcaccgaatatccacaatggtgcacttgccgcgtgttacgcatttgaaagtgttactccatgatttacatggcaggcttggcttatggtgttatccgtggttggttttatttgcgtttaccggagcattatcaggattaggcgcgctcggaaccgtttcccttggtgaaagggctgcaccggataatccacaaataatcatgaaaaccttgatgggcgaatttaaaccactgaaaacaccagtccccacggctgaaagctcgattactgcggcactcagcgcattacagcaaacagtccctggctttatacctcaaaccttgttcaagcaaggtgatacgtgggtgattggcggtgtgcgtaatggacagttatctacctctaacttcgaacaatatcaatttaatagtaaaaagcgccagttagtcgcagtgcgggattctgcattgcaaggtatttggactcgtgcttttatcgccatccaacctttgcattatgggcaatatcaatggttacctaaaataagtaatacattgagttatctgcattttatcgcaggtgtgagtgggctgatattggtttctgttggcctggttatgtggtgttggaaaagaaatcatagcctggcggcaaggttcattgtgggcagttgtggtggattgctgttgtccgcatgtgcactattagcggcaatgccatggttcacggttttgctaccaatacacttttttatgggctgggggatagtctgtatagcaagtttactctgcaaaaatgcacagttgagtttgctggtatgccttttattctctgctgctttgttgctattcgcatctatagcctcctacttgtttagtttgttgcctttttctcgtatcaatctcgttttgttatgtggcggaatagggcttttatgtattttattcggttgtcgaaaattgtcagacacagcaaaaggtgcgcggagtgagtatgaaagatctattacaaaataa

SEQ ID NO: 30509 - DNA, 1218 bp, Escherichia coli
atgaaagatctattacaaaataaacagttagtggtgacgttggggttactttatcttgcgcaagggataccgatggggatagcaatggatgcgttgcctacttttttacgccatgatggaggcgaactgaaagcattagctttttcgccattagtcggtttgccatgggtagtgaaatttttatgggcttcgtttattgataaccattgggggaaacgtttaggtcgtcgtaaaagttggattattccaatgcaaattattgtcacgataacgatgtttgcgttaagtaccatcgggctgtcagttgcgaatgctttaccctgcattgtattgttgtttgtcgcttcatttgccagtgccacccaagatattgcaacagatggcatggctgcggagcaggtcagtggcacactgttatcaaagattaatgcagtacagatagccggggtgatggcaggtttttttattggtggcgcaggattgatgatcatgagtgaaagtttaggccaacatcttgctttgggaattttagcttgtgtaccgttattcagcttgttgtttattagtgtgtgtccattgaaagcgccaacaataacacaggaaattaatgagaaagcgagtttattaaaaaccgtaaaacgtcgtggtgctccgcgtttactgttattaactttgctttctgcggtgacggctgtttctggttttagtttagccaagttgttcctaaatgatgtggggtggtcattagcgcaaattggtaaaatgggtatggcagggggtatggtcacattagtactaggttgtggtggtggggcgtggttaattggtaaaatcggtgtgtggcgcgctttctcattcggtctgttatttgctttattatcttcattgttatggttgttgcaatccgttaatggtgtttctattacctttattgtactgtgtattacattcggttcgttatctgcggggatcacatctgtagcgataatgacagcggggatgcaatttgcgtcacgctatcagcaagcgggtactgatatgaccgcggtacagagtacccgtgatattggtgaattagccagttcgatgatgcttgttggtttaacggcagcggtaggctattcaggtggatttatattaggggcgttaattgcctttgttgcgctgttagtgacattttcacattatcgctatatgcagcgattaaaagcagagtaa

SEQ ID NO: 30510 - DNA, 1209 bp, Escherichia coli
atgtctgggatccactttcacttatttgccgcttcgcttatcgcggtagcttcgtttactcaggcgcaggagatgcttatcaagccggaagatattcatcgcgccgccgtcgcgccagcggtggttgagctggcctggagtgcaaaacaaaatgccgtgtttgtcagttcgccggactggaaggatgagaaaaaatcgaccgttctgcgccttaatccgcaaactctggaaacgcaggccaccatctctactgatgtcaaaggttttggcgtcgcactggacgatgagaataatcgtctctatttgaccgaaggcttcaacggcagcgtggggattgttgataccgccaccaaccgcagtctcgggtcaatcaaattacaggagaaggtcaatatcgagtcagcctggcgtaaagcaggcatgaccggtgaacaccttgattttatgctttctgaacttaaacgttttaaaatcagcgaaggctatctgtataaattccgcgaggcgcggttcgatgcccggaccgggcgtctgttcctgcccggcctcggttacggcgtggacagcgtgctttacgtggtgaatacccgcaccggtaaactggagaaaacccttcccggattcggtttctatgccgtcggtatcgcaattgatgaaaaaggacgccgtgtatttgtttcaaatatgcaggggcagcttttttccgtcaatgccgatacactggaaataaccagtaagcatgagatccaggccgatcagctactgaatctggtttatgaccgcaaaaacgatcggattctgggtgttgatcagggaatcgatcgtgacaagtaccgcaactatcatctgaaagaaacctatactcgccgcagcagcgggcatcgcctgttcgctctgaacgctcaggacggcaaacttctggccagcatcgagaccaaagatgtaccgatttccctgctgctggatgaagatagcgaaaggatttacgtcaccaatcgcggtggcattcgagtggagaaaggcgtgggctcgctttccgtctttgagagtaaaacactggctcatctgcaaaccctcccgctgcttccacacccaaacagtctggcactggatagcaaagcgcacgcgctgtttgtcaccgtgaaaaacgacggtgcggcggcaaaagccaataacaacgagagcgtcgtgcgcattcctctgcactga

SEQ ID NO: 30511 - DNA, 2106 bp, Escherichia coli
atgagtacgcataccgccgctcaacaccacgcttcaactgaccggccagaaccggttgagtcagcgaatttttcccggttttccgcccttttagttggcctgtgctgcctgcttccgcttaatatactcgccgaagagaacgaagagcaggagaaaaagcgcacggatagtggttatcaggatctgttgatcgttaccggcgaaaaaaccacccgttcgctactcgataccggctccagcgttgaagtattcgatagccgacggttcgacagcatgccgggagctgaaaccgtctctgacctgatgcgcatgactgccaacaccgttgatatcggtatcggtaacaatctgccaaccgtacgcggggtcgatggctccgggccgagcaccggaggcgcagcgtttctcagtggtacccgtccgcgcctggtgctttctcttgatggtcgcccgctgacctacaacgaacaggcctatggcccgcagtcgctgtgggatatggaacgggtggaaatttttcgcggaccacagagctatattcaaggccgtaacgccattgccggggccatcgtgatgacatcaaaagacccggattttgactgggagagcgccttcaaaggcggcgcgggtaatcaacattcatcccagcttgccgcgatggtcaacgctccgctgattgaagaacaactggccttccgcgccagcgttgatcgccagcggcggcgcagcgatatcgatttaccagcctacgatccagtcggcgatccgagcgaagtacaaaccaccgtcgctcgcgcgaagctgctgttcaacccgtcaggcctgcgcaatctcaccaccaaactcaccttcaaccactccgatagcggagctccacaaggcgaaagtcttaaccctatgccgcacccgaccagctcccgttacgactggcggcgggcggtgtttaaaagcaacgtcaatagcggtatatgggatcttgcctatgaaggcgatgacggcctgcggctggaaaaccgcttgatttacactgggttccacattaaccgctacgtcgccgacggcctgccaaaagccaaaatcgatggttctgaagtgcacgtcgaacccgtcgtgcacttcggcaatagcgacagccgcctgcggggctttgccggattacgctatttcgacgcctcacaggatgagtcgatctatatctttggcggttccaccttcaccgatgatacccgcaccagttcagcctacggcgaactgacctgggcggtcacgccgcaggtggatattacgacctccacccgccttgagcgcgagcaccgcaaacgtctcggcggcagtcagcgcgtgcacattgattttgacgaaacttacaacgtttttttaccgaaactggacgtcgcatggaaaccggaagccaatcaaacttggggcgcacgcgttgcacgaggctataacgccggcggcgcgggggtcacactgagcgcaccgatcaccagctacacctatgatccggaatatgtccggagctacgagctttatactcgccatgccctgaacgatggcaatgtagtcttaactggcaaccttttctacaacgactacaaagatatgcagctcccctattaccttgccgccaattctgcggtaatccgtaatgccgataaggttgaaaccatgggcgcagaagtgggagccacctggacaccgcattggaatctggagctttccggcaatatcggtttactgaaaaccaaaattgccgaattccctggcagcggcgttgaaggtcactatctggcccgcgctcctgcgtataccgccaacttcggtgccgcctggcaggttgccagcggctgggaactgagcggcaacgttgccttctccgattcctactactccgcctacgacaacgactcacgtggtcgtatcggctcttattggtcggcaaatgcgcaactggcttacacctttatgtacggccgggcgacgctgttcgcgcaaaacctatttgattccaaccgcaaggtgatggtcagaggcaacgatgtttataccgccactcagcagcgctcacgcctgattggtgccgccgtggaattacgcttttaa

SEQ ID NO: 30512 - DNA, 435 bp, Escherichia coli
atgctagaaagaataaatgtgatatttaccagactgacagaccatcatgatactggccttctgttgctaagactaacgtttggtatattgatgcttttccatggggtagccaaaatagagcatggtgttaactggattgtttccattctgcaggctgttggcttacctggatttatcgcttatggtgtgtatattggtgaagttgtggcgccagtgcttattattctgggtatatttactaggccagctgcactgatttatgcactgacactacttgtagccactcttttggttggaacagggaagttttttacactaacggaagtgggggcatgggggcttgaaaacgaaatgctgtatttcatgggaggtattgtcattatgttactcggtgcgggacgatattctgtatcaaccagaacatccatgagataa

SEQ ID NO: 30513 - DNA, 1311 bp, Escherichia coli
atggaaaggtatgatatgccacaaactattcagcccagtcactgggtgccactgacaccggcacagttggatttttgggaagagtttacgtttcacccccatcagccggtctcaactgtcgcccattgtataacgttacgtggtaccattaacgaacgtgcgctgattgccgcacttcagcaggttataaaagaaaccgaggtattttccgtacgctttcgtttagtagaggaagataccataccggttcagtattgcgatcctcaccagtgtcccgacgtccgtattatagatctgcaacagcggcgctctgcacagacggttgcgctggccatgatgcagggggatattgacggtcaactgaatctgttgcgccagccgttggccgcgatatggctgatacggctctcgtctgatcactatatggtctatatccgtgcgcatcatatcatagtcgacggtttcggcatggcgttaatagaacatcgctgcgcggaactgtatcaggcctattgcgagagcacctctgtggggagaccactcagcccgtttgctgattttctcgcagaagagcaacattatttacgcagcaaaaagtatcaggcggatcgcacgtactggcacagacttctcgaacaggcgcctccgctaaaggtattacagaaaggtggggaagattacgcaaccgagtccctgcacagtgataaatggcttccggcctcattcactaaacatattcttgcggttgccactcggtgtcggattgggtggcctgatgtactgctggccctttctgctgcatggatagcaaaacagatccctgatatacaacataacggagtcttacctgtctgggtgccagtgatgaaccgacgtggccatgccgcgactaacaccccatcgctggcagtaaatatattgccagtatttatcacttttgatcccatggagaatcctgttgatttcctaaaacgtacatctatcgcacttcacgatatgcgcgcacacagccgttaccgcattgaaacgcttgccgccgatcagggtattggcaagggaatgcggtacttcttctcgccgctgattaacattctgcccttcgatcctccggtgtttatcggttgcgaaacggtgcgtcaggtgatggccagcgggccgggagacggatttaatattacctggcgaggtcgtactgattgtagtgaacttcatcttgatattgacgcggaacctggtatgtttccggagctggatccgcaggccacgctcaatagcttaaccgactggatttctcacttccttgcgtcgtag

SEQ ID NO: 30514 - DNA, 4395 bp, Escherichia coli
atgaaatcattgactccaatgcaggcggcttcctgggttggcaggcaatcgcctcagtctctgggcggcgttgctgctcatttatacgccgaatttgacggatttattcatgacagtgcacgctttcaacaagccgtaaatgcgctgtatgcccgacaccccatgttgcgattgcgcatcagtgatgacggaaaacaatatgtggcggcggagcatcctccggctaatattgatgattaccgtcacaacaccagcgaatacatccagaaccgactagcgaaaaaacgttatcgaatggagaaccagcaattactacgcgaccacggcgtgccatgtgaaatcacactctcattactgccagacgggaaaagccggttgcatatcgacctggatatgatcgccgttgatgccgactcatttcgcatccttatggaggatctggcgcgtttttatgcctcgccacctaatgatgttattccgcagcatgaagttgcatggtttcactatctggagcagcgtcttcacgatccgcaattacagatgctaaaaacgcgcgatcgtctctggtggcaggatcaattaccgacgcttccccctgccccacggcttttttcaacggaacagcgctgtcagagccgccgattagctctatttcttgaccgcgaaaccagcattgcccttaacgtctgcgcacgtcagcatcacctgacgctcagcgcactgttcctgtcactgttcacgctgacgattggtgaagggcttgaccagccatcactgcgcatcaacgtgccgacctttttccgcgatccaaatttcccccaagtggagcaactggtgggcgatttttcggattttctgctgttcagcggcgaaatccgcccatcaatgtctctgttgcaccacgcgcaagaaacaatggcacaacttcatgaacgggtttcgcacggtaactatcctggagtcagcattatgcgcgacctgtcgcgacagcacggtaacctgcaatattcgccgatcgtttttacggctggcttcggtattcgtgatggcgcgctgttctccaaacgtgtttgcgaacaactgggtacattgaactgggttatatcacaaggtccacaggtcgctctggatgcgcaattcgtctggtatggtgaggaaattttaatcaactgggacgtgcgggccgatgcctttaatccggggttgcctgaacacctgtttactcattttcacgtgctcgccagacgactggcgcagcatccagaccatatctgccatccggtttcacagtggcttgccaacccacaggagatcaaacacgatgcccgatacggggaggaaagtatgacgaaacccttaacgccattacagcaggcctatctgctgggaagaaactcgcagtggccgctgggcggcgtatcgatgcatgatttcagaacttttcgcggatcgctggatccgtcgaatttctgtcagcgcgtcgcagaactgatcgcccatttcgacgccttacgcacggttatcaacgccgaaaaacaacagcaaactgtgctgtccgtcctaccctcacctgtagagcgtattgatttaactacatgtagcgcaaccgaagcggaacagcagatccagctgcttaaacagcgttatcagcaacattgtcacgatctcaccctcccaccgtggaaaatcgttctgatcgcaatgccaacacaaggtgagtacgtcgtctttaccagctttgatgccctgattctggatggtcacgggatctcgcgcattatcgcacgcctgttcgatgatcaacctctggagccactagtgtcccaccaacctgaccaggaatcgcccggaaccgcccacagccgcgaagtggccagagagtggtggaaagcaacgctgaacgacgcggttacgccctctcgtttgccctggcaacgaccactgagtgaaataaagtgtccagaatggcgacgtgaaagcctgacgctgccagcgaacagccgaaaaaaactcatccgccttggcgcaaaaagaggattattcgccaacagtgtaatgtcagcagtcgttctcgacacgctggctctatgggcggaggatgaaacactgctgatcggcgttccctgtgcattttcagcaacggcagaacagcccactaatgcctcaacgtttatcgcaatacgctatcaacgttccggcgagctggaacagaatgcacagcgtttgcaggcagatattcaccacggtctggagcatctctcctggtcgggtgtagatctggctcgccaattgtcgtcgcgaaacgcaaaccagcctgctctgccattgatcctcactaactgtctgtcgtgggaaacgttgcccgccgaatcagtcattcgggaagaagatggcctgacccagacaccgcaggtagcactggacatgcgtctgatgaccgacagtgcgggaaatctacggttggttgcagactatgttgtacaggcgctgtccacagaaatgatacaggccgtgctggagacaattatgcgtcgtattcagttaattgttgaccgcgagtcgctgaatattccacttcgcgaagcgctgtcgtatacccattaccaggcgaatacccctgtgacggctgcagtcgggtatgactttctgggcagtattgccgaacatctgtttagcggtgacgacaccagaacagcgctgatttgcggtgacagacgctggagctggaaacaactcggccaacaggttgcgcgcgtggcaaacgggctgctggaacgtcagctaaaacccggcagtgtggtggctatttcactgccgcgcagtccggagcacatgattatttcgctcgcttgcgcgctggttgggattgttcgtgtgccgatagacatcaactcacctgcagaacgcacacgctatctgctggaaaattgccatcccgatttggtgattagcttggaaaatgcacagtttgacgacagcgttacgccacatgcgcttgtgtcggataacgactctcctccgccattaaccggacaaagtgccagcgagcaaccatcatattatctctatacctcgggcacaacgggtaaacccaagtgcgtaatgctcaataatcgcgccacagccaacgtgctggcgcaaactattgcacgctggcaagtagacgagcgcgacatttttatctccgtaactccattgcatcacgacatgtccgtttttgatctgtttgccgcgatgagcgttggcgcaacattggtactcccgacactggagcaggaaaaagatgcaatcagttggagtcagttagtagaacagcaccaggttacactctggtgttcagttcctgcgatacttgaaatgctgttggactgtgccgaaccgacacagcttcactctctgcggctcgtggcacagggtggcgattatataaaaccggctacgctccggcgtttgctggcgctctttccctcgccgcgtctggtttcgctgggaggtccgacagaaaccacaatctggagcatctggcatgacatcacccccgatgatgttgaacgtgttccctatggtctaccgctcgcaggtaatcagtattacatctgccataacagcggcgaacattgcccctgcggcgtagcagggcgcattcatacagcaggcgttaatctcgcctgtggttatctggaaaacggtgaacaggtcgaccatgattttgtgaatattcttacccccgaaggtgaaactgtccgcgcattccgcacgggtgatattggcttttatcggcctgatggtgccattatgttcgccacgcgcatcaatggttacgtgaaaattcgcggcattcgtgtttcgctaccggagatagaggacgtctttcgccaacatcccgccattaacgatatcgtcgtggtggactacgcaacggatgatgcaaatgaaaaatcactcggagcaatttgccttatcggtgacaatgtcatgccgggaataacggaactgcgtactttcgctcaacgctatcttccctgcacacatattccagggcgatttattaccctccagggcttccctctgacgactaacggtaagatcgatcgtcatgcgctgcgcgccatcctgacgcaaacgccccaacatacattatccgtactgaacaccaccaactgtatagtgcgtccggatgttgaacaaaaaatacttgagatttactgcgcggcgatgcagcagccagtccacccagaatgggatgccacggtaccgtttatcattatgggggttaagctgaaccatctgaagacagtcagagaacgtcttaacgccgagtttggctgtcacttaactgggcacgatttgattaagtgcaaaaatatcagcgacgtttgcgcactgttgaactga

SEQ ID NO: 30515 - DNA, 2736 bp, Escherichia coli
atgagtacgattttttatcagtctggcacgcagcatacggaaaaggccagcgaggctgaagaacagatctggtttgagcatcaacagcagcagtatggtgaaagccagcattgctttgcctggaagcttgacaaccgcgtcgatagcgggcgtttagtgaatgcgcttactctggcgcagaagcagatcggcgcggcgaacttgaactatgactatgatgacgcgcgcgggttggttcgacgcccagcctctgcaccgccgggtgtgactatacaggccattcataatgaacagcaggcatcagaggtgctgctgcggttaaaagagacaccgttcgatctcgccagcaccacgccgctcctctttcacctttttattggccaagatatctgcattctgggaatagtagtccacgatatcttgctcatttcgcagagactgccggaaataatgcaaaccatcagtgtactttacaacggacaagacggttctctcctgcgtgagttttcgctacccggaagtttgccattccccgcaggcagtcacttattgtcatcctgcacagcgttgccgggacacgttgggcagggtgttcacttgcgcacaacattgccgatcagtgctgtcccgcaggaacaggcattcagtgtgtggcttgcaggcgttgtgctggcgcttagcgagatatccgggcaggcgcggatatctctctggttcgagggggatttctttcagaatggtacccctacgtcgctgacgcttatctgcacggataaatcatccgtacaacttgctatgctaattgagcggcatgtgcagggccatgatgttacgctcccgcaggctgaagcaggcgtgccgttacgcgtgcgctggcagactgaattatctttacaggggattgtaggtgagcttttaccgttaccaccagggcatacgcgatggccgctgacggtggcgtttaagactcccgtgcaggtggagattatcgctggggcacagcttgcaggctgggtcgcggaatatttactgttcaggagccttcaacgccaggatgcgtatgtcagccagttgccggttagcattgctgtgccgcagccttcttactccggtaaagaggaggttcggcagcgcattctggaggcgtttcgcgaagccctggcgatgccggaaatgggtgagaatgacgacttttttgattttggcggacattcgcttattgcaacgcgcattatcgggcgcttaaaaagagattgtcgcattgagatcaatattaacgatttattcagttatccgaccgcggcgcaactggcggcttatgtgaaggtggatgaggcgcagaccagtgtcacggtaagcgaaagtgcgtataccagcaagcttcaggcacctctctccctggcgcaacaatcgttatggaagatttacaaggcgctgggattcagcgaagcgttcaatattccgtttgcgctgcgctttcttgatgctattgatgaagaggttttccgtcaggcgttcagtgatatcctggtgcgtcatgcgggcttgcgtagcttgtttgtggacattggtggtgagattcaccagcaggttattcctcccgcgctgctctcgcagtacgagtggttttgggcctccgatactcaccaaaaagagcctcttgatcaggcactgaaacgggccgcagggcatcattttgaactggataatgagttgcccattcgtattacttttttcagggatgagaaaaatggtcaacaggtggtctcactgttgttccaccatatagtgctggatgagtggtccgtcaatctgctgatggatgaactttctctggcgctgaagagccgctcagcgggacgtgtgccggtgtggaagaacattccaccgccgttccatgtatttgcgttgcaacaacatgaaaagggacttaacgataggcatctacgttactggcttgatcatctacatggtgtctcgccggcaatgcccatttttgcagccagagagcaggtaaggaaaaccactggatcacacggcggctgggtggaatgcaaagtcgaaggtgaggtggcaaaggggctttatcatctggcaaaacagcaaggcgcgtcgttgtttaacgttgtttacagcggtattgcagccgcactgcatttgcttggcaacttcagagatctgacgataggtacctctgcttccgggcgtaacgatccacaattctttgatactattggttattttactacagtggtggcgcatcgtatacagtttaccaaggcactaaccatcaatgctctgatagatgacgtgaagcggcaaatcaacgattcaatgccctacaccgacattcctatcgacctggtggaagaggctctgttcggcgatgagattgcgcaggatagtcatattttcgaggtttttattcagatccacgctaaaaacaagctgaacggtgcgttccgtcttgccgacgaccgggaagtgcgtttccgccaggtcgatccggaaaaaacggagtcagtgctgggattacagtttgaagtgatggaggaacaaattgacggaaaaccttacatacgagtgatgctgagctatcgtgaggaccattattctcctgctcaggttgatctcatcgctcggacaatccttcagttgtttgctgctatggccggttcggtgggggggccggacgtaacgatggaatctctgcgcgagaaaatggggattgcctaa

SEQ ID NO: 30516 - DNA, 213 bp, Escherichia coli
atggcaacaattaaaacacacacaggactcatcactcataaaaatggcatcagacgcgtgcgtctctatgaaacatccacatcctggtgcgtcaatcaccgaaaatgctacagcaaaataacaggacgtcgcagtggaaacagcaacagtcttagtcgattacaactggatagtataacccctattgaacaggagaaggagataactgaatga

SEQ ID NO: 30517 - DNA, 234 bp, Escherichia coli
atgacaggacacaggacgtttttaatgcataacatgtacatgctggaacaacaaacgtgggataatgtgcccggagttaataccactaattttctgaacaattgtagaagtccagccagtactgcctgttatacctacttggtattcccagtgtcaccagcggtgatgataaactcacgccagcatttcgtctggggtgtgacagcgttgtacacggggcttttactcaggtaa

SEQ ID NO: 30518 - DNA, 237 bp, Escherichia coli
gtgggatatgtgatatggttattcctgaaggcaggtcttgtcgttcttgatgcttcgcaaaacggcaatggtggtgattatggttatcttgcctttgcgttcttcgccggactgaatgttgataaatttatcggtaagattgaagatgttggtatggctttgttcggtatagagaagtccctaggggggatttgcccctatatttccgagcctgtgcatagatgtgtaattgcttga

SEQ ID NO: 30519 - DNA, 1002 bp, Escherichia coli
atgaaaagaattggtattaacggttttggccgtatcggccgactcgtattacgtcgtctccttgagacaggactggatattgatgtcgtcgcaataaacgatctaacatcacctgacgttctggcttatttactgaaatacgattcaaactatggcccctttaaagggacggtgtctcatgctgagaacgcaatcatcgttaatggtaagaccattaacgtttttgcagaaaagaatgcccatgatataccatggggaagccttggtgttgatacagttgttgaatgtacgggcttttatacatcagcagaaaaagctaatgcccatattgaggccggggccggaaaagtgctcatttcagcccccgcgggggatatgaagactattgtatacaatgtaaacgacgatacgctttcccctgaagataaaattatttcggttgcatcctgtacgacaaactgtctggcacctgtggcgaaagcattaaatgatgcgtttggtattaaagttggcacgatgactacggttcatgcgtataccggaacccaggctcttgttgatggtcccagaggtaaagatttaagagcttcccgcgcagctgcagagaatatcattccacatacgacaggtgcagcaaaagcaatagggcttgtgatccctgaacttaacgggaaactgaaaggccatgctcaacgtattccggtaaaaacagggtcagtgactgaactagtaactgtattaagtaaaaaagtgactgttgacgaagttaacagtgcactgaaagcagtaacgcttggtaacgaatcctttggttatacagatgacccggttgtttcatccgatataatcggtattcactttgggtctgtattcgattcaacacagactgaagtaactgagttcgatggtatacagctggtcaagacagtatcctggtatgataatgagtatggttttgtgactcaactggtcagagtgttgaataaatatatttccctttga

SEQ ID NO: 30520 - DNA, 345 bp, Escherichia coli
atgatctacgataaaatactggatgaactgctcgaatggctccacaacaataccgacaaacccctacgaatcgctgatattgcagcgaaagcaggatactctccatggcacctacaaagaatattcaaaagttatacaggcgtcacgcttggccagtatgttacagagttaaagctaaagaaagcctttgagcttttagcaacaacaaaaaaaccaataatggatataacattaactgttggattttccagccagcagtgtttttcaaggcgatttcatcaatactttgggaaaacgccaagccaagtaagacgtaacgtagacgaaaaaattataaagcgttaa

SEQ ID NO: 30521 - DNA, 711 bp, Escherichia coli
atgacagctaagaatcaccttcttctggaagagcgctggcagcatcatcgggagcctgcgttgcttgcagtatcaggtggcgcaattgataccatcagttttatcacgttgtttgggctctttaccgctcatgtcaccggtaaccttgttgtggctggcgcatctttagctggagacagtgaaggtattgtagccaagcttctggcgatcccggcctttatggttgcagttgctgccaccacgctgattatcaaaaccagaaaacgtattacacctgcttttcttgccgggttgtttatggcagaagtgttcctgctgctgctctttgctttacttggctatatatggtcgccttttactgattctggcggactaacgactctcgttacaggaataacgggggttatggcaatgggggtacgtaatgcaaccacacggctgctgctctccagtaccagtccaagcacgatgatgacagggaatgttacacaactcacgattgattttatcaattatttccagataccctcgggggaaaatacttcgaagctaagaaagtcaggggcatctgtccttggatttcttgtcggagccgggttaggtgccgttggttatatattaactggatttatttctgtccttatccctgtgatgatgattgctgtcgtgatttataaagaaatgagctatgtctcaacaggcagatactga

SEQ ID NO: 30522 - DNA, 690 bp, Escherichia coli
atgattgagatgcgtaaagctgatcaacgtggggtggcaaacctaggctggttgcgttcgttccatactttttcctttgccagttactgggatccggagcaggttggattttctgacttgctggtcattaacgatgatcgtgtgagtgcggcaaaaggttttggtactcatccgcaccggaacatggaaattatatcctatgtgcttgaaggagcgcttgagcatcgtgactctatgggaactggttctgtcattgtccccggagatatacagttaatgagtgccggcactggtgttacacacagtgagtttaatcattctcatgaggagccggtgcattttctgcaaatatgggtaaatccgtcggaaaaaggaacaccgcctggttatcagcaatttactgtcacggaaaaagaaaaacatggtcagatgagactcatcgtgtccgggggcggggaaggcgacgcgctcactatccgtcaggatatccgtatctattcgggactgtttaacgataatgagaatacggagttaaatattcctgaaggaggatatgcatatgtgcatgttgcaagagggcgtctggaagtcaacgggatcatttttaatgaaggggacggagctcgtgtgcgggacgaacggctattgtcgtttgcccgtggagagaacgcggaggttctggtattttga

SEQ ID NO: 30523 - DNA, 483 bp, Escherichia coli
atgaccccggcaattctctcagcaagaaatatcagcaagactctggtcacagcactgtgctggcgatgtttcggatacaaggcactgatagtcagaggtggtgagtattcgggcaatatctgtactaaagaaccttgttgcagcgcatcttcaacaataaaaagcggtaaaagaacaattccgcccctcttcagcagcctcacagatcacttccccgttattgctgctaagctgcatgcgtattcagtgagtttcctgcgtttaacctccagccatactgccttttccggccatacagaaggcagttatgttgtgtcagttcagatcctgtctggggcgtacctcgcaaacggagataagctgggctggcacaaatcaccattgtcagtttacccagacaacgggcgattaaggttgagttcatcaggttaccaatacgcaaaaccatatcgtaaccttcccctgtcagcgccagtgatataa

SEQ ID NO: 30524 - DNA, 219 bp, Escherichia coli
atgaaaaaacatctactacttcttattaagttgttacttatatctatagctacttgctctattggaatagtggttagtatctggcttatagctcgggaaccaataccttctgaggtgtatgtaaaatacggaataattggcgcagtagttggcttatggggaggtgctgggatttggttacaactctatctacaaatgcgaagatactatcgtaaatag

SEQ ID NO: 30525 - DNA, 264 bp, Escherichia coli
atgagttggatttatcctgaggtgatcaagagattacaacactcttgtaaaaactttcttgaagggaaaataacggtacaaagtattcaatcagaaatttatgctgcggaaagccaaattgttgctgttgaggaaaagtggctccatacaatgttatttaatgcggagaatgagatcgaattgcttttgtatacagttgaggaagagcaattggttagttctgtaataccgatagtcaataatattttaagcaaaatcaaatag

SEQ ID NO: 30526 - DNA, 426 bp, Escherichia coli
atgttatttccaaatcaagtcggtgtcggattaactcagatagcacctcttattattgcagccaatatacttcaggatggattaattgctatagagcagcctgaactacatattcatcccgctttacaactcgctgtaggtgatctgtttacccaatatccccttgatgttaaaagacctatgtttttagtcgaaacacatagtgagcacattttgcttcgaattttaaaaagaattagacaaacaacggacaatgaattacctgaatcaaattacccagtaaaacctgattttatatcagtgatcgttttcgaggataataatggttcgactgttactaggaaaatagatattactgatgatggtgacttcaaacaaaaatggcccaaaggtttcttcgaagaaagaaggggagagcttttttaa

SEQ ID NO: 30527 - DNA, 135 bp, Escherichia coli
atgcatggtttagatgagggagaaggaacggatgatgtctcaattttgtcgaaagagggatataataaaagatgggaacattacactacgaataatgtttttgatttaatagaagagcgtgaagttatatgttaa

SEQ ID NO: 30528 - DNA, 414 bp, Escherichia coli
atgcaatacttatcgctggataaatataaagatggtgttctgctgtctgctcgtgttctgctgatggttctgtttgtattgtttggttggcagaaaattactggctttgaaggcactgttggatatatgaacgcagttggggcgcctctgcctaatgtgtctgctgtaattgctgtgattgccgagttagtgtttggtatcctcattttcgttgggtattttactcgaccattagcactgcttttggctgtttacacagttcttaccgcgattatcggacatgcttactggaatctgagtgggatggatcagtacatggcgatgattaacttctataagaatgtcagtattgccggtggtttgtcacttctcgcattcaccgggcctggccgatactcttttgaccgcaaataa

SEQ ID NO: 30529 - DNA, 558 bp, Escherichia coli
atgttgtccgttaatatctgttctgtgtgtgatattgtgatcctcagcgatggtctgggggagttttctgccactgagatagttcaggaagcttcactggcggcaattgtaattattcacctttccctggcccggaggcatgcggaatcacgacaatgcaatatattgatagcaggcttcttcaccgccatgtttttcagagaactggatgcattattcgacattatttatcatggtagctgggtctttttttctcttgcagtatccgtgatggctatattttatgccatccttgcagggcgtaaaacgctggagaaattatctcattatatatgtacacctcagtatggtattatgctgtgcggtataatttgtattcttgtgttttcccgattgtttggtatgcattatttatgggaaaccttgttgaaagataattatatgcgtacagtgaaaaatatcgttgagaaggggatggagatgtttgggtattctctctgtttattatcctctctgggatatatttttcaaatgccgggattgaagaaaacaaaatga

SEQ ID NO: 30530 - DNA, 306 bp, Escherichia coli
gtgcagtccattgaccgccaggtactgaaaaacaatgttgttggtctggctaaagcggcaaaactgtttaatgttcccaccaccataaccaccgtagaaaccgatggtttttccggcaacacctaccccgaactactggccgtttttccggaaaacaaaattctggaacgtacttccatgaactcatgggatgaccaaaacgtccgcgatgcactggcggcaaatggtcgtaaaaaagtaattgtttccgggttgtggactgaagtctgtaacacgacgtttgccctgtgtgcagctaaagagtaa

SEQ ID NO: 30531 - DNA, 711 bp, Escherichia coli
atgcaacgaaaatcattcgaaataccaaaagcactggtctgggcatcatatctggatgtgcgtcgcaacaagggagcccccggatgcgacgggcagactttgaaaatgttcgaccagcaacgtgatggcaatctatacaagatctggaaccggctatgttcgggaacatggtttccgccaccagtgctggaaaaacggatcccgaagtcgaatggcaaggagcgcattcaggggatcccaacagtatccgatcgaattgctcagggagcgataaaacttttcatggaagaaaagcttgacccgattttccatgctgattcatatggttaccgaccaggcaaatcagctcatgacgctctgaaacaatgtgccatccggtgctggcgttatagctggatactggaagtggacatcagtgcgtttttcgaccatgtgagacatgatctggtgctcaaagcactggaacaccacgggatgcctaaatgggtcatcctgtactgtcgacgctggatggaagcgccaatgcagagttgtgaaaatggagaattaataacccgaacacgaggcactccgctgggcggggtcattagtccgctacttgctaacttgttccttcactattcatttgatttgtggatggaaagagaatatcggggggtaccgtttgagaggtacgctgatgatattgtaacattgttcacgaatgagtga

SEQ ID NO: 30532 - DNA, 375 bp, Escherichia coli
gtggcgtactgccgctatgccgatgatttcgtgctcatcgtcaaaggtactaaatcacaggcagaaaccatcagggaggagtgtcgtagcgtgctcgaagacagcctgaaactcaggctgaacatagacaagaccagaatcacccatgttaacgacggctttatctttctggggcacaggattatccgcaaacgcagtcgttacggcggtatgcgggtggtcacgacgatcccacgggataaagccagaaacttcgcggcatccctgacgacattgttatcaggcaattacagtgaaagaaaaatcgatatggttgagatactcaaccgaaagctgaaaggctgggctgcgttctatcagttcgttgatttttaa

SEQ ID NO: 30533 - DNA, 972 bp, Escherichia coli
atgaacagggaaattcagcagcggctacagtgggtaaaactctatgaaacgtccggtgatgcgggatttgtatgccgtcgctgtggcatttctcggcccacattgcgtaaatggtggcgcagatatctggctcagggcatcgctggtctggaaagccacagccgtcgccccaagcgttcaccatcaacgaaaaacggcacttgcgaagtcgctctgattctggagttacgttctcagcgaaatctgggggcaagacgtattcaaagcgagttaaaacgacttcattcaatctcactggcaatagcaacaatccacaaagtcctttgccagaatcaggttaaacctgttgttaaatttcggcgtaaagctgatttcattcgctacgaacgccctgttcccggtgatcgggttcagatggatacctgtaaaattggccccggcttatatcagtacacatctattgatgattgcactcgctacagagtcctgaggctctactctcgtcgcacggcggcaaacacactggattttattgattgtgttattgaagaaatgcctttcccgatacagcgctttcagacagaccggggaagagaattttttgccgttaaagtgcaggaaagattaaaagaatacagcatcaagtttcgtccaaataagccagcgtcgcctcatcttaacggaaaggttgaacgttcccaaaagacagacaaagctgagttttacgctaccgtagatctttctgctgatgacctgaaggaactgctggcagaatggcagcattactataactgggaacgtcctcatagcgctcacaacggtaaaactccgatggaacgctactttgaacttgctgagaaaacaccatactctgatgtcgttcatgcaaactatcagcccaatgaagagcatatacaggaacagaattacaagcttgaacttggactgagaaaattgaaacgatgtctatga

SEQ ID NO: 30534 - DNA, 192 bp, Escherichia coli
atgcgagtgctggtctcggatgtggtaaacggtagagggatcgttgagagattattctgggattttgatgggaaaactattacgttgccacatgtgtgtaaaaatcactcttttgaaggggttgtggagtggcattggaaagagtttttatatggtgaggtaatctttatatatcttttacttggggtttaa

SEQ ID NO: 30535 - DNA, 528 bp, Escherichia coli
ttgcatcaggatattttcgacattttggtggaagatgtaaaatcagagtttgctcttaaatatatttttgaaaatgaattattttactccctattaaatactgataatttcaaaaaaccatttaactacgaaatggatattgcgacggattccgccggtgccactgagcgtaaaaacatcgatttagttgaaacattcaactatctcattggtttacatgtgaaatccatcgaatccaatatcgaacgtggctatgtgcgtgttgaaggaacgctgccaacaggcgagcgtacccttattctgtggcgcgattgcgacaagatcggttatgaagagttgaataaatatgccaacagattcgatttatatgcaaaagaaaatacgttcgacgttatctatatcaatggcgatcataacttacctaccgcctttaccgttgatgaagaagacggcgagattgttcgtagcctgaaaatccgccagatcgaacctgaattcttgaacctgatgtttgcggaggaggtttaa

SEQ ID NO: 30536 - DNA, 378 bp, Escherichia coli
atgaaaacattacccgacacacacatacgggaggcatcgcactgcccgtctcccgtcaccatctggcagacactgctcacccgactgctggaccagcactacggcctcgcgctgaatgacacaccgttcgctgatgaacgtgtgattgagcagcatattgaagcgggcatttcactgtgtgatgcggtgaactttctcgttgaaaaatacgcgctggtacgtaccgaccagccgggattcagcgcaggagcctcgtcgcagttaatcaacagcattgatattctccgggctcgccgggcaacaggcctgatgaccagccacaactacagaacggtgaacaatatcaccctgggtaagcatccggaggcgaaacgatga

SEQ ID NO: 30537 - DNA, 477 bp, Escherichia coli
atgcaacagatttcctttctgcccggagaaatgacgcccggcgagcgcagtcacattctgcgggccctgaaaaccctggaccgccatcttcatgaacccggcgtggccttcacctccacgcatgcagcacgggaatggctgattcttaacatggcgggactggagcgtgaagaattccgggtgctgtatctgaacaaccagaatcagctgattgccggtgaaaccctcttcaccggcaccatcaaccgcacggaagtccatccccgggaagtgattaaacgcgccctgtatcacaatgccgcagccgtggtgctggcgcacaatcacccgtccggtgaagtcacacccagtaaggcagaccggcttatcaccgaacgtctggtacaggcactggccttagtggatatccgggtgccggaccatctgatagtcggtggcaaccaggttttctcctttgcggaacacggtctgctttaa

SEQ ID NO: 30538 - DNA, 501 bp, Escherichia coli
atgaaaatgaagaagactattggagccatagctttcactgctttttttgcaagtatgggggcgtctgccgtcgaaaaaaatattacggtaactgctagtgttgacccaactatagaccttctacaggctgatggtaaggcattacctaatgctatttcacttacttattctcctgcagcaaaagggttcgaaccttatacactaccaacggcagtacatacaaatgacgatacaaaaggagtggtggtgaaactgtcaacagatccgaaattaacaaatattctgcaaccaaacacccagatcccaatgagtgtaacattgggaggtaaaacactaacgactgctgcccaaacctttacagctgatgaaatgaatttcggtgcaacaggtatgagtagtatctcatctgttaaagaccttgtaattcaggctcagcagcaggccaccgcagcaggtaactatcaaggggtagtatccattatattgactcaggcgccgtaa

SEQ ID NO: 30539 - DNA, 1335 bp, Escherichia coli
atgaataattttaattatctgttatgcccggtttcttttcatttttctcttgcattttatgtcgcgttggggatgggattggtcacaacatctgtatttgctgcgaaagagacggagtttgatcccggctttttgcgttcggtatcggggacgaatgctattgatattagtcgctttagttatggtaatccgatccctgaggggaagtattatgctgacatctatcttaatagcgaatggaaagggaaagctaatttagaatatgtatatggaaataattccactgcttctaccttatgcctgacatcagaattactgtctttaattgatttaattgaagatattgaacctgaaaatgcaaaggttactggtaaatcttgctatccagcatcagaggggcttccatcagctaaaattaattttgagttgtcaacgttaaaactgaatatagagatccctcaggctcaactgaatacacatcccagaggatacatatctccagttcagtggcagagtggggttccagcggcatttataaattatgatgctaactattataagtacagtaattctgatatcaataacgaacagacttacctgggattaaaagcaggattcaatttatggggatgggcctttcgccaccgtggaggagaaagctggaataatagttattctgcgggatatcagaatatagaaacaaatgtgacgcatgatattgctcagctgagagcacaatttaccttaggggatttttatacaaatggccagttaatggagagccttaacctgcgtggagcgcgactggcatcagatgaacgaatgttgccggggtctttgcgtggatatgctcctgttgttcggggaatcgctaacagcaatgctagggtcaccatttatcaaaattctcatattctttatgaaacgacagtgccagcggggccatttactattaatgatttatatccgagcgggtatgcaggcgatcttcttgttaagataactgagtctaatgggcagacaagaacgtttaccgtaccttttgcagctgtagctcagcttgtccggcctggattcagtcgttggcagatgtcagtagggaaatatcgttattcgaatgaaacatataatgatttgatagcacagggcacgtatcaatatgggcttacgaatgatattaccttaaatggtggaataacaacaagttcaaaatatacagcgggtttggctggtattgcctttaatacgcctgttggtgctgttgcatctgatattacattatccagaacaacatttagtcgctctgatgtaacgctgtctcttatacacatctga

SEQ ID NO: 30540 - DNA, 723 bp, Escherichia coli
atgttaaggtttcttctgattgtttttactctatctgtatcgacagttgtgcagggtagcgttgttattatgggaacccgtgttgtttatcccgcagctcaaaagagtattaatatacggttaaataatgaaaactcatctcctgcgcttgttcaatcctggttagatacaggagatgcgacggttacaccagattcagtacgagtcccctttattattactccgccaatatttcgtatggacccaaaatcgggacaaacaatcagagttgtatatacaggggagtccttaccgacagacagggagtctcttttttatctgaatgtgctggacattccagcaaaaccagaaaataaggattccgggagtgctgaggtgaataataactatctgcaactggcggttcgtagtcgtattaaattcttttttcgtccggatgacctgaaaataacaccgaatgatgcttatcaaaaagtctcttggcatcaggagggtaagagacgtattaaagcaattaacccaactccgtattacataacatacaataaaattgaagttgttcagaataaagacatcatgccagttgaacaaagtgggatggtggaacctttttcttcaaaagtatttacacttaaaaataactcggcactggcaaataaagtgacttggaccattgttaatgattatggtggattccagcaaggtgagtctgttttggaatag

SEQ ID NO: 30541 - DNA, 375 bp, Escherichia coli
ttggcaaaccaaggggcaacagcgggattaacaccgttttcaattgatttagcggattgtactccagatacagatggtgcaactcaggttaaagcttattttgaacctggagccagtactgattttacaacaaataatcttaaaaacatggctcaaaataatcccgctggcgatgttcagattcagttattgaatagtgatggagcttcaagcattttattagggaaagatttcgctggacaggatgttcatgctgaagctatcggagcggatggtcatgccacattacgttatatggcgcagtattacgcaaccgggacagcaactgctggtgatgtaacaacaactgtcaattataccatcgcttacgaataa

SEQ ID NO: 30542 - DNA, 156 bp, Escherichia coli
atgatgtcaaaaggatctgtagggtggtcttgtcctcctccatctagtattccgcctgttattttaatgttagtgccagtattagggcttattctcagcatgacgtcattagaaaaattacgtttaatggttacgccatcagtcatctttaggtga

SEQ ID NO: 30543 - DNA, 324 bp, Escherichia coli
atgattttgcaagccgcgattgatagacagcctgaagagagagggggtggcggtatgaaggtgtcattgcttgatcgttgtttacaatttttgtctggcgcaatcattgtagtttgcttgctcgtgatttttacatcgttaatcaatatgtatcaatcaggggaacgattgacaaagacgatagagggaaaaaaatcagtctcaaattacgaagtatcacatgcacataacgatttagtagaaagccttgaccgtattaacaagaggcttgacgagacaaatatgctacttaagcaaattcaaaatgaagtggaaaaacgttga

SEQ ID NO: 30544 - DNA, 807 bp, Escherichia coli
atgaataagaaaccaacacacttaatatattgtttaacagagtggattgaaaaaaacctgcattccgatataaacattgactccgttgccaaaaaaagtggctatagtaagcgccacattcaatatgtattcaaatatgttactggaaggtctataggagaatatataagaaccagaagattgacaaaatcagctatacttgtaattttcacaaaaaagaaaattgaaagtatcgcgagtgagttgaactacagttcattacaatcattcaccagagcgtttacagatcactttgaactatctcctttagcttttagaaaaaagaaaaccttagattgctccaaattattgagtaacaaaagcattaaagtaaaaacaaccaagcaaaccatctgttataataaaaaatttataatagatggaaaacatatagaacataaagatactctaatagaacattgctccttaagaaaaagaatgttaagaacaaaagaaatagccaagcacaatttaaataaacctttatatatcatatcaatactatcgccatatagcagaggtgcttggtacttaaatgttacctcagtaattggaatatcatctccctcaggaaaagaaagaattcattttaaaaaatgcgttaaagtagaatacaatgggacattggagggatattattttttttctcgccatatctttaatatactcaacttaaatatttatccatattgtttcattgaagaggttgagtttttttgcatacaaagcgatagtataaatattaacatttttatagagattgcttga

SEQ ID NO: 30545 - DNA, 156 bp, Escherichia coli
atgaccgtttccgcgctgttggcgaagattcctgaactgggaacgctctcccgacgcgaaattagtgcgcttgtggcaacccgctttaattcggtgataaaaacgttttatgtgtgcctgcttgcagccggaaagaccaaaaagtggcgctggtag

SEQ ID NO: 30546 - DNA, 1041 bp, Escherichia coli
atgaatgtggcagttgctagatatccagaaactcatccaaattctataaacataaataaattaattggacctatcgacagaaacgttagctcacctagttatacaatatttaaggactatgttgcaggatacacaacatcacatacgagttataatggaattagctttctttgtcagtcctccaataatccaacgcatggggcctgtgcaacctcttttgcaaattataatccaggaatcacaactattaatctcgagtttacggaaagaaaaagtttaataaaaaaagtcctgcaggtaaaggggtacaaaactctcatattcccattttcgagttgcccgatagaaaaattaacactcaactctcacatatatacatgtgagaagcagcatgctaatggaacaaaactgtccatggatattccagcaggcgaactcaataaactaccattcggcggaatatgggaagcaacacttaaattaaccgtacaacgcctttatggtcaagtttacgggacttacaaaattgactttcgtattgatttaactgataaaggtaatatccaggtttggctgccagctttcaaaaccacccctcagatagatctgaacctcagaccccaaaataaagggcgctatataggtaataatcaaattgatatgtgtttctatgatgggtatagcacaaacagcaatagtatggaaataatatttagagatgatagtggtagcactggagggaacatgtattatctcaataaaagaggagccccctctaaaaaattaccatatagtgtttcacttctgctcggtggacgtagttacaatcctgaaaatggtatcccacttacaataaacaatgcagactcacttgaggtaaattggaatcgcattactgcagtagctatgccagagattagtgttcccgtattatgttggccagggcaattactactgaatgctgatatatacaatccgcaggctggtcagtactcaggacatataaatattacattcacaccaagcagttcaaatatctga

SEQ ID NO: 30547 - DNA, 168 bp, Escherichia coli
atggctgaaacagaacccaaagatcagggggatttaccagcccgtgaactaacggtgggtgtgaatcacattgaacgtctgtggcaggtgctgtacgacacgataacccggaatcaccagtgccgcgccatgtggcaactactgaaaaaggttcgacataacgcctga

SEQ ID NO: 30548 - DNA, 1176 bp, Escherichia coli
ttggcagcttaccgttattcgtcaaaagatttttatcatctgaaagatgctatattttcaaataacagtgactttattgatgatgtgtctataaagagttcgggtttttatcgtcctaaaaatcagtttcagatttcgatcaatcaggcgttaggtgaaaaatggggaagcctatttttaacaggaacaacttatagttactgggggcataaaggaagtcgtaatgaatatcagatgggctatagtaacttctggaaacaagtcggatatcaaattggtttctctcagtcaagagataatgaacagcaacatcgtgatgacaggttttatatgaattttactcttccgctgggagggagtactcaaagtcctgtattttcaacggtcttaaattataacaaaggagaaaaaaatagcattcagacatcaattagcggaattgccggaaaatataatcagttttcttatggtgtttctggtaacagccaggaaagcggcccttccggctatgcaatgaatggaggctatcgttcttcttatgtaaatatgaccaccacattcggacatgatacgcagcataacaagcaaatgtcatttggtgcatcgggggcgattgttgcacatccttatggggtgacattgagtaatgacttaagtgatacctttactatcgtccatgctaaaggtgcgcagggtgctgctattaataatgcctccggaagtcgactggatttttggggtaatggtattgtcccttatgtcgcaccctatgaaaaaaatcaaatcagcatagatccttctgatttggatttaaacgttgaattatcagcgacagaacaggaaatcatacctcgtgctaatagtgcaacgttagtgacatttaatactcaaacaggggagagtttgttatttaatatcagaatgccagatggtaataccccaccaatggctgctgaggttctggatcaggatggacagttagtcgggtatgtggctcaggctggaagcttgtttactagggggctccctgaaaaaggtcatctcagcgttgtatggggacctgataataaagacagatgttcatttacatatcatgtcacacacaataaaactgatgtacaacctcagcgcgttcctgttcagtgtataccgcgccataatcaggaaaaaacatga

SEQ ID NO: 30549 - DNA, 378 bp, Escherichia coli; identical to SEQ ID NO: 30536

SEQ ID NO: 30550 - DNA, 579 bp, Escherichia coli
gtgaaggaaaatatcaaaaaaatagagagtgacgtaggcattattgatattctggtaaataatgcagggattattcagcgtaaacctatgctagaaactacagcagctgattatcgcaaaataatagatattgatctgacaggtcagtttattatggctaaggcggtattgccttcaatgattaaaaaaggacatggcaagatcattaatatctgttccatgatgagcgaattgggtcgcgaaaccgttgtaggctacgcttcggcaaaaggcggcttaaaaatgctgactaaaaatatctgttctgagtttggtgaaaaaaatattcagtgtaatggtattggtccaggctacattgctacacctcaaacagcaccgttacgtgaaattcaaccagatggcagccgccatccatttgatcagtttattatatcaaaaacgccagctggacgctggggtaaaccagatgatcttgctggtgcagctatatttttagcatcggatgcttcaaactttatcaatggtcatattttatatgtcgatggtggcattctggcctacattggcaaacagccttag

SEQ ID NO: 30551 - DNA, 471 bp, Escherichia coli
atggcttactcagctgcagcggttgctaatgccttcattgaaaaggctttaaagggtgagttaaagaatctgactccaatgaagctccagaagcttcttttttatactcaatcatggcatctaaagttacgcgacaacacaccgctttttgatgatcttttcgccagatggaaattcgggcctgttattccaccgctttatcatatgttgaagaagtatggagcaaacgaaatcactgaaaagattagcgtcatcttagagtgtgatggcgaattaaaaagaataacccctacaattcaaaaagatgatcaagaagctcaagctcttatcaataaaatcatcgaagtatatgggaaattttcaggtactgaactgtctaacttaacacatgcacctggtacagcatggagcaagggaagtgcagatggtggccccatttctcatgaggatatggcgaagcatattcactaa

SEQ ID NO: 30552 - DNA, 1368 bp, Escherichia coli
atgaaaaaacaaacccagctgttgagtgcattagcgttaagtgtcgggttaactctctcggcgtcatttcaggccgttgcgtcgattccaggccaggttgccgatcaggcccctctccccagtctggccccaatgctggaaaaagtgcttccggcagtggtgagcgtacgggtggaaggaacggccagtcagggacagaaaatcccggaagaattcaaaaagttttttggtgatgatttaccggatcaacctgcacaacccttcgaaggtttaggctccggtgtcatcatcaacgccagtaaaggctatgtgctgaccaacaaccatgtgattaatcaggcacagaaaatcagtattcagctcaatgatgggcgcgagtttgatgcaaaactgattggtagcgatgaccagagcgatatcgccctgttgcaaattcaaaacccgagcaaattaacgcaaatcgctattgccgactccgataaattgcgcgtcggtgattttgccgtggcggtcggtaacccatttggccttgggcaaaccgccacctctggcattgtttccgcattaggccgcagcgggttgaatcttgaaggtcttgaaaactttatccagacagatgcttccattaaccgcggtaactccggcggtgcactgttaaaccttaacggcgagttaattggcatcaacacggcaatccttgcgcctggtggcgggagcgtcgggattggatttgccatccccagtaatatggcgcgaacactggcgcagcagcttatcgactttggtgaaatcaaacgcggtttgttaggcatcaaaggcaccgagatgagtgccgatatcgccaaagccttcaaccttgacgtgcagcgtggcgcgtttgtcagcgaagtgttgccaggttctggctcggcaaaagcgggcgtcaaagcgggcgatattattaccagcctcaacggcaaaccgctgaatagctttgctgagttgcgctctcgtatcgcaaccaccgagccgggcacgaaagtgaagcttggcctgctgcgtaacggcaaaccactggaagtagaagtgacgcttgataccagcacctcttcgtcggccagcgctgaaatgatcacgccagcgctggaaggtgcaacgttgagcgatggtcagctaaaagatggtggcaaaggtattaagatcgatgaggttgtcaaaggaagcccagctgctcaggctggcttgcaaaaagacgatgtgatcattggcgtcaaccgcgatcgggtgaactcgattgctgaaatgcgtaaagtgctggcggcaaaaccggccatcattgccctgcaaattgtacgcggcaatgaaagcatctatctgctgatgcgttaa

SEQ ID NO: 30553 - DNA, 231 bp, Escherichia coli
atgagtaaggccggacatgtgtcgcttcgcagggcgttgtatatgcctgcaatggtagccaccagtaagactgagtggggacggatgttccgtgaccgtctggcggctaatggcaagaaaggaaaagtgattctcggcgcgatgatgcgcaagctggcccaggtggcgtatggagtgctgaagtcaggcgtgccgttcgatgcgtcacggcataatccggtagcggcgtaa

SEQ ID NO: 30554 - DNA, 390 bp, Escherichia coli
atgaaatataatacgatgaataacaacgaaattattttatctctatgtgcacgcattaaagaaacgcggatctcattatcgttgacccaacagcagttagccgatcgtgcattggtgggcattgcaacggtcaagcggattgaaaagggaggaagtttaaatcttgataccctcatttctcttctgcgcgcgctgaataaattgcaaaatctcgatgccatattgttcgaagctgaaatgcgtaatttcaacgaaaattcttccagcggcgaaggggcagggcgacttcaggtgcgccagcaactgacagatttaaaccagaagtctccagccccgcacgcagatgaccgtgattttagtacggcgctggaaaataccctttgctggtga

SEQ ID NO: 30555 - DNA, 1353 bp, Escherichia coli
atggaaagctgcatagatatattcaagatagttattggtccatccagttcccgcacagtcgggccaatgcgtgcggcttataattttgtgtcacaattgaaacagcaagaaatgttacctttgttgcggaaaattgatgtcgaactttatggtgcgctgtcattaagccgcaagtgccataatgttgatgtggcgattgatctcggtttgcaaggccacttacctgacagtgttgatatccgcatggaaatgtccgccatcaggcgtgcagaaactgaggcgacgctggaagttatgcctggtgtcaacgtcagtgtatccattctttctaatccacaggcgcatccggggcacccttatgcgatgacatttcgtgccagagatgactggtttacactttatgaagaaacctggttttctatcggcgacggtcaggtgcaaaaagcgggagaggcgatgatgccctcctcagtcactccacatccttttgaattccagaacgcaaacgaattattaatactttgtcagcaaaacggattatctgttgcggcattaatgatgaaaaacgaactgcactgccagacatctggttttttgcatgacgatttcaataaaaaatgggaagtaatgaaggatgcggtctatcgcgggatgcatacagaaggattacttccaggtccgtatcaggttaaccgtcgtgcctgtgctttatataaatcgttgcaggcaaaggggtttaccaatgacttcctgactgcgatcaattgggttaatacttttgccattgcggtgagcgaagaaaatgctgcgggtggacgcgtcgtgacagcacccaccaacggcgcgagcggtattatcccggccgtactgtgttggtatgataaattcattcatgaacttgatacttactccgttactcgcttttttctgaccgccggtgccatcgccattctgttcaaaaaaaatgcctctattctggggtctgaagttggatgtcagggagaaatcggcgttgccagttcaatggcggcagcaggattagcagaacttatgggcgggtcagtgactcaggtactcagcgcggcagaaattgcaatggaacaccatttaggtttgacctgtgatccagttggcgggcaggtacaaattccttgtattgaacgaaatgctatttcagccgtgaaagctatcaacgcaacgacgatggcgttgagtcgcataagcgagccctgcattacgctggatgagataatttccgcgatgtatgaaaccggaaaggatatgagcgctaaataccgggaaacttatcatggctgtcttagcaaattgcagccaagaaaaaaggacgcgtaa

SEQ ID NO: 30556 - DNA, 888 bp, Escherichia coli
atgacgattatttatttcttgtcgccaacaggcatcgacatcacccaaaaatgtctgaaagattatctgcaacatttaaagatttccccctcggtgttttcgctaacaacgaattacagtaggcaaataaatagagagtatctaaagctagtattaccaaatgatgttaccaaccctgctttttatgctggtttacgtcaccgtgctgatcatcatcattttgattttttccgcaaacctacggacttaccggctgagggaattattgcctttgatatggattccacctttgttgaagaggaaggtgttgatgaaatagcccgtagactcgggatctcggaaaaaatcaccgcgctgacccgtgaagcgatggaaggaaaaatcgattttgataccagttttacccggcgaattgccatgcttaaaggaacgcataaagatatattgcatcaagtttgtgaacagatgactctttcaccaggtcttgaaactattcttcccatactaaaagaaaaaggattcaagacggcaattatatctggaggtttggatatttttactgagcgattgaaggaaaaatatcaacttgattttgcattttctaactctgtgcgcattaaggaagatctgttaactgatacaattaccttacctattatgaatgcagaaaagaaaaagcaaaccctgataaatttggcgacagagttatcaacttgtcgtgaaaacatcattgcctgcggagatggtgctaatgatattcctatgcttctgcatgccgggaatggcgtggcatggaaagcaaaacctaaaacccgggaaaaagttgctaaccagattaattttaatggtttcgagtcgcttctcttttttatagaagaaaaattatag

SEQ ID NO: 30557 - DNA, 1323 bp, Escherichia coli
atgagcttgaaaaaatttattttcagccaggccgaccaaccggtggtcaaacggcaagaagaagttgatcatacttataaaaaatttcgcattgaaatcatcacctctgtatttatctcttatgccgtattttatttaacccgcaagaatttctctgcggccatgccggcgatgttaacggatacgtcattaactgcacaagatttcgctatcatgtcgtcggtcttttacattctttatggctccatgaagtttgtaggtggcatgttagttgataaaattaatccacgcgcgatgaccggccccgtacttattggcgtcggtattgttaatattcttttcggtttttcagacagcgttgctgcgttctatatcctgtacagccttaatgctattcttcagggtaccagttttccgccgatggcaaaaattatggcctcgtggttctctaaaaatgaacgcgggcgctggtgggcagttgttgaagcggcgcataatattggcggtagtcttgcgcctctcctgacaagctttgccattgcttttagtggcagctggaaaatgggcttttatgttccgggtgtaatatcgctgattatgggggttgttgccctgtttacgattaaagatcgtcccggcacactcggtttgcctaacgtaggtaagtggcgcaacgacccgacagaacttgctcaagttaaagcaagcccggttgatctgagtttttggcaaattttcattaaatatattcttaccaacccattagtttggctgattatcctcggggatatgtcagtctatattgcacgcaccatcctcaatgactggccacaaatttattattctcaggttcataactggagcctgattaaagcgaactccattatatcctggtttgaagcaggtggacttgcagggggattactggcggggtacttgtccgattttatgtttaaaagtaaccgctggatgaccggattaatgtttgccatcgccttatgtatttgcatcgttctcgtaccgctggtgcaggacgtctcctatacattaacggctattctgtttacaatcatggggtttgcattgtatggaccgcatatgttattcgctgtcgggtgtcttgatgttacgcataaagatgcggcaggttccattactggattcaggggcttgtttagttatttaggcgcggcaatggcagggcttccagttattatggtgaaaaacagttgggaatggtcaggagtgtatatttacgcagtcattaccattttgctgacaacattttcactggccttactggcaaaatttcatcggttataa

SEQ ID NO: 30558 - DNA, 405 bp, Escherichia coli
atgcaaaaatacaaaatcaatcgttcaagacatgctgccttccttttgcatgttcatcttgtctttgtaacaaaataccgtcgaaagatactgggagagttacactgtgcagcattccatcagtatgcagcagaagtctgccgtgattttggggcagaacttaaagaaagtaacggagatgtcgatcatgtccacatgctgatcgaatacccaccaacagtgcagctttcggtactggttaactcactgaaagcagtgacatcccgccgtctgcgaaacgaatttcttgatttgcggggggcatacggaaaagccgtgctctggtcgaggtcatactttgctggctcctgcggaggtgcgccgctggaagttgtgaagcaatatattcaacatcagcgaggctga

SEQ ID NO: 30559 - DNA, 123 bp, Escherichia coli
atgctgatcaaacgactggcatcatcgctgaaagcggtgaaacccgacagtagcgtggtgcgtgcggcgcaggactggctgtgcgacagaaaacttgtggatatcacagatattctccggtga

SEQ ID NO: 30560 - DNA, 321 bp, Escherichia coli
atgaaaatgccatcaggatgttcccgtattctcattgcggctgccattatgggctgctcaggtatggcacttgccgcgccagaaccggcaccgtctgccggacaactgccaccgccatgcccggaacgactggcaccaccaccggcacagccaccgctctatgccttatcacaacagaccaccacaccggcagaaacactgagcgcggcggtaaaaaatattcctgccctggaaaaagggaaaaagtatgaagtccgtgtggaagttcgtgagataaccccaccaccaccggcaccggatatggacgaccctcgcccttaa

SEQ ID NO: 30561 - DNA, 348 bp, Escherichia coli
atggcaggaaagaaatttttttccgatgacgatattgaagcggcacgtcttgctctctctgaactccctgacctgacagcaaaacgcaaaacactgcatgattttctgtccgcaatccgggatgacatcatcgtcctggtcaggacgaaaggttacacccttgccgacataagaagcacactgaaggaagccggttatgaggtgggcgaaaagacactgagggatatcattcgtgaaaccgaagcgaagaaaccccgacgccgttctggcaggtcttcagcaacagaaaaggcaacatctcctcatactgaatcacaggataacgtaaagatatcgtcagcacagtga

SEQ ID NO: 30562 - DNA, 2292 bp, Escherichia coli
atgagtgaacatcgcgttaaccccgagcttttacaccgtacagcctggggaaatcctgtctggaatgcactccagagtctcaatatctatggtttttgcctggtggcaagtcttgtggccagttttatctggccacttgcattaccggcatgtctgttgttcacactgataacgatgctggtatttagtctgcagcgatggcgctgccctcttcgtatgcccatgacgctggaatgtgctgacccgtcacaggacagaatgattaaaagaagtcttttcagcttctggccaaccctgttccagtatgaggccatcctggagtcaccagccagcggcatattctatgttggttaccaacgcgtcagggatattggcagggagttgtggctgagtatggacgatctgacccgtcatataatgtttttcgccaccaccggtggtggtaaaacggaaaccatctttgcctgggcgattaacccgctttgctgggcaagaggattcacccttgtcgatggcaaggcacagaatgatacggcaagaacaatctggtatctggccagacgctttggccgtgaagacgatgtggaagtcatcaacttcatgaacggaggaaaatcccgcagtgaaatcattctgagtggtgaaaaaacgcgtcctcagtcaaatacctggaatcccttctgttacagcactgaggcattcacagcggagacaatgcagtcaatgctgccccagaacgtccaggggggcgagtggcagtcccgggccatagccatgaacaaggcactggtatttggtactaaattctggtgtgtgcgcgaaggcaaaacaatgtcactgcagatgctccgagaacatatgactctcgaagggatggccagactttactgtcgtggcctcgatgatcagtggccggaagaagctatcgcaccattacgtaactaccttcaggacgttcccggtttcgacctgtcgctggtcaggacaccatcagcctggacggaagaacccagaaaacaacatgcttatctctccgggcagttttctgaaactttcagcacattcacggaagcattcggggatatttttgctgaagattccggtgatatcgatatccgtgacagcattcacagcgacaggattctgatggtaatgatccccgctctggatacatcagcgcatacaacgtctgctctgggacgaatgtttatcacccagaaaagtatgattctcgcccgtgatttgggctaccgcctcgaaggaactgattccgatgcactggaagtcaaaaaatataaggggcgtttcccttatctgtgtttccttgatgaagtgggggcatactatacggatcgtattgctgtggaagccactcaggttcgttcactggattttgctctgattttgatggcacaggaccaggaacgtatagaaggacagacgacagccacgaatactgcaacactgatgcagaacacggggacaaaatttgccggcaggattgtcagcgagggcagtacggccagaacgctgaaaagcgccgccggtgaagaagccagggcgaggatgaataacctgcagcgtcaggacggcatatttggtgaatcatggattgacagcccacaaatcagcatcctgatggaaagtaagataaatgttcaggagttgattgaacttcatcctggcgagttcttttctattttccggggagaaaccgtaccatcagcatcattcttcatccctgacaatgagaaaagctgcagcagcgatcccgttgttataaacaggtatatcagcgtggatgcaccacgcctggaccgtctccgccgtctggttccccgtacagctcaacgtcgaatcccgtcaccggaaaatgtcagtgccatcattggcgtcctgactgcaaaaccctccagaaaaagacgaaaaattcgcacagagccgcacacgatcgtgaatacattccagcaacgcattgcaggacgtcaggcggctatggcaatgctggaagagtacgacacggatatcaacgcacgtgaaagtgccttgtgggaaacagcggtgaatacacttaaaacgaccacacgggaagagcgacgaattcgctatatcacgctgaacaggccagaactacctgaaacaaaagaggaaaatcagatatcagtgagaacagaaagagcaggtataaacctgttaacgcttccacaggacaataaccacccgacagggcgtcctgtaaacgggtttcatcataaaaaaaccaaccgtccggactgggacggaatgtactga

SEQ ID NO: 30563 - DNA, 3768 bp, Escherichia coli
atgccgtctgtatcccgataccgcacctggcttgccgtgcctgcagatgaaatagaagatctcaaacaagcgcatcccccgatgaacgggcacacacccgtcctctgggataaagagcacaaactctggtttgcccgcccgggggcggacctgtccatgctggaccgctggctgccccgaccgcaggaagtctccatgaacggcagtgatccggtcaccgagtttgcccaggtactggaaaatgccggactggttctgaaagaactgccggccatggacggtaaaatccaccgggttccgaccaccggtgacaaaaacgggcaaaaaagtggcgcatatcgcggcttcctggacggcagacctgccggctggtacagggattatcgcagcgcggatgattcgccggtcaactggaccttctccggcggagagcagacagatccccgcgcaaggcttcacctgaaagcgcattcgctgcaacgcagggaggacgcagagcgggaactgaaagcacagtacaacagacaggccgcgtatgcccgccgctatgtcaacaaatggccgcaggccacagcacatgaatacctgacccggaaaggcattcaggctgcgccgggggtgcgaataaacaacaaaaatgagctcgttattcctttccgcaaccgtaacggcgcaatacgctcctaccagcgcattccggtcaccggcgggaaggatgcccgcatcctgaaagattccgagaaaaccggtaactggtttgcgctgggtacaccgcgcaacggccagccggtgctgtttgccgagggctatgccactgccgcctccctgcacgaagccaccggccttccggtgctgatgacagtggatgcgggcaacatgattgccgtggccgaagatgcccggcaaaaatggaagcaaagcccctttatcttctgtgccgacaacgatcatgcacgccaggttaacaaaggtatcgtcagtgcaacaaaagccgcagaactgacaggaggatcggtcatctttcctgcgttcaccgatgccgaaaaagcgcagggactgaccgatttcaatgacctggacgccagccggggacgggccgcttttcagcatgtcatcaacgcccagttagaacatatcggggtttccacccccaacagtaacaccccggaaatgcgggaggcactggtgatcggcaacctcgtttttacaccggtccacactgaggaaaaaaccatgactccgacagaatatcctgaaacatcacccggtacagggcacagccatgaccagggaccttctctgccgtctgccacgcagcaggaacaacctgctgcttccagcggtaacattgctgatgaaacaccgccatttaccagtcacgccactgaaaataacggcaaagatgagcagcacgctgataacgttcaggcgcaaacggaaagctctgtagttcaggacgcccctgcagaatcaccggcatccccggaaagtacaacggcgtctgcccctgatgagcccgctcatccggcggaacctccggaaaaagttgtctctgtggccacagataaagactggcgtgaatttgaagccgaactgtcacaaccggaaaaaaacgagttacaacaggaatccggcacttcacctgaaataccggcccctgctgccgcccccgccgcccctgaagacagcccctcatctgaaaccatgaatgaatcagccgagccatcactttcccctgatgcagtcaaagaggaaatgaccgtgatgacggagcctgatgacaaacaaagcaccggaatatccccggatactccccgggaagaggcggtcagccatgtaactgaagacattccccttcagccagagccgttccttcctgagtcagatggccccgaagaatacgaagactacagcgcatatcaggagctgatgaacaatgaaaatcctgagcatctgcaggaaaacagtgatatgccgtcgcagccggacacaggccacgttcaggcagatgagtcagaacttcaggccacaacagccactatagaaccggctgtccgggatgaacccactccgcagcaacctgttcagagcacatcaccttctgataatacttcatcgtttctcgacaaagcgcgtggcctttttacgcgtaaaaaaacggattcacaggcgcatgagaacagtgatcccacgccctcagcggaaaccacgacgaccacaccggcacctgacagtattgtctacgccccggaacgccctgatgcaccgatatcgctcaatctggacgaaatcattaaatcgctggaaggtgaagaacgagcagacagaaccgtcctgtacaaactggatggcaaacctgccttcattgaccgggtaaaccggctggaaatggtcaacggtgccagcaataacgatcgcagtgttctagccgcacttgctgtggccactgatttctatggtggtgtcattgagctgacgggcagtgatgcctttaagcaaaaagcgatgcagttgatcatcgagcacaacatcaaagtgcgcatgaaattcccggatcagcgagcggcgctcgaaaaattacgcaaggaaatggctgtcggtaaggatactgttgtcacccataagccaacaccggaacttaaccggaatacccctgaacaaccagcagtcccagaccctgttcaggaaaaagaagccacacaatccccggcgtccccagtagcccctgaagcatcaaccgtcagcaccgtccctgcatcatcaccgactgaacctggcaaaacggcagatgcggcacaaggtgaagaaccaccaggaaaacttcgcccgggagagagcgtgactgccgtactgcacaattttggtcgtgctgaatatgcacccggcaaaggagagagtttctttgttgagcttaaaaaccgcagtggcagcaaactctactggggggaacaactggaaagtctggtcaaaaaccatcagaaaggtgacgtggtgacactgacacttcagaaccgcgaacaattcatcctcccgggagagcaaaaagcacgtttccggaataagtggtccatggagtcagttaccaacgggatctcggtatcacatgataatccggataaaggtcagcgtattcaggcgattccggtcgaaacctttatgaaagtggctgcgcaaatcagccaggggtggcccgaagagatgaaagcgttacgtatgccagaaaacgtcggctcacatctgtttatcggtgaagaccgacatccggtctccgcgccacagaacgcaaatcaggtaacagaaataaccagcgcagcccctgacaagctgacacctgttctgggatcagtggataaggatacgcgtgaactcaacctgctacttgtccagagtgccgatgaacatctgcagggtgtggtccggctgaacggcacattgtatccggcactggccaccccatcggccgacaacagtcagctggttatcaatgcgctgaccgacaaaggtttacgctttgcaggttatggtgaagcggtaaaccacgatgctgacagcacgaatcgccccgcaccggagcttatgcagtttcatctgaaaacccgggaagaaccgctttttgctgctgtctacacgccggaaaaacaacctgatgcgttgtaccggaacctgggcttcgagcagtcatggcagcagtggtccaacagccaaaagccggaggacaggcaggaaaaaactctgcatcaggatctctcccacagccccggccgatga

SEQ ID NO: 30564 - DNA, 336 bp, Escherichia coli
atggaatttcgtaacctgacgccgttttcagcgatagaatatgcgatggatgataaacatagcgaacgtcaccgcgttatcgccatgaaaacgggcttccggctgcaacgggacgaaaatggtcagtggcaaacccaacttatcgaaaccccgccgctaccgctgtgtgtggaagatgagtatgccggggagatgaacacatctccggtactgcgcgaaagcgacctcgcccccctgaaacccgcctgtgacatcatcattaacgggacagcttatacaccggggggcgttgccgtaccagaaatgacggcaggtgtacttatgctctcattgtag

SEQ ID NO: 30565 - DNA, 462 bp, Escherichia coli
atggttatcatcctttcccctgactgcgacttactttccatccccttcagtgccaccacggatttcaccgatctggccgactactgcgatcgcttcgctgaaaccctgatcgaatgccacgatccggcgctgaaaatggcgctttatggcaggatcaacgccagccttgcgctgctgcgtccctcgttgggcgagccgatcccgctgcacctgatcgaccgtttcattgtggacacgcttcccgacgtttcaccgcgctttgaacccggcgcagggctgctctgtgactactgtctggcgctgacgcaggtattaagcgggcggtcgctgctgccggaaaccgaaaccacactgaccgggttgctgtgcgaactggtctggtattttgccgccgaccttaaagcgccgcagtggctgcgcaccgctgatggcttacaggttattgacggggggacggtatga

SEQ ID NO: 30566 - DNA, 252 bp, Escherichia coli
atgcaaccggactggcatcccgccgatatcatggcagcactgcgaaaacgtggtacgtcgctggcagcggtttcccgcaaagcgggactggcgtccgccacactggcaaacgcgctgagccgctcctggccgcgtggcgaaaaactcattgcggatgcgctggaaacatcaccggaaattatctggccgtccagatatttcgatgatcagggcaaccgtattgtaaggctcatgcgaaagcagtgctcctga

SEQ ID NO: 30567 - DNA, 273 bp, Escherichia coli
atgcacatgtttaatccaccccatccgggtgacgtccttcgcgattatctggacggcgtgagcatcacgcaggccgcttcccggcttcaggtatcgcgctcgcggttatcccgtatcctcaatggacatgcaccagtgacggctgatatggcgctacgtctggcggcgctgctgaatacccgcgctgaactgtggacggggatgcagtctgagtatggcctctggcaggcgtcacaaaaaccacgacccgttatccggtcattgcggggttaa

SEQ ID NO: 30568 - DNA, 885 bp, Escherichia coli
atgagcaaattaagcagtgaaatgaaggcgctggcgaaaaaagcaggcggtagtttcagaacggtggactaccgtatccatgccacgaagcggttcagtcagcatttacgcgaactgaatattcagatccagcgggtggagcagatcaaagttcgccatatcgaatgctatattcaggagcggctggagcaggatattggcctgcgcacgctgcaaaacgaaatggcggcgctgcgggccgtgctgaggctggcgggacgccggcaggtggtggagcatccgcgcctgaccaataaggcgctggggctgtcaggtgcttcgcgcaacggcacgcgtcgcgccatcacgccggaacattatgaaaaagtgatggagaacgcccgcgcacaggatgcggggctggcggcagcggtggagatcgcgcgactgatgggattacgctcgcaggaggcggtacagagttcacagtcgctgaaaacgtggctgaaagccatttcccgcggcgaaacccggctgaaagtggtgtttggcaccaaaggcgggcgtccgcgttacacgacgctcctggacgctggcgcagtcaggaaggcggtggaaaacgcattaccgatcgccagacagcgcaatggcaggctgatcgacaagccagaccttaaaacggcgctggagagctggcacaaacaggccattaaggcggggctgaaaggggaattttccccgcactcgctgcgttatgcgtgggcgcaggacgcgatccgccattatctggcgcagggattcagcgaaaaggaatcgctggcgctgacggcgacggatctgggtcatggcgacggtcgcggccgctgggtgaaacaggtgtacggctaccgctggaaggaggaataa

SEQ ID NO: 30569 - DNA, 1263 bp, Escherichia coli
atgtctttaaacgattctaaaatccgcaagttaaagtcttcttcccgtccggtaaaactctccgactctcagggtctgtatctgctcgtcaatccgggtggttcacgcatctggtatctcaaatatcgtttcaacggaaaagaatccagagtcagtcttggcgcatatccgcttgtctcactggcagaagccaggcaacagcgcgacggtatccgcaagctactggcgcagaatatcaacccggcgcaacagcgtatggcagagaaatccgcctgctcccctgaaaagtgctttaaggcggtggcgctggcctggcacaaaaccaacaaaaaatggtcggctgattatgccgcccgtattctcgccagtatggaaaaccatatcttcccggcgattggtcatctgcccgttgctgcgcttaaaacgcaggatttcacggctttgctgcgggttattgaggataagggctttctggaagtcgcgtcccgaacccggcagcaactcagcaacatcatgcgctatgccgttcagcagggactgaccgaaagcaacccggcgcagcatctggatggtgtagtcgcctctcccgtcaagaatcactatcccgctttaccgctggagcggttgcctgaattgctcgatcgtattggcgattaccggcagggccgggagttaacccggctggcggtggtgctgacactgcacctgttcatccgttccagcgaactgcgtttcgcccgctggagcgagattgatttcaggcacaaaatctggaccatccccgccacccgcgaggccatcgacaaagtacggttttcggggcgtggcgcaaaaatgcgtagtccgcatatcgtgccactctcccgccaggcgattgccattctgaaacagatacaggagctttccggccatctggatctggtattccccggcgaccataacccgtacaagccaatgagcgaaaacacaaccaaccgggcgctgcgcctgatggggtatgatacgaaaaccgatgtgtgcggacatggacttcgcgcaatggcctgtagcgccctggtagagtcggatctctggtcacgcgatacggtggaacggcaaatgagccaccaggagcgtaacagcgtgcgggcggcctatgtgcataaagcggagcatctggaggccagaaaggccatgatgcagtggtggtcggattatctggatgtgtgccgcgaggggtatgtcgcgccgtatatttatgcgcggcagcataaggcagcctga

SEQ ID NO: 30570 - DNA, 1455 bp, Escherichia coli
ttgaatatctcctctgctttacgccaggttgttcacggcactcgctggcacgctaaacgcaagagctacaaagtgttgttctggcgcgagataaccccgcttgctgttcctatcttcatggagaatgcctgtgtcctgttgatgggggtcctgagcacttttctggtcagctggctgggaaaagatgcgatggccggcgtgggattggcggacagcttcaatatggtcattatggctttttttgctgctatcgatcttggtactactgtcgttgtggcattttgtctcggtaagcgggatcgacgacgagcgagggtggcgacgcggcagtcattggtgatcatgacgttgtttgccgtactgttggcaacgcttattcatcattttggcgaacaaattattgatttcgtcgcgggtgatgccacgacagaagttaaagcactggcgttgacttatctggagctgacggtactcagttatccagcagctgccatcactttgattggtagcggggcacttcgtggtgcagggaatacgaaaataccgctactgattaacggtagcctgaatattcttaatattattattagcggcatattgatttacggccttttctcctggccgggactgggatttgtcggggctgggttgggtttaaccatttctcgttatattggcgcagttgcaattttgtgggtgctggcgattggttttaatcctgcgctaagaatttcgttaaagagctattttaacccgctgaattttagcattatctgggaagtcatggggattggtattccagcgagtgtcgaatcagtgttatttaccagtggtcggttattaacccaaatgttcgttgccgggatggggaccagtgttattgccggaaattttatcgcgttttcaattgcggctcttatcaacttacccggaagtgcgctcggctctgcttctacgatcattacaggccgaaggttgggggtagggcagatagcgcaagcagagattcagttgcggcatgtgttctggctgtccactcttggattaacggccatcgcctggctaacggctccctttgccggggttatggcatcgttttacacccaggatccacaggttaaacatgtcgttgtgattctgatttggctaaatgctttatttatgcctatttggtctgcctcatgggtgctacccgctggatttaagggtgctcgcgatgcacgttacgccatgtgggtttctatgttgagcatgtggggttgccgggttgtagtcggttatgtgctgggaatcatgcttggctggggtgtagttggtgtctggatgggaatgtttgccgactgggctgtgcgggccgtgctgttttactggcgaatggttactggacgttggctgtggaaatatcctcgacctgagccgcaaaagtgtgaaaaaaagccagttgtgtcggaataa

SEQ ID NO: 30571 - DNA, 243 bp, Escherichia coli
atgagcgctatggcaggtatggatatgggcagaattttactcgatttatccgatgaggtgattaagcgacttgatgatctcaaagtgcagcgcaatcttcctcgcgcagagctattacgagaagctgtagatcaatatctggaaaatcaatcgaaaacgacaatatccagtgcttttggtatctggcaagggtgtgaggaagatggtgtcgaatatcagcgtaagctgcgtgaggaatggtaa

SEQ ID NO: 30572 - DNA, 375 bp, Escherichia coli
atggcaaaaagaactgcgctttttgataccaatatccttatcgatttgttcagcggacgaattgaggcaaaacaggctctggaggcatggcccctacagaatgcgattagtctggtcacatggatggaggtgctggttggcgcaaaaaaatatgatcaagaacatcgcacacggattgcaatgagtgcgtttaacgttattgggatttcgcaggatatcgcggaacgaagcgttgctttaaggcaggagtatagaatgaaacttccagatgccattattctggcaacagcacagatttatggctttgaactggtaacgcgaaatacgagagattttgcgggaatagcaggtgtcgtcacaccctatgagctgtaa

SEQ ID NO: 30573 - DNA, 387 bp, Escherichia coli
gtgcgccattctcaacatcctttagatgaaaaacaattagcagcactgaatacagaaatagataacattgttacactgccggaattgaataacctgtccattatatatcaaataaaagcggtcagtgctctggtaaaaggtaaaacagatgagtcttaccaggcgataaatactggcattgatcttgaaatgtcctggctaaattatgtgttgcttggcaaggtttatgaaatgaaggggatgaaccgggaagcagctgatgcatatctcaccgcctttaatttacgcccaggggcaaacaccctttactggattgaaaatggtatattccagacttctgttccttatgttgtaccttatctcgacaaatttctcgcttcagaataa

SEQ ID NO: 30574 - DNA, 918 bp, Escherichia coli
atgaagtccagatttggaccaaatggggtgcatttattcgaccgaaatacaggtctgaacgtcctcctggaggagttacgcccaaaggaatctgtttggtccatttctccacgccaggtctcgattgcacttaccaatctttgtgaccttcgctgcgcacattgttttgcgcccaagcataaggcattgctacatactgaccaagtgcttacttggttaaaagaactggatactgaaggatgcctcggtatcggatttggtggtggagaaccaacactgcatcctgatttcgtcgaaatatgtaaacgggctgctggggaaactcatcttgcagtcacatttacgactcatggtcaccgtctgacccagccattggttaaaaaactcaaaggctcgatccactttgcgcgcattagcgttgacgggataggtcatacctacgaagaacaacgtggaaggcagttttcaagtttactcagaggcattgagtcgatcgcgaaattgtcgtcttttgggatcaatgtcgtgataaacgagcgtacgatttttgagcttgacgcagtggctgagctggcgcaacagtttggtgctagtgaattgctgttgttgcctcagcaagcaactaatgcagtcgcaagtatggacgaattggtcggccgagagcttcaaaactgggtctctagctatagaggaaaggttcgacttgcagtaagtgaggtgggagcgtcagggctccccatatgtgaccctcttcctaatgaaacaggccttcaagcctacgcgcatatagacgcttccgggatattgcgcacgagttcttattcaaccacaggtatggatattgaagaaactggtgttatgtccgcgcttaaacggcttagaaataccttagagattaaacaagggacacaatcatga

SEQ ID NO: 30575 - DNA, 408 bp, Escherichia coli
atgaaaatttggaacggatacggatctgagcattcgatgaacttagttctcatcggaaaattcaagcaagagcaagatgcagtgaaggtcgagaaggatattaaaacgctcagtactcaggctgagaaagatgaatgttactcgatcccttttgatgagccagagaatcaacggttttcatatgaaatgctctcattactatgcagcctaaaactccacactttaggaccaaccgatcttggtcaattggtgtcagatcatcatctagatcgcgaaggcgatagaataacaataactactgatgaggcagaggtatccgcgttcgtgaagctgtttgtcgaggctggagcaaaggtcgagattttctcagcgcatgactatccgtccgattccagcgatgccagttga

SEQ ID NO: 30576 - DNA, 4059 bp, Escherichia coli
atgcctgaagtaaattggaaagtattcaacgaactgcccggtgcagcagatgtgaacttcgaaaacctttgccgcgctctggtacgccgacactatggtcgtttcggtcgctttaagcaactcgcaaatcagcctggggtggagtttcacctcgagctgacggagccttgtgatctcggtgcgccaccaggttggattggttggcaatgcaagtggtatgaactggtgaatggacaagatttgggagcctcccgccgcaacaagatcatcgaaggtatcgaaaagacgcgtaagcatgtccctggagtgaccaattggaagctttggactcatcacacgttaacaaaaggtgatcaagagtggtttttcgcgctagagcaagaccgcttcccagaattgaagttagaactgctcacagctacggatatcgaagatcttttggtcggaccgggagcgcttttacgagaaacctactttggtgaactggttctaactccagagctaattgctgagcagtataagcttgcagtggccccatttaagaaccgctaccagccagatgttcatgtagcggtgggggctgaggagaatatattcaggcatctgtgcagccaaaacgcatgggaatctctggaagaactctcaaacgctttaaaaaagaatcatacgagcattgcttcggttactgagcaactcaaaactgagctcagggctgaagttgaattactcctggcccgggttattgggttgactgagtttattgatggcttacacgcggcgctcggcaaaggtgactttaactctgtatatcaagcgttggtttcaaatccgcgtcagccggtacgttatgacaggctactttcgaaattgcgtggagcgcgctttgacggggctccgttaaccgctaatttggttgcagatatccacgcggtttcgtcagttctccgcagtctggagcaatcgattagtgctcgggcggttgctgttcttgcggcggcgggggaaggtaagtctgaacttgcagtcaaggtaacacagccagaaggggcgttcctagggggaatcctcctattaggcaagaatcttcattcaggccaggggcttgatgatctcgtatctgccttcaagatttctgggagaccagcagaaagttttgaccgcctgattgaggccgtagatgcggcaggccagcgtgcaggtaaacgcatacctattgttattgacggtctgaatgaggcggaagatccgagaaattggaaggatgaattatcccgagtggatgagcttctaaagaattttccttatgtcttgttagttgtcactcttcgcaatgaattcgcccagatgtgtctgcctgaggggtttccccaagttgaacataatgggtttcaggaagatccgaagacagcatttgacaagtattttgagtactacaagatcgatgctactgatgcggatctaccagtcgaactcttgcagcaccccttaacactgagaattttttgcgaagtagcaaattctcctcgtcagcatattgtcggagtggaagcattgccccgttcgcttgcaagcctgttcgaagctcactttaacaaggttgcagcacgagtcgctgagctttcaccgacgatgcatcgcatttatcaagatgacgttcaggatgcactactaacgatcgcgggtcttctttgggataacaatgcgagaagtgtggattttcaggctacacggatggcagttcgggatatggggtgggacgacagtattattcgtgcactggagtctgaaggcattctcgttcggactatttctccagaaggtaggcaaggagttgcgtttgcatacgacctaatggccggacatatgatggcgcgcaacctgcttatgaagcctgaactggtgcaatggctacaaagcgatgaagggaacgcaaaatttaaatctcatggacctgattcgcataccttcgcttatgacgtattacgggctctggttgatctgtatccgcaacactctggtaggcggcagctttggcaagacttgtcggatgatatactcgttatgaacgctctgctattgacgacgcaatcggatccaagatatatcgggcgggctactgttgaacgatttgctcaagctatgcaggagtcgaagcggtttgcacaacttgccttcgagagactacggagcactagggctgcgctggcacatccgtttgatatgagctttttgcatgatgtgctaatggctatgtccaacactcagcgcgatcttttttggtcagagtggattcgtcagaaatctgaacaagttaaagacgacttaaaattcttgtcgacgagatggaaatcgggtcatctggatgagcgtgaacttcgaagagttcgctgggtaatgtggacactgacgacgacatccagagctttgcgggatatggctaccaaagccctgtatgaatttgccatcaggcggccagaagagtttttccggttagcgacggagacaattgtagtttcagacccatatgtccccgagcgagtgttcgccgcagcctacggtgcagtcctgaccacttggtcggatatcgatgcggtagagttacatgatgcgttgccacggttcgctcgtgagatttaccaaaccatgtttgcacctggcgctacagcccctacctggcatgcattacatcagcagtactgtttgggaatcattgccattgcgaggatggtcgatccaaattgtttttcagaggacgaagctgtttatcttcttccgccatttagccatctgcctaacgtatttgaaagcattcaaccgtacgatccagagatgattgggcgagcggagagcgcagcgattcaaatggactttggtaactatacgattggtggacttattccagacagagcgaactacgatgacagtaatccggagtaccaacaggtgttgcaggccattgtttctcgaatgctgatgcttggttatgaccctgagcagtttgaagctgttgatcggcaaatgtactccggttctcgtatgggagatgacaagcacaaaatcgatcgatatggcaaaaagtacggctggatagcttacttcgagatgtgggggatacgatacgcgcagggcctcctttccgaagaacgcagtgctcgcccatcagatgctgatatcgatccaacgtttccgcaaaaagtagagagtattagtttgtcactcccagtcttatttaacgatccgtctgtggatgatggtgactggatcgtgggaggcccgctacctgactaccgtagcatccttgagattacggaggttgatggtctgacggggccatggatcctacttgacggttttgttgagcaaaatgctacctcggatgaccgacagattttcactttcctgcgaggagtattcgtagatagccaagaagttgacaatctatgtaggttgttcattgatcttgaatatcctggcaatagcgccatccctgatgctcctggctactattacacctatgcgggtgagatgcctttcccgactattccggggctgctagtcgctaatgaacaagaggatgatagcgatgaaaatttggtgttcgcagaaagatggtcaggcaatggcgttgcggtagatatcacagtgcaggactacaactgggagagctaccatagcgtggagaaccaaagcagcggtgcgagcctgccctcaaagcaactttgtgaggctttgaatctcagatactgtgcaaacaaatgggatttgcatgatgctgcaggtgtagcgtcactttaccgcaaaattgacgaaaatggttcggacgtcagtggctctgtcagctatctacgtcgtgatctacttgaccgctatttgatgcaatccggtaaggtattggtatggcttatgtggggagagcgtggttttcattaccggtccaacaagacacgcaatttgcacaggtattacgtgaatcaccaacatattcacaagcgtattcatatccatcagatagcttcgagtactagtaacccaaatattgcggatggagtcgctatatga

SEQ ID NO: 30577 - DNA, 165 bp, Escherichia coli
atgagttacgacttcagaaatctttcatccgcaaactttgaggatcttgtgcgggatcttatcgaaaaagaagaagggttcgcttcgaagcattctctgtgggggctgataatgatattgatggccgacacgcacatgctggagggaatgtcagtttataggtaa

SEQ ID NO: 30578 - DNA, 423 bp, Escherichia coli
atggatattgaaaaactaaatgattacatgacaaaatatccttttgattcctttgagtcaatacctaaagatgattcaggtcttactttccctgtttttgaaaatattatctttacccttcctgtacgctatcggcattgtcctaccaggattgtatatgtcgatgggctagcctttcttaaaaaattaggagatggagcattctgcattgatccgcgtagatggcataaaatcaaaaaatatatatcaaaagggtatgttgaatatccagaggcatctaacagtgaatttggtgtttctgatggaaggcatcgtacattgttattaatgcaattatataatcgcaaaacagtccctgttgttgttgcagaacgcgagtatgaaaaattcattcttgatgctaaggcaaatggagcaatttaa

SEQ ID NO: 30579 - DNA, 1344 bp, Escherichia coli
atggcgaccatgaaaaacagggtgatctggcaggaagggttgtttgccctgccgcagcattttcagcaacagcagcggaaccaggagtatttgctgaaccagcgtatcagcgcacaggatgattttgcctggggcttcacgtcattgtcgattaacaccgagctgctggcccagggaaaactcatgctcgacaacgcagcaggctgtatgccggatggtacggtgttcagcattccggagcaggatcagcttcctgtcccgtatcagccgcttgatctctcaaaacccggaagccatgacatttatctggcgctgcctgtcatcagcgatattacctgtgaaattgagggacgtcagagcgcagggcaggggacggagcgttaccgcctggcccgtgctgatgtccgtgatttgcactctgatgatggcgatgttcagcaaattgtcctcgggcaacttgcacccaaaattgtcagcggtgcggatgatctcagcgcaatggtgacgctgccgctgtgccgtatccgtgacaagctggctaatggcgcgctggtgctggacgacagttttattcccacctgtcaggccatccgggtcagtccggtactcagcgggtttgccggtgatgtgcaggggcttatcagcaaccgcgccagcgaactggcaaagcgtattggctcgccagagcaaagtggcattgccgatgtggccgagtttatgatgttgcagatgcttaaccgcagccagatgcacttcactcaccgcacgcacctgcataccctgcatccggaaaccttttatctggatcttgttcgcctgctgggtgaactgatgaccttcacggaggacagccgtcttccctgtccggtggaggtgtacagtcaccgcgatctgacccactcattcagtaccgtgatcccggaactgcgccgggcgctcaatactgtactgatgccgcgtgcgcagaacctgccgctggtcttctcggatgggttttatgtcgccaccgttaacgatcctacactgttgcagtccggcacctttattctggcggtgcgtgcgcgaatgcctcacagccagcttatccaccagtttacccagcagtcaaaaattgccgccaccaacaaaatccgcgatatggtcagcgtccaggtgccgggcgtgccgctgacgccacggaccgccgcgccgcgccagttaccctatcacgacggttatgtttacttcgaactcgacaagggcgtagctgcctggcaggacgtgatgaaagccggggcactggcgctgcatatttccggcactttcccggatctgggggtacaactgtgggcaataagaggttaa

SEQ ID NO: 30580 - DNA, 1299 bp, Escherichia coli
atggaatcgcatatggctgaagaaaaaacgcagtcctcccggctctcaatgacattacaggtgatgaacggtaatgaactggagagcggacgtgccgcaaaatgcctctttactgctgatggcggggatatcggtaacctgcctgagtgccactggccggtacaggacagggccggttccgttgccggtcgtgcctgccaggtggtggtgcatgacggcgcattttgtctgaagagtctgggtacaggactgatgattaacctggctccggttgccctggatgccgggctggtacgtctgcgacagggggacgagatcgtgctgggggcactggcgctgaaggtgtttatccacacaggaaaactgatcacttacagcgaacagatggcagcacctgaaactatcgtcactaaccgtgatcgtctggcggactcattgctgacaacggacggccagcctgcatatccaggtatgccccagcgacaccagcttgcagataccgtggccaacagtttttcagccgatccgttgcaggcgcttcaggcagaaagtttgacggtggcgggtgatcctctctccgggatcgtcccaacccgctcttcggctcccgtcagggatggtgtgatcgacaaaccgtttatggatctgcctccggtgtatcccgatccgcaggagaagcatgatgattccgttaatccgactgacatcgcccaactccatcttgctgttaccccgctactgcgtgggctgggtagtaccctggctgtacgcaactcgcaggatgcggatggttttctcgaagaggccggacgaaccctacaggcggcaataaaagggttactcgatctacaacagcaccgtaacagcctgtcggataaacatttgcgcccgctggaagataacccgctgcggctgaacatggattacgccaccgcgcttgatgtgatgtttgcagagggcaaaagcccggtacatctggcggcccctgccgccgtcagcgaaagcctgcgcaatatccgccatcacgaagaggccaaccgggcggcgattgtggagtcgctccgcgtgctgctggatgcgttttcaccacagagcctgatgcgccgttttgtgcagtaccgccgcagccatgaacttcgccagccgctggacgccgccggagcctggcagatgtacagccattattacgaagaactggcgtccgatcgccagcagggatttgaaatgctgtttaacgaagtctatgcccaggtctatgaccgggtactgcgtgagaaacagcgggagccggaagcatga

SEQ ID NO: 30581 - DNA, 1044 bp, Escherichia coli
atggcaacatacgggccagcacgccctgatatagagggaacgggaatactcccggatgtgcgcgggataaatttttatgtgctgatggaatcactgtaccgccgatatggtgcaccgaatcaggatccgtccctgcgcaccgagccagaaaaggaagtggcgctgtttaaatctgacgccagtattgcctttccctgtagcgacctgagcacgcttgagcgcagggattccgggcagtttaccctgaccacaaaatttctcggtttctccggcggccagtctccgctacccggttattacctggatcggatggcgcgggaatccgcacagaatgaagaagggctgaaagcatttcttgatctgttcagccaccgctggacgcaatttgcctaccatgcctggcgtaagtaccgctattacatctgttttcgcaacggtgggacggatgtcttttcacagcgaatgtatgcgctggttgggctgggcaaccagagtgtgcgtgacaggcttgccatcaaccacagcaaaatgctcgcgtatgccggaattctggcaacgccggggcgctcgccggatgtggtgtgcaacctggtcagccactgctttgatctgccggatgtcagtattgaaagctggcagttacgaaaggtggtcattgcgcctgaccagcagaaccggctgggcgtgcgtaatgctaaaaagaaaaccgccggatacgtaccagggcgctccgtcattggcgttaattttacgctgggtgccagagtacctgatcgcagcggaaaatttctgctgcggttaagtaatctttccatggcgtgctatctctcgtttttaccggaaggcgaaaaccaccaggcgctgaccatgtttattgcctttctgttgcgcgatcagtttgcctgggatctccggctggatctggctccggaacaggcaaaaggaatgctgctgggtgatcgttcccgctcctgcatcggacgcacggcgtttattggtcagcccaaaacgccgccctccgtcacccttcacatcagggattaa

SEQ ID NO: 30582 - DNA, 1824 bp, Escherichia coli
atggccttcgaagaacgttactatcgagaagagcttgattatctacgtcagcttggcaagctgctgtcacaggagaaaccttatctggcccgctttctggctgaaaaggaaggtgatcctgatgtggaacgcctgatggaggcgtttgcgtttctctcgggcggtttgcgacaaaagctggaggatgaattcccggaatttacgcatagcctgattaatatgttgtggcctaactatttacgcccggttccggcaatggcagtgattgaataccaaccccgtaaggaactgaaatcatccgtccaggtacaccgcgacgagctgataaaaacgcagacaggcagcagtatgcgaacttatgctcggggggcgttaaccgatgatgataacaaagccgcactgccgaactgctatttcacactggcgcgtgatatctggctacaacccctgatggtaagggatgtacggaataccagtaccctcaaagaaggtgtcattgagatagattttttcactgagggaaacgtttctcccggtgaactggatctgaataagctctccttctggctgggaaatgaggatgattatacccgccatcaactctatctgtggtttagtgagcgtctgatggatgcggaactggtagccggagatcaccgtgtggcgctgccggatctgtggcttgaggctgcgggatttgagcgggaggatgcgctgctgccgtggccgaaaaacgtacataatggctaccgtgtacttcaggagtatttctgttatccggagagctttttcttctttcatctgcgggaggctgcaccgttgccgaaaggcttcccgctccatgcttttacactacgactgcactttaatctgcctcttccggtggatgttaagctgcgtaaggcttcacttcgtccatattgcacaccagcagtgaacctgtttgtccatcattctgaacccgtgaggcccgatgacagtgcgccacagtacccattaacggccagccaacagtatccagagttctatgatatttttcagataaaatctgtttccagcaaacttccaacggtcagcaaaggggaaaagtatcgcctttggcctgaatttgagggttttcagcaccagatcgagtacagccgtcagcgtgaagtcgtttactggcatcaccgcacaaaaacgtcactgtttcaccggggactggatcattccattgcctttgtccatgctgatggcagcctgccggagcaggccctactggacggagaagtgttcacggcctcgctggtatgcaccaaccggatgttgcccgcgtcactgcatgtgggtgatatctgtgaagccgtgaataaaaacccggcagtggcttccttcagcaatgtcacccggccaacccgcccgttatacccggtgacggatggtgatatgcactggtcgctgatttcaagcatgaacctgaactacctctcgctgctggacagggaagcactggttcaggtactgcgtacttttgatttaccaggcattcatcacccgcagcaggcccggctttcctcccagaagctggatgccatcgaaaaaatggaatcccgtcccgtcgatcgcctgtttaaaggcataccggtccgcggtctctccaccacgctgtggattaaccccgcaccctttgtctgtgagggggagatctatttcctggggacggtgctctcatacttctttgccctttatgccagcatcaactcatttcactgcctcaaaattattaacacggaaagtcaggagtcctgggaatggcaacatacgggccagcacgccctgatatag

SEQ ID NO: 30583 - DNA, 423 bp, Escherichia coli
atggtaacggaacgggagtcgggaggaagtttgtttgagcgtattggtgaggcggtaaatccctcttcgcgtcaacgtccaaaggtggcgttgttgcgttctgttcgcaataacctgcgcaatatactcaacacccgttctggtagttgccacggttctccggagcttgggattgtagattttaatgatggctcccctgactccatgaacatccgggactggatgattctggctattaaaaatagcattctgcgttacgaaccccgcatttctgatgtggtggttagtgctgccgaagaggaaatgcacgcgccactggagctaggttttcatattgtagcgtacatagatttcagtgaccgacaggatgttctggaatttgatattttgctggataaccaccagcattggtgtgtggagtaa

SEQ ID NO: 30584 - DNA, 1485 bp, Escherichia coli
atgtcagaaactaccttaccggaagtatctgcttccgctgcaccggtctccgcgcccaccctgctggatgaaatcatggcgcagactcgttttaaaccggaatcagaaagctacgatattgcccgtcagggcgtgactgcttttatcactgcgctgttacaaagtgatgaagaggcggagtccgtcgatattcttgccgtcaatggcatgattgctgacatcgatgagcgcatggggcgtcaaatggatttgattctccatgccccggagtttcaggagctggaatcgttcctgcgttcactgaaactgctggttgaccatgccgatccgcgcgaaaacatcaaaattcatctgatgcatgctaccaaagaagaactgctggatgattttgaatttgctccggaaattacccagtcaggatactaccggcatgtttattccagtggtttcggccagtttggtggggagccagttgccgctgttattggtaattacgctttcgataataccgccgccgatatgaagctgctgaaatatatcagcgcagtcagcgcgatggctcactgcccgttcctgtcttccgtttcccctgatttctttggcctggattcgtttaccgaacttcctggtatcaaggatgttgccgccattttcgaaggcccggcttacaccaaatggcgttcactgcgtgagtcagaagactcccgaaatctcggtctgacagcaccgcgtttcctgttgcgtcacccttatgcgcctgatgagaatccggtgaaaagctttaattatcatgaaaatgtcagcaaaaaccacgaacactatttgtggggtaacaccgcgtttctgctggcagcaaacatggctgagagtttcatgtcaacgcgctggtgcccgaatattgtcggtccacaaagtggtggtgctgtaaaagatttgcccgtgcatttatatgaggctatgggccagcttcaggctaaagtcccgacggaaattctcattaccgacagacgggagtatgagctggcagagcagggtttcatcactctgactatgcgtaaaggctctgacaatgcagcatttttctccgccaattcagtacagaagccgaaagtattccccaatacgccggaaggaaaagaagccgagactaactacaaactgggcactcagcttccttatctgttcattatcaacaggctggcgcattacattaaagtgcttcagcgtgaacagttgggttcatggaaagagcgtggagatcttgaacgcgagttaaacacctggattcgtcagtatgtggctgaccaggaaaacccgccttcagaagttcgcagccgcaagccattacgccaggcaaaaattgaagttgctgatgttgaaggtgaaccgggctggtatcaggtcaatatcgcagtacgtccgcacttcaaatacatgggggcttcatttgaattatccctggtcggacgtctggacaaggagtga

SEQ ID NO: 30585 - DNA, 507 bp, Escherichia coli
atgagcagcagaagaaatgacggtggtggcagtattgccccaaaagaaagagtaaatattaaatttaagccaaaaacggggaatcagacagcagaagtggaattaccgctaaatctgttggttactggcaatttgacaggtgatgcagataacacgccactggatgagcgccagcccgttgccatcaaccgcaacaactttaacgcagtgctggatcaggcagggattggtcgtgatttcaccgttccgtctgctctcagcgaaacgcctgatacgcgcatgagcgtaaatctgaaaatcagctcgctggccgatctttctccggacaacattgcctcccaggtgccggagatgcgcaaaatgctggaactacgcgaagcattggtggcgcttcgggggccaatgggcaatatccctgcgttccgtgcacaacttcaggcattgcttgatgacgaaaagagccgtgagcaactgattgcagagctgggcctcgcaggccggaaataa

SEQ ID NO: 30586 - DNA, 501 bp, Escherichia coli
atgcagttcctgatcatcacacaccatatttacacaggcttaccatttttatccagtgaatttggattggtttcaaaagatttgcagttgtttttacttttaaatgaatcaaggtacagggtgttaatgtcagattcatcatctgttgtttctcttgaaatcatactgttttctatcaccacattttcatgtatctcatttggcattttgtactgttgcaaatattgttggcggcggatgcgtgcctgttcactgctttctatgaacaccaccgtgacgattgctcagtacatgaaaatcaggaaaagcaagaactctcttggtatcttccaaaaaagtgcggacagtttgttatctgatgaaattaaaatcggaaaaaggattgcaaagataatcaaagtcgcgatggttaatttaactaaaaacaatatggtcccctcctgttttgacgaggtcttttgtttttgttgtgtttacgacagccagtcctgcaggtgctga

SEQ ID NO: 30587 - DNA, 510 bp, Escherichia coli
ttgaaaatacgtattgaaaaagccagtaaagaagattttccatccattcaggctgttgagcttgcctcatttctgacgttgcaaaattccgggggagtaactggtgaagcaaccgccagcagtacggaagaactggaagactatctgaaagatgaactactgtttgttgcctttgatgcgaagaatcaggtcgtcggtttcgctggagctactgttattgatgatacgcttcatcttggcgaaattgatgtacatccagcatggcaaaaaagagggattggacgctcactgcttacgactgtcctctgtgaggggaaaaaaaagaatctatattgtgtgaccctgacaaccgacaaatttgttccgtttaatgcgccattttatgagtcctgcggattttcgatccttgaagcagatgaatgctcaccgtttttgaaagatatccttgagtcagaaaaagaatccggttttgacccgcgccgacgcgttgcaatgcaatttgtgtattaa

SEQ ID NO: 30588 - DNA, 165 bp, Escherichia coli
atgtctgacattgtcagggacctctcgcgtctggactggacagatgagcgtattggcacagagttgggcatgagccaggatgaagtgctgaggctgaaacagattagcgggctgacagagctgtttcaggaagagaatttcagcccggcatggacgattcgctaa

SEQ ID NO: 30589 - DNA, 558 bp, Escherichia coli
atgtatagatggacaatcccagaacaatatgccaataagtatattggagaatatcaatatgaatcttttgattacttacttttttctcatagcacaccaattgaaagagttgagaatatcaatccagtcattatctacgcgatgcccgatgaaatgataaataaatatgattgcttgccaaatagttcattgatccccgtagttaatgaacgactaaaggacttcctggaaacacatgccaaaggtaatgttgagtttcataaaatagaccttcacacgaacaatggactcaaagatggtttttatcttttgaatacactcacaaaactaccgttaattgatatgcagcactctcattgccagtatattcccggaacaacagcgatcatggggtttgaacaggttttttttattgaagagcctccggaagatttttgcattgcacgatgcgcagaatattcatcttatcttatgttatctgattcattagtaaaaaaaatgaaaaaagaaaaatttaaaggaatttcatattcgaaagttcctgttcaccgaggttaa

SEQ ID NO: 30590 - DNA, 1533 bp, Escherichia coli
atggaaacctcccgacgcagcggggccggattttaccagacgctggcttacacgcgcacagggatgccagcgaagcagaatgccggggaccaccaggccgggccgcatgagcgaaataaaagcctggagcgggaatggctttacgacaaagcgtataacctgaccgcaatcgccgactcgctgcgcggctccatgttcaacaccatcacggcaaacgaccagataagccacgccacctggacgggtgattccagccagtttccgctgtgcgaggagctgttcacttacgataaaaacctgaacatcacccgccgccagacccgtgtgaataacgtcctggaaagcgaaacgcaccagcaacagcagcatggccgggtgatatccagtgagcatgaaggctggcggcactcaacgcaccgcatcaatccgcagacaggaaaaccggaagaagggaaatttgtccgggtggtgaatgcccataacatcacctggaaatacgatgttaacggcaggctggtacagaagctggtcgataaaggtggctaccgccctctcgaatggcgctacagatgggatgcaagaagccagctaaccggactggaaaccccggatggcgaacgctgggaatataaatacgacccgtttggcaggcgcatcagcaaacgctgcaccaaccgcgacaaacccggcatggattttcactggaacggcgaccagctaacggaggaaattccggttggcgttaacggtaaaccggaagacgaaaacgccatccgctggatatacgagccgggagatttcacgccgtttgcgcgttatgagaaggggcaactgaattatgcggtgacggacacggttggacgagtacaggaactgctgaccgaagacggcctgattgtctggaaaggcaagcagcagctatggggacgtgaggaaggcatcaataagggcgatgcacccacctgtcggttacgttttccggggcagtatgaggacacagaatcgggactgtactataaccggttccggtactatgattgcgagacggggcagtatatctcttcagatcccataggattacttggggggataaatccttatggatatgttcgtaactcgctggaattgattgacccttgggggctagacagtaaacgcgctcgactcctcaaacaaaaaggattccaagaacatcatattatcagcgataaaaacagcttaaccaaaaaccatccattgttgaaggccgcggcatacgacctacagaaaatgaaaaacaagattttcttacctacaaaatgtgaacttcatgcaactcgatccattcataaagggaggcatcaaaaaaaggtaagtgaaaacctggcaaatgaaatggacaaagtgttagaacacgggagaaaacatgggtggacgcaaaaacaatacagtgacgcacttgacgaaatagttgctaaagaaagagccctcttgaaatctggccatagagctttaaataaaaacagacgtgcatggtctgttttactaacttaa

SEQ ID NO: 30591 - DNA, 528 bp, Escherichia coli
atgaaaaaattaaaagaattgattaacgatattttggttgatttaaaaataaatataacggaattacctgtcactttacacagccatgataaagtacccacgctaaaaaaagattactatagaaatcttagccctatgctaaaggttagatttggtatgttctctagttggaagaatgcaacacatggggattggctttcaatagaagagatgatggaaatttggcgtgatgatttggtaataaatgaccgattgtggcgaattaaggagaatcagatagctgctcgtaataattgggacaatgatgcttcttcgcttttcaaaaataatagattatcactttttgctggaagtgagtctacctatgaacgaatatatctgctttggttagatagtgaaattgaacctgagatatgggtatatgactgcaatggtgaatcgagatataaaaatctagagtcttatttaaatgcatatataaatgacgatgttagtgctagtaatgagtcatggagagccaaatactga

SEQ ID NO: 30592 - DNA, 1224 bp, Escherichia coli
gtgaacgaggtactggagagcgagacacatcagcagcaacagcatggccgggtggcgtcgcgtggacacaaagaatggcgacactcaacgcaccggattaacccggacactggcaagccggaggaagggaaatttgtccgggtggtcaacgcgcacggtatcacctggaagtacgatattaacggtcgtctggtggagaagctggtcgataaaggtggctatcgccctctccagtggcgttacaaatgggattcacgcagccagttgaccgggctggaaacaccggatggtgaacgctgggagtataaatacgacccgttcggcaggcgcatcagcaaacgctgtaccagccacgataaacccggtatggattttcactggaacggcgaccagttgacggaggaaattccggttggtgtggatggcaaaccggaagacgaaaacgccatccgctggatatacgagccgggagatttcacgccgtttgcgcgttatgagaaggggcaactgaattatgcggtgacggacacggttggacgagtacaggaactgctgaccgaagacggcctgattgtctggaaaggcaagcagcagctatggggacgtgaggaaggcatcaataagggcgatgcacccacctgtcggttacgttttccggggcagtatgaggacacagaatcgggactgtactataaccggttccggtactatgattgcgggacggggcagtatatctcttcagatccgattgggctgagagggggaataaaaccatatggctatgttcatagtccattaaattatattgacccattaggtttagctaacgctaaagttatagataatgttttgcatattgtggataaatttggagtaaatggggctgctcctgatactgcagcatccagagaattggctgagtttgtaaaaagatggaacgagcagatagtggcgaatggtggttcaatggccagacgttctgtttgtaaagaagtcagaaaagcagcaagtgaagccgccgctgctgagagaaaacttaacccaagtttatatgctaatggtgaagtggcggggcatattccagatgttggatggggtggaaaaattgatggtccgtttatgccgttaagtccaaaagtaaattcttatattggtgggttaactcaagcagtgcctgttggtacaacttatacatcggtaagaatagtggacattatactatga

SEQ ID NO: 30593 - DNA, 390 bp, Escherichia coli
atgggtgagctgacatcgtggcagatagccgaccatgcgccgctggcatttgaatatgacctgcgcggccaggaaacatccagacaaagcgaggccggattttaccagacgcagggctacacgcagacaggaatgctgacaacgcagcgttcgggaagccaggcagagccggaggcgaagaataaagacctgcaacgccagtggctgtacgaccatgcgtataacctgacgatgatatcggacacgctgcgcgggacgatggtcaacagcgtgacagcgaacgaccagataagccatgccacctggacgggcagcagtaatatgccgatgagtgaggaacgcttcctctacgacaaaaacctgaatatcaccgccgccagacctgggtga

SEQ ID NO: 30594 - DNA, 294 bp, Escherichia coli
atgcctgcactatctgagtactcgaatgtacacaacactgtttttaatattttgatttgtaaaggatatcgattgtggcatgaaaaaaaacaagaaagatattatgccgaaaaagatggttgggattttgtagccaatagcccgtgtgctctcttggggctcattgctatttatgaatataaaaaacccgatcattattatgagtactggtggaaagatgaaggattacatttagaaaaaaacattagtgaaatcgctcctgaatataactcaatcattttaaaaaataattag

SEQ ID NO: 30595 - DNA, 4419 bp, Escherichia coli
atggccgacaactttacagcccgtaagcacggacaatggaaagtcatcagcaccaaaccggatgtctgtaaaacaccacgcggagattccacaccgcctgtcccctaccctgtcacagccaatatggctgaagcagtgatggtggtgcagtcggtgaagctgaacggctgcccggcagtggtcctaaaccagagcaccatccctcagacaaagggcgatgccgcaggtgcggcaaaaggtgtcagcagcggtacagtgggtgatgtctgcgagccgctggaccacagcgagacagtattttttggcggcaagccgatactgcgtcaccacgatgagttctggatgaacagccgtaacaccatcggcctaatcgtgggccagccgccaccggcaggcgtgcctgcggaagaagcggacccgccggatgaaccggagacggaagaagaggaagaaaagagcagctggctggactgggtgcagacaggactggatattgccgggtttgcaccgggctttggtttttttgccgatatgctgaatgcgggtatcagcctggcgcgtggtaattatgctgacgcgtttatgtctgtggcggcctcacttccggggataggtgatgcggcagcggctggcaggatggcagttaaaggacgaaaagcagcaaaggcggctaaagaagccgccgaacgagccgcaaagaaaaagctggagaaggaggcggcaatgcgctcccgtgcgctgagaaaagcccagaagaaagcggcagctaaaaagaaagggggtatcgttaaggggaaagcgaaaaataacaaaggcaaaggtaagggtgcggaaagcagtgattgtaccaaacccggcgaacccgtggacgccggaaccggcgactttctccagcacttcagcgttctttcccttcccggctcacttcctctcacgctttcccggttttaccgttctcaggcacaacatggcggcatctttggtcccaaatggaccgatgaatggtccgtatccctgaaggtacacactgacggcaacctgcacttcactgacggtgaaggggtggaactgtactaccccattccgcaggacggcatttttgagggtgcagcgaactcccgccaggcacactaccggctgacgggcgacatgagcggagaactgtcgttgtccgaccgccgcacacagcagacacagattttttctcaggcaggcacaggtacttatttgctgtctgcccttcatgacaattacggcaaccggattgattttatccgcacggacggcctgctgacagaaatccgccacagcgacggctacacgctcgcgcttgcctggctacagcagcaactaatgagcattgacctggcaacaccgcggcgtcagcgccttgtcacctgtcagtacgatgataatggttatctggcagagtgcgatactttccagttttctcatctgtggcatgaatacacgactgaagggtttatgacccgctggcgggatacggataaaacctgcgtggatatccgttacgacccgcaggggcgcgccatcagcaccctgtcaaccgaaggctattacgacgaccgttttatctataacgatgaagagcactgtaccacctacgtggatgcagaaggcggcgaaacccgttactggtataacgaagacggcctggtcacccacagcaccgacccgctgggccgtgaagagattacagtatgggaaaacacgcaacttcagtcgcgcaccgacgcgctggggcgtaaaacagcgtatgaatataacgatgagggcgatatctggcatgttgccctgccgggcggctacagcctctattacgactacaacgacgccgggcagttaacccgcctgaccctgccgggcgaccaggtatggctgtgggactacgacgataagggcagcatggtctgcctgaccgacccgcagggccggaaacagcagttcagctacagccaacagggtgatttactggcgcggattatgccgggcggagccacctggcgctggagccatgacgccctgcaccaggtgcgcgagaccactgcgccggacggcggcgtcacgcagactgaacaggatatgctgggccgcctgctgagtgtgaaagacccgctgggcttcaccacgcagttccgccacagcaaaacccacgctgggccgctgggcagcgtggaagaaattaaccgcccggatggcgtgcgggaactgatgcgccagaacagtgaaaagctgccggagagcttcaccgatggcgaaggcaaaaccacccgctacgaatatggtgcatttgacctgttaacggcagttatccgcccggatggtgaacggctggagtgccgctacgacaagctgacccgcctgaccgaaatcaccaacgcggaaggtgagcactaccgtctggaatatgataaagccgggcagcttatcgcggaaaccgacttcaccgggcgcacactgacctacagctacgatgcggcaggccgctgtacccgcaccaccttcccggacggcactcacctgaaccgccgctacaacgtgaccgaccaggtaacggacgaggaagtcacccagggcgacagcaaccgtaccctgagcgccaccaccttcctctatgacacgctgtgccgcctggtggaggcgaaaaacgatgatgccatcgttacgtatgaatatgacagtgccagcagggttgtggccgagacaatcaacggcaggcgtacagaatacagttacgacaataatctcgacacagtttcacagcgcaccaccgcaggcatcacagagcacttcacccgcaacctgatgggctatctgaccacctggcagatagccgaccatgccccgctgacatttgaacatgacctgcgcggcatggaaacgtcccgacgcagcgaggccgggttttaccagacgctggcttacacccgcacaggaatgccaacgaagcagaatgccggggaccaccgggccggctcggatgagcggaataaaagcctgaagcgccagtggctgtatgacaaagcgtataatctgaccgcaatcgccgactcgctgcgcggctccatgttcaacaccatcacggcgaacgaccagataagccacgccacctggacgggtgattccagtcagtttccgctgtgtgaggaactgttcacttacgacaaaaacctgaacatcacccgccgccagacccgggtgaatgacatactggaaagcgaaacgcaccagcagaaccggcatggacgggtgatatcaagtgagcatgaaggctggcggcactcaacgcaccgcatcaatccgcagacaggaaaaccggaagaagggaaatttgtccgggtggtgaacgcccataacgtcacctggaaatacgatgttaacggcaggctgatacagaagctggtcgataaaggcggttaccgaccgctggaatggcgctacagatgggacgcgcgcagccagctaaccgggctggaaaccccggatggtgaacgctgggaatacaaatacgaccccttcggcaggcgcatcagcaagcgctgcaccaaccgcgacaaacccggtatggattttcactggaatggcgaccagttgacggaggaaattccggtcggcgctgacagtagtcctgatactgaaaacagcatccgctggatatatgagccgggaagttttacaccgattgcgcgttatgagaaggggcaactgcattatgcagtgacgaacacggttggccgcgtacaggaactgctgacagaaaacggcctgatagtctggaaaggcaagcagcagctatggggccgtgaggaaggcagaaataagaaagatgcgcccacatgccggttacgttttccggggcagtacgaggatgtggaatcagggttgtactataaccggttccggtactatgattgcgagacaggacaatatctgtgtgctgatccgtcaggattggacggagggattaatccatatgggtatgtgcataatccattagggtgggcagacccttttgggctagccaaaaagaacgctcagaatacagttttcagatatctgagtgcagacgatcgtattcgatatgagaatggtcaaagtttattacctaaaggtgagtttggttcaatagttgaacatgttgatggaaaaaatacaggacatatttctgcatcgcttaccaagtgtgcagctaaaatatttgattcgggcaatgggtatatagaaattgatgttcaaaaaattatcgacagtggtatatcatttattgatcacaagaatgttatgcaagcggttcgtcgtagcggctctttaactaacaggagagatgccgaaagagcactagaagttctcttcaaaggtgaaattccctttgatgcaattattcgtcatgttatataa

SEQ ID NO: 30596 - DNA, 1182 bp, Escherichia coli
atggaatttcgtaatcttacgccgttttcagtaatgcaatatgcaatggacgacaaacacaacgagcgtcattgtgtggtcgccatgaaaaccggcttccggctgaagcaggacgagaatggtcagtggcaggcacaactgatggaaaacccgccattgccgctctgtgtggaggatgagtatgccggggagatgaacacctctccggtactgcgtgaaagtgaccttgctcctctgaaacccgcctgtgacatcatcatcaacggaacagcttatacgccgggaggcgctgccgtgccagaaatgacggcaggcgttcttatgctctcatcgacaggtgaggtgctgacagacaaaaaactgcggataacaggccagcgtttctacaggtaccagccgttaatccgccagtggtatgaaactgaaccggaacccttcacctccctgccgcttgactaccgttacgctttcggcggcgaatgccgcgtggaggcaggcagcgaatatgccagccgcgtccccgaagaatatcgcctgaccgaagaccagcgtcgggaacacccaaaccaggagaatccaccactggcgcatatggcctgtccggtcaatccactcggattaggctatatgcagcagtggtatctgcgggcctgtcaggttcagcaggttgaagcgccccgcatcatcgccgtggacagcccattcacactcaaacagttcacagactgtctcgaagggaaagcagactggtttgcccccgaatttcagccagccggttttggctgtatcgggcgcgcctggctgccacggttatctcttgctggcacctatgaccaggagtggctggaaacacaacaccccgacctgccggatgattttgattttaactactggaactgcgccccggatgaccagcgcatcccttttcctctgccaggactgggatttgtactgacgggttttcgcccggagggcgatatccggttcaccctgcccgcacatgaaggacgccttctgttgcgcgccatgagcgggcatcgaatgccattacccatgttgctggatacggtggaaatcaatactgacaccctgaccgtggcgctgacctggcgctttctgctgcccaacagcacaccaccggtgcgggtactggaagcccgctacagaacaaggagcgcctaa

SEQ ID NO: 30597 - DNA, 1158 bp, Escherichia coli
atggatgggttgcgtaatgatgcggaattaggcagcggtagcagcaattcgccgaggctatggccaggaacccgtttcaaactggagaaccatccacagaaaaccctgaaccgggaatggcaagtgatcggtagcacactaacgggcgaacagccgcaggcattacatggtagccagggttacggaacctcgatgcataaccagtttactgttatcccggcagaccgtacctggcgtccacagccaatgatgaagccaaaggtagatggtccacaaagtgccattgtcaccggtccggctggcgaggaaattttctgcgatgaacatggccgggtacgggtgaagtttcactgggacagaaccaaaaccaaagatgagaataactcctgttgggtacgagtgtcacaagcctgggctggagccggattcggcaaccttgccattccgcgtatagaccaggaagtgattgtcgattttcttaacggcgatcccgaccagcccatcatcatgggacgtacttatcaccaggataaccgctctcccggtggtctgcctggcaccaaaacgcagatgactatccgttcaaaaacctacaaaggtgagggttttaacgaactacgttttgaggatgcgaccagtaacgaacagctttatatgcacgcccagaaggacatggtgacagaggtactgcatgaccggacgacaacagtggatcacgaccataccgaaacagtgaagaataaccagacggtcacagtagttgttggtcagacggtcaatgtgggcagtaaaaaagaaggcggacacgaccagaaagtgacggttgcccacgaccagacagtcacggttcagaacaaccagacgctgaatgtcacagaaaagcgtgaaaaaaatgtgggtggagaccagaaggtcactatcactggcggcgatgatgaaactgtcatgaagtcgcaaaaggtaacagtaaaagaaaactatacgcttgatgtcaccaaagaaacgaagattatttccggcgagtcgattgagcttatctgtggctcctgctccctgaaaatggaaaaaggtggcaaggtaacaatctccggctcagagtttgattttactgctggtggccttgtgcatatcaacggtaaagacgtatttatcaactga

SEQ ID NO: 30598 - DNA, 1836 bp, Escherichia coli
atgagtacattacagttacctggtagttcatattctacagaagttaatttaaacggcttaattgaggtgctcagtaagcatctttactccactcccgtggttgccgtgcgcgagctggtgcagaacggccatgatgcgatcgttcgccgcaggattgagcagcccgatgcgccaaaggataacgcgattcgtgtggtggcagacgtggcgaagtccactatcactattagcgatactggcgctggactgacagaaagtgaaattcacggcttcctggcgacagtaggcgtgggttatacccgaatgttgcgccagcaggatgacaacaccggtttaattggtatgttcggcctcggttttttgtcggcctttgtgttggcgaaagaggtcacggtgttgaccacatcctggcaaacgccggatcagagctggaaataccactctaccgacgggcaaaaatataccgttacgccgcatcagtcctcggaaacgggtacgcaggtgattctgacgctcaaagaagagtacagccatctggcgagtaacaatttgctgaaccgcgttctttcccgctactgtatattgctgcacgaaccggtctatgtcggcgatgccagcgagccggtaaataaacttcaaccaccgtggcgtgaagttgcccccgaaggcgtaaccatgcaccgcgcgctggtacagcgtaaaaatctcgcctttgccgcccagtttgaatcctccttcgaaccgatttgcaccattccggtggtgcccgtggggatgagcgacgcggttgggattttatggattcaggatggcgcaacctacggcaccagcgataaccgcaacctgtcgctgtttttgcgcggtatgttactggatgatgaagcgcgtgagttgttacctccctgggccggatttattggcggcgtgattgagtcatcgaaactaacgcctacggcgagccgggaagatctccagcgggacgaaacctgggttgcggtgcaggaggcgttaaaagaggcgctgatttctggtttgtccgatctcgcacaaaatcagccagaaatctggcggcgtgtattaatgcgccacaacgaagcgttgctcggtgcggcattatgtgatgaccgtctgtttgatttgctcaaagatcgcttgcaggtgccaacgtcaaaaggggcgttgctggcgaaggatttacgcgttaataacagcattcatattctgttaagccgcgacggcggttttgaagagatgttgttccacattctgcaacggcccgttgcccgtggcgatcgctatgccgtcgtgccatttttacgtcgctgggcgctgttatatcactgccggattgtcgaagtcggtacgcaaacaggtaatgagcagttgttcagcctggcggaattacccgaagagcaggtagcttatctggaagagcatctctgcgatggcgagcaattaattatctcccgcttcgaacccgccgttttaccgttagtggttacgccagaccgcgaagcagaattaaaacaaattctcgaacaggatgacgcagataaacgcatcagcaccgcagcgttaatgctggcgcggcaatttacttcacaaatccaaaaaacgaaaacctcaagtttatacatcaaccttaataacccttgcatcatgcaactggtgacggcattacaacaccagcaacagcccgcagcggcattacgcttattaaaatcgctgaaagtgattttgtgctccagcggtaataaagaacagcattgggatttacaccaggcactggaagattttactcaggttattcctgtcttaattaatcaaggaaaataa

SEQ ID NO: 30599 - DNA, 351 bp, Escherichia coli
atgaagagccgcatttctgctcgtgctgagtttgaggatgtcattgagactgggctgggaatcactgaatctcttcatgggtgctattcggcaggaggtaaggaagttattgccctgatcgaagaaatcaatcatctgattgaaagtaacaaacagcaaggtgtatttattgagtatccatatagtatccttggggggatttgttggatatctttgggatatccaacaaatatcctgcactatctcatgagaaaagtgaaatttagttcacaggatgataaactgaaaaacttggtggattccgccagattacactgccgtaacattaacagtcccgtctcagccaaatga

SEQ ID NO: 30600 - DNA, 909 bp, Escherichia coli
atgaacaaacagttcactgcttcagatatcgtgggcgtcaaccccattgtggcaatgccgtttacccaaaatggggaaatcgatgaatgtagctttatccgcctgctggagcatctcgtcaccagtggcgtgaacggcgcaacactgtttggtgtcgcgagcgagtttccaaagcttgatgatagagagcgcgatcgcatggctcaactgatggtcagcaccttggcaggtagtccggtgtatcgcgccttttccgtgacggatcacagtacggaaatcgctatcaagcgtgcaaagcgctatcaggtactgggtgccgatgcgctgatgctgctgccaccgttctttctatccccgagtccacgggccgttcaggaacatattttcgcggtacttgaagccgttgatattccagtgatagtgcaatatgcgccaggcgagaccgggctatctattacgccggaacaacttgccatcgtggcggaacgttatccacatgcggtatttaaaatcgagtgcaacccacctgtggaatacacccgcgaattcctacgtcatgctccacaggcttgtgttctgaacggctatgcaggattgtatatgttgcaaatactggaagcgggcggcaaaggcgtaatgccgggctgttcgtttaccgaagtgtatgtgcaaatttatcgacactggcaagcaggggaaattcagcaggcttgggctttacaccagcagttgttgccctttattcagcgctggatgggacattgcgaatacatcattcaggcagaaaaaacgctactgatgcaacgcgggattattgccagtgactactgtcgccgtccaggatggacgctggacacagccgatcggcaagcgattactcaactgctgcatgattttaacttagtgtag

SEQ ID NO: 30601 - DNA, 1713 bp, Escherichia coli
atgaaaagagaatgtggaagatgtgccaactgtggcacgcatttcagtcccatcctcgagggtgataacggcgcgctaaaacgcgccctctacaaatccatgggccatacggacgagcaactgcgtcgtccagtgattgcggtggtcaacagctacaccaacgccaccgcgggacatgccaatcttaatgaactgacggcaaatgtgctgaaagggatcgacgaagcgggcggcgtcggaatggtatttggtactatcgccccttgtgatggtatcgctgaagggcatcaggggatgcgctatattctcgcggcccgtgaagtgatcgttatgtctattgagagcatgatgcgcgctcattgctttgatggcatggtactacttggttcctgtgacaaaatcgttccagctatgctgatggcggctgcccgtctagatattcctgcgatcatgatcaacggcggcccgatgtatccggctgagtataaaggcaaacactgggacggcaatattgtcactgaagccattggctggaaaacgcgtggcgaaataaccgaagaggaatttgcccacattgaaaacattgccgaaccgggcccgggctcctgcactatgtacggtacagcgaacactatgtgctgtattgccgaggtactaggcatgagcttaccgggcagtagtacgctgccagccgtttcacaggaacgtcgaatttgcgccgttgaaaccgggaggcaggccgtggccctagtacgcgaaggcattagtgctcgccagattattacagcagattctatttataacgcaatggtctatctgctggcgaccggtggctccaccaacgccatcctccatcttcaggccattcattacgaagcggaattagggcacttacccctttccgcttttgacaaacttagtcatcaggtacctctggtcacttctctctatccggcttcggaatacgacatgatcgatttctgggaagcgggtggtgttcgcgctgtcgagcatgaaattgcagggttgatgaactgcaatacactgaccgtcgtcggaaaaaccaaagctgaacttttggctgaagggcacaaaactacgcgtccggaagtaattcgttcgcgggcaatcccggtgcgcagtgaagcaggtgtagctgttctgcatggcaacctttcacctctgggctgtgtagtgaaacccgcagcagtccctgaaaatctgatgactttccgtggcccggcagtggtgtttaatagtgaacaggcgtcggtcgacgctattatgtcaggaaatattcatcctggcagtgtattggtgttgcgctatgaaggcccccaaggtgggcctggcatgccggaaatgtataaaccgatgaagtgcctcgaagggatgggacttgctgacagctgtgcgctgatcaccgatggccgtttctccggttccaaccgtggattgttcgtcggtcatatttctccggaagctactgaaggtggcgcactggggttggtagcggatggcgatgaaatctccatcgatattccaagacgtttactcactctgcatgttgatgaagtgacccttgcacaacgccgtgcaaattggaaaccggtttataaagaagtgccacgaggctttctgcgcctttaccgccgctgggcgctgcccgcggcacagggagcggtacttgccgatagggaggatatggaatga

SEQ ID NO: 30602 - DNA, 1356 bp, Escherichia coli
atgacaaaacttactgaagacaacgtttaccgaaaagtgacccgcagactgattccgttcttgatcctgtgttacttctttgcctatctcgaccgcgtcaacgtcgggtttgccaagctgcatatgcaggatgcgctgaatttcagtgataccgtctacgggcttggtgcaggaatcttctttatcggttactttctgtttgaattaccgagtaatctgctgatgcagcgctttggtccacgtttatggatagcccgcattatggtttcgtgggcaattctttccgccgcgatgatttttgtcacctctcccacacagttctatgtgttgcgtttcctgatcggtatcgcggaggcgggtttctttccggggattgttttctatctaacattgtggtttccgtcatggcgttcggcccgtacgctggggctatttatcttggtcactccgctgtcgaccatcattggcagcccactttccggtcttattctgaaactgtttgagggagtagaaggcctacacaactggcaatggttatttctggtagaggcatttccgtcattcctgctggccttcatggtgctgagctatctcgataacgatgtgaaatcagctaaatggctaaacgatgcagaaaagcagatcattctcaacgatttggcgcgcgacaaacttaaccgtgaacaggccaatgcgggcaaggtcagcagcacactaagtgccatgttccgcaatggttatgtctggttactggcgttaatctttttcagctttaacatcggctattacggcatcaatttctggctgccatcaattatcaaaagctcaggtattagcgacgatttgcaaattggtctgctggcggcgctgccctatgtgtttggcgcgacgtttatggtctggaacagccgacattccgatctcaaacaggagcgccgctggcacattgccattccagctttgctcggttgcgtgggcttagcactcagcgcttattgcagcggctcaacattctggatgatggcgtggatctgtcttgccatgtccgggacgctcgcacttatccctacttatatcagtctgccgggagcgatgttttccggaacagccgccgccgcaggtattgcactggtgaattccataggcaatctcgctggtttctttggtcccacggtactgggatggctgaaagatactaccggcagcaccgacgccggactgtacatccttgccggcttcctgctgctagtggttccgctgattctgctattacctgctaagtttgctaatccaaaacgccaatcgcaccctgaacaactcaatggaccgcatgacgtttcccaacacacaaattaa

SEQ ID NO: 30603 - DNA, 645 bp, Escherichia coli
atgaccccggatcttttccttgaacactggcgcaaagaaccgctaccgctaattgccattctgcgtggcatcacgccgcaggatgcgacaaacgcagcggagattctgattgaggcaggatttcgctggatagaagtgccgctcaacagtccatcagcactggagtctattcgactgatgcgccagtgcgcaggcgataacgcaaaaattggcgcaggtacggtgttaaccgtcgcgcaggtcgacgacgtggctgaagcaggcggtcagttgattgtctccccaaatgccgatgcaaccgttattcagcgtacccgtcagcgcaacatggtgagcctacccggagttatgacgccaacagaagcgtttaccgcactgcacgcgggtgccagcgccctgaaactgtttccggcggaacagatttcccctgaattattaaaagcgtttcgcgcggttcttcctctcagtgttgcctgtttacctgtgggcggaattcgtccaaatacggagcagatgcggcgctacgtgcaggcaggagccaacggtttcggacttggtggttcactttatcagggtggaatgccaatggatgagctagcgaaactcgccagctcataccgccaggcatgggaactgacgcaatag

SEQ ID NO: 30604 - DNA, 903 bp, Escherichia coli
atgagaaaacattggatcgccgtcgactggggcacgactaactttcgtgcatttttactcaatgaccagcaggttgttgcttctatttcaaaagcatgcggtcttcttgctatcaccaaaagtgaatttgcccccacactgcatcaacacctggagccgtggcttaacgaacacggcgctctaccggtgataatggccgggatggttggttcacagcagggctggcaggaagtaccgtatgtttctcccccagcaacggcacaaacgttgcggaaaaatgcgctactcatgaccacgcagtggggaagccaggcgtggattattcccggcgttagctctgccagtacgttcggattacccgatgtgatgcgcggtgaagaggttcagttgatgggactgaatactttccatccggcagatgaggtttacgccattttgcctggaactcatagcaaacacgccaaactgagtcacggtgaaatcacacatttctccacgctaatgacaggcgaactcttttcactgctcagtcagcactcgttattgggccgggcactaccggaacagcaggacgacagtaccgcttttgtgaaaggcgtattgaccgcccaagcgaacatccctttcagccacctgattttctctgctcgtacccgtcgtttgagcaatgaactggaaccctcagcgatccatagctatctctctgggctgttgattggctatgagctatccagcatatctgcagaagaagaaaactggctcgtcggctcgcctgcactgtgcaaacgttatctacacgctgcaaagacgttgcaaatttcattacatactgcagatggcgatacctgctttttgcacggcatgcgcgctctttacacacaactactggagacatacacatga

SEQ ID NO: 30605 - DNA, 1197 bp, Escherichia coli
atgaaaactttgttatttatcttcatggccattgcgatgttgttatggttcctgggtacgttaaggcgtaagcccagcctaaagaaaggctgtattgacgccattatacctgcttataacgaaggcccgtgtctggcgcagtcactggataatctgctgcgtaatccttatttttgccgggtaatttgtgttaacgatggctccacggacaataccgaagaggtcatggcggaagtcaaacgcaaatggggcgatcgctttgttgccgtcacgcaaaaaaacaccggtaaaggtggcgcactaatgcgtggactaaaatatgccacgtgtgatcaagtatttttaagtgatgcagatactttcgttccacctgatagtgacggaatgggctatatgctggcagaaattgagcgcggcgctgatgccgtaggcggcattccctctactgcgttgaaaggcgctggcctgttaccgcatattcgcgcgacggtaaaattaccgatgattgttatgaagcgtacgctacagcagttcctgggtggtgcaccgtttattatcagcggtgcctgcgggatgttccgtaccgatgtgttgcgtaaattcggtttttcggaccgtaccaaagttgaagatctcgatctcacctggacattggtggcaaacggctaccgtattcggcaggcaaatcgctgcatcgtatacccacaggaatgcaacagctttcgtgaggagtggcgtcgctggcggcgttggattgtgggctacgcggtctgtatgcgcctgcataaaaggcttttattaagccgcttcggtatcttcagtatatttcctatgctgttggttgtgctttatggcgttggtatttatctcactacctggtttaatgaattcatcaccaccgggccgcatggtgtggtgttggcaatgtttccgcttatctggctcggcgtagtttgtgttattggtgcatttagcgcctggtttcatcgttgctggttgttggtacctttagcaccgctttccgttgtgtatgtattattagcttatgccatctggattatttatggacttattgccttttttactggacgcgagcctcagcgcgacaaacccacccgctattccgcactggtggaaacgtcaaccgcttattcccaatcttctgtcacagaaactgaaaaactatctgaagcttaa

SEQ ID NO: 30606 - DNA, 657 bp, Escherichia coli
atgaaatcaaagaaaacaatattttctggtaaaaaaactggggttttggctataggtgctcatcctgatgatattgagttgggatgtggggcaacgctctcatcgcttgcgcataatgatgtatatatattgtctgtaattatgacatccggaggttgtggcgggaatgctattgttcgttatgaagagtcaagagaagcgttaaaaatactaggttgtaatgaaattatcaaccttgactttaatgataccaagctttatttgcaaattaaggaaatgattgattctctggaaagaatacttgcaactgaaattccttctgatgttgaaattatgcgtgtttatacaatgcataatgcagaccgtcatcaggatcatgtcgctgtttatcaggcttcgatggttgcctgtcggcatattcctcagattctaggttatgaaacaccaagtacatggatttcattttctcctcaagtttttgagcgattggaagagcatcattttgagaagaagatttcagcactaagtaaacataaaagccagagtctacgaaaatatatgcaaccggaacatttgtggaatcaggcgaaatttagaggtcagcaagtggattgttctctttgcgaaggatttgttgtccataagatggtgttgtga

SEQ ID NO: 30607 - DNA, 309 bp, Escherichia coli
atgttttgcaacaggttgctgctgaccagatatgaccgcctaccctttgacattatctctgctgcagcaaaaaccatacacccacttaccccattcgtcgatgtgttggcagtgtcatgggaaaatgttgaactgagcacattactggctcttacggaatacaattttgaccgtgttgacttacttattagcgaaccggaagcgctagatttattcactgtggtgagactgttgcgcggacatctcaatttagttactacactgttggtgcgtaagagttgtgtctttgttgagaaggcatcgagatag

SEQ ID NO: 30608 - DNA, 4551 bp, Escherichia coli
atggcgaataattatatggcacgtcaggacgggttgtggattgtggtcagtgtctgcccggacgtctgcaaaaccccgatgggaagcgccactccgccggttccgtattcagtgatcgcttacctgggcgatgcagtacagatcgtgccgtcagtgaaagtcaacggatgcccggtgctggttctggatcagagttttatcccttacaccaaaggggatgaaccgggtgtggcaaaagggtttaaaagcggtacggtgggcgatatctgcgaaccactggaattcagtaaatcggttttcgcgggtggtaagcccgttctccggcacttcgacaagttctggatgaacgcccgtaatacgacgggtttaattatcggtcagccccctgaagccgctatttccgccagcgaagctgaccctgcgccagagccagaaacaaaagaagagcaaagtatctgggacatgatgttgatgatccagatggatgaaagtcgggcgaaaattgaagcttcggcagtccagcttgatttggctattggtgctgccaaagcattctggaaccagttcccggatatggcgacgatgataggccagggggccaccatgcagtatgccggagaaatgcagatgaacggcgccatgctttctgcgatgggcatggatgatattggcgaggatatgtacaacatgggcggagatctccgggagcatgcgggagatttcaatctggacatgtaccgtctggaaatgagcaacaggaaccaggaaattggcggcatgatttatgactatggctcgctggcgctgggaggatatggtctggcccgaggcgggttcgtgggtcttagagcgatgcggactgccagtaaactggcacgagaagaagcagcggcggggaaattcaccgccgatctgctgaaggtaaacaaagcagacgatgttgtcagtgacgcagaaaagttggcggatgatgtcatacccgaaggccaggatggcgcaaatattaaaggtgaaaccgagggaactggtgatcagagtaaatgtgttggtgctcagttgtgcaccaaacccggtgagcctgtggatattggcaccggcgattttctccagcatttcagcgtgctttcgctgccgggttccctgccgctgacgctctcgcgtttttaccgctcacaggccagggggaccgggattttcggcccgaaatggaccgatgagtggtcagcgtcgctgacgatacagggtaaccggctgcattttaccgacagtgaaggcgttgtactgtattaccgcctgccgcaggacggtatctttcgcggtgcagtgaactcacgccaggcgtactaccggctgacgggaagcctgcgcgatggcgtgagcgttttcgatcgccgttcgcagcagacacagctcttttccccggcaggcaatggcgtctggcggttgtccgctgtcttcgataattatggcaaccggattgattttatccgcactgatggtctgctgacagaaatccgtcacagcgatggctatatgctcgcccttgcctggcaacaggctcagctgatgagcattgacctggcaacgccgcagcgtcagcgtcttgtgacctgccagtatgatgacaatggttttatggcagaatgcgataccttccagttctcgcatttatggcatgagtacacatcagaaggctttatgacccgctggcgggatacggacaaaacctgtgtggatatccgctatgatccgcaggggcgcgctgtcagcacactgtcaacggaaggctacttcgatgaccgctttatctataacgatgatgaaaaatgcaccacctacctggatgcagaagggggcgaaacccgttactggtataacgaggacggcctggtcacccgctgtatcgatccgctggggcgggaagaaattaccgtctggaataatgcccggcttcagtcacgcaccgatgcgctggggcgtaccacggcgtaccgctataaccgggaaggtgaggttatccaggttgccctgccgggcggctatggcctgttctacgagtataatgataccggtcagttaacccggctgtcgacaactgataatcaggcgtggcaatgggtctatgatgatcggggcagcataatcagcctgatcgaccctcagggccggaaacagcagttcagctacagtgaacagggtgatttgcttgcacggattctgccgggcggggccacctggtgctggagtcatgacgccctgcatcaggtgcgcgagactgttgcgccagacggcggcatcacgcagaccgaacaggatatgctgggccgactgttaagtgtgaaagacccacttggcttcaccacgcagtttcgtcacagcaaaatccacgccgggccacagggctgcgtggaagaaatccagcgcccggacggcgtgcgggaactgatgcgccagaacagcgaaaagctaccggaaagctttaccgatggcgagggcaaaaccacccgttacgaatacggtgcattcgatctgctcacggctctggtgcgtcctgacggcgagcggctggcgtgtcgctacgataaactgacccgcctgaccgaaattaccaacgccgaaggcgagcgctaccgtcttaaatatgataaagccgggcagcttgtagcagaaacagacttcaccggacgcacgctgaactacacctacgatgccgtcgggcgttgtattcgcaccagcttcccggacggcactcaccttaaccgccgctacaacgtgaatgaccaggtgacggacgaggaagtcacacagggcaacagtgaccgaactctgagtgtcaccacatttcgttacgacacgcagcgtcgtctggtggaagcgaagaatgacgatgccaccgttacatttgaatataacgatgcaaaccagattgttgccgaaacgctgaacggcaggcgcacagaataccgttacgaccctgacctggatacggtcacacagcgcaccacagcaggtatcacagaacgctttacccgaaacctgatggggcatctggcatcctggcagatagcggaccatgccccgctgacatttgagcacgacctgcgcggcctggaaacgtccaggcggagcgaggccgggttttaccagacgctggcatacacgcgcacagggatgccagcgaagcagaatgccggggaccaccaggccgggccgtacgaacggaacaaaagcctggagcgccagtggctgtatgacaaggcgtacaacctgacggtaatatcagactcgctgcggggatcagccttcaacaatatgacggttaacgaccaggtaagccatgccacctggacgggcgattcccgggagtttccgctgtgtgaggaactgttcacttatgacaaaaacctgaatattgcccgccgccagacatgggtaaatgaggtgctggaaagcgagacacaccagcagttgcggcatggaagagttgtttccagagagcacaaaggctggcggcatcagacacaccgcatcaacccggacacaggaaagccggaagagggaaaatttgtccgggtggtgaatgagcacaatattacctggacgtacgatgctaatggtcgcctggtggagaaactggtcgataaaggcggctatcgtccgctcgaatggcgctatcgctgggatgccagaagtcagcttaccgggcttgaaacgccggagggggaacgctgggagtataaatacgacccgtttggcaggcgcatcagcaaacggtgtaccaaccgtgataagtccggaatggatttccactggaatggcgatcagttaaccgaagaaattcctgttggtactgatggcaaaccagaatatgaaaatgccattcgctggatatatgaaccgggaagttttacaccgctggcacgttatgagaaaggcttgctgcattacgcggtgacggatacggtcggtcgtgtccaggagttgctgaccgaagacggcacgattgtctggcggggaaaacagcaactttggggccgggaagaaggcagaaacaaggatgatgcgcctgactgccgcctgcgttttccggggcagtacgaagatacggaatcaggactgtactataaccggttcaggtactatgatcctgatacggcgcagtatatttcggcagatcccattgggttacttgggggattaaatccatattcatatgtacagaacccatttagttatattgaccctttaggtttatcggcattatttgcattcctgcaagaagtaaattgtaaaaaactatggagtaaaggaagttgggatactccggcagagtcattactggagcacttcagaaaacatggtcgtgaagttggtgcagaaacggtagagcaatatctaaataaagctaaggttttttctgagaacttgagaagaataaaaccaaccaaagtttctggttatactgaaaatgtgtggagatatagaaagaacggaagatatattgatgttgcggtagatacaggggaaattgtctcttttggtcgtttatag

SEQ ID NO: 30609 - DNA, 342 bp, Escherichia coli
atgggctggcatcaaatgaaaatacgcagtgtatctaaagtagagaaagttgaagccgagtttgtaatttggatgtttggtgttatccctagcgcaaaagtaaaaataaaaatacgagagtctcaggatgggagttacatggggattacaaatgtaatgattaaacggaaatttgatgattgtcccgaaggtgctattggctggggaaaaacagtagatgaggcattggaaaatactataaataacttcctagcaattttagatagtgattatccaagagagttatatccagatggactttctgatgagcatatagaatatatggatcattccgatttttaa

SEQ ID NO: 30610 - DNA, 597 bp, Escherichia coli
atgaataacacggatcttatctatctcattaaacattttatgcataacgaacttaaagcagtagaagaggttattgattccccactttctgaattcgctaatttaattaaagtattacaatcttgtcagggaaaagttgtttttattggtgttggtaagtccggtattattgcccgaaaactcgcagcaacttttgccagtaccggaactccctcgttttttgttcacggtacggaagcggtacacggcgaccttggaatggtggcgaaagacgatgttgttattcttatttcaaacagtggtgagacggcggaaatcctggcgacactgcctagtctgaaaaaaatgggtaattatttgatctcttttacccgcagtcatcactcatcgcttgcgataagttgtgatttatctgttgaaatccccgtcaaaagtgaggcggataatttaggtttagcaccgtcatgctcgtcgactgttgttctggttgttggtgatgcggtggcgcttgcactctctgaattgaaaaaatttactcgtgctgatttcggcttatatcatccaggaggtgcactcggcattaaagcaaattcataa

SEQ ID NO: 30611 - DNA, 1392 bp, Escherichia coli
gtgcggcatggaaacctcccgacgcagcgaagctacgacaaagcgtataacctcaccgcaatcgccgactcgctgcgcggctccatgttcaacaccatcacggcaaacgaccagataagccacgccacctggacgggtgattccagccagtttccgctgtgcgaggagctgttcacttacgataaaaacctgaacattacccgtcgccagatcagggtgaataacgtactggaaagcgagacgcaccagcaacagcagcatggtcgtgtggtatcgcgggaacatgaaggctggcggcactcgacgcatcgcatcaacccggacaccggaaaaggggaagacgggagatttgtccgggtggtgaatgcgcacaacatcacctggaaatatgatgttaacggcaggctggtacagaaactggtggataaagggggttatcgcccactggaatggcgttataaatgggatgcacgcagccagttgaccggactggaaacaccggagggcgaacgctgggaatataagtatgacccgttcggcaggcgcatcagcaagcgctgtaccagccgcgacaaacgcggcatggattttcactggaacggcgaccagttgacggcggaaattccggttggcgctgacggcaaaccggaagatgaaaacgccatccgctggatatacgagccgggagatttcacgccgtttgcgcgttatgaaaaggggcaactgcattatgcggtaacagacacaactggccgcgtacaagaactgctgaccgaagagggtctgatagtctggaaaggcaagcagcagctctgggggcgtgaggaaggcatcagtaaagaagatgcgcccacatgccggttacgttttccggggcagtacgaggatgttgagtcaggcctgtactataaccgattcaggtattatgattgcgatacggggcagtatctgtgtgctgatccgatggggctgagaggtggggattgcctgtatggatatgtatttaatccgctaaaaattattgatccgttagggttaactggtgacgatactgttagagttagacatcatacttcaacagagggtattgatggaattagcaaggatgggtctatcaaccctgccagaggcaatcctgttggtgtacacgttgaggtggagccatttggagatcctaaaacggcaggtgcagaaacaggggcatggaagaatggttcttatgtagagtttgatgcttccaaagattcacttactaaaacaaatgttgggccaagaaatacagccgttataccaacagacgatcctttaccattaaacgataaaaaccctatatacaaaaaagactctttttggtcacgaataatgagttttattaaaggatgtgattcatga

SEQ ID NO: 30612 - DNA, 435 bp, Escherichia coli
atgaatatgaataaaaaagaagcattagagttcctgtcactacatcaaccaatgcccgcggattgtgatattactcaggatcttatagataaatacgatgaggtacgaatttactttctttcccatcccgataaagatgcaatacctttatttttgcgatcttttggtgagggtgatggtcttggagtatatcaaattgttgaggattttctctataagtgtgattttaatgatgttgttataaatatcgttaacatactcgaaaatcctaacacaataaaaagcgttaggctttggtgtactatattaacaatgtctttcccagataaaagaatggtaaacgggttgaaaatttcggctcaatcgcatgatgaagatattcatgatatggcattacttggcttgaagctcattgaagaaaaattccccatttaa

SEQ ID NO: 30613 - DNA, 729 bp, Escherichia coli
atgaatgccatttgcaatcattcttccgcagtgcctgaatgggtcactatttctgaagccgcacatattattaatcaacaaccgggtatcagtgtcaccgaagctgctatatggcgctatgcgctgtacggccatttaatcctgtctgtttattttcagtccccggtgaaaatgcgccgggtaacacaaaataaaaacgccattgtgctggcaaaaacacataatgatattatcggtaggttgtgttatctgagtcctgaatgtctggcaacagatgattactggcaggtaaaaacagaaggcgatattatttcccctggcagacatattattgatacgccattaatgggacatgaatgtattgcgttgcaacaaagactggctttttcgctgggccttccacctcctcagacaggtcggtgtaatattcattgcggcattactgttcagagtggtggcgctttatatcagttagtcgaagatatttcatcagaacaacgtattactcaacagttacaatgtctgccctccggtaaacaggaatattacagggagaaattgagcagactgcatattaaccgggagcagcaccatttttttcccgtctaccatttcccggatgacgcctggtttgttatcaaacgaacaaatctggagcagtttatccgtaccttttttcctcctctggcaaaaccttcaaatcagatttccactgtagtggcacagtaa

SEQ ID NO: 30614 - DNA, 792 bp, Escherichia coli
atgaatttcagaccagcagtatatttatgtgcagcaacatttttactggctggctgtgcgccacgctcccccattgatgcgaagaaaacgggcgcatccgccaaagagagcagcatcagcaaaaacacaacggcacaactgaccgataaagatatttttggcaatgaaaccacgctggcagtttctgaggaagatattcaggcagcactggaaggcgaagcgttccgcgtgccgctgaattcacccgtgattctggttcaatccggtagccgcgcaccggaggccatgatgcagcaggaaatgagtaaatattataccgttgccacattctccggtatcccggacagacaaaaacctgtgacctgtaacaaagacaaaaacaaagataaaagcgagaaccaggatgttgctgttgttgagaatatgaactggatgcaggcactgcgttttgtggctgcaaaaggacatcagaaatcgattattgtttaccaggatacgttgcagacaggaaaatatgactctgcgctgaaatcaacagtgtggtcagattataaaaatcaaaaactaactgacacaatgtcattacgttttttggttcgcttcactctggtggatgtggcaactggcgagtgggctacctggtcacctgtaaattatgagtccagagttatcttccctcagactgaaaaaaagggtgcaatcactaccgatgtgacagagcaacaaatcacccagcttaagcagaaaacatacgcagcaatgaccagggatctggtgaaccgctatcagtaa

SEQ ID NO: 30615 - DNA, 300 bp, Escherichia coli
atgccattagtaaaaaatgttgaaaagaaaatctgggatgtacagggatttgatgttcgcttcaaaacacccgatggtaaggacgtccggggtgataaaaaagatatgccacaatatcagcgggtgaaaatgtccaaaaatgattcgacggtctcagagttcaaacgcaatataaagaaacaatatcctggctatgacatcgacgttctgatgggagatgggacgcctgccaatggcaatacaaaactggggaccgtcagggattcatatgaggaggatacagaagacgattccgattaa

SEQ ID NO: 30616 - DNA, 240 bp, Escherichia coli
atgacagaaacccagatctacgagaacattaagcaagccattagcagcgcaccacgaaatagccaaacgatggaaatgcacctccagatgatcaaatatgctgaccatctgaaaaaggttacggcaaaagagttttgtgaaggtgtaggacttaaagccagctttggtacagagttcagcaaaatgagaaatcttaccgagcgactcaaagctgctggacttgacaccacgaagttataa

SEQ ID NO: 30617 - DNA, 264 bp, Escherichia coli
atgaaaccattaataacgcttggggataaaacatctcatggtggtgttgtaattagtgccagtgcaaattttttgcatgagggacagcctgtcgcctgtgatggtgaccaggtaacttgtccgatagaaggccatgggccagcaaaaatcatagcatctggacaggggttttctataaatgggaaacaggctgcacatgatggcgataaaacaacctgtggggcaacgctgatagccagtcattttattgtgcgtcataagtaa

SEQ ID NO: 30618 - DNA, 933 bp, Escherichia coli
atggcagcaagcaaaacaaaaaacagactggaaaaaatgcttcctcgcgtttatagctgggcacagagcggcagccaatcagtaaccgcccctgagtttaactatatggaacaatatattaatggtcaatctgaacttttcatggcattaattcatttatatggacttggcatgagtgaagctgcattaagcttactggaagccaaacagtctatggcttcttctgttatccatatgagttatggattctctcgaatgcttcattctgatggcattaatatattgagtttaaaagaaagcaaggcaactattacttcaggcttggatttcgtcacacatagtatgcttggagcaattgcgctgggtatgcccgctctgacgaaaaaatttcaccagattgtttttactgctcttgagaaagggtatggcattgtaaatgcgcatgaagatcctggcccagaaactttacgctatgctgctatgggactttccatcattaatgactggctacagatccccctggatttagataagctgggactgccacgcgatccggcctgggggcttctggtcaaacactggaataaccctgatcccgttaaattacaatcggttctgtatgatgcctgtgatatccatatagaacgtatcgcgttaacagaacgtgaagtttataccggtaactttgaatttggctctccgtttgaagccgttcacccaacagagattctggcggtattgcgcctgagagacatgctgaatctgcccaatccgacattagaccatccgctgatgaacacaccttatgcccaaatcaccaccactccgggccaggtcactcagccggacagtctgctagaaacctttctggctaaggcccgtgaacgggatccagaggtcatggccgaatgggatcgggttcaggtggattaa

SEQ ID NO: 30619 - DNA, 696 bp, Escherichia coli
atgtcattaaaaggattgcgttttacgctgaaagtggacggccaaaatgcggacaccttcgccgtggtaaatttctggctgatgcagaatttctcgtttccatttgttatggatgtagatgtcgccagcaaggagtttggtattcaagcaaatagcttgctggaaaaaaaagccacgctgatcatctggcagggccccaaggcgctgcgttatgtatcgggtgtaattgccagtttcggaatgaaagaaaacaataactggcagatgcagtaccgccttcgtatccagccacctctgtggcgtagcggcctacgccagaatttccgtatttttcaacagcaagatattgcaactatttcagccaccttactggatgagaatggtgtaacagactgggagccatccttaaacagtgagcaccctactcgcgagttctgcgtacagtatggcgaaacggacctggcatttctgtcacggctatgggcagaagaaggcatttatttttatgataagttagccccgaacggcccggatcagaaactgacattatgtgatgatgcagcaggtttgtcgccaataggaaccattaccttcaacccaaatacccgaactgaagccgacaaggagtgcatcaatgcgtttcattacgaagctaatgttcgtccttcagtaagcgtcaacggagcaccgtattga

SEQ ID NO: 30620 - DNA, 1539 bp, Escherichia coli
gtgtataagagacagttccaggacgcagcaaaagatggtggtgtgtgggactatggtagtaacggttttaaaatagcttatgacgttaatactgcaaaaaatagcaaccaggaaagaaccacctacagtagtattgatggccaggtgaatctgggcgaatgggtgttattgggtagggggtatgcttaccagggcgaaaatttcgatactaataacctgttactgacgcgggcaatcaaatcactgaaatccgatttgcaactgggcaagacacagctttataactcattgaataatggttttaccttttacggtgctcagcttaaatcgaatcaggatatgtatccgtggaactctcgtgcctattcgccggtaattaatggtattgcgcgaacccatgccagggtaaccattgagcagagtggttataccttaaaatctattgtcgtgcctccgggaccatttgtgatcaacgatcttaacggcgtttactctggcgatttgatcatgaaaatctatgaagaggatggctccgttcgtgaacagcgtttccctgtcgcagtgttgcctaatttgttaagaccgggaacgtataactacgccctcgccatgggtagcaaagttaaccaagataatggcgaacgggataaagaaagtctgtttgcccaaatgagttatgactatggattcgagccttttacactcaatagctctttattgctggataaaaattataacaatattggtttaggactaattcgctcgtttggatggtttggagccatgtcttttagtggcaacttatcacaagcaaaataccataatggtaagaatctaaaaggctatagcacgtcattaaaatatgcaaaagcgcttggtgataatgcaaatttacagcttattggttaccgttttaattcagaggattatattgactatgctgattttacttataattcatatagttttataagaaataggccaaagcaacgctatgagtcaatcgttacctaccagctaccagaaaaaggtatgtttttaaacttttctgcgtggaaggaagattactgggataattataacgaggtcggtgctaacttaagtctgacaaaaagttttgatcaaataacaatgacactgaacggtggttattccagactgcaaaatatggatgctgactataatgttggtttgtcattaagtgtgccgttaagtctgtttgataaaacacattatagtttttcgaatgttaactatgatcgacgtacggggaccagtatgaatactgggatctcaggaatgattaaccaaaggctgagttataacgcatcagttaaccagacgcgtgatactaccggtggtacactttctgcctcctatttattcgactggatgcagacatcagcaacgtattcacaaactgggaaaaattcatctacctcactccagttgggtggtagtgtaattggtgtaccagaaggtggcataatatctgtctcttatacacatctgacgctgccgacgaagaggatagtgtag

SEQ ID NO: 30621 - DNA, 639 bp, Escherichia coli
atgcgcccgtccacgtccatgagcgcagacggtcccttcaatctgtataacgcggtagtcaccgcagctgataaagcctccgctaatcgtggcgtactggtagtaatgaacgacactgttctggatggccgtgacgtcactaaaaccaacaccaccaacgtagcgaccttcaagtctgttaactacggccctctgggttacattcacaacggtaagattgactaccagcgcaccccggcacgtaagcacaccagtgatacgccgttcgatgtctctaagctgaatgaactgccgaaagtcggcattgtttataactacgctaacgcatccgatcttccggctaaagcactggtagatgcgggctatgatggcatcgttagcgctggtgtgggtaacggtaacctgtataaatccgtgtttgacaccctggcgaccgccgcgaaaaacggcactgcggtagtgcgttcttcccgcgtaccgacgggagcaaccactcaggatgccgaagtggatgatgcgaaatatggcttcgtcgcctctggcacgttgaacccgcaaaaagcacgtgttctgctgcaactggctctgacgcaaaccaaagatccgcagcagatccagcagatattcaatcagtactaa

SEQ ID NO: 30622 - DNA, 1101 bp, Escherichia coli
atgaaattaaaaatagttgcggtggttgtaactggtttgttagctgcgaacgtagcacacgctgccgaagtctataacaaggatggtaataaactcgacctttatggcaaggttaccgctctacgttattttactgatgataagcgtgacgatggtgataaaacttatgcccgtctcggctttaaaggagaaacgcaaatcaatgatcaaatgattggttttggtcactgggaatatgattttaaaggctataacgatgaagccaacggctcgcgcggtaacaagacccgtctggcctatgcaggtttaaaaattagtgaatttggctctctggactatggtcgtaactacggtgtcggctatgacattggttcatggaccgatatgttgccagaatttggtggcgatacctggagtcagaaagatgtcttcatgacataccgtactaccggtgtggcaacctatcgcaactacgatttcttcggcttaattgaaggtctgaactttgccgcgcaatatcaaggcaaaaatgaacgcactgacaatggtcatctttatggtgctgactacacgcgtgccaatggtgacggtttcggtatctcctcaacttatgtttatgatggctttggtatcggtgcggtgtataccaaatccgatcggacaaatgcgcaggaaagagccgctgctaatcctctcaatgcctccggtaagaatgcagaactgtgggctacaggtataaaatatgatgccaacaacatctactttgcagctaattacgctgaaacattaaacatgaccacctatggcgatggttatatctctaacaaagcacaaagttttgaagtagtggcacaatatcaattcgacttcggcttgcgcccatcactcgcttacctgaaatcgaaaggcagagatctgggccgctacggcgaccaggacatgattgagtatatcgacgttggtgcgacgtatttcttcaacaaaaatatgtcgacctatgttgattataaaatcaacctgattgatgaaagcgactttacccgtgccgtagatattcgcaccgataacatcgtcgcaacgggaattacctatcagttctaa

SEQ ID NO: 30623 - DNA, 678 bp, Escherichia coli; identical to SEQ ID NO: 11356

SEQ ID NO: 30624 - DNA, 135 bp, Escherichia coli
atgcagaaaaccctcaaggttggaaaccgaattactttgcgggatcagttgcaacttatgatgcaaatcgaattgttaaatgtggtttttatgatgaatacaatttccataaagggacatttagagctgatttaa

SEQ ID NO: 30625 - DNA, 669 bp, Escherichia coli
atgatcaatgaccttatattacacaatcaccccatagtggagaaaatcactttaaacgacaaccatattgcacatttaaacgcgaaaaccactacaaaactggaatatttaaacttaagcaataacaatttattgccaacagatgacattgatcaattaatatcatcaaaacatctttggcatgtattagttaacggcatcaacaatgatccacttgcccaaatgcagtactggactgcagtaagaaatataattgatgacactaatgaagtgaccattgatttatcttataacctggcaatcacaaatatcgataccagcgatgaacatcttgtagaagtaagcgagaattccgaaggaaatcatataaaagaaaatgactcaatgtctattcgttatagatcaaaatattattccagagagtacgccttaatagaagaagaaacaatattttctgacgcagaactaaaagctattctgcctatgcgtcgcatgtacggggttggtgactataagtcaaattcctcttctctaccctcacactcggggctaaaggacccaacgggcacacccgtctgttattatattcataatgaggataaaccttccttaggttttggtccaacatccaataattggttaagccaatcctttacaacagagttataa

SEQ ID NO: 30626 - DNA, 432 bp, Escherichia coli
atgaaaatccagcacattgtgccgctgtcggatcaggcgattgcgatactgaaacagatcgaggccctctccgggcatctggcctttatttttcccggcgaatacgaccaggacaagtgcatgagcgacaacaccgtcaacaaggcgctgcgcgtgatgggttacgacaccaaaaaggatatctgcgggcatggcttccgggcaatggcctgtagtgcgctgagcgaatcgggattatggagcaaagaagccattgaaaagcagatgagccaccaggaaagaaacagcgtccgtgctgcctatattcacaaggctgaatatctggaggaacggatcgagatgatgcagtggtggtcagattatcttgatgcaaacagtgacgggtatgtctcggcttaccagtatgcccgccgcctaaaacaggcgtcgtaa

SEQ ID NO: 30627 - DNA, 309 bp, Escherichia coli
atggcgaaagaacgtttatatgatgatgtcatggtggaagcgctccgggaagatcctgcttttgctcaggcctatctgcatcaggcatttctggatatggatgaagatggcggtcaggaagcttttttactcgcgttacgccatgttgttgaagcgcggggaggaatggcgacggttgcccagaaagccggtgtatcgcgtgaatcactgtaccgcacgctctccccgaccggcaacccgacactgaaaacactccgcagcgtcgtccacgccgcaggttttcagttctctgcgctggcaagtgcctga

SEQ ID NO: 30628 - DNA, 174 bp, Escherichia coli; identical to SEQ ID NO: 28672

SEQ ID NO: 30629 - DNA, 2649 bp, Escherichia coli; identical to SEQ ID NO: 20157

SEQ ID NO: 30630 - DNA, 861 bp, Escherichia coli
atgagtattcaacatttccgtgtcgcccttattcccttttttgcggcattttgccttcctgtttttgctcacccagaaacgctggtgaaagtaaaagatgctgaagatcagttgggtgcacgagtgggttacatcgaactggatctcaacagcggtaagatccttgagagttttcgccccgaagaacgttttccaatgatgagcacttttaaagttctgctatgtggtgcggtattatcccgtgttgacgccgggcaagagcaactcggtcgccgcatacactattctcagaatgacttggttgagtactcaccagtcacagaaaagcatcttacggatggcatgacagtaagagaattatgcagtgctgccataaccatgagtgataacactgcggccaacttacttctgacaacgatcggaggaccgaaggagctaaccgcttttttgcacaacatgggggatcatgtaactcgccttgatcgttgggaaccggagctgaatgaagccataccaaacgacgagcgtgacaccacgatgcctgcagcaatggcaacaacgttgcgcaaactattaactggcgaactacttactctagcttcccggcaacaattaatagactggatggaggcggataaagttgcaggaccacttctgcgctcggcccttccggctggctggtttattgctgataaatctggagccggtgagcgtgggtctcgcggtatcattgcagcactggggccagatggtaagccctcccgtatcgtagttatctacacgacggggagtcaggcaactatggatgaacgaaatagacagatcgctgagataggtgcctcactgattaagcattggtaa

SEQ ID NO: 30631 - DNA, 441 bp, Escherichia coli
gtggcaaacctgcaggtggccacatcagaaagctggcgtgacaaacagacgggggagatgcgggagcagacggaatggcaccgcgtggtgctgttcggcaagctcgcggaagtggcaggtgaatatctgcgcaagggtgcgcaggtctacatcgaaggtcagcttcgcacccgtagctgggaagataacggtatcacccgttacgtcactgaaattcttgttaagaccacgggcaccgtgcagatgctgggacgtgcaccacagcagaacgctcaggcgcaaccgaagcctcagcagaatgggcagccacagagtgctgacgcgacgaaaaaaggtggcgcgaaaacgaaaggccgtggacgtaaggccgcgcagccagagcctcagccgcaaccgccggagggggaggattacgggttttcagacgacatcccgttctga

SEQ ID NO: 30632 - DNA, 234 bp, Escherichia coli; identical to SEQ ID NO: 8563

SEQ ID NO: 30633 - DNA, 426 bp, Escherichia coli; identical to SEQ ID NO: 5761

SEQ ID NO: 30634 - DNA, 156 bp, Escherichia coli
atgcggatgtacattatggttatggtaagctattatggcatgataaaaaaccagtcatatacccattggcatccttatctgattatacttattataacgaattcgacccatttgaaacgatttattatgtggggcaatactataaaattagcttaa

SEQ ID NO: 30635 - DNA, 432 bp, Escherichia coli
atggcccttttctcgcaagccctgcattttggctttgagtacaatttttctgcatcagtgcacctattggcccctcttttagaagatataattagaaagatactttatgatcaaggtgaatactctgcaattatagataagaatgcaaaaagcactgaagtatctatatcaactcttttagataaaccaaaagctaaggaagtttttgacgagaatttcctttttgagttaaaaatgctattaactaacaacattggctctaatctgagaaatgcagtagcacacgggttattagatgacgatactgccagtgggggggatgttgtttatctctggtggagaatattaagatgggtaatgctatctgtcgtgattggtcataatgaatatcaggaactaaaaaatgctcctgtcattgaggaacctgaatga

SEQ ID NO: 30636 - DNA, 144 bp, Escherichia coli
atgcattggctttatggagttatcattcagataggagttgctttctctttcttgaaactactgtgttttgccttggcaattaattttgttctctttagttttagtttttttgtccttcaagtaataagttttcatgaaagttaa

SEQ ID NO: 30637 - DNA, 2961 bp, Escherichia coli
atgaaactacattttgaatctgaccttacctatcagcaaaacgccataacatcagtttgcgatctgtttgaaggtcaggaaaaatgggaaagcgaaatgactgtgctggcaccagctcagggcgttctctcatttgaaggttcaacgggttcaatgcctgttaacccacaaatacccgaagatgatgttctgctgaaaaacctgaacaatgttcagttaaaaaaccagcttccaccttcacctgtgctcgacagccatgattttactgtcgaaatggaaacagggacaggtaaaacgtatgtttatcttcgcaccatgctggagctgaataaacgctatggcatgagtaaatttattattgtggttccttcagttgctatcaaggaaggcgtttataaaacactacaaatcactgaagaacatttcaaaagcctgtatgcgggagttccatacgaatactatttgtatgattcggcaaaacctgccgatgtccgtaattttgcaaccagttctgttatgcagatcatggtaatgacggtgggcgcgattaacaaaaaagatgttaacaagctctatcagtccagtgaaaaaacaactgtggacgatctggataagcccattgatttaatccgtgctacacgtccaattattattgtcgatgaaccgcaaagtgttgatggtggcttgaacggtgcgggtaaaaccgcacttgatgctatgcaccccatgttcaccttacgctattcagcaacacatgttcataaacatcatatggtgtaccgccttgacgccattgatgcttacaaccaaaaactggtcaaacagatcgaggttgccgggcttgaagtccaaaatgcaagtaatagcccctatgtaaaactggtcagtattaacaataagaagaatagcattagcgcgactcttattgttgatatagccgataaaaaagggggcgtaaatcgttctgaaattaccgtgcatgacggtatgacacttgatgacgaaacggggcgtgatatttatcagggatacaggataagtgagatccgcacgggcaaagaaggctatctgacactggatacgccttctaatacctactatatgaaagaaggtgatatcgtaggtgatattgacccaatgcttatccagcggcatatgattagacgtacaatccgtgaacatctggataaagagcttcgccttaatcctcagcaaatcaaggttcttaccctatttttcattgataaggttgatttctatcgccagactaatgaagaaggactgcttgaaccgggtgaatatgcccgcatctttgaagaagaatatctaaaggccattaaaagccccgcatataaaactttggttccttctcatccagaacatgctaaagacgttcatgatggttatttctccattgataaaaaaggtgcatgggctgaaacaaccgaaagcaataatgcaggccgcgaaaatgcggaacgcggttataacctcatcatgaaaaataaagagaagcttttgagtttctcgaatccggtgaggtttattttttcacactctgctttgaaagaaggctgggataaccccaatgtattccagatctgtagccttcgagagatgggaagtgaacgagaacgtcgtcaaacattagggcgtggtcttcgcctgtgtgttaaccaagaaggtgaacgtgttcgtgatgacagcattaacattctgactgtcgttgccagtgaaaattacgaagcctacgctgaacgattacagtctgaaattgagagcgaaacgggtatccgttttggtatcatcgaaaaagatgcgtttgcccatctgatcttctctgattcctcacaagctgtgggtattgccggttcacatgagatttgggctgaactacagaccgaaggttatctggaaaaatcgggaaaaatcactaaaaccctgaaagaaactcttctcgatggcacttttgctgttagcgaaaggttccttcctcttcaggagcaaattgaagctatcctgcgtaaatcagcaggacgactcaatataaataatgctgatgagcgtaaagtaatcaaataccggaaagaggtcttaaacagccctgaattcgaagcgttatggcagcgcatttgccaaaaaacactgtatcgtctggcatttgatgaagatgaattgatcaaatcatgtacaaaatcactttctgaaatgcagcctgtagcaaaagcaatggtcagtttcagcaaagcaacaatcaaacaaagtcaatctggacttgatgtcaaagctcagtctaatgggacaacaagcgctgttatagatgttgcagagcagccactgccagatattcttggtgttctacaggaaaaaaccggacttacaagacgcagtttaagcaccatcctgaaagagagtggaagactcgctgattttgctaaaaatccacagcagtttatcagtgaagctataggccgaatcaactactgcaaacgcctgtcaattgttgatggtattaaatattatccactaaaaggagaggtgtatgcgcaaagtctctttatggataaagagctaacaggatatgcccgtaatctttttgaaacctcgtctaagtcagtttacgaatacgttcctaaagattctgaagtcgaaagccgtttcgctcaggaactcgaagaacaggatgaagttaagctttatgtgaagcttcccggttggtttaaaattccgacgccactgggaacctacaatcctgactgggccttagttattgaagacaatggtgaagaacatatttactttgttgtagaaacaaaaagtaaacacattggtcttggtaatgaagaagatgcgaaaattacttgtggaacagctcatttcagtgctttaaaagaagaaaacactaatgcagcaaaatatatcagagcgacaaatcttacagaagtaataagcagcatttga

SEQ ID NO: 30638 - DNA, 195 bp, Escherichia coli
atgtttaagtgtgcagagatgttgatggtggaagaagatgataaagtatgtgaacttatttttaaacaacaagataatttgattttaataattataaagaaataccgaacattacaaggtaaagtcgtatggctatggatattgccatttgttattgaatggttaagtgtgcgcactttaggcgcaaacagttag

SEQ ID NO: 30639 - DNA, 216 bp, Escherichia coli
atgcatacctttatttttcttgtgctgatgaaaaatgttggcggtggtggtatctggaatattacacctatgccaaatacggatgtatgtgtacagatccttcggagagtcgaagcgcgtggaggcaggggattaggaaatacaggggaatgtattgaagttaaaacaaatgaacctttgaacaacgtgatggaaacactgaatggtgggcaatga

SEQ ID NO: 30640 - DNA, 474 bp, Escherichia coli
atgcataaatcagaagctgaaaaaatagattctattctggatgaacatcaacagatatatcgcagacatgaccgaatagataacatcctggcgttttttgcgtgtattgcatggattccctgtattattgctgcgttcggcgttgatggtatatatctgaaaatcctgtttgcggtccttacctgctgtggtgcggtatgcttttttattttcttcttcaccctcctgccggaatcactcatggtcctcagccgtcagagcctgcttcagcttatgcgtctgactgaagacgtaccggatgtgagacaggaactgcttaaccgtctgctgtccggtaaaaaactgactggtcgggatgaaaaggatatccggcgtctctggcaggagaaagtggatgcaatgcaggcgtctgccacccgtcagcgtgaacaggataccatccggaagtttactgaaaagaataaatccgaatga

SEQ ID NO: 30641 - DNA, 384 bp, Escherichia coli
atggccagagtaaatctgtatatcagtaatgaggttcatgaaaaaattaacatgattgttgaaaagcgttgtcaggagggagcaagagataaagatataagcctttcaggaactgcttcaatgcttcttgaattggggcttcgcgtatatgatgcacagatggagcgtaaagagtctgcgtttaaccagacagagtttaataaacttcttcttgaatgtgttgtaaaaacacagtcaacggtggcaaagattttaggtattgagtctctcagtcctcatgtctccggaaacccgaagtttgaatatgccagtatggttgacgatatcagagagaaagtgtctgttgagatggaccggttttttccaaaaaatgatgatgaataa

SEQ ID NO: 30642 - DNA, 978 bp, Escherichia coli; identical to SEQ ID NO: 8561

SEQ ID NO: 30643 - DNA, 159 bp, Escherichia coli; identical to SEQ ID NO: 6188

SEQ ID NO: 30644 - DNA, 1068 bp, Escherichia coli
atggcctgcggcaccatacacccctgtcgtcagagacataccggcaacctctgttctgagcaggtcaccctccagacggacgaagccatagctgccgctgctttccggcgtggctccacgggcaataccgccgttgttatcgtgaccgagatgaccgccctgaatgctgagacggacgctgttattttcaccgtttacaccggtctgatggctgcgggagcctgccagaatccggtcatagtccattgcctgtgtcagcatggatgtatacagggggacttcagcacgataagcattttcactgcgcaggtaccagtcttcatcgctgtcacggttcagggtgtagttaaaggcgccggcctgaagcgggcgactcagggcaaacgcaccttcttctgtggtagcgccattctgtgcatccacaacccggataccctgtccggtggttgccaccccgaggttactgtttccgacatttgtaaacgcaagccaggttttgccggttgcctgaccaccattaatcaccagctggtcagaggcattgctgccatcaaggcgaacacgcatattgatagtgccaccctgaccggtgaggttactggttgtcagtttatggaacgttaccggggcgttgccttttgcaacagcacggctcagtacggcatccggtgttgtctgattgtcaaagtaaatctcccctgcgttaacaatatcgccggtactgaccacatcaccattcagtaccatgctggcgcctttactgagctgtgttctgccactcagacttcccccggcagccagcatcagtgttccacgatgtccgacagtggtgttgctggcctgtcccccggcattaaccgtaaagctgccgccattttccagcagcaggccgctggcctgaccggatatgccatcaatactgaacttaccgctggcattggtcccctcaacagtggcaccactgtctgcaatcagggcaccaccggatgtcatggtgacacctgttgccttaccaccggcagacactgccagggttccgccgtcatccacccgtgttttctgcgctga

SEQ ID NO: 30645 - DNA, 216 bp, Escherichia coli
atgtctcatccacgtcagtatggcctcttaccgtgcaaattgcaaggaggagtaaaccatgaaactaccgggaaacgcccttatctggtgcgtattaatcgtgtgctgcacgttgttgatattcacactcctgacccggaatcgcctgtgcgaagtccggctgaaggacggatacagggaagttacggcaacaatggcttacgaatccggcggtaa

SEQ ID NO: 30646 - DNA, 411 bp, Escherichia coli
atgaaaacttttatcaaaactttactcgttgctgtaactattctgttctctgtcttcgctacggcgaaacaagtaaaactgccaaacaacatcaaatacgttaatactacagaggcgttttcctgtactgagattgacggtatgaattgccagacgaagaatccgttcaactataaagataacagctatgttttcgtgcttgaacgtggtggtgcctggtgttacgactacactgtctcggtacttaacctgaaaaccgggaaagcacagatgctcgaatacaaagacaaccagctgtgctcaggtagcaacaaaccgttcttcgaaatcaaaaatggcgtaccgacggtaggagtcatcgacacatccggaaaacctgtcgttgtggctctggacaaacttaaaacctga

SEQ ID NO: 30647 - DNA, 318 bp, Escherichia coli
atgcgtatgtctctgatgtttgctgcggttgcgcttttcagtggcgttaaccttttatttgtcccgtttctgcctgagcctgcattgtggggagtaatcctggccgctgcttttattatgattaatgtcgtatcggataaaatgcgcctccggagtggtctgatatggagtttttgggctgtcattatcatggccgttatgctgggaggagtggaccccggtgacgaattaagaatactgatgacggtctttgctttcctggcgtcggcctggtacagcgttgtgaaatacagaaaagaaaaaaatttccgtccctga

SEQ ID NO: 30648 - DNA, 222 bp, Escherichia coli; identical to SEQ ID NO: 30267

SEQ ID NO: 30649 - DNA, 222 bp, Escherichia coli; identical to SEQ ID NO: 6179

SEQ ID NO: 30650 - DNA, 222 bp, Escherichia coli
gtggaaaaccattcctcctggcaccgcctgtttgtggacccgttaagtcgcgccatgtacagctctgacggcccggattttgagtttgtgcagcagaaacgtaaagaggggctgagtattcatgaggcggtgtggcagctggcgtggaagaagtcagggccggagatggcttcgctggaagcctggctggaagaacatgagaaatacaggagtgttgcatga

SEQ ID NO: 30651 - DNA, 222 bp, Escherichia coli
gtggaaaaccattcctcctggcaccgtctgtttgtggacccgttaagccgcgccatgtacagctctgacggcccggattttgagtttgtgcagcagaagcgtaaagaggggctgagtattcatgaggcagtgtggcagctggcgtggaagaagtcagggccggaaatggcttcgctggaagcctggctggaagaacatgagaaatacaggagtgtggcatga

SEQ ID NO: 30652 - DNA, 207 bp, Escherichia coli; identical to SEQ ID NO: 7904

SEQ ID NO: 30653 - DNA, 903 bp, Escherichia coli
atggctaatctttatgatctaaaaaaatttgacctcaatttactggttatatttgaatgtatttatcaacatctcagcattagtaaagcggcagaatcattatatataacaccctctgctgttagtcagtcgttacaacgtttacgtgcgcaatttaatgacccgttattcattcgctcagggaaaggtatcgcgccgactacaacagggttaaacctgcatcaccatcttgagaaaaatctcagaggccttgaacaaacgatcaatatcgttaataagtctgaactaaagaaaaattttattatctacggtcctcagcttatttcttgtactaataacaacatgctaatccgctgtcttagacaagatacttcaatcgatatagaatgccatgacatactgctttcagctgaaaatgccgaagaactgttggttcaacgcaaaactgacctggcaattacgctgcaaccagtaattagtcgctctgtcatctgcatgccgttacacactattcgcaattcccttatatgtagcaacaaacatcctcgtattactgataccagtaactatgaacaaattatcgccgaagaattcaccctgttgatatctaaatcagcagggattgacgaaattcaaatggacatagatgaacgttttataaaccgtaaagtttcatttcgcagttcttctttgttgactataattaatagcatttctgttactgacttattaggcattgtgcccaccgaactgtacgatttacatcgtgactttttgaagttaaaagaaataaaactggaacaacctcttcctgcggttaaactttatatttcctataacaaggcttcgttgaacaaccttgtcttctctcgattcatagatcgtttaaatgatagcttctga

SEQ ID NO: 30654 - DNA, 609 bp, Escherichia coli
atgccggagtctgcagagtatccgctgacggatgtggaaggtaagcgagttgtggtattgggcggtggcgatacgacaatggattgtttgcggacttccatccgccttaatgctgccagcgtgacctgtgcgtatcgtcgtgatgaagtcagtatgccgggttcgcgcaaagaggtggtcaatgcccgcgaggaaggtgttgagtttcagttcaatgttcagccgcaatatatcgcttgtgatgaagatggacgcttaacggcggtgggcctgattcgtaccgctatgggtgagccggggccggatggccgccgtcgtcctcgtccggttgcgggttcagagtttgaattgcccgccgatgttctcattatggcctttggtttccaggcacataccatgccgtggttgcagggcagcggaattaaactcgataaatggggcctgattcaaaccggcgacgtcgggtatttacccacccagacgcatctgaaaaaagtctttgctggtggtgatgcagttcatggcgcagatctggttgtcactgcaatggccgcaggaaggcaggcggcgcgcgatatgttaactctgtttgatacgaaggcatcgtga

SEQ ID NO: 30655 - DNA, 417 bp, Escherichia coli; identical to SEQ ID NO: 16762

SEQ ID NO: 30656 - DNA, 144 bp, Escherichia coli
atgaaggagaaggtggagaaggtggagaaggtggagaaggtggagaaggtggagaaggtggagaaggtggagaaggtggataaggtggagaaggtggataccatgataatggtggcaatgaagattagacaaggaagggagtaa

SEQ ID NO: 30657 - DNA, 390 bp, Escherichia coli
atggacgtaatagcgttaaaaacgctactcttactaaacagattatacctctatattcccagaagctccgcccactgcctgactcaggagtttctcgataacgactatccgctctatatgccggatacacgcttgtatcacgtgggcctggcgctgcaaaaaatggcggctaactatattgaaagcatcgatcaggcccgcgatttgcggctattgatctcatttctgagcaaacggttgggaaaaccagctacgcggcgattctggacgacaggcaggtggtttatttggcaaaagcgttctcctatgatgaactctctcattaatgcggcatatcggatcggcaataatctcccagccactgtaccgccgcttgtaaagtgctgctga

SEQ ID NO: 30658 - DNA, 1194 bp, Escherichia coli
atgaagaaaattgttttgccagttgctctcgcgctgttgggcatgaatgcaggtgcttatgccgccgatgtaagcattgatattttaagtgcgacagtgaaagataaacgcattgaaggggcatcggtgacgctgcaacgcaatggtgcacaatctgtttctggtatcacaaatacttcgggcagcattagtttggggacttcatttgctgataataaagatgctctattaatcgtcaaaaaagaggggtattccaatctggtggtcaaatgtccgtgcgctggcatgacttatgctatcagtccggtgatgacgaatctggatggcatgcgtgtagttttgagctggggcgaaaagccttttgatcttgattcgcatttgatcttccctggcggacatatctattttgatagtaaagagggaactgatgccaatctggatgttgatgatacggatagctatggaccagaaactgtcactatcagcaaaaagcattttggtgaaagttacatctatgccgtgcaggactatagcaataaagggctgcccaacagtaattatctctctgccagtaaggcaaaagtgtttgtttatgtagggagctccctggtacgtagttatagtgtccctgcaggaaaacgagggaacatctggaccgtgtttaaactcaatccaaacggcgagtttgaagatatcaactctgttaccagcgccaattttaacggcaccacattagacgtcagggatttagccactgtgataatgcctgcgacggactcttcagctccggcttcgcctgcgatgcaaaacagtggagatactcaactggcaagaaaatataatcgcgaaggtgaagctgtttataaaaccggtcaacttgagcaagccattcaactcttccaacaggcaacagaattagacggcaattacggacaggcatttagtaacctgggtctggcgtatcagaaaaatggcaacatagcggaagcaatttgggcaaatcgtaaagcgatctcgttagcgagtggggtaaatgcggcgacaacgcgcgccaactcctattataacattgccaaaatttatgaaacctcgggccagaatgctgaagcattgcagcattatcaactggcgtatacggaaaaaaataagccttcttatgaagaagctattgcacgtgtaaagacgaaaatgtaa

SEQ ID NO: 30659 - DNA, 600 bp, Escherichia coli
atgagtggttacaccgtcaagcctcctaccggagacaccagtgagcagacactatttattgattattttaatctgttctacagtaagcgtggtcaggaacaaataagcatctctcagcagcttggacattacggtacgacatttttcagtgccagtcgccaaagttactggaacacgtcacgcagcgaccagcaaatatcatttggattaaatgtgccgcttggtgatattacgacttcgctgaattacagctattccaataatatatggcaaaacgatcgggatcatttactcgcttttacacttaatgttccctttagtcattggatgcgtacagacagtcagtcggcatttcgtaattcaaacgccagttacagtatgtcaaacgatttgaaaggcggcatgaccaacctatcaggggtttatggcactctgctgccggataataacctgaattatagcgttcaggtcggtaacacccaagggggtaatacatcatctggcaccagtgactacggtttcatccagttcaacattatctgcaagggaattcgcgttaagagcgacacgattttctctatattctgtcgcaaatggtaa

SEQ ID NO: 30660 - DNA, 513 bp, Escherichia coli; identical to SEQ ID NO: 30098

SEQ ID NO: 30661 - DNA, 513 bp, Escherichia coli
gtgaccgccgccgctgacatccagcgtgccgtcctgattcactacagcgttattacccgcgatttcggtacctgtagagccctgaccatcaacggtggtgttaccgttattgttcacggtggcttcatcaccgttaatctgcgtgccggtgccgccgttactgatggcattgtcgccgtcgttgttgacgatggctttgtcgccgtcgatcagaataccaatggaatccggatcggtaaccgtcataccgcccttgttgtccaccgtggcgctgtcgccggtgatatcaataccgtgaccgccgccgctgacatccagtgtaccgtcctgaataactttcccgttattaccggcgatctccgtgccagtggaatctttaccatcaacgatggttttgccattgttgtttactgtggcattatcacccgtaataacaagctcaccgttatgattatattgccacttcgttgcgccatctgcgctcacggtgatgctgccaacttactgatttag

SEQ ID NO: 30662 - DNA, 711 bp, Escherichia coli
atgttcaggcgacgtggcgtaacattaactaaggccctgctgacagtggtctgtatgctggcggcacctttgacacaggcgatttcggtcggcaatctgactttttcactgccgtccgagactgactttgtcagcaaacgtgtagtgaataacaacaaaagcgcacggatataccgtattgccatcagtgctattgatagcccgggcagcagtgaattgcgcacccgaccggtggatggtgaactgcttttcgccccccgccagctggcgttgcaggctggtgagagcgagtattttaaattttactatcatggtccacgggataaccgcgagcgctactaccgggtctcatttcgcgaggtccccactcgtaaccagacaagacgtagcccaaccggcggcgaggtcagcacggagccggtggtggtgatagataccattctggtagtacgaccacgtcaggttcagtttaaatggtccttcgaccaggtgacaggaacggtaagtaacactggcaacacatggtttaagctactgattaagccaggatgtgattcgaccgaagaggaaggcgatgcctggtatctacgtccgggagacgtggttcatcagcctgagttacgtcagccggggaatcattatctggtctataacgacaaattcattaagattagcgattcctgtcctgctaagcccccttcggcggactaa

SEQ ID NO: 30663 - DNA, 261 bp, Escherichia coli; identical to SEQ ID NO: 14159

SEQ ID NO: 30664 - DNA, 468 bp, Escherichia coli
atggttgctaaattaaaaccagatgttctttttaatactaatccttttttagaagcaatgaataaggagagacttaatcataaaggatattgtgataaaattgctgtaagtattaataataagaaatataatgtaaactctaaggatattgaaaatattcttgatggcaaaggggatttatttaaaaaacgtacactgtgggagtttgttcgcgatctttttcccggctctcatattaaagaagtcaaaggcttaatttacgaatttgtcacgaaagttgataacaaagccgaggtgttcgataagattaaatctctggcaaaaaaagaacaacaatggcgatttagtactaagacagactttaccacaaatgaaaataatgaagttattgtgagtagatcctttaatctctacacgggggctacttcgaatgataacgaaaaaaacaggtttcttcagagagattaa

SEQ ID NO: 30665 - DNA, 1461 bp, Escherichia coli
atgttgaaaatacagttcccaaatgataatgaaaagcttagcgtatatttaaaaaataaaatcccctttgaaaatatcacaattgatttatctgcactggaaaaagaagccctggcatctttaaaatattgtaactttaaaaatgtgacattcactggtaatatatcttacgaaaatcttaatggttcagtatttgaaaattgtttttttgagggctgtaaatttgagaatgtgtcacttataagctccaggtgtcgagtaaaactaaataatgaaatacctatttacggcgtgtttaaagagtgttttctgtatcgatgtgaaataaaaaattttaacatagatacatcaaaaatatactctgtaaatcaagatcccaatgtgggtaagccagttggtgcatatctgtttatgcaatcatttgtatatgaatgtactcttctgaatggagtgtgtaaaaatgcaagtattattgcaagcagtttgttatgttgtaaaatagcaaagcttaatggtgctgaaatggatttcatagggacttcgttttatcacaaatatagatgtgaattaaaatatgataatcatttttatatgtgtgattttagctcctctgatatgacatgcaaacgaaatggaattcgcaaagatttactggattttgatcccagagaatatttcaaaaaggatggaggtaaacttaatctggataaacacatttcaaaccttatctacgttaatcttttccctaatatgagtggcggtcgttatataaatgataaatacgttgctgatgatataggtaaatatttaaaacttagtaattgcaatttacttaaaacctgtttgggcgagtcaatcaatggaattaaattggatgattgtgctattgatccttcaaccacttggttaagtggtaatcttgctgcgaatagccagattagaattcctgtttatatggacatgaaaggagctatagctgaaaatggcatttcagatttcatggaaaatttaatggaagttaattcatgggtagaagaattcaataattatggcaaggatgcgataagtcattacgaaaaggaactattatatttacaatctttgttggtcaagctgggtagcttcaatcttgatgatgaaggcaaaaaatatcaacttaatggtgaagctatccagtatattatattaaatgttttgtacaatatagaaaaagatatagccaatgaaatagatattgataaagtgaatttcatgcataacctctatactggattcttttggcaaagacattacgatgaacgtaactatttaaaaataaatcgttctgctatttcaaacagcgcaagatttcacttccactttaattttaatgatttgcgggatatttacaaagactataataataatcatgaagatgataattttgataaaatgcaaaagattttttttagcattgaatga

SEQ ID NO: 30666 - DNA, 204 bp, Escherichia coli
atggcaattaagcattttcctgtcgttcgtttcacttccagaggacgtgaatacgaagtcgacgaacgcctgattaccacaatcgacaaacaccgctcagaaaaggatgcacaccacatctatctcactgacggtacttacttctgcgccactaatgtggcgcgggtgaatcttatccgacaggtacaggattcacgtaaatga

SEQ ID NO: 30667 - DNA, 669 bp, Escherichia coli
atgcgctcactgaaacggcacgaacgccgggcgctgatgcgttcgcttcgtgacaaacaggcaaaaaacagcagtgatgaaatgcagagctggacacagagccgcaaacagcagcggactttgcctgataaccacgaattactcgctaaagaatggcgggaatctgccgaatctctcggcctgcatatcggtgaacagcagatgcagcacctgttacggggcggcagcctgtacgttgacggcagcatcattgcaccgcagggatttgaaattgtacgcaaaccagatacccgcccggacagccgaatcacgcagctctggcagcgcctgagccgtaatcacggcgtaagcagcacagagatccgtcataacccggtcgccagctatctggaacaactgggggcatcagaccccgaagccgccgcacacctggcatccacacttcagcaggaccagaacaccatgaaaacccccgttaccgtgctttctgacatgctgcgcgccatccgtgacgcagagcacgcacaaagaatcaatgaaaccactgaacgcgcccaccgcaaggctactttgctccaaaagagaggcaaacagcactttagtaatcaaaatgatgatgagaaaaaacaattacaaagttggatatgccttttccatcatgagggatga

SEQ ID NO: 30668 - DNA, 486 bp, Escherichia coli
gtggtgaccagatcccataaatctgtacgctctgttcgccgtaatcgttcagctcttctgcgaggtcgtaggcggtgcgaatcaggtagtctttgcgtggaacaagcacgccaccctgtttttcaatgtaggtggcaaaacacccggcatcagcggcagcgagtaccgcatccattgcgtcatccttcagccgttgcgggccttccgggttgcgtgccatctggctggcaaggcggcgtagttcacgccacacctgacgggaggggatgccaaagaactggaactggcggacccggtgaaggcgcgcccagccgatggcgcgctccacgctctcggccattgattttccagtttcgtggtcaacgcgtggcttgcccgttttcgggtcgataccatccacggcgcggctgtccaggttctttccgatgtaggtggcgatgtagctggttggcgtaccttttgagccgtcgacgtactccgccttaa

SEQ ID NO: 30669 - DNA, 564 bp, Escherichia coli
atgatttctttacattgcagatataataacaatttcaaaataaaaaaaacctgttgttttgattttaaaaataaatctttttgtaatgccaggttgcaatatataacgtttattgcatgtttattttcacatgcaaacatgaaatattcgacatttcatgatgttaaccttgatatgtgtgagataaagaattgcaattttgacaattcagagatgaatttcatttcgtgcgtcgggacaaattttagcggttctacatttaacaatgtaaaaacaacaacagcgcaactaattaagacaccaacaaagtggacgaataatactctaaaatattggttctccagttgtaataaacgtaatatcatcttcacttttaatacaatatctgatagaaatatgaaattaaaagatatcaaggatatattactgtcgttggttgaccaaaaagtcaatatttatagtgtaaggcaagagcttctggattttcttaataatgatttatataaaaataatggagagattctctcttataaagaatcaataatgttgttttgtgctgtgtag

SEQ ID NO: 30670 - DNA, 981 bp, Escherichia coli; identical to SEQ ID NO: 11425

SEQ ID NO: 30671 - DNA, 273 bp, Escherichia coli
gtggaggctgttggccagccgagtgatgatgcatccggctatctggattttttcaaaggcgagatagggaaaagccatctggctcaggagctgtggacgcagattgataacggtcagcttgcgcctgacctggctgaaatcaggacgtccattacggatgtcagcaatgaaatcacgcagaccgtcaataagaaactggaagaccagagtgcggcaatccagcagatacagaaggttcaggttgatacaaataataacctgaacagcatgtag

SEQ ID NO: 30672 - DNA, 789 bp, Escherichia coli
atgcaggacggacgcctttatatcgcgggtattggtgccggtattgagaacacccctgacggcatgcagagtcaggtgctgctggcggcggacaggattgcgatggttaatcctgcgaatggcaacacaaagccgatgtttgttggtcagggcgatcagatattcatgaacgaagtgttcctgaaatatctgacggctcccaccattaccagcggcggtaatcctccggcattttccctgacaccggacgggcggctgacggcgaaaaatgccgatatcagcggtaacgtgaatgcgaactccgggacgctcaacaacgtcacgattaacgagaactgccgggttctgggaaaactgtccgcgaaccagattgaaggcgatctcgttaaaacagtgggcaaagctttcccccgggactcccgtgcaccggagcggtggccatcagggaccattaccgtcagggtttatgacgatcagccgtttgaccggcaaattgttattccagcggtggctttcagcggtgccagacatgaacgggagaatagcgatacttattcgtcatgccgcctgatagtgaagaaaaacggggctgaaatttataaccgaacggctctggataatactctgatttacacgggtgttattgatatgcctgcaggcagtggcgtaatgacactggagttttctgtatcagcatggtgggtaaatggctggtatcccacagcaagtatcagcgatttgctggttgttgtgatgaagaaagccactgcaggcatcagtatcagctga

SEQ ID NO: 30673 - DNA, 273 bp, Escherichia coli; identical to SEQ ID NO: 22451

SEQ ID NO: 30674 - DNA, 144 bp, Escherichia coli; identical to SEQ ID NO: 9158

SEQ ID NO: 30675 - DNA, 396 bp, Escherichia coli
atgacgaaagatgaactgattgcccgtcttcaggtgctgggtgagcaactgaaccgtgatgtcagcctgacggggacgaaagaagaactggtgctccgtgtggcagagctggaagaggagcttgatgacacggatgacgctgccggtcaggacacatctgtcagcccggaaaatgcgctgaccggacatgaaaatgaggttgtatcagcgcagccggataccgtgactgatacggctgaactggtcacggtcgtggcactggtgacgctgcatactgatgcacttcacgccacgcgggataaacctgtggcatttgtgctgccgggaacggcgttccgtgtctctgccggtgtggcagctgaaatgacagaacgtggcctggccagaatgcaataa

SEQ ID NO: 30676 - DNA, 534 bp, Escherichia coli
atgatgcacttaaaaaacattactgctggcaaccctaaaacaaaagagcaataccagctaacgaaacaatttaacatcaaatggctttattcagaggatggaaaaaactggtatgaggaacaaaagaatttccagccagacactttgaaaatggtctatgaccataacggcgttattatttgtattgaaaaggatgtttcagcaattaatccggaaggcgcaagcgtcgttgaattacctgatattacagcaaatcgccgtgctgacatttcgggtagatggatgttcaaagatggcgtagtggtaaagcgaacttataccgaggaagagcagaggcagcaggcggaaaatgaaaagcaaagcctgctacagctcgtcagggataaaacccagctatgggactcacagctacgactgggcatcatttccgacgagaataaacaaaaattaaccgagtggatgctttatgcgcagaaagtcgaatctacagacacctccagcctgccagtaacatttcccgaacaacctgaatga

SEQ ID NO: 30677 - DNA, 405 bp, Escherichia coli
atgaacgcaaccacccagaatcaacgctatgccttacaggaactggaaaaagaggcgctgatgggcgccgagggcgaagagaccttcgcccgcgaagtgcgctgtatcgacctgtcgaactttgccgcaagaaaaaatgacattgccgaacaactgtgggaggcggcggtagagattggcttcttccaggtcagccatcacggtattccgctggcggatatccgccagcggaataccgtgatggctgacctggaagaagccaatctctaccgccgcctcccacagttgttcggcaatgtcattttttcttgcggcaaagttcgacaggtcgatacagcgcacttcgcgggcgaaggtctcttcgccctcggcgcccatcagcgcctctttttccagttcctgtaa

SEQ ID NO: 30678 - DNA, 297 bp, Escherichia coli; identical to SEQ ID NO: 19006

SEQ ID NO: 30679 - DNA, 354 bp, Escherichia coli
gtggctgatttcgataacctgttcgatgctgccattgcccgcgctgatgaaacgatacgcgggtacatgggaacgtcagccaccatgacatccggtgagcagtccggcgctgtgatacgtggtgtttttgatgaccctgaaaatatcagctatgccggacagggcgtgcgcgttgaaggctccagcccgtccctgtttgtccggactgatgatgtgcggcaactgcggcgtggagacacgctgaccatcggtgaggaaaacttctggatagaccgggtatcgccggatgatggcggaagctgtcatctctggcttgggcgtggcgtgccgcctgccgttaaccgtcgccgctga

SEQ ID NO: 30680 - DNA, 324 bp, Escherichia coli
atggtggtcgcaaaattcgggtcgtttcccagcgccgccgctaactcgttcagcgtattcagtgcgtcaggtgacgaatctacaagtgcggcaatcgcggccataacgaaagccgtgcttgcgatttgggtattattcgttccctgtcgtgcagttggtgttgttggcgttccggtcagtgccgggctgtttaatggggctttcttgttcgtttcatccattaccgccttaaccgcttttggtgtcgctgccagcgtttcagacgtgctgttggttgcactgctgagctggactatcccttttcgtgccgtcgtggcgtcctga

SEQ ID NO: 30681 - DNA, 303 bp, Escherichia coli
atggcggggccgtctgtacgcgtgaatgaatggttcagcgcgtatgcgatggtgggtgtggcttacagccgtgtgtcgactttctccggggattatctccgcgtaactgacaacaaggggaaaacgcacgatgtgctgaccggaagtgatgacggtcgccacagcaacacgtctctggcgtggggggctggcgtgcagtttaacccgaccgaatccgtggccattgatattgcttatgaaggctccggcagtggtgactggcgcactgacggtttcatcgtgggtgtcggttataaattctga

SEQ ID NO: 30682 - DNA, 486 bp, Escherichia coli
gtgactggaaatgcagcaatcctcgacatgtgctgtggcagtcgcatgttctggttcgataagaatgacgaccgggcgatatttagcgatatcagaaaggaagagcacacattatgtgatggacgacgcctgattatcagtcctgacctgatagctgattttcgtgcactaccatttgcagacgcatccttttcgatggttgtattcgaccctccgcatcttgagcgtgttggtgataacgcctggatgggaaagaaatatggacgactgaataaagatacctggcgtgatgatttgcggcaggggtttaaagaagcctttcgggtgttgtggccacacggcgttctgatttttaaatggaatgaaacgcaaatacctgttcgccagatattggcactgaccgacagaaagcctgttatcggtcaacgaacaggaaaggctgacaagacccactggattatttttatgaaggagggcaaccagtga

SEQ ID NO: 30683 - DNA, 591 bp, Escherichia coli
atgaacaaataccgacttatttacgcagatccgccttggcaatatcgcgacaaagccaacgatggcaatcgcggtgctggacataaatacgatgttatgaatgttcaggacatttgccgactgccagtatgggatttagcggatccagaatcttgcttgttagcgatgtggtgggtgccgacacagccagccgaagcgctaaaggtagttgaggcatggggattcaggttgatgactatgaaaggctttacctggcacaaaaccaataagcacaaaggcaacagtgcgatcggaatggggcatatgaccagggcaaatagcgaggattgcttgtttgctgttcgagggcggttgcctgagagaatggacgcttccatatgccagcactttaccgcaccgagaatggagcacagtgcaaaaccaccgatcgtaatagacatgttagctaagttgcttggcgacgtgccgcgctgtgagttatttagccgcgacaaagtgaccgggtgggatatgtggggcaatcagtgcgactccgattttgaactggctaccggcatggcgattaaaccatgcaaaatggtgatcgcatga

SEQ ID NO: 30684 - DNA, 330 bp, Escherichia coli
gtgttagaaatagtcgtactcgctcttgggatatcctgttgcgtactatatgcagggttagctgccctcaagaaacaggttaaggaattagatcgctcacatgaaattgatacaaaaattgcgcgattaacagaagagaataaacacttaaaaaattccataaggacactaactgatgacaactacaaactgtcccatgcattggctaagtgggaaatagtaagttatgaaagaatgaccgacatgattttttcgtcttatatggctacaaaatctcctgaaacatcaggaaaagcaataattgcagccattgaaaagagaattaaatag

SEQ ID NO: 30685 - DNA, 225 bp, Escherichia coli
atgaataaactattttctttgctcattccccgctgggaaacagatacagttgctttgcaagaaacagaacgtggtctggaaatagtttgcagctattccgacatcgatcctggtgaatttttcgatgcgatgtgcgagctgaaaacatttacctggctgaattggtcatggccatatggtgagccaattaacgttcgccgatttcagccgaaggtaagtatatga

SEQ ID NO: 30686 - DNA, 1191 bp, Escherichia coli
atggtggtggatcgttcttcttgccttcccgtgtattacccgactctttttttaacaacccaaatccgcaacagaggggatgctttttcaactatgctagcagcagctagcaaccttgttgtgctgctacgcttcttagataatcgtggcattgacctagaacagcgatttttgaccaaaaatttcttcaaaccttacgaactggacgatctgcgggattttgctcagcgcaagcagggaaagaagctgttagttgcttcttctacaccttggttggaagatgcgagtagcgatactgttgataacggaacattgcattcccggctgacaacatatgccaaatatttaggttggtatgcaatgcatattttaaagacggcagaaccgggcgttgtcgaacagatcaatgaaatgttgcagcacataaagatacgtcgaccgtcgaaaaagcgcagaaacagtgaatggcaagacaggtcattgaatgatgtgcaattggatacgctatttgaagttatcaagccgggatcagatttaaatcctttctcaatagatgttcagcgtcgcaatcggctgatgatcttacttctgttttatcttggtattcgaggtggggaattgttaaacatcagaatacaagatattgattttagtactaacaggatccgtatatttaggcgagcagatgagctagctgattctagaaccaatcagccccatgctaaaacgagagaccggctcttgccattggctgaatccctagttcaagaactacatagttatatcatccaagatcgccggaaagtccgaaatgcaaagaaaaatgactacctctttgtcacttataagctagggccaacagttggaaaccctatctctaaagggggatatcataaaatcttttccgtggtcagggctgtatcaccacaattgtatgcagcgacagggcattcgttccgccatacatggaatcgaaagttttcagaaagaatggatgccatgaatgagcaagtcagcgaggaacgccaagagcagctccgttcttacttaatgggttggagagatggttcgggaactgcagcgacttacaacaagcgtttcattcagcaaaaagggtttgaggccgctttggcattgcaggaaggtaatggcactcgcttgccaaaggacatgaagaatgatgacgagtaa

SEQ ID NO: 30687 - DNA, 2034 bp, Escherichia coli
atggctgagattttccagtttaaaccaaaggctacgctgacagcagcacaaaaccttggagtattcatatccaagtgccgagtacaattgattgtattcggttccgatctgaattgggaagctcctgtttggccaaacataacagtgtttgccaagctaggcattattacgcgaacacctatgcagggagaggtacaagaccctgcgttcattgatttcgccaaagcctattttcgttaccagcagggacatcatcccacagggacaaagaatgaaagtaaggccctccgtgcgattgaggcggctttaattcaagtaaatggaaatgcaaatattgatggtctgtcgatttcagtactggatgaagcatctgaattggcaaggcagcactactctgatggtgctgcatatcattgtggccgagagattgagcggctggctaagtttgtcgttgaaaatcgacttgtatcaagtgctgtgcaaaattgggttaatcccattaggcgtgcagaggacaaaaacaaaacaggcagagaggctaaaaaaaatagggaaaagaaactaccgagtgatattgccctcaacgcgcttgcggaaatttttgcaaacgatccaatggatgaaagagacatatttacaacatcggtgtttgctatgctgatgtctgctccttcgcgcatttctgaagtgttagcacttcctgcagattgtgaggtgtttgaaaccgatagcgaagatatagaacgctatggttggcgtttctttgcaggtaaaggctatgaagggggcattaaatggatacccactgtaatggttggcgttgctaaaacagctatcgctagaaccaaaatgttatctgagaatgctcgacagctggccaagtggattgagatacacccggataaattttaccgccatgctaactgtcctgatgtcgctgatgatgagccgttgacaatggaacagtcttgtatggctctcggtcttgcttgtaaatccaaaaaacaatgtcgttcttctctctttaatcgagggttagctcaagaagatggttcgcacacactaaaaagcctgtggcgccatgctatggcgcgattgcctgatggttttccgtggtttgataaagacaagggaattaagtacagcaatgctttgtttgcacttaatgtaaatcagttccacgggaatcgccgatgtataccgattgaattgtataaaccaaccaataacttctttaataatgatctgacgcctcgggagactttgaatggaaaacatgccagtatctttgatcgctataattaccatgctgaaaacggtgaacgggttaaattaacctcgcaccaagctcggcacctacttaacaccatagctcagcgtggtgggctctcaaacttggaaattgccaagtggtctggtcgggcagatatgaaacagaatcgagcttacaaccacatgactgaatatgagttggttggcatgtctgaacgcctcgatccctcaaaaggtctatttgggcctgctggagatgtggctaagcaccttcctgtgactattcaagagttcaatacgttagatcatgccgcagtccatgtgacggagtatggctactgcgtgcatgattacaccatgggcccttgcgagaagttccgagattgcgtcaattgtactgagcaggtttgtatcaaaggcgaggatacagaaatattggatcgaattaagaaacgtttggtgaagtcggaacgaatgttttgtattgctgatgcagcggtagaacgcggcgagatgggggctgatcgctggtatcaataccacaagaaaactgtcacccggcttcgtgagttagtcgctattttagagaatccagacattgaaaatggtgcccagattaagctccggggcaatgatttcagccagcttcgccgtgttgtcgcaaagacgtctattgcggccatcaagcaaaaaggcaaagaaagtgaagaagctgtgatgttagatgatttgacaactttgttaggaggtggccttggctaa

SEQ ID NO: 30688 - DNA, 846 bp, Escherichia coli
atgtcaaacatcacaatctcccatccggaagtggtcaccgggaatacggacgttatctgctcaacctcagtcagccacattctggctgtacgaaagagtacactgttgcaaatcgacatacttatccggcaactggctgaaatctcagcaatgacagaaagtattggcggtaaaaccgcactggactgggcgatgaaacaggattttcgctgcggatgctggctcatggagaaacctgaaacagcaatgaaagccatcacccgcaaccttgaccgcgaaatctggcgtgacctgatgcaacgttccgggatgctgtcattaatggatgcgcaggcccgtgatacatggtaccggtcactggagtacgataattttccggaaatcagtgaagcgaacattctgagcacatttgaacaactgcaccagaataaggatgaggtgtttgagcgaggggtaattaatgttttcaggggactgagctggaattacaaaaacaattcaccctgtaaatttggcagtaaaattatcgtcaacaatctggtgaggtgggacagatggggatttcatcttatcaccgggcaacagactgaccgacttgccgacctggaaagaatgctgcatctgttcagcggcaaaccgatccccgacaaccgggaaaacatcactattcatctggatgagcacatccggtctgttcagggtaaagagtgctatgaagatgaaatgttcagcatcagatactttaagaagggctccgcgcacatcacgttcaggaaaccagaactggttgatcggctaaatgatattatagccagacactatccggaaatgttaccttcacaatag

SEQ ID NO: 30689 - DNA, 552 bp, Escherichia coli
atgaaactcaaacccatgggcatccccggtcaggcaccaagacacgttaaacaatggacgaaacaggaagatgcgttgctgataagcatgtacccgaaacacagcatcagggaaatgacatccagacttaatcgctcatttcatgcaacggggcagcgccttatcaccttgcgcaagcgagggctgattgggcggaaacgccagcggctggatgaaaaggcaatagcagaaataatcagcaaccgccaccgaaaaagtaagagggatatggcgcgggaaatgaaatgtagcaaatgcaccatacaaaaaatactccgcgatcgtggttacagcgcaatgaagtgtggaggcatacatcatgctgctaaatacgacgatcatattgttcatctggtaactgaattgcgtgatgggcacggcatgccattcagggaaataagcagacatatacacaaaatcacagggatacaggtggcatacagcacagtatggtggctttacaaccgccgaaccgccgccgacgccgtgctgtacgagctattaccaaactga

SEQ ID NO: 30690 - DNA, 576 bp, Escherichia coli
atggctttcagaatgagtgcagaagcacaaactatccgcgtatttaatttacttgatggaaccaatgaatttattggggaaagtgaagcgtatattccaccgtatacaggtctgccagcaaacagtacagatattgcaccacctgatattcctgctggttatgcagccgttttcaatgcagatgaaatgaaatgggaactgatggaagaccatcgcggaaagaccgtctatgaaacgaaaacaggagcagccatttatatttctgaacttggcgcattacctccagacgtgacagccatttccccggagggggattatcagaaatggaacggaaatgcgtgggtgaatgatgagaatgcagagcgtgatgcacttgtcagagccgccgaatctcagaagagagaacaaatcgcttatgcgagtaagatcattgctactttgcaggacgctgttgatttagatatagcgacagaagacgaaaagataaacttgacacgctggaagaagtaccgtgtattggtgaatcgtattcaaccagaaaataccaccgatattgattggccagagcaaccatga

SEQ ID NO: 30691 - DNA, 381 bp, Escherichia coli
atgcgccgggtgggcaaacgcatcggagcaaaccttcatcgcgattataatgttgagattcctttaacagtgagtatagggccaggcttagatattgctcacttatcaggtattgttattacagaaaactgtgtgatagggagaaatctacatataaagcaaggtgttactattggtctaagaaccccttccaatgaggcaatgattactattggagataatgttgatataggttgcaattcatctatccttggtgggcaagttaatatcggtgataacgttacgataggtgctcatgctctggtaacaaaatctattccttccaactcaatatatataaacgaaataactcctgttataagacaaaaaaaggcgcagtaa

SEQ ID NO: 30692 - DNA, 291 bp, Escherichia coli
atgccaacgtatctcgccagagtagaactatataatgctgagccagaggattacgaagggcttcataaatatatgctctcactaggattcaggagaacgatcccccatggagatggttcgtataatcaactcccggacggaacttatgtttccgaaaagggcggtgatatttatcaaattcgcagccagatatctgactatgcagaccgactatctaggtatcgcgcgtctgtttttgtttgcgaattcagtcaatgcgcatggtatttataccccgccaagacccggtga

SEQ ID NO: 30693 - DNA, 198 bp, Escherichia coli
atgtttaacagcctgccggacgggctgtcctaccttctcaatccggttgacgccgggttaattccttatacatcacttaaagatggctctgtcgatttgtacgacattgctctcttgaatgaccatctggcggtaaaagcggataaccagcggcgcattgagaaatggagagaggataatgaacgccgagactattaa

SEQ ID NO: 30694 - DNA, 597 bp, Escherichia coli
atggatttagttctttctgcccttagttacatagggaaaattttttccagtatttgggaatccagccctacgttttatccaggtgctgcgggtgcgcttattgcagtgattagcatacgaaatcagagaaagacatcgcgcgaaaaaaactcattggattttgaggctgcatataaacgtaacaaggacatagttgatgcgtggtcagaagtgttacgcattcataaggatcgccataattttccgatcgctgattggggaaaagaagaatattctcaaacagatggagcaaaagcattaaaactcatttttaatgagtgggagcgttgtgccaatgccgtgaataacggtttgtatgatgagcggtatctatatcgtgtttatggttctaccttaatctttcttgatgtccattttgaaccttatatggaggagtgccgcaagcgtaatcctaggttttaccgtaacttaaaatgtcttgctctccgatggcgtgttaggcgagcgtatgaagatcaggaaaacgatagtagggaatacaaaaaactgctcaatgaggctaagcgattggtagacaaattgcataccaaattctga

SEQ ID NO: 30695 - DNA, 285 bp, Escherichia coli
atggatatcatttctgtcgccttaaagcgtcattccactaaggcatttgatgccagcaaaaaacttaccccggaacaggccgagcagatcaaaactctactgcaatacagcccatccagcaccaactcccagccgtggcattttattgttgccagcacggaagaaggtaaagcgcgtgttgccaaatccgctgccgataattacgtgttcaacgagcgtaaaatgcttgatgcctcgcacgtcgtggtgttctgtgcaaaaacccgatggacgatgcctggctga

SEQ ID NO: 30696 - DNA, 1119 bp, Escherichia coli; identical to SEQ ID NO: 249

SEQ ID NO: 30697 - DNA, 1146 bp, Escherichia coli
atggcaaaggtatcgctggagaaagacaagattaagtttctgctggtagaaggcgtgcaccaaaaggcgctggaaagccttcgtgcagctggttacaccaacatcgaatttcacaaaggcgcgctggatgatgaacaattaaaagaatccatccgcgatgcccacttcatcggcctgcgatcccgtacccatctgactgaagacgtgatcaacgccgcagaaaaactggtcgctattggctgtttctgtatcggaacaaatcaggttgatctggatgcggcggcaaagcgcgggatcccggtatttaacgcaccgttctcaaatacgcgctctgttgcggagctggtgattggcgaactgctgctgctattgcgcggcgtgccagaagccaatgctaaagcgcatcgtggcgtgtggaacaaactggcggcgggttcttttgaagcgcgcggcaaaaagctgggtatcatcggctacggtcatattggtacgcaattgggcattctggctgaatcgctgggaatgtatgtttacttttatgatattgaaaacaaactgccgctgggcaacgccactcaggtacagcatctttctgacctgctgaatatgagcgatgtggtgagtctgcatgtaccagagaatccgtccaccaaaaatatgatgggcgcgaaagagatttcgctaatgaagcccggctcgctgctgattaatgcttcgcgcggtactgtggtggatattccagcgctgtgtgacgcgctggcgagcaaacatctggcgggggcggcaatcgacgtattcccgacggaaccggcgaccaatagcgatccatttacctctccgctgtgtgaattcgacaatgtccttctgacgccacacattggcggttcgactcaggaagcgcaggagaatatcggcttggaagttgcgggtaaattgatcaagtattctgacaatggctcaacgctctctgcggtgaacttcccggaagtctcgctgccactgcacggtgggcgtcgtctgatgcacatccacgaaaaccgtccgggcggtgctaactgcgctcaacaaaatttttgccgagcagggcgtcaacatcgccgcgcaatatctacaaacttccgcccagatgggttatgtagttattga

SEQ ID NO: 30698 - DNA, 2262 bp, Escherichia coli
atgtcgcaacataacgaaaagaacccacatcagcaccagtcaccactacacgattccagcgaagcgaaaccggggatggactcactggcacctgaagacggatctcatcgtccagcggctgaaccaacaccgcctggtgcacaacctaccgccccagggagcctgaaagcccctgatacgcgtaacgaaaaacttaattctctggaagacgtacgcaaaggcagtgaaaattatgcgctgaccactaatcagggcgtgcgcatcgccgacgatcaaaactcactgcgtgccggtagccgtggtccaactctgctggaagattttattctgcgcgagaaaatcactcactttgaccatgagcgcatcccggaacgtattgttcatgcacgcggatcagcagctcacggttatttccagccatataaaagcttaagcgatatcaccaaagcggatttcctctcagatacgaacaaaatcaccccagtatttgttaggttctctaccgttcagggcggcgctggctctgccgataccgtacgtgatatccgtggctttgccaccaagttctatactgaagagggtatttttgacctcgttggcaataacacgccaatcttctttatccaggatgcgcataaattccccgattttgttcatgcggtaaaaccagaaccgcactgggcaattccacaagggcaaagcgcccacgatactttctgggattatgtttctctgcaacctgaaactctgcacaacgtgatgtgggcaatgtcggatcgcggtatcccgcgcagttaccgcactatggaaggcttcggtattcataccttccgcctgattaatgccgaagggaaggcaacgttcgtacgtttccactggaaaccactggcaggtaaagcctcactcgtttgggatgaagcacaaaaactaaccggacgtgacccggacttccaccgccgcgagttgtgggaagcgattgaagcaggcgattttcctgaatacgaactgggcttccagttgattcctgaagaagacgaattcaagttcgacttcgatcttctcgatccaacaaaacttatcccggaagaattggtgcctgttcagcgtgtcggcaaaatggtgctcaatcgtaatccggataacttctttgctgaaaacgaacaggtggctttccatccagggcatattgtccccggtctggatttcaccaacgacccgttattgcaggggcgtttgttctcttataccgatacacaaatcagtcgtcttggtgggccgaatttccatgaaattccgattaaccgcccgacctgcccttaccataatttccagcgtgacggcatgcatcgtatggggatcgacactaaccctgcgaattacgaaccgaactcgatcaacgataactggccgcgcgaaacaccgccggggccgaaacgcggcggttttgaatcataccaggaacgcgtggaagggaataaagttcgcgagcgcagtccatcgtttggcgaatattattcccatccgcgtctgttctggctaagtcagacgccattcgagcagcaccatattgtcgatggtttcagttttgagttaagcaaagtagttcgtccgtatattcgtgagcgcgttgttgaccagctggcgcatattgatctcactctggcccaggcggtggcgaaaaatctcggtatcgaactgactgacgaccagttgaatatcaccccgcctccggacgtcaacggtctgaaaaaggatccatccttaagtctgtacgccattcctgacggtgatgtgaaaggtcgcgtggtagcaattttgcttaatgatgaagtgagatcggcagaccttctggccattctcaaggcactgaaggccaaaggcgttcatgccaaactgctctactcccgaatgggggaagtgactgcggatgacggtacggtgttgcctatagctgctacctttgccggtgcgccttcgctgacggtcgatgcagtcattgtcccttgcggcaatattgcggatatcgctaacaacggcgatgccaactactatctgatggaagcctacaaacaccttaaaccgattgcgctggcaggagacgcgcgcaagtttaaagcaacaatcaaggtcgctgaccagggtgaagaagggattgcggaagctgacagcgccgatggtagttttatggatgaactgttaacgctgatgacagcacaccgcgtgtggtcacgcattcctaagattgacaaaatcccggcgtaa

SEQ ID NO: 30699 - DNA, 639 bp, Escherichia coli
atgcgtacacgaattgactatcttgcggataaatacagttttactgaactgaatgaacgtccacaccttcgccggcagtggcaggatgttctggaggagtgtcggcagacagaggccgggccagaagaacggctgcggattgccctgttgaatgtggattacgtcaccagttttgaactgccatttcggttgctgcttatccgtacaccacaacagattgcagcgttgcgtgaagaatgggacatcagccagaaaaatgtgctgtttaacgataaacggtttggttgcgtgtacagcctgaagtccagtctttctggtgtaccggatacataccggtatcatctgtctcaccgtattcgtcgtgtggttgcgaatgaaaacacatcattgccatatcagcagattgcccgggaagtgaaagccccccgggaacgactgaagtatgcgctggagacgggattgcaggtgaccgcactggacggcctgttctggttcggtagccagcgcattgctgcagatatacagagactgagaaaatctggtatgaggattaccacttctgccataagcgtgtatgactctattaccgcaacccggagattgttcccggtataccggattgtcgcgaataataaataa

SEQ ID NO: 30700 - DNA, 1380 bp, Escherichia coli
atggggagtaattatatagaaatgcgtcttgaagattgtatggacgctattattgattacaggggtaaaaccccaaaaaaagttgataacggcatccccttaatcacggcaaaaataattaaaaatggcagaattcacgaagtaaatgaatttattgctattgatgattatgatgactggatggttcgtgggttaccattggaaggcgacgtagtgctaactacagaggcaccactaggtgaggtagcacaattagatgcacgcaaagtagcattggctcagagagttattactctaaggggtaaaaaaggaatcctagaaaatgattaccttttatatctattgcagtcttcttttgtccaaaaccagctggatggaagagcctccggaagcactgttacaggtattaaacagtctgaacttcgagaaataatactaagactgcctccagtctctttacaaaaatcaatttctcatcaattaaagtgtcttgataaaaaaattgatttaaataataaaattaataaaaccttagaacaaatgtcccaaaccctgttcaaatcctggtttgtggattttgatccggtgattgataacgctctggatgcaggaaatccaatccaggaaaccctgcaaactcgcgccaagttgcgtcaaaaagtacgtaatagtgcagattttaaaccacttccggcggaaatccgctcgcttttcccaagtgaatttgaagaaacggagttgggttgggtgccaaagggctggaatatatccccggctggtgaagagtttattattaaaggtggttcaacaccaagtacagccaatgaagatttttggattaatggaactattcactggacttcaccaaaagatttgactggaaatcaaagtaaagttttgctagatacggctaaaaagattacgccattaggactaaccaaaatatcatcagggcttttacctgtaaatacagtattgatgtcatcacgagctcctattggatatttagcgatcagtaaagtaccaatggctataaatcaaggatatattgcaattccttctgctaaacatttatcaccagagtataccatctactggcttgacaatattatggatgatatcaaaggtatggccggaggaacgacttttgcagaaataagtaaatcagcttttaaaacaattaaattacttattccttcttcggatataattaccgagttttcacgtataactcgcaaccactttgatatggttgttcaaaatacaaaagagatagactcactaaccaacctccgcgacaccctgctcccgaaactcatctccggtgagctatccctggaagatcttccggatctcagcaccgatacagaagctgcataa

SEQ ID NO: 30701 - DNA, 126 bp, Escherichia coli
atggagtatctcatcagatactccttctttatctattttgtaagagccaaaatagataaaattatgttacgtataaccagctcatttaaactatctggtctgtttcctccggttctacaaaaatag

SEQ ID NO: 30702 - DNA, 1125 bp, Escherichia coli; identical to SEQ ID NO: 9068

SEQ ID NO: 30703 - DNA, 753 bp, Escherichia coli
atgacttcccggattgctcaggcgggcacgtatggcatccactgcgctggcgtccataatgtccgtcagttgtttaccggcccgttgcagtttgaacgtcagaaactcttcaaggttattgtccagaggcagaagttcgaccacctcacagcgctgaacgacttcacggacttccatattgcgttcagacagttttgtcgccagttccggctggccaatcagcacgatggacagcagttttttgaaaccggactccagctcaaaaaagcgtttgaggtgtttcagtgtcggaatgggcagactgtgggcctcctcaatcaccagaacgtggctgaaccccgcctggctgctgtctttcaggacgcgatgcaactggcgaaagcgggcgtcctgactgcgtctgatgctttccagtggtgcgatggtactgataatggcttcggcaatcgctgctgccttcagggttttccctttcacatcgttgtcttccatagcgatgatgtatggctcgataacaattaccggcgcattctcgcggttgatacgttcagtcaggtcgcggcgcagcgtggatttacccgcaccggactcaccgatgacggccataaacccaccatgacgggctgtctggtacaacgcctcacgcacgtagcgaatgtccggggtggtgaacacatcatcagaaccctgcatggcttcgtcggcgaacgggtcacggaaaagaccaaacgcttttttggttgctggaaataa

SEQ ID NO: 30704 - DNA, 882 bp, Escherichia coli; identical to SEQ ID NO: 22787

SEQ ID NO: 30705 - DNA, 162 bp, Escherichia coli
atggaagaaaataatatgaagacggtcgctgtagttggcacagtgggtgttcctgcttgttatggtgggtttgaatcacttgttcagaatctaattgattatcaatctgatggtatacaatatcagatattttgctcttcaaaaaatataataaaaaattaa

SEQ ID NO: 30706 - DNA, 192 bp, Escherichia coli
atgactacttctcctttcattctcgaatttcacgataatgatagagataatcattatcaattgattgtgtcagtaattttgacttacatcacactttcatggtttaatcaggtgatttatttaatgaaaagagtgtgtttgtggatgtattgtgtatatgtcttaccgggcatctgttcttacattaattaa

SEQ ID NO: 30707 - DNA, 351 bp, Escherichia coli
atgaaaaacctgaaaaaattcattccccctgttaaaaaacctcgcctcagcggctggctgctgacctcagtgctgttgctgggcaccatcgctctggtctcaccacagcagctgcctgttgtgatctacaagctggcactcatcacgctggcagcagtgctgggttactggcttgaccgttcgctcttccccaaagcccgtcccggtcagtacctgaaacatgacgacaggctgatggctgatgggcgtttcccggtacagaccggccttcacctggtgttttctgctgcgttaatccgccgtgcactgattgttgcagcggtctgcctggctgttgcgatggggctttaa

SEQ ID NO: 30708 - DNA, 207 bp, Escherichia coli
gtgtcccgcgccatctacccggacaccacgcaactggagctgcgccgtgagcttgattacctggcagatcgcaagatggtggaactggagaataggccttccggtgactggtttgccgatctgagtcgccttggtgtggatattgtggaatacaccgtggaatgcggccccggtattgcccgcccggaaaaatactggagtgagtga

SEQ ID NO: 30709 - DNA, 513 bp, Escherichia coli
gtgatccgtaatgcccggcttgaatggggactgtctgcgccggtggctgatttcgctgcgcaactgcatcaggaaagcggctggcgacctgatgcgatctcgccggttggcgctcagggactggcgcagttcatgcccgccaccgccgactggataagtcagttgatgccggggcttaacagccgtgagccatttaatccggcatgggccatccgggcgctggtcagctatgaccgctggctgtggcagcgcgtcagcgccgccagtgactgcgagcgtatggccatgacactgtcgggctataacggtggtctgggctgggtacagcgggacaggcggcttgcatcacaaaaagggctggacagcacccgctggtttggtcatgtcgccacggtgaatgccggacgcagcactgccagctggcgggagaaccgtcattatccccagcgcatcctgttcacgctggccccgcgttatctctcatggggaggggcaagctgtgtgggtacgtaa

SEQ ID NO: 30710 - DNA, 765 bp, Escherichia coli
atgaccctgcgtcgcctgccggatgaagatccacagaatgtggcggacccggcttaccgccgccgtcgcattatcctgcagaacatgcgagacgaagagctggccattgctcaggtcgaagagatgcaggccgtttctgccgtgctcaagggcaaatacaccatgaccggtgaagccttcgatccggttgaggtggatatgggccgcagtgcggcgaataacatcacacagtccggcggcacggagtggagcaagcgtgacaagtccacgtatgacccgaccgacgatatcgaagcctacgcgctgaacgccagcggtgtggtgaacatcatcgtgtttgatccgaaaggctgggcgctgttccgttccttcaaagccgtcaaggagaagctggatacccgtcgcggctctaattccgaactggagacagcggtaaaagacctgggcgaagcggtgtcctataaggggatgtatggtgatacggcgatcgtcgtgtattccggacagtacgtggaaaacgacgtcaaaaagaacttcctgccggacaacacgatggtgctggggaacactcaggcacgcggtctgcgcacctatggctgcattcaggatgcggacgcacagcgcgaaggtattaacgcctctgcccgctacccgaaaaactgggtgaccaccggcgatccggcgcgtgagttcaccatgattcagtcagcaccgctgatgctgctggctgaccctgatgcgttcgtgtccgtacaactggcgtaa

SEQ ID NO: 30711 - DNA, 231 bp, Escherichia coli; identical to SEQ ID NO: 25247

SEQ ID NO: 30712 - DNA, 183 bp, Escherichia coli; identical to SEQ ID NO: 10063

SEQ ID NO: 30713 - DNA, 195 bp, Escherichia coli
atgactcatgtggaggccgcgaaagccctgcgcgataagttcagcgccgacggccttacctggacgccggaacattaccgccagttaacggcacagtacccggacggcgtaccggaagccgcactggatgaagtcatggccacgctgaccacaccggccagcagcagtgttatcagcattgttaacggcaactga

SEQ ID NO: 30714 - DNA, 195 bp, Escherichia coli
atgacttatgtggaggccgcgaaagccctgcgcgataagttcagcgccaacggctttacctggacgccggaacattaccgccagttaacggcacagtatccggacggcgtaccggaagccgcactggatgaagtcatggccacgctgaccacgccggcccgcagcagcgttatcagtattgttaacggcaactga

SEQ ID NO: 30715 - DNA, 192 bp, Escherichia coli; identical to SEQ ID NO: 22845

SEQ ID NO: 30716 - DNA, 801 bp, Escherichia coli
atgcttgtgaccatgtcagataaagaactcagtcggatcaatgtcattcagtcagttgttgaaaagcgcatgcgccgtcgtgatgcagctcagctgcttgctctgaccgaacgtcagacacagcgtctgatgaaccgctttcgcgaatctggcgcagcaggactggcaaaccttcggcgtggacgccccggtaatcacaggcttcctgagtcactgaagctgcgtattctttcgttacttcacgaccattacagcgactttggaccaacactggccgcagaaaaattacgcgaacggcacaacatcaccgtatctgttgaaacgctcagaaaatggatgacggctgatggactctgggttccttactcacgtcgcaggccccgtgttcatcagcccagatatcggcgtgactgcttgggagaacttgttcagattgatggttctccacatgactggtttgaaggccgggcgccgaaatgctgcctgctcgtctttattgatgacgcgactggccgcctgatgcacctccgctttggtgagattgaatcagcctttgattacatgatggccacccgcgagtatctcgaacaacacggcaagccccttgcattctacagcgacaagcacggcattttcagggtcaataatggtggttcaaccacaaccggcatcacacagtttggccgtgtactttctgaactggggatcgagttgatttgtgccaacagtccgcaggctaagtccgtgtggagcgagcaaatcagacaattcaggaccgacttatcaaggaaatgcgtctaa

SEQ ID NO: 30717 - DNA, 612 bp, Escherichia coli
gtggagcgagcaaatcagacaattcaggaccgacttatcaaggaaatgcgtctaaaaggaatcagcagcattgaagcagcgaacgcctggctggctactttcatagctgacttcaatcgtcgtttcgccaggcccgcaaagtatcccaaagatttgcatcgcccggtggcagaaagtggcgaagagctggatgatatatttgcatggcaggaatcgcgcaagctatcgaaaacactgacattccgatatgacaaaatgatatatctcgttgacccaacagaagaaaatgctcgtatcgctggcgagaaaataacagtctacgactatcctgacggtacactggcattcaaatacggttaccgttcactcaaatatcaggtgttcgacaaactggaatgcgttgatcaggggcaaatcgttgataacaaacgtcttggggctgttttaaaactggctcaaagcaaaatggatgaacttgaacgcgatggcaagcgtgaccggagcaaaaagatgcccaaacgacgggcccaggccagagttcaggaacaactcagggtgattaatccggttctgataaatccggatgaattcagggccagtcggaaacgctag

SEQ ID NO: 30718 - DNA, 1941 bp, Escherichia coli
atgagcaagaaggagttgagacccgaactgataacagtaggcaagctattcacgggctattatctgattcctatttatcaacggaactatgcttggcgggccgaacagattgagcaacttatcagcgatattcaaggctcggtggttgggggccaggacgactattttcttgggaaccttgttgtaatcaagcggggtagagaggacgagttcgaggtcatagatggacaacaacgacttacaaccctctatctgcttctgaccttcctggagcaagacggtgagggtgggaagctgtcgattggccatgcaggccacttgcaatatgagtcgcgcgcacgggcaacggaagccctgcggcgagtagcacaggaggcggctaaggggcacgtccgaccgcagggctccacgagtaatgcagatgctggcatccatgaaggctacagcatcatcaatcagttcttcaaacaaaatgaaacccttaatcgctcacgcgaaaaattctccgatttcttgctaaagaaggttactgtcgtccgtgcctcgctgccacccaataccgacctcaatcgctacttcgagatcatgaacactcgtgggcagcaactcaagcaggttgatattgttaaggctcgcctgatgagcaagctgcccaatcaatatgaacgcgaatgcttcgcgtgggtttgggatgcctgtgctgacatggattcttatgtccagatgtctctgacccgtggtgacaccagtttacgaaacaaagtatttggcgatgaatggtcctggctggaggtgaccagcttcgcgtcgctaatggaaagtcgtccgcaatccgacatcagttcattaaggcaatcctccgaaggggtatcgttgtccttggatgaggcgttgtcaaaatacgctaaagagatcgagtcaaattccactgaagacgagggcaacgagcggtttcgttcgactattgagtttccggcctttctgctacacgttctaagaattatgaaaggcgatgaggtcgaagacgaaggccagcttgacgacaagcgcctcatcaagtcatttgacgacgccgtaaataatgtacccgatgctaaagccgattgggtgcgtagctttgcatttatgcttcttaagtgccgtaacctcttcgatggcttcatcttgaagcgtcaattcacggcgaacatcggtgacgatggcgattggtctctccagcgattgaagaaaggcggtgcggacaagaagccagccccgacgtacatccatgttttctcggccagcaatggaaacttggaggaggacagcggtgctgacccacatacccgagatgtattgttgcttcagtccatgcttcggattacctacacttctccgcgaacgatgcactggattaccaaagttcttcgctggctatccgttaaagcccctcaagacgcgaaacatgcggatcttgccgatttgttgaaggggtatgcccgcagcaaggttaaagagacattcccctttgaggaagatcagcaaccacaagggtttggtatcagccgtatcgtcttttcatacctcgactatcttctgttgagtgattcctcaaaacgagatttcaaatttcagttcagaacttccattgagcacttttatccacagcatccggacaaagaacagtcgggcgcggctgtttcaggttctagccttaacctgcttggcaacctcgcgctcgtaagcgtcagcgcgaactcaaaattcagcaatagccttcccagagcgaaggccgaaaacttcaaggatacgattgaacttcaaagtcccaagctcaagagaatggcggaaatcgctcgaaatacaagctgggacgatcagcagataacagcacatcatgaagagatggtgacattgcttcgtgatgatgtaagtctggtggaggcaagcggaagatcctaa

SEQ ID NO: 30719 - DNA, 1281 bp, Escherichia coli
atggcgattaacggagaggacggtgttagtgcagtcaccgtggatgaactactcaagcaaggccttcggataccgaactatcaacgcccatacagttgggaagtatcgaccgctctacaactggtggatgatcttagcgaagctcttcgagagaccgaaagaaaagatattccctatgttttgggtgcaatcattcttcacgatgatggtgagtatctcaatgtagtcgacggacagcaacgtctgctgactttgcgaatgattcttgcggccttagatccgataaatcatcagatttcggtgtctggtaacagcgaaactcctgtctccctggtttggatagagcttcaaaggcgcctgtcgcagttggaagataaaaaagaatttttggattttatctgtcacaaatgtcagttggtgcgtattgtgacggacgatattgatgaggcatttcgtgtctttgattcccagaactatcgcggcaaaccgcttgcccctcatgacttgctcaaagcacaccacctccgcgaaatgcacgatgagtccgctgctatgaaagtggctgtcgttgaggcttgggaagccgtaaatgatgaggatctggacaggcttttttctacttttttataccggatatccaagtggtcacgaggcgaaagctcgctcgaatttgctattcgggacatcgggatgtttaagggaatttcatcacgatcccacagatcattttcgccaaatctgcgatatcaccttgcagcacaagccgctatgccacttctaagtgcatgggcggtgtcctctacacatgatgcacgaaatgccgggcgcagccgctttcagcttgatgccccgataatcgctgggcgctcatttttcgagatggtgacattcatgcttgacgaattgaagatactggaaaaagaggttatcgacagaggtttcaaaaactttggcccatctcaaagtcgctaccgctacgtgtacgaattgttcattgccgcgctgctttgctatacaaacaagtttggcgatgaagatgtggatgaagtgcgaaatagattattcgcatgggcatatgccttgcgggtcgagttacttcgtgtgcaatttgtatctgctgacaaccgagctcgaggtaaaaacgatgcaaataaatcgccttttgttttgctacgcaacgcgatgactggaagtgttgtccgcaaacttccaatagcaagtcagccatacaacgataaccacgaaaaggaactcgttgcttttatcaaggggctgcaatga

SEQ ID NO: 30720 - DNA, 798 bp, Escherichia coli
atggctatatcatcatataatacagttacagataatttttctacgctgactaaaatgacggatgaaaataatggattgcaaaaaaaatcagaaaaattttgtttgtctgttggtaatgaggagaagtattcaataacccataaagatataacaaaccttataactggtgatagacaatcttttcttaaactcactctttgggaatttatactcgatctctttcccatgtatcatattaaggaggctaaagaaacaattgtagaatttgtaacgaaaactgaggacaaagttaagagatttgagagaattaaatatctcgccattccagaagaaaaatggcgctttagtgcgactacagaatttacagtagatgagaataaagatattattgttagtagagtatttaaaataaatattaactcaaaagatcatcataatgaagctgaagaaaataaaatgcattctgtattttcagaagtactcagcttggatatttataagcatgatatacaatttgacgagaaggctttacaatcagggatattgaaaatgcagttccctaatgataatgaaaagctaagcgtatatttaaaaaataaaatcccctttgaaaatatgacaattgatttatctgcactgaaaaaagatgttctggtatcgctaaaacagtgtcactttaaaaatatgacattcactggtaatatatcttacgagaaccttaatggcccagtatttgaaaattgttttttgagagttgtaatttcgagaatgtgtcccttgttggctttgataaagtga

SEQ ID NO: 30721 - DNA, 1626 bp, Escherichia coli
atgtttaaagggtgttttttgtatcaatgcgaaatgaaaaatttcaagatagagacatcaaaaatatactctataaatcaagatccccaaaaagggggtaagaaagtcggtgcatatctgtttatgcagtcatttgtatatgcaagtaatcttcaagatggagtgtgtaaagaagcaagtgttattgcaagcagtttattatcttgcaatatagcaaagcttgatggtgttggaatggatttcatagaaacttcgttttatagaaaaactagcgatcgttctagaaatagtaataatttttatgattgtgattttcgttatgttaatatgacatgcaaacgagatggaattcgtgaagatttacgagattatgattccagaaaatatttcggaaaaagtgaaaataaacttaatctggataaagatcttttagatgcaatccacgaaaatattttccaaaatatgaagactcattataatataaatgacgatatagataatcatctaaaacttaataattgctgtttatatgctgcttgtttgggcgagttaaccggtggaaatcctttgcatgattgtgaaattgatacttataccaccaggttaagtggtaatcttgctgcaaacactcaggttaaaattcctgtttatatgtcctatagaggagctatagctgaaaatgatactttacctttcatgaaaaagttaacggaaattgattcacggataaaagatattaatgaacatagcgataatttgaagaataattacaaaaaggcactagccgatttacaatccttattagttaatctgcataacatcatgcctggtgatgatgtaaaagattttcaacttaatgatgaaactataaaatatatcatagacaatgttttgtacaatagaaaaaaagatatagctaatgaaatagatattgataaagtgaatttcatgcacaatatctataataaccttgattggtatagacgttacgatgaaaatgggaaaataaaaacatatcgttctattaatccaaatggcaatagattttactttgattttaatgatttgcaatttctttactacgatcatgagaagaagaatggtcctaaagtggaggattttgtgaaaatgcaaaatgtttttttaacggtgaaaaactttaaggcagaagaaaaaataaaccaggagaagtatacagaaaaaccagcagatgtagcccgtgaaattgcttcattctttgacattgaacaatatttactgggggtcattgatagaaatggtaattatattactgagaattttactgctaaaatgaaaatgctatccaaacttactgtcgaaagaaatgctcagctcgaaagaaagatttattttgatgaaaagatgcttgaattaaatgataatgatgaaaaaggaaaagtcaaaatcgaaaatgatatagagaaaatagataaaattattgaagaaatagataataaaatcttggatctttcctctgaaacagagaggtttaagataaactttcaacaagaaaatagacttaatgatgtagttcaaggtatcagtcgttggctaaaagaaaatcatcttatggtggaagctattaagaaaactgatactgaataa

SEQ ID NO: 30722 - DNA, 390 bp, Escherichia coli
atggctaaggccaaatggcacaaactcccggcgttcaccattccgctgtttcaaagtgcacacgtctacctcgcaacaaccagagaacagtttcagcacgctgataaattccttggcggcagcggggatgagaagccattcaatcttgggcttgcaagcaactatgaaaacactgatacgggtgagcgatgctatctgattggagtattcgatcagcagatcgctacgctcgttcatgagtgcgcccacgtctgcttttacgtttgctctgatgtcggcgtgacgacaagccctgaagatgccaacgagacgtactgttacatgctggacaggatggttaatcacttcctgccattcattcaggagaaacaagatgtatcactggaataa

SEQ ID NO: 30723 - DNA, 216 bp, Escherichia coli
atggatgataacggaaaccaatgggtcaatgttgaacaccggctaccagaaagcaaagaaggaatgtggtctaaagaggttatagctcttactgatactggtgacgtgttcaaactatcatgtatgggctcttactggcagagaaccaaggcattcatcgattcaggagcaagcaaggttacacactggatgccgcttaattacccagatgattaa

SEQ ID NO: 30724 - DNA, 228 bp, Escherichia coli
gtgagtaaatcagaattcctccaaaagttagactcgctcgcttcagagtgtcacgcactggcctgccagctagacattggcgatgaacgcactgagatgtttgaaatatacaacgtgctgagaagccttggacgtagcggatatgcaagccagataagcaaaggtaccaacccactgttatgggcggttgacgataacgacgatgattgggatgaggatgatgagtga

SEQ ID NO: 30725 - DNA, 1065 bp, Escherichia coli
atgagtcaggttggtaatcattcattcgaatttccggcatcgcaaggtgtacagggtggtactgttacactcttccttaccataccaggaagatcgctggctcgtttcctcgcttcagataattacggccatacactggaacgctctcagcgagaaattaatccaaatcgagtacgaaaatttttaaattatctcactaacgcagactcaagaaatgagccttttatcattccccctctcgtaggtaactgtgattcgaatatagaatttgtaccgtttggcaacacaaatgttggtatagccagaattcccctcgacgccgaaataaaactttttgatggtcaacatcgtgcagctggcattgagatattttgccgaagttccccatcaacgctcatggttcccatgatgcttacaatgaatctgccgctaaaaacccggcagcagttcttttcggacataaataacaacgtttctaagccatcagcgaccatcaatatggcgtataacggccgggatgatattgctcagggaatgatatccttcctgacccaacatactgtatttgccgatataaccgattttgaacacaacgtagtgccattaaaaagtaatatgtgggtgagtttcaaggcactcactgatgcaacgtcaaagttcgccaggaacggcaatcaacaacttgaaatgggatatatagaatctgtctgggaggcatggattacactaactcagattgactcaatccgacatggtgtacaccacgctacgtacaagcgcgattatattcagttccatggagtaatgattaacgctttcggttttgcggttcaacagatgatggttaatcattccatcgcagaaataacttctatgatcgaaaaactatgtgcaactaccagctctgcagaaagagaggatttttttctgatggataactgggcggggatctgcacgaaagccagccaggaaaaactatctgttattgccaatgtggcagcgcagaaagcagcagcaaacagactgatacaagcttttaccaaaggaagtctggaatcaacttaa

SEQ ID NO: 30726 - DNA, 678 bp, Escherichia coli
atgaaagtcttaacaatttattcagttgtcggcatggctcttttactcgggggatgtacctctccgaagtacaattatttaccaaaaacagaaaattatagtgaacctcctgtaggaagcattaatacagcttatgtcggtgattcaatgattaagcagggggtgtcacagaggtttgaaggtctgaaggttaatgctcctgcgagaatttcctgggcgtatacgatcactccggggatgctgaaaaaggttggtgaggataacaaggctgattattactttctcacaaacggtgctgattcagccaatgtggaaaaggcagcccttgccgatatgtggcagggcatcatggtagaaaagaaaaagaatgccttatgtgtaataacagttttcggtgttaccaactgtgaaactaacatgcctatcgaaaaggttactctgaatatcagtggtgattcatctttccagcaagctctgctttacaacggaagggtcggaaacaaaatcaacattggatatcgtgaattttcatcgaatacagcacgcccggccttcaacaacgatgttgagtatgatctcgcggagtctaaaacaattggctataaaggggctaaattcgaagtacttgatgcgagtaaccaaagcataaggtatcgggtaataagtaactttagataa

SEQ ID NO: 30727 - DNA, 1122 bp, Escherichia coli
atgaaaacagataaattatacggaatagaagcgcttcgtggaattgcagctcttgctgtagctattggtcataatagaggtcttttcgggcaagtagatcctggttctttcatggacaagataaccgcgaatgctatatttggagttgaattgttttttataataagcggatttataatatcatactcaactaaaaacttagcaaaaacatctttaagaaataccgcttcatttcttgtaaagagattttttagaatttatcctgtttacgcaatagtattaagcgtttatgtttttcttttttaccacaatatttacacaggcgtatcatggggtggtgttttttctataaataatattataaaatcatttcttctcatccctttagatggctcaactctaccgccatattatgggtggggaacgctaattgtttcatggtcacttgggtacgagatatatttttattttattttcgcaatatccatgtcattaagtataaaatacagggtattaatcacatcatgttttctagttgctgtaagtacaattatttctctttactttaaccactcggtagtaattgacgcccaatcattcaatattgcaaaaacaggagtgttttctcatataggattcataggcaaccctatagtatatgatttcattttagggatgattatatcagagacaatgcctttacttaggcataaaagaatgaataatgctattataaatagtttatgcgttttcattctaggaatgatgtttgttttttggcttaatggggtgtctgaaggacatggtttgacgcgatctgcatatattgcatttctgattgttttatgtgttattattctagaaaataataaagttatttcattcaataaatcacttgttgctcttggtggaatatcatattcactttatctgattcatgttcctgttatacagtttattgagttttacggttccagcattggtgttagcactgaacatagatcgtttgccatttatatatcatcgctcataatttctataagcctatcttacttgatatataacgtaatagaaaaaccgtttataaatataggtcattctatagctaaaagaatatcttaa

SEQ ID NO: 30728 - DNA, 510 bp, Escherichia coli
  misc_feature (206)..(226): n is a, c, g, or t
atggcgctgaaaaaatattcaacgccatcgactttttatgcctttgcggcatcgtgcaatgcgtgtcggatgcggcgtgaacgccttatccgacctacggttctacccctgcgcaggcctgataagacgcgccagcgtcgcatcaggcaacgactgtcggatgcggcatatacgccttatccgacctacggttctacccctgcgcnnnnnnnnnnnnnnnnnnnnnacgccttatccgacctacggttctacccctgcgtaggcctgataagacgcgccagcgtcgcatcaggcaacgactgtcggatgcggcgtaaacgccttatccgacctacggttctactcctgcgcaggcctgataagacgtgccagcgtcgcatcaggcaagaccgtattaattcggcgtatagcccattaccacgccacttaagccagaaagttgcttcaactcacccagcgaacctttcagcttatctttcgaggcatctggcccaaccagaatacgggtaa

SEQ ID NO: 30729 - DNA, 1770 bp, Escherichia coli
atggataatgaattttataccctcctgaccaatagagggatggcaaaaattgccagtgctcttgcggataaaaaacaactgcatctgcaaaagatggccgttggagacggcggtgggcaatattatgaacccacggcgagtcaaactaaattacgccatgaggtctggcgcggtgatttaaatacattaacagttgcgcccaataatcctagctggttaattgcggaacttgtactgcccgaaaatatcggcggctggtatatacgtgaagtcggcgtttttgataccgatggtgaactcattgctatcggtaaattcccggagtcgtataaaccgctattacccggcggctgcggtaagcaagtttgcattcgtctcattatggaagtgtccaacacgactgcggtaacactcaccgttgatcccagtattgtgctggcaacacgggattacgtcgattcgcaactggatgaacacgaacattcgactaaccaccctgatgctacattgacacaaaaaggctttacgcagttgagtaacgccactgacagtgatgacgaaaccaaagcggctacgccaaaagcggtgaaagcggcactgattgaggctcgaaatcatcgtcatacctggagtcagattactgatataccagatggcacactgacgcaaaaagggattgtgaagcttagtaacgcgaccaatagcaacagcactacagaggcggcgactccgagcgcggtgaaggcggcatatgacctggcgaatagtaaggctgcgggtagtcatacgcacccctggggacagattacgagtattcctgacggtaccctgacacaaaaagggattgtgaaacttaataacgcgaccaatagcaacagtacgacggaggcggcgacaccgagcgcggtgaaggcggcatatgacctggcgaatagtaaggctgcgggaaaccatactcacccatggggacagattacgggtgttccagacggcaccctgtcgcaaaaagggattgtgaagcttaataacgcgacggatagcaacagtacgacggaggcggcgacaccgagcgcggtgaaggcggcgtatgataaagcctgtgaggcatatagcaggattaacaattcctcattccgattctatacatcaaatggaacatttaccgtgccagctggagtgacagaaatacttctggaaatgtcaggcggcggagggggcggtggaggtggggcagtcgccggaagctcgacaatgctgaatccaaaatttggactaggcggcggagcaggaaaacccggtgaactgataattgcctctctcacagttaaacccggagatatgtattcctttacagttgggtccggaggggctggaggggctggaggtacacaggtgataccagagcgtggtccgggatggattcccgaagatgcaatggggcaagcaggtattccaggaggagcatcacatttttcttcacagagtgcttccggcggtgctggtggggggggaggtaaaatcataactatcgactccccgcacgccaactcagtaggagaggttcccaaaacatactccagcaacggtgaaactgcagtaaatactccttatggaaaagggggcttgggaggagcgaatagtgatggtcaatccggctctggttatggggcgggaggtgggggaggggctggtttaggatcaacttgggtaaaccacgttgcccgcaatggcggtcgtggcttgggtggttatataaaaattttatggtga

SEQ ID NO: 30730 - DNA, 456 bp, Escherichia coli
atggaaattttatcagtaatgaattctgttgtgaccagattacgtgaacagaatcccgaaatggatgtatctatttcatcggttgatacccataaatatattccgcagacgcagcaagttacagtgattattaattatagcggttctctatttgccatgcctgaaagcagtgatgctctcgtgcaacagcaaacgctccgcttaaccgccaccgttattgttggcaaaaattgtgatgcgttaaacgcactggaccgcatacgcagcgcattgggtggccttcagcttcctgattgcgatcgtcttctttggcttgaaaaagaaattaatacgggtgagagcggcggtttctgccgctacatcctggaaatggcgaccagctcgctgtttatcgctgaacaggaaaacacggatcttcccctacttacggaagttaattacgaggaaactgaatga

SEQ ID NO: 30731 - DNA, 1215 bp, Escherichia coli
atgacagaacagcaattacctgaaggctggcaaatggtgaagtttggcgatatcgctaaacatatctctaaacgagtggaaccgagcgagacagaccttgaaatttatgtcggtttggagcatttagaccctgatagcctgaagatcaaacgtcatggtacacccagcgacgttgaagggcagaagcttttagtgaaaaaaggccagataatttttggcaagcgtcgtgcttatcaacgtaaagtcgcggtagcagattgggattgtatttgttcggctcacgcaatggttctggaagctaaccaaaataatgttattccagaatttttgcctttttttatgcagtctgatgtgtttatgaaccgggcagtagcgatttcagaaggttctttatcacctacaataaaatggaaggtattagaacgtcagctatttatattcccagaaaaagtaaaacaagagcagttactggaagagctcaagaaagcagaaaaagttactgcaatatcagatgctctaattgttcaactaaaaaaaactataggatgcatgtatcaggaagtcttttgctcgaaactgggagtgaatgatttttctaaatatccgattaaaattaaagcaaatgtggacgttgtaccattaaaaaatctactggtgtgtaaacctcaaaatggattattcgttaagaaagatgtagagcaagaggttaaaagtttgtttcttaatgtcgtcgacggctatgtaaattcttactctaatacggataatcgagagtatgttacttgcagtctttcagatttgaaaaaatttaatttaaagagcggcgatgtactctttaaccgctcatcacttgtgaggtcaggtattggttggccgtttttagtgaggcaggaagataatactgctacgtttgactgccacttaatcagagtaaaattaaataaagaaaaaatacttcctgaatatctatatatatattctctttctccttgggctagaaaatatttcttgtgcgtgagtcagacaactacgatgaccacaataagccaaagtgaaatagagtattttccagtaccagtaccaagtctgaaagtacaaaaggaaatagctgatatcttttctaagttattttatttgcaagatcaaatgactaattacaagcagagtgtattgaagttgattaatcaatacatatgtgaaacattggaaggataa

SEQ ID NO: 30732 - DNA, 1161 bp, Escherichia coli; identical to SEQ ID NO: 11635

SEQ ID NO: 30733 - DNA, 207 bp, Escherichia coli
atgcataaagatcaatacactgatgactcatccttggatcaggtccgtgtaaaaactatgctcactagcaccatttctatgagttatccggatgttgtaattgcatgtatagaacatcaagtgtctctggaagcattcagggcaattgaggcagcgttggtgaagcacgataagaattcgaaggattattccctggtggttgactga

SEQ ID NO: 30734 - DNA, 666 bp, Escherichia coli
atggctgatatatcaacacccaacctcgactataacgatatgctggaggcgtgggatattaacgacgcactgatgggcggtacgcttgaaatgcgcaggcagggggaaaattatctcccaaaatggcctaacgaagatgaagacgcttataaaaaacgcctgtctgtggctacgctacttcctgtgtatgaagaaagcatcaagcaaaatattgggcgcatatttgcagagccgacagtattgagtgaggaaacgccggcaaaaatcagggaatatgcagaaaatatcgacatggaggggagccgactggatgtgtgggcgcagcaatttttcagcctcgcatttcagtatggtgtggcacatgcgctggtggactatccacgaacggatatgaaagagattcggacaaaagccgatgaaaacgcggccggtggtcgtccgtacgttacgatgctgaatccacgccaggttattggatggaaatcgaaagttgaacaagggaaagttgttctcactgatttgcgtataaaagaggtcatcattattgatggtgatgatttcgggcagaagaaggtggagcagatccgccatattatgccccgtcgagttgaaatttatcgacgtagctgtagtggtcaagtaatactggccacggttttacagtaa

SEQ ID NO: 30735 - DNA, 885 bp, Escherichia coli
atggattggaatgttttttttagtactattagccagacgtcaggtgcaattgtcggaatattttcagcatttctaataactaagataatatctaatcagtctgatttttcaagaatgaaggaacgagtgtcctttcttattaataagtctaaagccttgagtttagaagcgaactccagatattttgattggtataatagacgaacgcgagagcgagaattggataagttaaagggtatgtttgatgaaagtgatgagtttttatccgcagaggaatattatgagaggcttgatttttcgccgtttgaattaagagatgatgtcttggtgtacatacgcaatgctattgaggcgcgtaaagaggaagaaaaaagaaagataggttattacgggattatgcccactttaagaatgcctgtaagtatcttgagtaatgatgtccaggaagagttcgaacttattgatgctctcaaagttaggattctagcaaatataaatgacattatttatgtccatgacgagattgtaaaagaaaagtatggtaaaaatctgataacaatctcgattgttgcatcatcccttttatttatattgggcgttatttatccgcttagttttatccctaaagctattggtgaagacattaacattacttttatggcattttttgatgttttgttttctattaaaggtttttttctttctttgcttgccattgtttttttgagtttgatgttagcatttctatatattaacataacacttcgatttgagagtgaggtaatatcagaacttgaattctatatgaatataagtgcctattctgaatactttggaaacgagtataaaaatagtgtccatttaaaagagatgtccgtgcaatga

SEQ ID NO: 30736 - DNA, 174 bp, Escherichia coli
atgtcaaataaccaccatcaatatattgaagacgttagtaaatatataaaaacatgccttgacggaatggcgataaaattcatccccacagatattcaaactatctatttacgagaatcacttgaaaaattcagagacaacgaagagtttaaggttggagtaaaaataccttaa

SEQ ID NO: 30737 - DNA, 249 bp, Escherichia coli
atgcgtattgagatctgcatagccaaagagaaaatgactaaaatgccaaacggtgctgtggatgcgttaaaggaagaattaactcgacgcatcagtaagcgttatgacgatgtagaggtgatcgtaaaagccaccagcaacgatggcctttctgttacgcgcaccgccgataaagattcagctaaaacttttgttcaggaaactctgaaagatacctgggagtctgctgacgagtggtttgttcactaa

SEQ ID NO: 30738 - DNA, 1068 bp, Escherichia coli
atgaatttcaaggataaaaattgtttccctaacgaactcatagcgttggcgaaaatttcaaaaaatgatgttttagataagttcggaacggatgtttttaaaaaggttgtttatgatgttttaacaggtaaaaatgttcgcgaattcactgaaatactaactcgtactagattgttagaaagcaatctctctttttttgacttttttgtggataaaatgaaagaagggataacgccaaagcagctttatctctatgcaaaaaatgcattatcgaacaagtcttatgttaagtctaatcaacctgttctcgagtggatggttatgatgacaaataaacagacccaaaatgttttaagagatgagcatggggatggttttgatagacttgctttaaggacgcaagaagaaatacttaaaataaaaaacgggtatgaagataaaattggagagatatctattggtgggcaaaaggtgtctttagaagatttttgctatattattttatctcttggttcgcaaactttaactattaggggatctgagaaatctcttcatggtaaatattttgaaaagctaatactcggttctttatttacaataatgggttttgaatataaagaaaaaattgaagaagggttaaatgctaaatgttttactctttcaacaagagctgatgacagggagtctgatgctactcttgtttttaatgggaaggcgattagggttgacattggttttattggtaggggtaacacagaaataagtttggataaagtatctagatttagacgaatggatgatattggcggagtgatgcataatataagcacaatggttattgttgacgttattggtgatagaagtagaatagttaatatggctgaagagattgatggtaaagttgttgcgatgagtgatccgtattgggttgcaaaggtctcttcctatattagttcgaaactgaatgtagatgatcttttagaggataaacctcaacttaaagacatacagtcttttatatctgatgcattagagaatgtagatctggaaaaatacattaaattataa

SEQ ID NO: 30739 - DNA, 1131 bp, Escherichia coli
atgacagttaaaaacaattacttaaacagaggttatttggtaacctctacgactcaggcgaaaaaaatagcaaagttgcacctagagaaattagacttagctgataaattttcctttgggttacctgaagtcgatgatcggtaccatgtatggcgtgtaccattagtagcgacaggccacaggattggtgaaatagttataaattcaaaaacgtcaactattgattataagaaaagttcgaagtctccatttcttattaagaaagcaatggaggttgtccataccccaaaaaaggtaaaaaaagaaaaaaaaatcatatcaaagtcaccattaaataacatgttactacaaggcaactgcgcggagaccttgaaaaaattacctgatgaatcagtgaacttagtattcacatcaccgccatattacaatgccaaaccagagtattccgaatatcatacatatgatgaatacctctctctattgcgttcagtaataaaagagtgccatagagttttaagcgaaggtcgttttttcgtcatcaatgtctcgcccgttttaataagaagggcatcacggaatgaagcatcaaaaagaatagctgttccttttgacttgcacaggttatttatagaagaaggctatgaattcatagatgatatacattgggttaaaccagaaggagctggctgggctttaggtagaggccgtcgattcgcagctgaccgcaatccgttgcaatataaaccagtaccagtaactgagtacattcttgtttacagaaaaaaaactgataaattaatagattggaacataagaaaccatcatagcaaagaggatgtttttgactcaaaaatcggcgacgattacgaaaagacaaacctatggaaaataaatccatctcgtaacagaaaacatcctgctacatttccatacggtctggcagaaagagttataaaatactattctttcaaaaatgatgttattttagatccttttgctggatcgggaacaacagcaaaagcagcaattgatttaggcagaagatttgtgatgtgtgagatatcaaagcagtatattgatctgatcatagaaggaaccatgctaggtggtgatttaaaaatcataaattaa

SEQ ID NO: 30740 - DNA, 174 bp, Escherichia coli
atgggcggcaagccggaaaacgtcgggtctctgggtgatattgagaaagtggcaaaggtctttgtccgcaatgaacttatcccgctacaggacaggattcgggaaataaacggctggctcggtcaggaggtcatccgctttaaaaactactcactggacactgacaacggctga

SEQ ID NO: 30741 - DNA, 1365 bp, Escherichia coli
atgattaatttaattatgggtggttttcccgaccactacgaccactggaaaccattcagccaaaataatggagaattctcatttcttttatcacgaatgtttgaaaacacctccgatggtattcgcaaaaaactatccccattaagcagtaatgtactatcttatcttgaaaaactcccaacaatattcatgagtgaagcttatcaaatagagggagcaaaaccttattatgtcgacatacgaattggaagaatttcaaatattcacattaagggaaaagaaatcaacttccaatttgcaatcacccatacacacaatgaaatcaaaatatcagacgccaaaagtgttgaaagcagtttagaactcggaacttatggccttaaaagaacacactgggccataaaagacaaaaatatagatgatatccttaagacatttggtattaaccaaaatgcacaagtggatagcagtccagcgcctctcccagacgaagatagcacattattaaccgtaaatagtttacaagaatttattgaaaaagttctccatataacagcagatatggatgaggagattttttacaggggtcattcagattcatcttatgaacttgcaccatctcttttcagaaaatatgaaaatgggaactataaatttctacataatgaaatcaaccttgttaaagaagcattgagcgcaagaccctcagaattcattgatgatacatcaatgcttgataaacttgtaagaatgcaacattatggcatacctactcgcttacttgacatcacatcaaatccattaattgcactttattttgcatgcagtagtataaattccgacaaaaacgatatcgatggtcaagtaataatatttaaaacacacagagagaacattaaatttttcgattccgacactgtcagttgcatatctaatttatgcatgctatcaaaagacatgaaagacaagctttctttcgaagaaagaaataatgattttaacagctctcatgcttgccttaaactcttagaatccataaagcatgaaaaaccatattttcaaagcataataaatccagatgatttggaaaaaataatttttgtaaaaagcaggataaataatgaaagaatatcatctcaatccggtgcctttttattattcggtaataacgccgtttttcctgagatatccaacgatcaggcagataattcaccatacaattttaagacagaaaaaataaacatcagagacaaaaagaaaattttaaaagaacttgccgtgctcaatattactgatgccactgtatatttaggattggaaagaacaatgaaactaatcacagaaaaatacacattaaaaaattag

SEQ ID NO: 30742 - DNA, 978 bp, Escherichia coli
atgttattgagtgggcgaataagaaaaatgaaaagacgaataaaactcaaaatttccactaaaaataaatcttacgatataattgattcgccgttttataaaatgagaagtaaaaggaaattggcttctttattgggggttgatgtaggggatttatcaaccttaaaaaaagatgaaggcaattattctatttttgaacagttatctaaaaacggaaagccacgtaagatacaaaaaccattagaaaaattagatgtggtgcatactcgtattgcaagtctgctatcgcgaattactttgccagattatctacattctggaaagaagggatgttctaatgttactaatgctaaaatccaccttaataatgaaaggttgatgacaaccgacatcagggctttttttccatcaactaccagagaaatgatattttcattctttttttctgttatgaagatgtcatctgatgttgcggatgtattatcgtatatatgtacttgctatgggcgtttgcctacaggtagcaggattagtatgcctcttgcatattttgcaaattccagaatgttcggagaaatacaccaactttgtaataaactacacgtaaatatgtctgtttatgttgatgatctaactttttcaggacaaaacgttaatagactattttgttcagtgattcgcaaaataataaataagcatggtcatgtgatgcatgcggataaaacaaaaatttatagtagagaaaagcccaagttggtaacaggtgttattgttttgggcggttctttaaaagtcaggaataagcagcatcttttaatgtctcaagaaattgaatattggaaaatgataaaggatgcagcgtgtgcaagagaaactcatactgccaaaaagttatttggacgattgcattctatgggggtaattgaacaacgttatagatcaaaggtgcttacattaaaagcaagtactgcactttaa

SEQ ID NO: 30743 - DNA, 321 bp, Escherichia coli
atgttacacagagcccttcgtttaataaggcaataccataaagagtcattggttgatttatcaacatctttaggtattccaaaagaaaaaatagtagaactcgaaagtggggtttggtcgcctacaattgatgttttacagcgttacgcctcccatttcgatatgccggtatcttctttagtatttttttcagaatcgttaggtacgcaggggcggttatctaagcgtttccgtttaaatttagctggtaaagtattagatgttattgagtgggcgaataagaaaaatgaaaagacgaataaaactcaaaatttccactaa

SEQ ID NO: 30744 - DNA, 156 bp, Escherichia coli
atgaagaatgataaattaaccaacgaacagcaggcgcagaacaagtcaaacctgaaaaagtgggctggttatgtttggaaattaatcaaatggggtattagactgtttgatttagccactcgagcactggactactttgaagggggtgatgagtaa

SEQ ID NO: 30745 - DNA, 528 bp, Escherichia coli; identical to SEQ ID NO: 15171

SEQ ID NO: 30746 - DNA, 555 bp, Escherichia coli
atgacattaaacacacagggaaccgcttatgctggtgttactgctcaattgtggggcaactccagccgtcctgttgtttatgaagtcggtgttgatggtggcgcttatatgttctatgcgcagaaaaataccgataacacctatatgttaagcgttaatggtgcatgtcatgccaccgcatttaaccagcattccgaccgggatctgaaagacaacattcaggtgatcgataatgcaaccgaccgcatccgtaaaatgaacggctatacatacacgcttaaagaaaacggtatgccctatgctggtgtcattgcacaggaagctctggaagcaatcccagaagctgtaggttccgcaatgaaatatcaggacggtgcaagcggatcggaaggtgaagaaggtgaacgttattacacagtagattattctggtgttactggcttgcttgttcaggtagccagagagtcagacgacagaataacagcactggaagaagaaaatgcagaattaaaacaaagattatctgcaattgaggcgacgcttgcgtctaaataa

SEQ ID NO: 30747 - DNA, 159 bp, Escherichia coli
atggaggggccggactctccgtacgtcaacgccattgttgcgcgcgaagataataaagacagtaaaaaagttcaggaactgaaagaggccttccagacgcaagccgttgccgacaaggcagcggaagtctataaaggcgatgcgattaagggctggtaa

SEQ ID NO: 30748 - DNA, 549 bp, Escherichia coli; identical to SEQ ID NO: 10880

SEQ ID NO: 30749 - DNA, 714 bp, Escherichia coli; identical to SEQ ID NO: 28164

SEQ ID NO: 30750 - DNA, 438 bp, Escherichia coli
atgttcaatcgtgcaatgaccaaatttcttctgaattatcgaggatttgtatatctacatgacgatatcacaacattagctgcatacgctcttggtaaagtttattttctcccgaaataccttatgttatatagacagcacacgaatgcggtaactggtatcaaaacattccgcaatggattgacttctaaatttaaatcaccagtaaactatcttttatcacgaaaacattatcaggtaaaaaaatctttttttgaatgtaacagctctatcttatcagagacgaataaaaaagtttttttggattttatttcattttgtgaatcaaataataaatttacagatttttttaagttatggcgaggtgggtttagattaaataacagtagaactaaattattattaaaattcttaatacggagaaaatttagcgaatga

SEQ ID NO: 30751 - DNA, 249 bp, Escherichia coli
  misc_feature (233)..(242): n is a, c, g, or t
atgaacaaaattattatagttgggcaccccaattcaaatttcgaatttgttgaaaaaatatctctgcaatatgggatgggtacccctcatacatcaaaacgagaaaacctaagcccacaaaacataactgagattatttgtaaagcgtataacacacccaagataagtgaagtcacaagtacatcagatttttcccctttacaggtttctgctgtctggcacggtatggctcnnnnnnnnnngctctag

SEQ ID NO: 30752 - DNA, 465 bp, Escherichia coli; identical to SEQ ID NO: 10072

SEQ ID NO: 30753 - DNA, 330 bp, Escherichia coli; identical to SEQ ID NO: 8750

SEQ ID NO: 30754 - DNA, 753 bp, Escherichia coli
atgaaattctccaaattttctgagttggtgaatcgtattttgtccaataaccacagccatcgtcgcgatatggatgtaacgatcgttgttcattcgcctggcagcattggttcaacaccctcagttgaggttcagtcaattcacgctggttttgattgggattccgggaaagtgctgattttcccagcacagccactgaccacgctaacaccagaacagattactgatattactgatagtgtgcgcaaaggtcagtcctggcacgcatatcaggaatacaagaagcataaagagcagttggaaaaattatcgattgaacttgatgccgcaaaacagcgcattgcagagctggagggtaatcgcgcggcgctggcggcggagaatgcagggctgaataaatttatcgcacagagttgctacgtgtttgatggcgagcaggatgaaatatctgatgcgtatatctgcgcaacagatggagggatgccgcaaacaccagccaccgatgcttttctggctgaagtgaagactgaagcacgcaaggagggcgcttactttgtggcgaacagaatgctggctgcctgggaagctggttttattgatgatactgcgaagaacgccgcggatattgcccggatgattcttacctctactgagtttatggctaatgcgccggaaggcgattttgaccgctcattctctgatggcgttctcgaagatatcgccgcccagcttggaaaaggaggcaaacagtga

SEQ ID NO: 30755 - DNA, 438 bp, Escherichia coli
atgcgtatgtgctcaactcacctacagactcacttccgcttcctcgctcactcagtcgctacgctcctgccgttcgactgcggcgagcggtaccacctctcgcatgttgtcggcgattccgttgctgttctgttcgaaaatgcgttctgtgagccatccagagcaccagaacgcgattttctggtggtggtaatggttttcttcgtattggcccttaaaacgcgctcagaagctctcagacgcacgaaacaggttttaaatgcccgtcagggcatggaaggcgcgaaaaacgattacagagcgtttcaggaggtcaggcgcgccgatacccctaaccaggggctttcaggaagcaggagaccgcgccagctccctgcaaaggccgtttgcacaggaataacaacgatgatctcattactggaactgactaacgtttag

SEQ ID NO: 30756 - DNA, 546 bp, Escherichia coli
atgaaacaaatcaaattcaggcttgatgatgccaagcatcatgacctgctgatctgcctaaagtctctttatcctgatgaaccaggcttgactgtatcaaaaggtatgaaactgcttgccaatgcattgctgaaaagcaaaaaaactaaccagatacaaaatgattatgctgatgaaaacaatttcatcaaaaccacgctttacttaacaggtaaacaaagggctgatattgaaaaagcagctaaccgtcatgggtggacattatcacgggaatgtcgatataggattcaaaccacactgaataataggcttgatttcttcgaccaggaactgctgatgatgaatcgctgccgaaatactatagataaaattggtcgtaactttcattatatcattgttaatgatcagaccagggttcttgataaagatggtttctatcaggatgcggaacgtcttaagacagaaatttttagtcttaaaaatcagtttgagaattacattatgttatgtaaggggagaacagtttcaaacaaggtagatgtatga

SEQ ID NO: 30757 - DNA, 204 bp, Escherichia coli
atgagtgatattaactttggtatcttttttataatcgcatttggcttcattactgttggttcattttttattgtgcttatccgttttcttgaacgtgcagaaaccatattgattggtcatttagatttaaaatctaaagccattattcatgggttaattatattatttatatactggacgcttaaattttttgcagaatcttaa

SEQ ID NO: 30758 - DNA, 1077 bp, Escherichia coli
atggctacagataatacttatcccgtatatgatggaaatttctttagagcaactcatgatataatattaagagcagttgagaaatcaacatcaggaatgttcgataattatatcaatattgcttatacactgggtaaatatggtgtttctttatatatcttatggtatgcattcactgtcttagcaagaaaacaacaaactcctgttccagattttatctggaatttgtgcaggttttcgataattttaatgttcgttaaaaatacagggggatggcttgataacgccaatcaagctatagatggcttaaaagagactctcgccggtggtgatccttggttatggatggatcaactttgggataaagtaattactgttggtaaaaaggtttggcatcttgatacagatacaatccccgttgtaggtgttgcagcggccttgcttacttatgccggaggcattttagcaatgatcgtgtgtgcaatagtatttttttcagcagaaattacgttaaaaatcctttctattacagcaccgttatttattatgtgtctgatgttcggttttcttcgtcagatgtttaataactggttacagcttattttcagttcattacttatttttatgtttgcagcactggcgttacgtgcaggtatgtggcaattgaatggaacattaagcagcactttatcttcagcaacagctcctaatttatttgaagcaggtgcgacagttcttgtctcaggtatctttatggcatggattatctggcaggcaaaaacctatgcttcacagcttgctggcgtgggtgttgaaggtgccatgcagggcgcagccgctatggggattggtgctggcattttcggtgcatcccgtatgacgcgtggtgcacttggtatgggcagaaatgccggtattggtgcatggaaaggtctgcgtcgtcaggaaggcgggttcggacagtctccgggaataacgggcaaagccgctaacctggccggacagggcgttaatattggtgccaaaaaacttcgtcaggccgctattgagagagcaaaaaaaatgtacggtggttaa

SEQ ID NO: 30759 - DNA, 270 bp, Escherichia coli
atgaaatatatcgtcttggtatttttagcatctttatcatttattcttaccggatgtaatgaagatacaaaatctgtcgattggtggactaatcacccgaaagaagctgtcgataaatataaagaatgcaagaaaacaggaagtgactcagataattgtaaaaacgtaagacgtgcgggacttataatcgctgacacttatcctccgatgagtgaaatatacaagcaagaagccagagaacttgataagaaattaggcgtttcaaaataa

SEQ ID NO: 30760 - DNA, 759 bp, Escherichia coli
atgaagaaacgcattatatcggcggtgctcgcttcgctctcggttatttccgtcgctcaggcggggatacctgttgccattgatgccaatccggaatgggcggttgaagccggacgatggacagaacgtctgaagcaatgggcagaaacggtgaaacattacgaaaatcagataaatgcgtacaaacaggagctgctgtcaaaaacgggtatccgtgatgtgcagggactggtgcagtccgcacagtcagtgagtcaggaactgatgcagatttatgatcaggggaatgcttttattgacgattacattaaaaatcctgaaagtgcgttatcggaacaggccaaatcgttattgtcagattacagggtaacggatacctgccagaacctgggatattctggtgaccaggtacggggatgtgaagcgacgttcctttctcaactggcaagcgtggaatacggtaacaagctggagagcaagcttcgtcaggacaatcagacaatgaaagaccttatcgagcaggttaaaaatgcgaaggatacgaaagccacgcaggatgcaacaaacgccgttgcacttgaacaactgaagtttgagaagctcaaatttcagtatcaaatgtacatcgataaacaaaaacaactgtctgaatataaaaaggaaatggcgaaagcttcttttcgtcatgaacaaattaatgcaaaaccaattgattacagagaagcattttcaacacaagactttgatttgatcaaataa

SEQ ID NO: 30761 - DNA, 276 bp, Escherichia coli
atggctggcccaagtatatctgaatatcagttaaaaacccgcaaagaattttacgcttatcttgatagtaagaggaaagaaggaaactcgagatttagtttatcccttgagaaagaccctttctctttttctttatatcttttgttcacaagtaatgaaggtattcgtaatagtgatttaatccgtcgcttccgaattactagcaggggcacgaggtttattgtaagtaactttaaattctggcttaaggaatacaatcgcggtatgtttaagtga

SEQ ID NO: 30762 - DNA, 732 bp, Escherichia coli
atgaccaagaagaatgttgaccaaccaatgacgatgactgtcagtttacgtggcaaaaatgttgtcatgagtaatgctatatctcgtgccgcgcaaagcctttctttggctgaaaagcgcatcatttttgcagctattgctcagatgggtgggaaatatgcgccagtaaggattacagcacaggaatatgctaacacctttggaatgcctttaaagcaagcatattcacaattaaaagaggcttcggaaaatttctttaatagatatattcgctttaaattaaatgaagttagtgagattgatgttgatgtatggaagattagatggttaggggcgtataaatataatgatggtgaagctaatgttcttttacattttacgcctcaagtaatgccatatttatgcgaactggaagataattttacgaagtatcagctatctcaagcttgcgcattgcgttcagtacattcatggcgtttgttagaactctttgaacaaatgaatacgaacaaggaaaataatggatggttatccatatcgttagaagattttcatcatgctatggaatcacccgatagttataaaacaacgtttggattacttcgtaagtatatgattgaaccggcggtaaaggagttaacagagaaagatcactggatgatcgactggaaacctattaagaaggggagaaaagtcgttcgtcttgagttctggtttaggaaagaaaactaa

SEQ ID NO: 30763 - DNA, 297 bp, Escherichia coli; identical to SEQ ID NO: 14056

SEQ ID NO: 30764 - DNA, 492 bp, Escherichia coli
atgatgaaactggccctgacactggaagccgacagcgttaacgtacaggcactgaatatggggcgaattgtcgttgacattgatggtgttaatctcgctgaactgattaacatggtctgcgataacggctactcccttcgtgttgttgatgaatctgaccggacctcagcagactgcacgccaccatttgctgcccttaccggcatacgctgcagtaccgcacatatcacggaaacggacaacgcctggctgtactcgctgtcacaccagaccagtgacttcggtgaatcagaatggattcattttaccggtaacggctatctgttgcgtaccgatgcgtggtcatacccggttctgcggcttaaacgcctggggctgtcaaaaacgttccgtcgtctggttgtcacacttacccgacgttatggcgtcagtctcattcatctggatgccagcgctgaatgcctgccgggtttacccactttcaactggtaa

SEQ ID NO: 30765 - DNA, 159 bp, Escherichia coli
atgaatggcctgctgtgccggcgtgtgaagcccggctttctgcagactgatagcggtttccagcaatgtctcaccggcccgcgcctttatctgctcagaaaccaccgtaaaggacggatggcgggcgagtttttccgcagtacgggtttcatccagtga

SEQ ID NO: 30766 - DNA, 354 bp, Escherichia coli
atgaccattcagcccggcggtgttgctcaggacgcgaaaacgtccggcagcggtggaatccttcatcgaacgagagatatcgccctgattgttgagtattttactggaaacactacgcatcgcgcggtcagcctgctgccagcccacgccagcgttcatggaccagtcgtcgttaaagtagtggatcaggcgagtgctgatggtatcggtagtgaggtcgttgcccgcagtgctgagcgccagatttttgtccttcggattcggcgcagacggcagtttgacgttcggcccatagttaaagctaccgacatagcctttctggataaattcgtaatggctggcgtcgagctgtag

SEQ ID NO: 30767 - DNA, 282 bp, Escherichia coli
atgacagaagccgaaatactgcgattaatccgccgcgttaccggaatcagccagcaggctgacgaacaggccacgcagccggacagcgtgaccgctgaaaattatgtgcgtgttgttgctgaggtgatgcgccgtgacggtatcgagcttaacggcgtggatatgcgcaacatacgcgccagagttctggagatgttgtcgtaccgtcgccgcgtgcagatgtaccaagagaaagaaaaaattacttaccactggaagaagccggaacggttacgacgttaa

SEQ ID NO: 30768 - DNA, 543 bp, Escherichia coli
atgaaatcgcacctgatgaacaaaaaaactatggcgcaaagctgccgcgtaagtgcgacagcgttcgacaagtggggagtaactcccgttgagcgtaaaggccgtgaggcgttttatgatgttgctagcgtgatagacaatagggttaacaatgcaattaaccagcttacaaacgacaaaggcgagattgatgatgatgaacttttacgcgtaagaatcagattgctgacagcacaggcggaagcgcaggaacttaaaaacgagcgcgaacgcggcgaggtgattgatacaaagttttgcatctacgcgatttcaaaactagcgagtcagatttcatcaatcatggacagcctcccgctcacaatgcaaaggcgctttcccgatataaggccgtatatgctggatgaactaaaaagggaaatagccaaagcatgtaacgcatgtgcaagacttgacgaaaacctgccacagatactggctgattacctgatggaaactaccggaagcgcgcctgagaagttgctacagaacaaaggcgagtaa

SEQ ID NO: 30769 - DNA, 282 bp, Escherichia coli
atgctgaccggttatctgtccggcccgccgcagacgcagcatgtgttttgtgtattcccggcggctctggtcgcgcacgcgggtctggcaggcaaagaacggctgaaagccttccttctgcagactttccagcacggtgatggtggggatgtacgtataccgctcactgcgggaggtatgccggtcttcaccgaaaatacccggtacatggtgcatcagttcttcgtgtgtcagcggacggtcacggcgtatctggttcgcataaccaaaacgactggctaa

SEQ ID NO: 30770 - DNA, 237 bp, Escherichia coli; identical to SEQ ID NO: 11039

SEQ ID NO: 30771 - DNA, 276 bp, Escherichia coli; identical to SEQ ID NO: 6180

SEQ ID NO: 30772 - DNA, 375 bp, Escherichia coli
gtggcgcttgaagagcttcgctggggcgcgtttggtgatgtgatacgtcagggtgaaacaggccaggttaatcagttactggatattctcagatataaatcattaacgcagatggcacaggagagtggtggtagcgcaacagtacggctgaactcactggactggcttggtggtcagagccgggagcaggcagataacgaatggtatgaagcgattaactggctgggggactggtgcagtgaagagcggcatcctgtgatctggtcaaccacacaggctgcagaacacttaccggctcgcatgccccgtctctgctcagcagagcgtctctctgaaagtatggtcgatgaaatatttcagaagggggctgcatga

SEQ ID NO: 30773 - DNA, 234 bp, Escherichia coli
gtggtgctcgatgccattctgaaccgtggcgcccgtttttcctctgtggaaatgtacctggtctgtgagtgtgtggagcatatcctggccagtggtctggtctgtgatgtgctgcgtataccggatgaaccgtcccgtcgctggtttgacagggatattctgcgggaggttgttctggaggcacgggatgaaatccgcagcatggcggatgcactggcgaaaatcaggggctga

SEQ ID NO: 30774 - DNA, 738 bp, Escherichia coli
atgagcaaagattcatcattagaaaataaagatgaaaatgtcacagtcaggaacacaatagaagaagccataagagacaagttattcaataagttgtttgcatatgttgtggtttctttttttgtcgttaactggcaggatattattatattatttaaatcaaagtacgatatatatacaacattgtctatagtatgggttggtgagaaatatcactttccttatgttggccccatcattgtatctccgtttgtggctcattttgttatgccatttatatatggaaccactgcgtcagtggtaatgccttatataacaatgtatatatcaaaagcaacaggcaggaactatgcaagaattagatacattgactatgagtttgatttagaagagagggcaagaataaaagagttgcagatcaacttgaagcaaaaagagagcaagcttttaagtctagaaaagcaaacagaagatcaatataaattattgtctgcaattgaagagaagaagagagagactgagagtgccagagtggctctgtatcacggcataaaagtaattgtcgatgtatataaagcaaaaaagaaaagaatttccacccaagaagattttgccgatttattaaaagcaattgaagaaagcgatttttataaagacactggattgtggggtattaataaactaatagatgacgtagagacaatatatgagtctcaatcgacatcaaaggacaagtaa

SEQ ID NO: 30775 - DNA, 279 bp, Escherichia coli
atggctgatatcaaagtaactattaccccaccaaatgcgacagataaaactttcactgtcgaatccgatcatccggaaattgtgagagttgatggaaccacatgcaccgcagtatctgctggtactgcggtactaaccatcaaaactacagatggaaataaaaccgcaacgtgcactgtaacggttaatgaagccgtagtaagtgtcgactctgtcagcgttgatccgtcaaccaaagaagtgacggtaggtgacagcttcacggtcggcgaagcctga

SEQ ID NO: 30776 - DNA, 885 bp, Escherichia coli
atggtagatgacaaaaaaggctttctgaacgttgaggaaatatcagggaataccggagaaatccacagcttaaagcctaacaataatagcactattcagccgatagctttgttgcggcttggggtgtttgttcccacattgaaatctaccagtgttgctttacgtcgcaagaacgccggtttaactaactcaactgatgcgacagaagaactgtccagcctgaagattgtagagcaggaagggtatcagggtattgagattcatgggccacgcctggatatggatactgattttaaggtgtggataggcattacatctgcattgtttgactataaaccagacaatgatggtgtgatcaccctaacattctctgaatttgtggatcgttgcggttatccaaggaagcggctgtccaaggcttttcgcaagagcattggcgactctctaacgcgtattcagcagacgttgctgaagttcaacttgcccaccagcaaagaacatgttcgttatatccagatgaatttattggcatttagtgaacttgatactgaaaatgacattataagaatccaaccgcagaagcagttgtctgagttgtactacgttgactataagcgaatattgaagctcaaaatgctcgataaacttggcaggaaagagacagccaaggtgctttatacgtttttcgaagcgttaccttcaaaccctgcgccagtgagtattgagcgccttcgcgccagattgaacctcaagtcctcggttagcgttcagaacagtgtgattcgtaaagccatgaaagacttagaagctgttgaatatcttaaattttcagagataaagaatggtcggaaaataggtttccagatccataaacgaaatccataa

SEQ ID NO: 30777 - DNA, 213 bp, Escherichia coli
atgatggcccggtggtccgtaaacctcgtcactcagagcgtggaggatgccaaattcgcgtatcaacaaaatggtccaaacacggctttaaagagaaatacgcttgaatgcgcaagatgtgagctgattcttgaggacaaaatgatgacatgtgagtcttcacaagcgtcattcagtgaatataatgcccccctctcagataccactaactga

SEQ ID NO: 30778 - DNA, 477 bp, Escherichia coli
atgcctccccgttccctaatacacagacggggacactctgcggtcgattttttgacgggggacgactcataccccgtggcgtcaggcttcttaggccgctaccatcatcagatcatcgtttgcatttactttaatggtcgggttctaaaccgccgcaaagtcgctaaccatgacgaaaacactgaaaaaacacccacccgaaggtgggcaaatatcccactcgcggtattgccacttaggcgtatggtcaacctggcaactcggtgtcctcaacggggaaggaataaccccgccatacttaccgccgcgcctgtcgcggttatcgctacgtatcaacataaaagccgactgcctgagcaagattcactttcaaaggcccgcagaaaggaatccatagtcggcttttatcttgaagcggctctctctccgcccgtcaccgctctgtctcggttgtcgcgtttgccacgccagccgtaa

SEQ ID NO: 30779 - DNA, 675 bp, Escherichia coli
atgaagtctgaaggtttaacgccagagcaactggcggagatcgagctttactatccgttacgtgaacgttattcaccgaaaccagcgcctaaatgccctgtttgtggcgaggaaatgtcaatgcagcgcatatctggatcacatgttgtttatgcctgttccggcatggaggatgacggatgcttcaaaactggacgaacttatgctgacgagcattacaaaaattcgcgcatatcagtagttgatggtagcgatcctgatgtgattgaactgctggacgagaacgtggagaaggctctaacgcttgagaatctgcgtgttgagctggaggccgctaaaaagtgtattgcagagctggaaagcaattgcggggcgctggtggcggaatgccaaagcaaaaaagcagcacttgaggcaattcttagccattgcccaattaatcatccagatatagacatcgcatgtatagcgaacatcgctcataacgaattaggcgaggcgaaaagcactacatctaaggcatcccttgtagaaatacaggcacaaggggtggaggcattcgctttgacgatgcgcgatacaggagatgatccattttttgattccgttgcttctgcttgcgcggatgcagctgataggttcgctgcccagcttcgcaaaggaggcaaccagtga

SEQ ID NO: 30780 - DNA, 378 bp, Escherichia coli
atgcgtgaaacttatgaaaatgcaggctcacttccatctgatattgtcgaggtttcccaaagtgtcagggacatgtataaccataccccaccggaagggaaatgcctggtggtggtagatgggttgcccgcatggggagatattccaccgcccacccgcgatgagcagattgctgttgctgaagctgaacgcagtcgccttcttaattacgccgattccgtaacagcagactggcgaaccgagctggctctgggtgaaattagcgatcccgacaaagcgaaactgtcttcatggatggcttacaaacgagatgtgaaaactattccagctgaagccgccattgcgactgattttaagtggcctgaaatgccagcatag

SEQ ID NO: 30781 - DNA, 204 bp, Escherichia coli
atgaaagtccgggcaatgcagggagacaccctcgatgcgatttgcgcccggcattacgggcgcactgagggtgtggtcgagacggtgctgccggccaatccgggtctgtctgagctgggtgtcattctgccgcatggtacggagattgacctgcccgacgtgccgtcttcaccagtaactaacactatcaatctttgggagtaa

SEQ ID NO: 30782 - DNA, 855 bp, Escherichia coli
atggcaaaaaaagtctcaaaattctttcgcatcggcgtcgagggtgatacctgcgacgggcgcattatcagcgccagtgatattcaggaaatggccgacacgtttgaccctcgcgtctacggttgccgcatcaatcttgagcacatcaaaagcgtgttgcctgatagcccgttcaaacgctatggcgatgtggtcgaactgaaagcggagaaaatcgaagatgactccgcgcttaacggaaagctggcgctgttcgccaaaatcagcccatccgatgatttagtcgcaatgaataaagcgctccagaaggtttatacctcaatggaaattgcgccgaatttcagtaacagcggcaaatgctatctcgttggtctggctgtgaccgatgacccggcaagcctcggcaccgaatacctcgaattctgtcgcaatgcaaaacacaacccgcttaaccgctttaaggctaatcctgaaaacctgatttcagcggcaacgcttgccgagcttgagtttgaagaccagccggaaacggtatttaccgccctgactgacaaggtgaaagccattttcagccgtaagcaggtcagcgacgatgcgcgcatgaatgatgtgcatgaggcggtgaccgccgtcagcgagcatgtgcagaccaacctcactgcgcaggataagcgtctttccgatatggaaaccgcacttgccacttttaaacaggaactgaccggcaaggttgaagaaaccagccaggcattttccgacctgaaagccaccctcgataaaaccgaaagtttcagccagccgcgacgcacgaaagccagcggcggtggtggcgatgagctgctgaccgactgctga

SEQ ID NO: 30783 - DNA, 2220 bp, Escherichia coli
gtgggtatttcttacgcttacccgtggaacgctccacggtcggcaatagccagcccataccttacctatgaccaacagtatcgccgcgaccgtatgttcgcggctttgctgcatgcgagaaaggtgctttctctccagcctgagtgcgtgcgctttgacgtttatcgcaccgctgcagtgctggagcaaaatcagggcagtcaacgagccaatgcttttttaatcagcttctgcaaaaaggcattgccacgtcttgaactggtagcaaaaaaatatgagtgcgcgggtattaaaagcaacgtatcagccgctgtttttggtggtcattttgatacccagcttatgcaatatctggcgtcacgcatggtcaatatggtcgccagatttaaccgcctaccggatatgtcgcgcgccgatattgacctgctggccgctgatatcgctaatttcattcgtgctgaactggctgatattgatgacagcggatttagcgaactcaaaacgctgtacacctggtacatgcgcgccggttttatttccctgcaattcaaagttacaccgccgaaatgggagcgtgtgactaaaaaatattttggcgaggatgaaatcgcaccggcagtaatgcgtatgtttaatgaggtttggtggcgcggtcgtttacgtcgaattgcgtctgcgtggcgcgaacacctgcacattgccgttggcagcgtcagtaagagaaaacacgtctatgcgagtaaaaactgcgtgactgactggcgcgagcaaaagcgccgcacgcgcgaatttctcaaggggctggatctcgaagacgaagacggcaaccgcattagcctgattgaaaaatacgacggctcggtagctaatccagcaatacgccgctgcgagctgatgacccgcatccgtgggtttgaaaatatctgcaatgaactcggttatgtcggtgagttttacaccctgaccgccccgtctaaatatcacgccaccaccaaagcgggctaccgtaatagaaaatggaacggtgccagcccgtcggacacgcagagctatctaaccggcctttgggcacgcatacgagccaagctacaccgggaagaaatccgtattttcggcatccgtgttgccgagcctcatcacgacggaacgcctcactggcacatgcttatgttcatgttgccggaagatgttgagcgcgtgcgcctcatcattcgcgattatgcgtgggaggaagaccgtcacgaactgagaagtgataaggccaaaaaggcacgttttcatgccgaggccattgacccggaaaagggcagcgctaccggctatgtcgctaaatacatttccaaaaatatcgacggctatgctctcgatggtgaaaccgatgacgaaagtggtgagctcctaaaagagacagcccccgctgtttcagcatgggcggcgcgctggcacatccgacaatttcagtttatcggcggtgcgcctgtgacggtctaccgtgagttgcgtcgtctcgctgataccgaaaccgcgcacggcctgagtattgagtttgccgccgttcatgacgccgctgatgccggtgactgggctggatatgtcaatgcgcagggtggtccgtttgtccgtcgtgatgatttgcaggtgcgcacgctgtatgaaccgcgcgccgagtttaaccagtatggtgaggaaaccgtctgcatccgtggcgtgtacgattcatctgtaggctctggcaccccaattttaacccggctaacgcagtggaaaatcgtgccgaagcgtgccgttgatttggccgttgacgttaagggcgctcctgcgccctctcggagttctgtcaataactgtacgggaagcgaaagcgatccgccggaactcgatttatcaaaacccctgagtcgacgtgaaagacgagagctgacaaaccgactcaggaagcaaaagccagcaatgcggcgaaaattcatccacggaacggatgagcaaaatgcagctatagcgaaaactattgacgagatacatctgacaaccggcatcactatcagccggggcgaagccctgcacctgatggccggtggtaaaagttgttttgatggcaaatggctacgtggaacagccaaaggagaaatattcttagcagcaccatcgcatcaggctaaggctagaaaaatccttaatcgtgttgctgcgatggctgaagcagcaaaaatcaatatctga

SEQ ID NO: 30784 - DNA, 474 bp, Escherichia coli
atgagcctccgcatagaaatcggtgataaatgggttattaccagcgaccagtatcaattcatcctgaatgaaaagaaagtcgctcaatccgggaagaaagctggcgaggaatggctcgacaccattggctattatccgaagattaatcagcttatttctggcttgattcatcaccatattcataactccgcgattacctcgattgaggctatgattgcagagattgaacacatcggtgagttatgcagtgatgcatttggtgccataaaaccaagcgaaaaaatcggcggttgcgagtgggtgtcgtggaatgaattaagtgcgcgcggtctcatcgttcgtatcaataaagagattttacaccctatcggactggctgtttttcgcgaccctaaaacgggcatatctcagggtgctttaattgctgctgatggtgtgtgggaatatgaccagtcaatttccgtgaaggggtaa

SEQ ID NO: 30785 - DNA, 297 bp, Escherichia coli
atgagcacagttcatagtttaaaaattggaccgatgttttttgcagatgttttatctggtcataaaaaagctgaattaagaatcaatgaccgtgattttaaacgtggtgatttcctgttattgcgtgaatgggagggcgaatacactggtaataaactcattgtaaaaatcactcacatcttaccaattgataacttaattagtggttgcggtaattgggtgatgttatctatcactccaatcagtactaccgacacattatcgataattgaagcaatggtagggggtgagttatga

SEQ ID NO: 30786 - DNA, 228 bp, Escherichia coli
atgcagaaagaattaaaaaacatctttgtcgccgaaagtgatccactcatggccgtgattgacatagccaagcgcgaagagcgtaaaggtcgcgctctcgccgtttcaattcgtcttgaagctctggcaacacatatcgcaaacaaaggcttaaacgggattgaagcggcagaacttctgcgccgtgaagccacccgctatgaaaacgaatctcaggagctgcactaa

SEQ ID NO: 30787 - DNA, 843 bp, Escherichia coli
atggctaaatttggagacggggcagcacctgcaatcgaaagaatcctttctgcttatggacttagctcgcaaaaagaactaggcgaaaaacttgggatttatgccaataacatcagcagttggcttgctcgggatagtgttcctggcaatgttttcgttgaatgtgccttagagacaggcgctgatatcggatggctggttactggtgaacttgcaaaatcaaactctgagcgagtggggaacgtgcttaaaggcaaggagctttatgaagaggtaatggcttctggaggtaaacctgttctaaggcgcatccttgatgcttatgggttttctatgcaaaaagaacttggtgatttgctcggcatttcatcaggaactataagtacgtgggtaagacgcgattttttccccggtgatgttgtagtgacatgtgctctagataccgatgtatcactagaatggttagctactggcaaagggcaaatgcgagtcgctagggaaagtgtcatttccggtctttctattaaaaagtctcgcctagaatctggtgagcttaaagacgctggaacttggcatcctgacccttccatgattcctcctaattctgaaaagttaatttttgttgagggtgtcggtgcctcttggctggtcgactgttctgctacgaatataagtaatggccgctggttaattgatatcgacggtgctcttgatatttttgatgtaattcgcttgccgggtggaaaggtcagattgtcaaataagtctgctgagtttgaatgcaatattactgacattacgcctgctggggctgtagttttcacactggaaaaacacttttaa

SEQ ID NO: 30788 - DNA, 339 bp, Escherichia coli
atgaaacgtaaactttttttaactctacttttaacactttcatttggtgtggctgctgctgagaagagcaaagatatagacggagctgcatatggtgacaagtggcctctaacctttgaaaaggcaaaggtatcatgtgttaaccgtgcttatgcttttgtgtatgacatcaaaactgatgatagatatccactgaatggcatggcggtagatgctgttaaatcaggaaagctggagggttctaacttagatgacgtatggaaggatgaccctgattatgacggcgttaaaatttcaatttcaccggtgattgatgccgctacagccctttgtaattaa

SEQ ID NO: 30789 - DNA, 1320 bp, Escherichia coli
atgacttttactattacacaagacagacaattggcttcattgaccgttactaaagaagaaaaagaaatcttatttgctgtaaaatctaaagctgggggaggactctttatacgcgttcgttatggtagcgacaataaaagctggatttatcgttatcgaatagctcaaaagccagctaaattaacactaggtagttaccctgccatgggattagctcaagctcgtaaagctcatgcggatgcaattgaattagtaagaaaaggtatagatcctcgtcatattagaaaaaatgaaaaacaaaaaaatgaacaaatgattatttactctgaattatggaaagattggatagaattcagaaagacaagtaaaccaattagcaccagaacccttgcagattatgaagggacttatcaccgctaccttgaaaaaacattaggaaaccttcgcattgacgaacttaccaaaagcgttatttttgaacatctcagtaatgtaagaaaaaccagttctgaagcagttcgtaaaggattaattattctaaatatgactcttgatcatgccaacttacagggtatgcttgagcataacccagcacgactgctcaaaccagcaatgtttggtgcatcgatgaataaacctcgcgagcgatggcttcctgagaatgaactccggatgctatggaaggctttggatgatgctactgttggaggaggctccattgcatctggtggctatggaatttcctctagtgtggtattatctcattctgtcgcaaatgcactccgtttgattattttcacaggagtgcgccgctctgaagcggcacaaatgcgctgggatcaaattaatggagagcgttggaccataccagccactaaaaatgggaaaagccatattgttactttacatccgtatatgctttctttaataaaaacacaacgtgaattcactgaaggtgcatatgtttttggttctactagcaaacctggctttcccatcacaaatgacgctctgactcgcgcgttagaaagggttcgctctaagtatctagccgaacttactccattttctcctcatgatctgcgtagaagtgttgcgactggatgcgctgaataccttgatgctccagagcgcctaatagagttactgttaaatcatgtacccaaagaccgtttaatacgaacatatcaagtcggacaacaagcagaaaaattaaaaaatttatttatagaatgggggaattttattatgaataacgtcattactgtgcagcagaatgctccggataatgttattcatataaaatttgggaacagatga

SEQ ID NO: 30790 - DNA, 543 bp, Escherichia coli
atgaaaaaagaggatagatcctttattcgctgggtcagccttagttgtaaaatttttagcgctgccttatttattggggtggcatactgtgctgctatgagtgtgttcggcttggtttataatccagttccatattatttgtctgagtggattaactggatgcaacctacgttaaaactaccggttacttatcatgattcgagcttatatcttgataacggaacttacagcataggtggttatattctttctgttggttatcttttctggctttgcatgtctcaaatgtatgttgctgcatattttttggggaaattgaactatgttttaatcagtaagataatagtgttcagggcaacaaaagaatttcaccaaagatattcaaatataaaatcggttcgtttggaacgattgttaagtgaaaagcgtatagatacagaactagaggatataagccacgaacattgggaaaaatggcgtgaacattacaaaagtaatatgagttacgatgagtggaaacagaaattcaaaaaggttctttag

SEQ ID NO: 30791 - DNA, 180 bp, Escherichia coli
atgcctttaccatgtcagcgttgttgtattacagaactctggtacaggtcagtcagcaaatataactggtataaccatgatttactattggatagagtgttgttcaggatattgctggctttagtcttggatgaggagaccccctcattatttttgtgttcaataaataatttaggttaa

SEQ ID NO: 30792 - DNA, 678 bp, Escherichia coli
atggtatggactaaagccgcttacagtgaacgccttgatgagaacattacttctctcatcgtgcgtatacgcagagggacgtatcacccgcaagcggcaagaatcacggagataccaaaagaggacggcagtaaacggccgctggctctctcgtgcatcgaggataaactggtgcaacttgctgtcagcgatattctcagcagtgtctatgagccactgtttctgccctgctcatacggtttccgaccgggattaaattgtcatgctgctttgaaggctttgcaacagcaaacgttccgcaactggaatggcgcggtggtggaaatcgacatccgaaagtatttcaacacaattccacatactgaattgatgaatttactgcggaagaagacatcagatcgtcgttttctcaggctggtcgaggtctcaataacggcacctgttatcagggggaaagagatatcagagaatgaacagggttgcccgcagggttcggccctgtcgccaatactcgctaatatctacctgcatcatgtaatagacgaatggtttgctcaaatcacgcgttcacacatccatgggcgggctgagatggtgaggtatgctgatgatatggtatttacctttgagttctttagtgaagcaaaacgcttctttaggaggctaccaaaaggctga

SEQ ID NO: 30793 - DNA, 186 bp, Escherichia coli
atgaccgtacacagcaacgacggactatcatggttaacgaaacttgagcgtataggcgagaaatcagcagccaacaaacataagatgttcagtaatctggggcatctggtgaacgttgacatgctgaaaggacaattcctgctactcgacgggaataaggctacaggtattgatggtatggactaa

SEQ ID NO: 30794 - DNA, 129 bp, Escherichia coli
atgcctctcaagggaacgagtatctcaggtacaagtgcgaaaacacaagaccacagaaacgggtatcaggaagtcggagtcagccatagtagtgatgaagcgagtaatgatcgtggatcgaagggctga

SEQ ID NO: 30795 - DNA, 126 bp, Escherichia coli
atgttaatgcaacatgtcggcgtcgggtatttgggttatcaccgtgcagccatctatgcgatgaaacactctgttatgcctgagatcgccaaattaagaatgaaagcactgcacttctgggaatga

SEQ ID NO: 30796 - DNA, 234 bp, Escherichia coli
atgcctactcgtcatgtatgtcagaattttttccgtgatgctctcgcgccgtttcacaaatatctacaaaattctctactggatgccaccactgcgctcattaagggcacatttctcatgctgaccagtattagacgttatttgcccggcaacgcacaagtcaaaaacaaaattaaacgagtggatcgtctgcttggtaatgaattgcttcatcatgatagccatatgatttaa

SEQ ID NO: 30797 - DNA, 1110 bp, Escherichia coli
atgtccaatatacgactgaggaatgtcaccaaaaggttcggcagcacggtgacgctgcaccaggtcaatctcgatattgaagatggcgagtttgccgttttcgtcggcccttccggttgtggaaaatcgacgctgctgcgcatgattgccgggctggaagaggtcagcgaaggagaagtgctgatcggcgatgaggtgatgaatgatgtggtgcccgcccgccgtggcgtggcaatggtcttccagtcctatgcgctctatccgcatatgaccgtggcggagaatatgggctacgggctgaaggtgaataaagtgccgaaggaggagatccgccgccaggtggaaatggtggccaaaaccctgcagctctcgcacctgctggaccgtaaaccgaagcagctctccggaggacagcggcagcgcgtggccattggccgcgcgatcgtgcgtaatccccgggtgtttatgttcgatgagccgctctctaaccttgatgcggagctgcgcgtcgatatgcgcctgcatattgcccgtctgcaccaggaactgaaaaccaccatggtgtatgtcacacatgatcaggtggaagcgatgaccctggccgataaaatcgtggtgatgaaccacgggaaagtcgaacaaatgggttcgccgatggccctgtattacaatccggtcaacaaattcgtcgccggctttatcggctcgccgaagatgaactttttgccggccgtcgtcagcgactggcagccggaatgcttaacggtcaccctcgcgcaggaccatcagctgaccctgaatatcgccacccaaccgctgaagcccggcgctgcggtaacgttagggatccggccagaacacctcactccggaggtcactactggtacggtggtggagtttcaatgtgaagtggtggaacgtctgggtaacaatacctacctgtttggccagtgctacggccacgataacgtcaaggttttgctgcccggcgacgtccatttccgcccgtggcagaagattaatctggccttcgatgagcgcttctgcatggtctttgatgagaacgatctgcgcatcagcgccgacatcacggcgccggacgcgcactaa

SEQ ID NO: 30798 - DNA, 1233 bp, Escherichia coli
atgaaaaagaacacgcttgctgcactaatccttaccaccctggcggtggggcaactcaccagcctgcaggcgcacgccgccgggcagctcaacgtctgggaagacattaagaaatccgcgggtattaaaaccgcggttagcgattttgaaaagcagtacaacgtgaaggtcaatctgcaggagatgccttatgcccagcagctggaaaaactgcgtctcgacgggccggcgggcattgggccggacgtgctggtgatcccgaatgaccagctcggcggcgccgtggttcagggacttctctcgccgctcagcgtcgatcaggcgaaacaggatgcctttacgccagcctccatcaatgccttccgcatggacaacgcgctgtatgggatcccgaaggcggtggaaactctggtgcttatctacaacaaggacctgatcgacaagccgctggacagcctgcaagcctggctggactactcgaaaacccagcgcgagcagaacaaatacggcctgctcgccaagtttgaccagatctactacagctggggggcgattggcccgatgggcggctatatctttgctaaaaacgacagcagcggctttaacccgcagcaggtgggcctcaatacccccggcgcagtggaagccgtcaccttcctgaaaaaattctatgccgagaaggtctttccggcggggatcctcggcgataacgggctgaatgccatcgattcgctgtttaccgagaaaaaagcggcggcggtgatcaatgggccctgggccttccagccatatgaagccgctggcattaactatggcgtggcgccgctgccgaccctaccggacagtaagccgatgagctccttcctgggcgtcaaaggttatgtggtatcgacctggagtaaagacaaagcgatggcgcaacagtttatcgagttcatcaaccagccgcagtatgtgaaagaccgctatgtcgccaccggcgaaattccgccgctgaaggcgatgattgacgatccgctgattaaaaacgaccaaaaggccagcgccgtcgctatccagtcggcgcgggcggtggcgatgccgggcattccggagatgggggaagtgtgggggccggccaatgccgcgcttgaactgagcctcaccggcaagcaggcgccgcaggccgcgctcgataatgcggtgaaacagatcacgatgcagatcgaagcaatgcaggccagcaatcagtaa

SEQ ID NO: 30799 - DNA, 1308 bp, Escherichia coli
gtgagcatccattccagcgaaaattttggcgacgcgcgcgggcccgggcggcatgcgtggtgcggcctgctacttgcaatcgtgccgggtttcggtcagttttatcatcgccagtggctgaaagggctggtcttcctggcgctgctgagcagctttctgggtattttttatgatttcctgcgcgaggggctgtgggggctatataccctgggcgaggaggtaccgcgcgataactctatcttcctgttagccgaggggattatcagcgtgctgatcgtcgcctttggcgtgctgatctatttcctctcgctgcgtgatgcgtggctcaacggtaaaaaacgtgatgaggggagcgttctcaacagcgtgcgtaagcagtaccagatgctgctaagcgacggctttccgtacctgatgatcaccccgggttttattttgctggtctttgtggtgatctttccgattctttttggttttgccatcgctttcaccaactacaacctgtaccacacgccgccagcgaagctggttgactgggtggggctgaaaaacttcgtcaatattttcaccctctccatctggcgctccaccttcctggatgtgctgcagtggaccgtggtatggacgctgctggcgaccactctgcagtgtacggtgggcgtgttgttggcgattctggtcaaccaaaaagatctgcgctttaaaccgctgatccgcaccatctttattttgccgtgggcggtgccggggtttgtcaccatcctcgtctttgccgggatgttcaacgactcctttggggtcatcaacaacgcgatcctttcattcttcggcatcagtccgaaggcatggctcaccgatccgttctggaccaaaacggcgctgattatgatgcagacctggcttggcttcccgtttgtgtttgccatgaccaccggcgtgctgcaggcgatcccggacgatctgtatgaagccgcaacgatggacggcgccagcgcgtttacccgtctgcgcaccatcactctgccgctggtgctgtacgcgatcgcgccgataatcatcacccagtacaccttcaactttaataattttaacatcatttacctgttcaacaacggcggccctgcggtggtgggttctaacgccggcgggacggatattctggtgtcgtggatctataagctgacgatgtcctcgtcgcagtacgccatcgcggcgaccatcacgatcctgctgtcgatctttgtcgtcggcctggcgctgtggcagttccgcgccaccaaatccttcaaaaatgacgacatggcgtaa

SEQ ID NO: 30800 - DNA, 852 bp, Escherichia coli
atggctcaatcacccagtattaaacgcgaaaagtggatccgactctctctcacctggctggtggtcatcctggtctcggtggtgattatctatccgctggtctggacggtcggggcatcgctgaacgccggcaatagcctgctcagtacctcaatcattccggaaaatgtgtcgttccagcactatgccgatctgttcaatggcaatgtgaattacctcacctggtactggaactcgatgaaaatcagcttcctgaccatggtactgaccctgattagcgttagctttaccgcttacgccttctcccgcttccgctttaaagggcggcagaacgggctgatgctgttcctgctgctgcagatgatcccgcagttttctgcgctgattgcgatctttgtcctgtcgcaactgcttggcctgattaacagccatctggcgctggtgctgatctacgtcggagggatgatcccgatgaatacctggctgatgaaagggtatctcgatgcgatccctaaagacctggatgagtccgctcgcatggacggtgccagcagctttcgcatctttatcgagatcatcatgccgttgtcgaggccgatcctcgcggtggtggcgctgttctcgttcactgggccgctgggggatttcatcctctccagtaccatcctgcgtaccccggataaatacacgctgcctatcggtctgtataacctggtggcgcaaaaaatgggtgccagctacaccacctacgcggcgggggcggtgctgatcgccgtaccggtggcgatcctctacctggcgttacaaaaatacttcgtctccggcctgacctcgggcagcactaaaggataa

SEQ ID NO: 30801 - DNA, 1203 bp, Escherichia coli
atgaaaagattcacacccgcatggcttgcggtttgtctggcatgcagtttttccacctcttctctggccgcggacgagcttgaaacccgcgcctttcaaggcatgccggcggactttatcaaaggcgcggatatctccacgttgctggacgccgaaaagcacggggcgacgttctacgatcagaataatcagcgcaaggatccgatcgctattctgaaagagaacggcgtcaactatgtccgcctccgtctgtgggtggatccgcaatcggcgagcggcgaggactatggcggtgggaacaatgatctggccaccaccctggcgctggcgaagcgggcgaaagtccaggggatgaaactgctgcttgattttcactacagcgatttctggaccgatcccggcaagcagttcaagccgaaagcttgggaaaagatggattacccgcagctgaaaacggcaattcatgactatacccgcgataccatcgcccgctttaagcaggcgggcgtgctgccggatatggtgcagattggcaatgaaatcaacggcggcatcctgtggccggaagggaaaagctgggggcaggggggcggcgagttcgaccgactggccggcctgctgaactcggccattgatggcctgaaggagaatatacgtaacggcgagcatgtgaaaatcatgctgcatctggccgaagggaccaagaacgataccttccgctggtggtttgatgagattgacaagcgccatgtaccgtatgacgtgattggtctgtcgatgtacacctactggaatgggccgatcagcgccctgaaggccaatatggatgacatcagcaaacgctataacaaagacgtcatcgtcgtcgaggcggcctatgcctataccctagccaactgcgataacgcggaaaatagtttccaggcgaaagaagaaaaggatgggggatatcccgccaccgtacaggggcaatataactatattcacgatttaatgcaggcggtggttaatgtgcctgaccagcgtggtaaaggtattttctattgggaaccaacatggattgccgtgccgggaaatacctgggccacgccggcgggaatgaaatatatccatgacgagtggaaagagggtaatgcgcgtgaaaatcaggcgctatttgattgccagggaaaagtattgccgtcggtaaaagtatttaattga

SEQ ID NO: 30802 - DNA, 2058 bp, Escherichia coli
atgaataaatttgcacctttacatccgaaggttaatacgctgctgcatggcgcggattataatccggagcaatgggagaatgaccccgatattattgataaagacattgccatgatgcagcaggcaaaatgcaatgtgatgtcggtgggaatatttagctgggcgaaactggagccacgcgaaggggtgtttgatttcgcctggctggacactattctggataaattgtatgccgccggtatacatgtttttctggccacgccgagcggcgcgcgtccggcgtggatgtcgcaacgctatccgcaggttctgcgggtggggcgcgatcgggtgccggccctgcacggcggccgtcacaatcattgtatgtcgtcgccggtctatcgcgagaagactctgaaaatcaatagcctgctggctgaacgttattcctcacacccggcggtgctgggctggcatatttccaacgaatatggcggcgaatgccattgcgatctctgccagaatcgttttcgcgactggctgaaggcgcgttaccagaccctggagaatctcaaccaggcctggtggagcaccttctggagccatacctatactgactggtcgcagattgaatcgcctgcgccgcagggcgagatgtcgatccacggtctcaatcttgactggcatcgctttaacaccgctcaggtgaccgatttttgccgccatgaaattgctccgctgaaagcggcgaattccgctctgccagtgaccaccaattttatggaatatttctacgattacgactactggcagctggcggaggtgctggatttcatctcctgggatagctatccgatgtggcaccgcgataaagacgaaactgcgctggcctgctacaccgcgatgtatcacgacatgatgcgcagcctgaagggcggtaagccgtttgtgctgatggagtccacgccgggcgccaccaactggcagccgaccagcaaactgaagaagccgggaatgcatattctctcctcgctgcaggcggtggcgcatggcgccgactcggtgcagtatttccagtggcggaaaagccgcggttcggttgagaaatttcacggcgcagtggtcgaccacgtcggacatattgatacccgcattggccgcgaagtctgccagctcggcgagatcctcagtaagttgccggaggtgaggggctgtcgcaccgaggcgaaagtagcgattatcttcgaccagcagaaccgctgggcgctggatgacgcccaggggccgcgcaatcttgggatggaatatgagaagacggtcaacgagcactaccgcccgttctgggagcagggcatcgccgtcgatgtgattgacgccgatgtcgatttaacgccgtaccagttagtgattgccccaatgttatatatggtgcgcgacggctttgccgggcgggcggaggcgtttgtcgccaacggcggccacctggtgaccacctactggaccggcatcgtcaatgagtccgatctctgctatctcggcggcttcccgggcccgctgcgcaatctgctggggatctgggcggaagagatcgactgcctgaatgacggcgagtttaatctggtgcagggacttgccgggaatcagtgcggtctgcagggcccttatcaggtgcgccatctctgcgaactaatccatacagagagcgcccaggcgctggccacctaccgggatgatttttatgccggccggccggctgtgacggtgaacgagttcgggaaaggcaaagcctggcatgtggcctcccgcaacgatttagccttccagcgcgatttctttaccaccctgagcaaggagctggccctgccgcgggcgatagcgacggagttaccacccggcgtggtggctactgcgcgcaccgacggtgacaactcttttatcttcctgcagaactacagcgcccaaaaccataccctgaccctgccgcaaggatattgggattgcctgaccgacgcggcggtgtcggctccactgaccctgtcggcatgggattgccgtattctccgtcgtcacgcgtaa

SEQ ID NO: 30803 - DNA, 315 bp, Escherichia coli
atggtgagtttaaaatccttcctgcactatttctccccagcgcgtccggcacagccattaagcgaggcggaaaaacagcaaatcgaggcgcttattcaggccttcggcggcgaagcgaatattacgcaagtggatgcctgtattacgcgtctgcgcgtgactgttcgtcatcttgcagacgtagatacggacgcattacagcagcagggcgcgctgggggttattattctttgtcaacaggtgcatgctattttcggtaaacagtccgatgcgctgcgtcagcttctggatgaacattttgctgcccggaaataa

SEQ ID NO: 30804 - DNA, 1272 bp, Escherichia coli
atgaacactacactgcgtgctctttcagtcgcgttagccgctgcgctaattgctccttccgcgtttgcggcttccgccgcgatcccaacgatcgatttccatggctatatgcgcgccggggttggagtctccagcgacggtagcgaagtggaatggcaaaaaaataagctgggccgtttggggaacgagtcggatacctatggcgagctggagctgggctctgaagtctataagaaagatgacgtcagcttctatctcgacagtatggtcagcatggtctccgacggctctaacgataatgaaaccacgctgaacgatgatgcacagttcggcttacgtcagttgaacctgcagataaaggggctgatccctggcgatccaaatgctgtgatctggggcggtaaacgttactaccagcgccatgatctgcatatcatcgataccaaatactggaacatttccggctccggagccggggtggaaaactatactctcggcccgggcgccgtctcgctggcctggatccgcggcgatgccaacgatgttgactatcgcgtcgatggcgacagcaacgtcaatatcaactatatcgatttacgctacgcgggctggaagccgtgggcgggctcgtggaccgaattcggtatcgactacgcgatgccaaacaccacgaaaaaacaggatagctatggcggactgtacgatgctgacaacggcgtcatgctgaccggtgaaatcagtcaggatatgctgggtggctataacaaaaccgtgctgcagtacgccaacaaaggcctggcgcagaacatggtctcccagggcggcggctggtacgatatgtggaactacgtgaatgacgccaccggttatcgtgtgattaacaccggcctgatcccgattactgaaaagttctctatcaaccacgttctgacctggggctcggcggatgacattaccgactataccgacaaaacgcggatgctgtcgctggtcgcccgcggacagtaccagtttaccgactacgtgcgcctgattggcgaagttggcggtttctatcagaaagacagctacaacaatggcaccagctacaaacaggcgggtgagaaatacaccattgcgttgggcctggcggacgggccagactttatgtcacgtccggaattacgcatttttgcttcgtatttgaatgactccgaagatggtaaaccgtttgaagaccagacggcgaataatacctggaatttcggcgtgcaggttgaggcctggtggtaa

SEQ ID NO: 30805 - DNA, 1071 bp, Escherichia coli
atgaagtctaaaagcgctactctggaagacgttgcccgtcatgcgggcgtctcttaccagaccgtgtccagggtactcaacaaatctgccaatgtatccgaagcgacgcgccgcaaggtggagaaatcgatagaggcattacgctatgtgccaaaccggctggcgcagcagctggtgggaaaggagagtcagacggtcgggctggtgactatttcgctggcctggcatgcgccttcccaggtggcgacggcggtaaaacgttatgccaatctggaaggttatcaggttctgatttcgatgatcgatgagagcgtcaaccaaagtatccaggattctatcaatgagctgaaatctcagcgagtggacaaagtcattatcaacgtgccactggagaccgaacaggcgcagaaaatcgccgctgacaacgatgatatcgtctgcctgtttctcgatgttgatccttacagctccgtgtttaacgtttcgtttaacccggcggacggcacgcgggccagcgtcaaatatctctatgagatggggcatcgggagatcgcgttgctggcaggaccggacaattctgtctcggccaaactccggttaaaaagctggctggagactttgcagggctacggtctgaagccggtgaccgtcctgcacggcaactgggatgcgcaaagcggctatgccggtgcgctgcagatgctgcgcgaaacgcccaattttagcgctgtgctggtaggaaatgaccagatggcgttgggggtgctcagcgccttccatcagcatcaggtggcggtgccgggtgagaagtccgtcattggctatgacgatacctacgaaagctcttttttctatccgtcgttgagtacggtgtcgctggatctcgatctgcaggggaaggaggcggtgcggcggatcctcgccagcaccagcggtgcgccgcatacctcatccattctgcctgcgcgcttggtgatacgccattccagcggcgcccgaatcgagcagggaaaagatctgcaggccattgcggaacagctccgcgccatcgcccacactctggcaccctga

SEQ ID NO: 30806 - DNA, 1170 bp, Escherichia coli
atggctaagggtgatattaaaaagttgaagtttgaatctttctacgatagtgaatcgaataacgaagttattcgattaacgccaacagatattctttgccatcgcaattatttttatcaaaaatgttttacaaatgatggtaaaaaattgattttcgctgctgagtttgattgtaaccggaattattatcttatggatttggtaactcagacagcgaaacaactcactgaaggagctggagataacacctttggtggcttcctgtcccctgatgataattatcttttttatgtgaagaatgaaaaacatttgcagcgtgttgatttgaccacattagaagaagttaccatatacacagtaccggataattgggtggggtacggaacatgggttgctaatactgattgtacggaaatcgtcggaatcgaaatcagtaaaactgactggaccccacttagcgactggaaaatatttctggaattttatcataagaatccacgatgccgtttaattacgattgatctggaaaccggaaacgctgaagtgatattggatcgtaatacttggttagggcatccaatttttcgtccgaataataacgatactatcgccttttgccacgaagggccccatgacctggtggatgcaagaatgtggatgattaaccgtgatgggacaaatgagcgtaaagtgcatgagcaccaacctggtgaaagttgcacacacgagttctggatccctgatggatctgcactggcttatgtttcctatatgaaaggacagcaacagcgttatattcgtaaatataatcctgatactgatgaagattcattagtgatggaaatgccggcatgttcccatttaatgagtaaccataatggtattctctatgttggtgatggttcaggtagtccggttgatgttaaagatacctgcagttataaaattgaaaatgatccctggatttacattcttagtagtaaaaataaaaaaatacataaattggtgaaacataatagttcctggagggtactgaaaggagaccggcaggtaacgcacccgcatccatcattttctccagataataagtacgttttatattcttgcgatgccgaaggtgaaccagcactatatatggctaaaatccctgaggaaatcttaacccagtaa

SEQ ID NO: 30807 - DNA, 963 bp, Escherichia coli
atgttgctctgcccgctcctggccggggcgaatcacccgggtctgctgtccgtccgacagcgtgacactgtcaccggaaaccgccgtcaccgtccagacgctgttggccacataaccgcgctcccggtcactcttcgtgaagcgcatccggtcaccggtccccacccggatggtgtccggggtgtacagtgtgacgccttcagccaccgcctcccggggcgaaatcagccgcgtgttaccttccgcatcctccagggttatcagcccgtcatccttactgataccggcaatccggtgatacacactatccaccagggcaagggcatccgggttattctcccaggtggagagacgacgcagctccccgtcacgtatattcgctgtgttcaggacaggcaccatgacctgctctttgcccagctcaccggccttttcccgtgcatcatgaatcatgctgttcagtacgcgccggtcctcattcaggtgcgtgacaatcagcgtctgctcccgtgcttccggtgttctgccggtatagtcgcggacaatggcttcatacagtgtcatggggacatccggaaaagcctcgcctttcagcatcgccttctgctgcgcttctgccagtttcgcttcctggctgtgactgaactccgtcacggagtgctccggtgcccatgcgccctccagacgtggcacctgagacggtttcacactctcaagtccggacagcgccctttccacatcccggttaatcaggctgtataccgcctcccgcagttccggcgtctgacgcacaatctccttcatgatggccacatcggcagcactgcgcgtctgctggagacggaaaggctgaccgggcgcgatggcctgcagctggtccgtgtcaccgctggccacggcacgaccaccaccggccgcaatcagggcgtatgcccgtgccatgtcggtattgcccaccattga

SEQ ID NO: 30808 - DNA, 570 bp, Escherichia coli
atggcctgctgtgccggcgtgtgcagcccggctttctgcagactgatagcggtttccagcgatgtctcaccggcccgcgcctttatctgctcagaaaccaccgtaaaggagggatggcggacaagtttttccgcagtacgggtttcatccagtgaggaatacagccggacatcacgaccgctgcgggccagaccgttcagggtggcgttgtccattgccatctgtgtgacggaggcaaaaaccttcgcactgtcgctgacggaatgcccgggcgtttccacccagccgttctccagcttcagtgccgtgaacggtgaatcagccacaggcagggtggccggttcagcacgccccggcacaacaaccgtcatcgcatcttcactgacggatgccacctgcaggcggtcaccgccggagacgcggagtccgggaattttccctgtcaccctcagacgctcgccgtctgccaccggcattttttccggccggaacagcgaccagctgctgtccagcgaggaaatacgcaccacctgcgtttcgccctgcgcatcccgcagggtcaggctgtga

SEQ ID NO: 30809 - DNA, 378 bp, Escherichia coli
atgtatctggttgaaagcctcacgaatcgccacgccgcgctttttcagttcgatttgcaccagaggcaagccattaaccaggatagttacgtcataacggttagcgtgagaacctgcctgttcaaactgctggataatctgcactttgttgcgcatgagattctttttatcgatcagatagatgttctcaagacgcccgtcgtcaaaaataaagtcgcagatatagtcgatatggattttacgggttttatccagaataccatcgctggggttgtccagatactgctccgtgaagcgccgccactcgctgtcattaaacatcacaccattgaggctctgaagctgttcccgaacattggacagcattgccgactgtga

SEQ ID NO: 30810 - DNA, 999 bp, Escherichia coli
atggggcacggtgtaactgttctatttttgttgttgcttttggttcatataatttttgacttttatttgcaaactgaggagatggttagagaaaaggcattcgataatggcattggtagggctttaaaggctcacttatttcatgccgtgatgcatggtttttttctatgtctatcctgcttcgctttcatatatgtactgcttggctgtaccaatctattaaactttatgctatttgttttgctgttttctttatttacattttttcattttgcaatagatgtcgcaaagtcgattacctctctgaaagtaaagggtttttattgttttgctgttttcttgtttgatcaagttttgcatattttaactatattttttgttatttattatttcttttgtgattatggcgtgtatatatatgattttaatttcataaaatatgttggcggggtgttgatatttgcttgttctatagcgtttttactaaagccttcatctattatagtttacttattctttaaatcatcaggtattggtgatggttcagagaaggttaaaataaccaaaagtaaaattgcggaattgctttatattgtattgaataaagaactgggtgattctgatgttaaagattgcaaggtggcagtaaataaatacaagaaaaaagcagaggaaattgtaatcggtatttctgatgggcaggctgatattgatatcagaactatttccaaagttaataatgctggtagatttataggttaccttgaaagattgataatttttttgtttttgattttaggctcggtcactgcggttgtcgcggtgttagcaatgaaaacagctctgagatttagtgatctaaaagatgataatgatagtgggaaggctgaatatataatgattggtacattttttagtcttattgtaaccgtgataatatctgtgttagccagaatgtacttgattgagattggtataaaaattaatgattttagttag

SEQ ID NO: 30811 - DNA, 648 bp, Escherichia coli
atgggggttatcactggtgatttgtatcggtcgagtaccgattacgaacgaggggtttcttacattggcttgatggaggttatgttagaaaagataaagaaaaacaataggttaagagttagcgatgttgatttttttcgaggggattcatttcagataaccagcaaagatcctattaatttattaagtattgccgtttatattagggcttatttaagatcatatagtgagaaaaacgatggtaaagggatgtatgatgctcgcttggcgatatccatagataaagttaataagtatagaagggatataaactcaatatttgaatctgctcagataaagtcagggaaaagtttagatctcattgaaaatgatgagatgatggtcttcgactcatcactttatgatttaaaggaaatatattccccatctattattcttcttgatgcattgctttcaatgttgtccaaacctcaatcagaaatcctaagggagattgtatatgatagggatgcaagtatttctgaaatagcagaaagactgggaaagagtaaacaagttgtttataaaaccataaaaagaggagcggttgataagataataaagtttttggatgctcatctttcactgcttggaatgagatttttttaa

SEQ ID NO: 30812 - DNA, 528 bp, Escherichia coli
gtggtcgcagtggtaaagatgaacttttcgcgccggtgtgtattccggctccacctgtctggccagttgctctaccgtcagcccgcactgcgcaagccacgcccggctttcactgctcacgcggtctgcccggatttcttcctccagtctgtccagcagccgtaccagttcagccgggaacaccacgccgtgcccgtcctcgctcccttcctgctgcagcttctccgccaggctgtggcgctgcgttttctcccgctcgccgttgtctgtttcgatgcggatgagtggtgtgaagcttcccggctcgtataccgtctggatccggctctgttgtgtctgtatcgtcgtcagcctgtcaccgtcccagccgtaccacgttacctccggtttacgcgacagcgacatccaccccgtcaggtcacgtacccgccgccacacccgtttacccgtccggcggcccagcgggtcgtagaggtagcggctctccacctgcggctcgccatgctgtatccgcgtgtagaactctag

SEQ ID NO: 30813 - DNA, 960 bp, Escherichia coli
atggcaagcgacattaacagtatgaacctcagttcctgccaggcggcacaggggattatcggcgggcttttcccccggacgcaggtgtcccagcagaaagtctgtcaggacattgccggtgagagcaatatttttgctgactgggctgcttcccggcagggatgtaccgttggcgggaaatctgacagcgtcagggataaagccagcgacaaggataaggagcgggtgaccaaaaacatcaacatcatgtggaatgcgctttccaaaaacagaatgtttgacggcaacaaagagctgaaagagtttgtgatgacgctgaccggctcactggtgtttggtcccaacggcgaaatcacaccgctatcggccagaaccactgaccgctcaattatccgggccatgatggaaggcggtacagcaaaaatttatcactgcaacgattctgacaaatgcctgaaagtggtggcagacacaccggtgaccatcagccgggataatgcactgaagtctcagattactaaacttctggccagcattcagaacaaggctgtcagtgacacgcctctggatgacaaggaaaaaggctttatttccagtaccaccatccccgtcttcaaatacctggttgacccgcagatgctcggtgtttccaacagtatgatttaccagctgacggactatatcggttacgacatcctgctgcagtacattcaggagctgatacagcaggcccgggcgatggtggccacgggaaattatgacgaagcagttatcgaacatattaacgacaatatgaatgatgccacccggcagattgcggcgtttcagtcacaggtacaggtgcagcaggatgcgctgctggtcgtcgatcgtcagatgagctacatgcgtcagcagctttccgcccgcatgctcagtcgttaccagaacaactatcacttcggagggagcacgctgtga

SEQ ID NO: 30814 - DNA, 246 bp, Escherichia coli
atgatatttggtgtggctggtatggcgttaataggtatctatttctctgtaaaaatgaaattagataaagcatctcatgccgaaataactaaagaattagagcgtctgaaaaaaggtggcagaaaagaagatgctacaccggaaattcgtaagcttgttaagcaactgactggttatgaatatgaccagtgcttcggtaataacaatgttggctttaaatttgaaaacaaagcaggggcattctag

SEQ ID NO: 30815 - DNA, 510 bp, Escherichia coli
atggtcgggaagtgctgtcatgagcgcactgaccagcgtatccagttcccagccggtgcaggccgatacggcaacaacccgatgtacgggccggaacagccggaataccgcatctgttttctcacgaatgttctgtgcctctgcgggagaaggctgaatgccggccatatcccattcatggcagggctccgttttgtcggcctgcatcaccacaaacagtacccgctgatgtccccggtgcaggatgtgtcgccagaaatactcatccacagacagggcacggtcatcggctttaatcagccacagtaccaggtccagttcgagcagaatgtcacggtacagggcttcatactctgcatccctgtcccggctctcgcccaccccgggcaggtcagtgataatcatgctgtgaccatggccattcagacggaagcgccgcacttcccgggtgccggcgtgaacatcactgaccggggtgacctccccctgaaacagtgcattacagagtga

SEQ ID NO: 30816 - DNA, 228 bp, Escherichia coli
atgtccgtacttgcactggaaaaaccttacccgacatatgcactaccaccgctggtgagaaatgcaataattgaaactcaaaaaaatacacaggcacccctggctctggtggcaacatccgcattaacagcgatgtcagtttccagccagaatcaggctgatgtatgcaggccaggaaatttatgtgggcctgttaatctttactctctgattctggctggaaactga

SEQ ID NO: 30817 - DNA, 393 bp, Escherichia coli; identical to SEQ ID NO: 7903

SEQ ID NO: 30818 - DNA, 261 bp, Escherichia coli
atgacacagggctggcgggaggataaatgcccgtctgtccgcgccgggaaaaaaccgcgcgtcggtggcgctgaaaggggccgcgctcacgcgccgcccctttcattacgcggacgttctgatgggggcttctgtcttttcagacctgtcatttgtctgttactgatgatgttgttgttcctgctactgctactgctactgctactgctactgctactgctactgctactgctactgttcttcttttttctactgctctga

SEQ ID NO: 30819 - DNA, 198 bp, Escherichia coli; identical to SEQ ID NO: 5330

SEQ ID NO: 30820 - DNA, 171 bp, Escherichia coli
atgcagaccttcttcccgaatatcccggtggccacaccgaccaccttcctggtcaacgtcaacacgcttgaggcattaccgcttttacagggggcaacggatgccgccggttttatggcgcggatggataccgttctgcagatgtacggagggaaaaaaggtgcgaaataa

SEQ ID NO: 30821 - DNA, 813 bp, Escherichia coli
atgaaatcactgtttaaagtaacgctgctggcgaccacaatggccgttgccctgcatgcaccgatcacttttgctgctgaagctgcaaaacctgctacaactgctgacagcaaagcagcgttcaaaaatgacgatcagaaatcagcttatgcactgggtgcttcgctgggtcgttacatggaaaactctcttaaagaacaagaaaaactgggcatcaaactggataaagatcagctgatcgctggtgttcaggatgcatttgctgataagagcaaactctccgaccaagagatcgaacagacactgcaagcattcgaagctcgcgtgaagtcttctgctcaggcgaagatggaaaaagacgcggcagataacgaagcgaaaggtaaagagtaccgcgagaaatttgccaaagagaaaggtgtgaaaacctcttcaactggtctggtttatcaggtagtcgaagccggtaaaggcgaagcaccgaaagacagcgatactgttgtcgtgaactacaaaggtacgctgatcgacggtaaagagttcgacaactcttacacccgtggtgaaccgctctctttccgtctggacggtgttattccgggttggacagaaggtctgaagaacatcaagaaaggcggtaagatcaaactggttattccaccagaactggcttacggcaaagcgggtgttccggggatcccaccgaattctaccctggtgtttgacgtagagctgctggatgtgaaaccagcgccgaaggctgatgcaaagccggaagctgatgcgaaagccgcagattctgctaaaaaataa

SEQ ID NO: 30822 - DNA, 2886 bp, Escherichia coli
atgggcatcaaacaacacaatgggaataccaaagccgatcgtctcgctgaattaaaaatccgttcgccctccattcaactgataaaatatggcgctattggtttgaatgcaattatcttttcccccctgctgatagctgctgatttaggaagtcaaaatggcaccaatattactattaatgatggtgacagaattacaggagataccgccgatccatcaggaaacctctatggtgtaatgaccccagcaggaaacacgcctggcaatatcaatctgggtaatgatgtcaccgtcaatgtcaacgacgcctctggatatgcaaagggaatcgttattcagggcaagaacagctccctgacagctaaccgacttacagtagatgttgttagtcaaacctctgccatcggcattaatttaattggtgactatacccatgctgacttaggcacaggcagcaccattaagagtaacgatgacggcatcattattggacatagctcaacactaacagccactcaattcaccattgaaaactcgaacggtataggcctaaccatcaatgactatggcaccagtgtcgatcttggaagcggaagtaaaatcaagaccgatggaagtacaggtgtttatatcggtggtctcaacggcaataacgccaatggtgctgcgcgttttacggcgacagacctgacaatcgatgttcagggctacagcgccatgggaataaacgtacagaaaaactctgttgtcgatctcggaacaaacagtaccattaaaaccaatggcgataatgcgcacggcctctggagctttggccaggtgagcgcgaatgcactcactgttgatgtaactggatccgcggccaatggcgtcgaagttcgtggtggtacaaccactatcggtgctgatagccatatttcttccgcgcagggcggtggcctcgtaaccagtggttcagacgcgacaatcaatttttctggcacggcagcgcaacgaaacagcatcttttccagcggttcttatggtgcctcagcccagacggcaacggctgttgtcaacatgcaaaataccgatattacggttgatcgtaatggcagtctggcgctgggtttgtgggcgctcagcggcggtagaataaccggagacagtttggctatcaccggcgcggcaggagccagggggatttatgccatgaccaacagccagatcgatctcacgagcgatctggtcattgatatgagtacacccgaccagatggccattgcaacgcaacatgacgatggttatgccgccagccgcatcaacgcctcgggtcgtatgcttatcaacggtagcgttctttccaaaggtgggctaatcaatctggatatgcaccctgggtcggtttggacaggttcttccctcagcgataatgtcaatggcgggaaactggacgttgcaatgaataacagcgtctggaacgtaacaagtaattctaatctcgacacgctggcgctgagccattcaactgtcgattttgccagccacacgtcaactgccggcacatttaccacattaaacgtagagaacctgagcggtaacagtacctttattatgcgtgctgatgttgttggcgagggtaatggcgttaataataaaggggatttattgaatatcagcgggagtagtgctggtaatcacgtattggctatccgtaaccagggcagcgaggccacaacgggaaatgaagttctgacagtggtaaaaaccactgacggcgcggcctcgttcagcgcgtcttctcaggttgagttggggggatatctgtacgatgtgcgtaaaaatggcactaactgggagctttacgcttccgggacagttccggaaccgactcctaatcctgaacccacaccagctcccgctcagcctcccatagtcaaccccgatcctacgcctgaacccgatcctacgcctgcccccgctcccacacctaaacccaccacgaccgcagatgctggcggcaattatctcaatgtcggttacttattgaactatgttgaaaaccgtacgctgatgcaacggatgggtgacctgcgaaatcagagtaaagacggaaatatctggctgcgcagttatgggggaagtctggactccttcgccagtggcaaactgagcggctttgacatgggttacagcggtatccagtttggtggggataaacgtctctctgatgtaatgccgttgtatgtcggtctgtatattggctcaacacatgcatcgccggactatagcggaggcgacggtaccgcacgttcagactacatgggaatgtacgccagttacatggcacaaaacggtttttacagcgatctcgttataaaagcatcgcgccagaaaaatagtttccacgtactggacagtcagaacaacggcgttaacgccaacggcactgcgaatggaatgagtatctccctggaagccgggcagaggttcaacctgtcccctactggttatgggttctatatagagccgcaaacccagctcacatacagccaccagaatgagatggctatgaaggcgagtaatggcctcaatatacatctgaatcactacgaatcgctgcaggggcgtgccagcatgatactgggatatgacatcaccgcaggcaacagccagctgaatgtctatgtgaagactggcgctatccgcgagttttcaggggataccgaatatctgttgaacaactcccgggagaagtacagtttcaaaggtaatggctggaataacggcgtgggagtcagtgcacagtataacaaacagcacacattctatctcgaagcggattacacgcagggtaacctctttgatcagaagcaagtcaacggaggatatcgcttcagcttttaa

SEQ ID NO: 30823 - DNA, 426 bp, Escherichia coli
atgatccgcgctgaacaaccgcagcgtcagtgggcagaccgttcgcgcacagtgctggccgggcagagcctcggcgggatcagtgcgctaatgggggctcgttacgcaccggaaacgttcggtctggtgctcagccactctccttcaatgtggtggacgccagaaagaaccagtcgaccaggcttgttcagcgaaaccgatacctcatgggtgagtgagcatctgctttctgccccaccgcagggcgtgcgtatcagcctgtgcgtgggatcgctggaaggttcgacagtgcctcacgttcagcaacttcaccagcggctgattaccgctggcgtcgaaagccattgcgcaatctacaccggtggtcacgattacgcatggtggcgcggtgcactgattgacgggattggtttactacagtgttga

SEQ ID NO: 30824 - DNA, 819 bp, Escherichia coli
atgtatgcccgcgagtatcgctcaacacgcccgcataaagcgattttttttcatctttcttgcctcacccttatctgtagtgcgcaagtttatgcgaagccggatatgcggccactggggccgaatatagccgataaaggctccgtgttttaccatttcagcgccacctctttcgactctgtcgatggcacacgccattatcgggtatggacggccgtgccgaatacaaccgcaccggcatcgggttacccgattttatatatgcttgacggtaacgcagttatggaccgcctggatgacgaactgctcaaacaattgtcagaaaaaacaccgccagtgatcgtggctgtcgggtatcagaccaacctccctttcgatctcaacagcagggcttacgactatatgccagcaacagaaagcagaaaaacagatctccactcagggcgttttagccgtaagagtggtggcagcaacaacttccgccagttactggaaacgcgtattgccccaaaagtggaacagagactgaatatcgatcggcaacgccgcggcttatgggggcactcctacggcggcctcttcgtgctggattcctggctgtcctcctcttacttccggtcgtactacagcgccagcccgtcgttgggcagaggttatgatgctttgctaagccgcgttactgcggttgagcctctgcaattctgcgccaaacacctggcgataatggaaggctcggcgacacagggtgataaccgggaaacgcatgctgtcggggtgctgtcgaaaatttatcccccccctcactatactgaaagataa

SEQ ID NO: 30825 - DNA, 195 bp, Escherichia coli
atgctgtcggggtgctgtcgaaaatttatcccccccctcactatactgaaagataaaggcgtcaatgccgtattttgggatttccccaacctgggacacgggccaatgtttaatgcctcctttcgccaggcactgttagatatcagtggtgaaaacgcaaattacacagcaggttgtcatgagttaagccactaa

SEQ ID NO: 30826 - DNA, 366 bp, Escherichia coli
atgattgatgtcttaggaccggagaaacgcagacggcgtaccacacaggaaaagatcgcaattgttcagcagagctttgaaccagggatgacggtctccctcgttgcccggcaacatggtgtagcagccagccagttatttctctggcgtaagcaataccaggaaggaagtcttactgctgtcgccgccggagaacaggttgttcccgcctctgaacttgctgccgccatgaagcagattaaagaactccagcgcctgctcggcaagaaaacgatggaaaatgaactcctcaaagaagccgttgaatatggacgggcaaaaaagtggatagcgcacgcgcccttattgcccggggatggggagtaa

SEQ ID NO: 30827 - DNA, 204 bp, Escherichia coli
atgatttgtgatggcgatagcgaggaaactcatgacggtaatgccagcctatcaggtaataccacatcgcatggccaatacgtttcattgttgaaggtgttaagttctcaacatgcggcgcaggcatatctggtaacttacgataaaaatccggatcgcgcggtagcgatgaatatgcgttcactccgccttcttcaacagtaa

SEQ ID NO: 30828 - DNA, 1215 bp, Escherichia coli
atgcctggcgacaaggttgttaagtttaaacgcgcatcaactgccacatatatcaataaatcaggcgtatttagtgttgctaaaattgatgagccacgatttgaaaaagaaggtttattgattgaaggacagcgcactaactattttgttaaatccaatactcccgctgaatggacgagtaccagcaatatcgataaaactaataatggtgttgatgaatttggtttttcatatgccaaaatgcgaacaaaagataatatgacaggacaatcatctgcacttagtctgcatacatgcagtgcatcccgggggattgatgttagtggcgataataagtattgcactgtttcatgcagggttaaagctcctgatggtcttcgttgtcgtttgcgttttgaaaaatacgatgggtcggtttatacatttttaggagatgcttatttaactttcggaactctgataatagaaaaaactggcggggcagccaatagaatagcagctactgcaactaaagatccggttacagggtggattttctatgaggcaactatagaagctgttgaaggtgaaaccttaattggcgcaatgattcagtatgcgccgaaaaaaggtggtataactgaagcgggagattatatttaccttgcaacaccacaatttgaaaacggcggatgtgcttcatcttttgttattacgacaactgcacccgcaacccgctccagtgatatggtgacgatcccaactgaaaataatatctataatagaccgcttacgtgtcttgtcgaggttaatagaaattggggcgatattcctcctaatgtagcaccgcgtatttttgatttttctggtgtgccacctattgagtcaattacatacgcttttaacacaactgagaaatattacggtcagctttatatgcaaacttataaagcgtcgacaagtacttacgtttctagtgtgtttgctggtcgagctgatgttcgaaaattcattggtggttttaatatttattctgatggtactaaacgagtagtttctaacggtgaggctactaaaactatgaaaacggagtggacgggcgtaaaaacacggacctttattcgaattggaggtcaagccacatcgggaactcgtcatctattcggccatttgagaaatcttcgtctctggcataaagaattaactgatgcgcaaatgggggagagtattaaatga

SEQ ID NO: 30829 - DNA, 1230 bp, Escherichia coli
atgtctaatatttggtcaaaagaagaaactctgtggagtttcgcgctctacggcacagccgttggtgcaggcacgctcttccttcctattcagttaggttcggcaggggctgtggtcctgtttattactgctctggtcgcctggcctttaacatattggccacataaagccttatgccagttcatcctctcatcaaaaacatcagcaggtgaagggataacgggcgcagtaacacactactatggcaagaagattggtaatctgattaccacgctgtacttcatcgccttttttgtcgtcgtgttgatatatgccgtggcaattaccaactcacttacggaacagctggcaaagcatatggttattgatcttcgtatccgtatgttggtgagtctgggtgttgtattaatcctgaatctcatttttctgatgggacgccatgccactattcgggtaatgggatttttggtattcccattgattgcctatttcttatttctttctatttacctggtcggtagttggcaacctgatctattaactacccaggtagagttcaatcagaatacccttcaccagatatggatatcgattcccgtgatggttttcgcctttagccatacgcccattatttctacgtttgccatagacagacgtgaaaaatatggcgaacacgctatggataaatgcaaaaaaattatgaaagtcgcttatctcatcatctgcataagtgtactgttctttgtctttagctgcctgctttctattccaccttcgtatattgaagcggctaaagaagaaggggttaccattttatcggcactttctatgctgccgaacgccccagcatggttgtcaatttccgggattattgtcgcagtagttgcgatgtcgaaatcattcctgggtacgtactttggcgttattgaaggtgccacagaggtcgtcaaaacaacattacagcaggttggtgtaaagaaaagtcgtgcatttaaccgcgcactatcaattatgttggtatcgctgattaccttcattgtttgttgcattaacccgaacgcgatttcgatgatttacgcgatcagcggcccgctcattgccatgatactgttcatcatgcctacgctgtcaacatatctcatcccggcgcttaaaccctggcgttccgtcggaaatctgattacgctgatcgtgggtatcctgtgcgtatcggtaatgttctttagctaa

SEQ ID NO: 30830 - DNA, 246 bp, Escherichia coli
atgccgggttacacacagagtatgtcctggctgaaggatctttctcatacgggcagacggtggctgtcacaacagcttaccgcaatgtgtttatccaggatgacccgggaatgcatttccgtcgggttatccgcaacgcggaaggtcagcgacgctggcgctgccggaatactgaaccctgtgccggaaagcagcttaatgcgtggctcgccagtgaagggcttctcagacaataaacgtcattga

SEQ ID NO: 30831 - DNA, 384 bp, Escherichia coli
atgaaaacattacccgacacacacgtacgggcggcatcgcgctgcccgtctccggttgaaatctggcagacactgctcacccgactgctggaccagcactatggccttacgttgaatgacacaccgttcgctgatgaacgtgtgattgagcagcatattgaggcagggatttcactgtgtgacgcggtgaactttctcgttgaaaaatacgtgctggtacgaactgaccagccgggattcagcgcaggagccccgtcgtctcagttaatcaacagcattgatattctccgggctcgcagggcgaccggcctgatgacccgggacaattacagaatggtaaataacattaccctgggcaagcatccggaggaggcgaaacaatga

SEQ ID NO: 30832 - DNA, 489 bp, Escherichia coli
atgaacctttccctgacgccggaagccgacagcattaacatgcaggcgctgaacatggggcgcattgtcgttgacgtcgatggtgttaatctcgctgaactgattaacaaggtctctgaaaacggttattcactccgcgtggtcgataaatccgaccagcagtcaaccagtacaccaccaccgttaacaacccttaccggcatacgttgcagtaccgcacatatcacggaaacggacaacgcctggctgtactcgctgtcacaccagactaatgacgacggcgaaacagaatggattcattttacaggcagcggctatctgttacgtaccgatgcatggtcgtacccggttctgcggcttaaacgcctgggcctgtcaagaacgttccgtcgtctggtcgtcactctcacccggcgttatggcgtcagtctcattcatctggacgccggcgcagaatgtctgccggggttccccactttcgactggtaa

SEQ ID NO: 30833 - DNA, 198 bp, Escherichia coli
atgtttgaacatgtcgccagtaaaatggccgatgttattgctgaatgggaggaaaaacacggcaaaaattactttgaaaatggatatgatgcccgccatgctgcatttttagaagataactttaaaatattatctcagtataataaagagtattctgttgaaagatcagtcctcattacccagtactttcgttgttaa

SEQ ID NO: 30834 - DNA, 855 bp, Escherichia coli
atgccaacaataaccactgcacaaattaaaagcacactacagtctgcaaagcaatcctctgcaaataaattgcactcagcaggacaaagcacgaaagatgcattaaaaaaagcagcagagcaaacccgcaatgcgggaaacagactcattttacttatccctaaagattataaaggacagggttcaagccttaatgaccttgtcaggacggcagatgaactgggaattgaagtccagtatgatgaaaagaatggcacggcgattactaaacaggtattcggcacagcagagaaactcattggcctcaccgaacggggagtgactatctttgcaccacaattagacaaattactgcaaaagtatcaaaaagcgggtaataaattaggcggcagtgctgaaaatataggtgataacttaggaaaggcaggcagtgtactgtcaacgtttcaaaattttctgggtactgcactttcctcaatgaaaatagacgaactgataaagagacaaaaatctggtagcaatgtcagttcttctgaactggcaaaagcgagtattgagctaatcaaccaactcgtggacacagctgccagcattaataataatgttaactcattttctcaacaactcaataagctgggaagtgtattatccaatacaaagcacctgaacggtgttggtaataagttacagaatttacctaaccttgataatatcggtgcagggttagatactgtatcgggtattttatctgcgatttcagcaagcttcattctgagcaatgcagatgcagataccggaactaaagctgcagcaggtgttgaattaacaacgaaagtactgggtaatgaggactga

SEQ ID NO: 30835 - DNA, 894 bp, Escherichia coli
ttggctttgacatatcaggggctattccatttcatcgtccaacaaaatgggtgcagtacaaacctgtatcaatccagtgaaggctatctgctctactcgaaaggcaatggctgtccaaaagatattacatcaggcgggtgctacctgatcggtaataaagatctcgatccggaaatcagtgtcaataaagaaattgggctggagttcacctgggaagattaccacgcaagtgtgacctacttccgcaatgattaccagaataagatcgtggccggggataacgttatcgggcaaatcgcttcaggcgcatatatcctcaagtggcagaatggcgggaaagctctggtggacggtatcgaagccagtatgtctttcccactggtgaaagatcgtctgaactggaataccaatgccacatggatgatcacttcggagcaaaaagacaccggtaatcctctgtcggtcatcccgaaatatactattaataactcgcttaactggaccatcacccaggcgttttctgccagcgtcaactggacgttatatggcagacaaaaaccgcgtactcatgcggaaacccgcagtgaagatactggcggtctgtcaggtaaagagctgggcgcttattcactggtggggacgaacttcaattacgatattaataaaaatctgcgtcttaatgtcggcgtcagtaatatcctcaataaacagatcttccgatcttctgaaggggtgaaccgccccgggtttcctggagagtgttttatctgtgaactcaggctgccagatcatcgtttccgatggaagcataataagctttttctgcttctgccggaggagtatggcccagcctttccagcaatcgtcgattgttataccagtccacccacgtga

SEQ ID NO: 30836 - DNA, 453 bp, Escherichia coli
atgcttactaccgagcaggtaggtaatgtgtattcgcggactttagtgctttctgcggtgttttgtcttagtgcaactgctctccacttgttcggggttgaacccggtcttttcgtttatgcaatgggaacattgctgacacttgttagttccttagctctgttcccattaggtcaaagattattcaatttttttgacctaaatcagttagcccgaagtgaaatactcccacgaattgcacgacacatcgaaggtgcgtctaatcccaagaattcagtatctttagctaatcatcactctaaagccgcacatttggcctttgagcagttaaactacattgatgatcgcctgatatgtgaaaaagtaggactcggagataatttacctgctctcagtaatgtttattcggcattacttcttcattaccttaatcagaaacacagaatagactga

SEQ ID NO: 30837 - DNA, 258 bp, Escherichia coli; identical to SEQ ID NO: 19029

SEQ ID NO: 30838 - DNA, 351 bp, Escherichia coli
atgagtcatcgtgcacgacaccaattactggcgttgccgggcattatctttttagttctctttcccatcatactgtcgctatggattgccttcctttgggcaaaatcagaagtgaatagtcagctccaaacttttgctcagctggcgctggataaatccgagctggtcattcgccaggcagatttagtgagcgatgcagcagaacgctatcaggggcaagtttgcactccagcccatcaaaagcgaatgttgaatattattcgtggctatctttatattaatgaattgatcttgttcagttcgttaattcatctgttggggagtataattcctcaagttaacttgaggtaa

SEQ ID NO: 30839 - DNA, 2070 bp, Escherichia coli
atgcccgttgattttttgaccactgagcaggttgagagttatggcaggttcactggcgaacccgatgaacttcagctggcgcgttattttcatcttgatgaagcggataaagaatttatcgggaaaagccggggtgatcacaatcgacttggtattgccctgcaaatcgggtgtgtgcgttttctgggcacttttcttactgacatgaatcatattccttccggcgtccggcattttaccgccagacagctcgggattcgtgatatcaccgttcttgcagaatacggtcagagggaaaatacccgccgtgagcatgcagcgctgatacgtcagcactatcagtatcgtgaatttgcctggccctggacatttcgccttacccgtcttttatatacccggagctggataagcaacgaacgtcctggcctgcttttcgacctggcgacagggtggcttatgcaacatcgtattattctccccggagccaccacgctgacccggttgatttcagaggtaagggaaaaggcgacgttgcgcctgtggaacaaactggcactgataccgtcagccgaacagcgttcacagctggagatgctgctggggccaactgattgcagccgcctgtctttactggaatcactgaaaaaaggccctgtgaccatcagtggtccggcgtttaatgaagcaattgaacgctggaaaactctgaacgattttggcctgcatgctgaaaacctgagtacactcccggctgtgcgcctgaaaaatctcgcacgttatgctggtatgacttcggtgttcaatattgccaggatgtcaccgcagaaaaggatggcggttctggttgcctttgtccttgcatgggaaacgctggcgctggatgatgcactggacgttctggacgccatgctggccgttatcatccgtgacgccagaaagattgggcagaaaaaacggctccgctcgctgaaggatctggataaatctgcattggcgctcgccagcgcatgttcgtacttgctgaaagaagaaacaccggacgaatcgattcgtgctgaggtgttcagctacatccctaggcaaaagctggctgaaatcatcacgcttgtccgtgaaattgcccggccctcagacgataattttcatgacgaaatggtggagcagtacgggcgcgttcgtcgtttcctgccccatctgctgaataccgttaaattttcatccgcacctgccggggttaccactctgaatgcctgtgactacctcagccgggagttcagctcacggcggcagttttttgacgacgcaccaacggaaatcatcagtcagtcatggaaacggctggtgattaacaaggaaaaacatatcacccgaaggggatacacgctctgctttctcagtaaactgcaggatagtctgagacggagggatgtctacgttaccggcagtaaccggtggggagatcctcgtgcaagattactacagggtgctgactggcaggcaaatcggattaaggtttatcgttctttggggcacccgacagacccgcaggaagcaataaaatctctgggccatcagcttgatagtcgttacagacaggttgctgcacgtcttggcgaaaatgaggctgtcgaactcgatgtttctggcccgaagccccggttgacaatttctcccctcgccagtcttgatgagccggacagtctgaaacgactgagcaaaatgatcagtgatctgctccctccggtggatttaacggagttgctgctcgaaattaacgcccataccggatttgctgatgagtttttccatgccagtgaagccagtgccagagttgatgatctgcccgtcagcatcagcgccgtgctgatggctgaagcctgcaatatcggtctggaaccactgatcagatcaaatgttcctgcactgacccgacaccggctgaactggacaaaagcgaactatctgcgggctgaaactatcaccagcgctaatgccagactggttgattttcaggcaacgctgccactggcacagatatggggtggaggagaaggggtcggttccggctga

SEQ ID NO: 30840 - DNA, 765 bp, Escherichia coli
  misc_feature (695)..(704): n is a, c, g, or t
gtgctcattaaacaactggtattacataattttcgggtatttaacggtactcacacgattgatctggctccaagaaagcggccacatgaagtaaaccctcgtccgattgtgctgtttggcggtttaaatggtgcaggaaaaacgtctattctgtcggctatccgactggcattgtatgggcggctggcatttgggctcgcgactcagcaacaggattatattgagcatcttagttcgttgattcacaaaggtgcgtactatattgagcaaccggaagaggcggctgttgaactgacctttacctataataagggggggcaggaatcagagtttaccgttacgcgaacttggaaaaagggcaagaaagatcgcctttctttacaaaaggatggccaaccactcagtgaactggattatgatcagtgccaggggtttcttaatgaattaattcctcatggtattgctgatttgttcttttttgatggcgagaaaattgcagaactggcagaagatgaatctggcaatattttgcgcaccgctgtacgccgtttattgggcctggatctgatatccaaactgcgtaatgacttaatgattttcgttaagcgccaacaatccagccagttagcggaaactcagcaacagcagattgaagtgctggaaaaacaaagtagagacttagcttgtcagacagnnnnnnnnnntgttgaatgcgcagggcggtgcatttgcgcagacaaaagcgcaggaaaagcagaaagttga

SEQ ID NO: 30841 - DNA, 1725 bp, Escherichia coli
atgatcctgccctctgaaaaatccgccacagatgtggctgcgcagtgcttcctgaatgccttgattcgtgaaaccaaagactggcaactggcggaatacccgccagacgaattgattatcccgctggacgaacagaagtcgctccatttcagagtggcttatttctccccaacccagcatcaccgctttgcatttcctgctcatctggtcacggcatcaggcagttatcctgtcgactttaccactctctcccggcttattattgataagctccggcatcaactttttctgccagttcccctctgcgaaactttccaccagcgcgtgctggaaagctacgcccatacgcaacagacaattgatgcccgccatgactgggccatcctgcgtgaaaaagcgttgaattttggcgaggctgagcaggcactgctgacaggacacgctttccaccctgcacctaagtctcatgaaccgtttaaccgccaggaagctgaacgatacctgcctgacatggcacctcacttcccgctgcggtggttttcggtggataaaacgcaaatcgctggtgaaagtctgcatcttaaccttcaacagcggttgacgcgatttgccgcagaaaatgcgccccagttactcaacgaattaagtgacaatcaatggctgttcccgctgcacccgtggcagggagaatatcttttgcagcaagtgtggtgccaggcactttttgctaaaggacttatcagagacttaggcgaggccggcacgtcgtggctgccgaccacctcttcccgctccctctactgtgctaccagccgcgatatgatcaagttctccctgagcgttcggctgaccaactccgtccgtactctgtctgtgaaagaggtggagcgaggaatgcgcctggcacgtctggcgcaaaccgacggctggcagatgctacaggcccgcttccctactttccgggtaatgcaggaggacggctgggccgggctgcgcgatcttaacggcaacatcatgcaggaaagtttgttttccctgcgtgaaaacctgctgctggagcagccgcaaagccagaccaacgttctggtttccctgactcaggccgcaccggatggcggtgattcgctgctggtttcggcggtaaaacgcctgagcgatcgcctcggtatcactgtgcaacaggccgcccacgcatgggtcgatgcttactgtcagcaggtgctgaagcctctgtttacggctgaagcggattacggcctggtgctgctggcgcatcagcaaaatattcttgtgcagatgcttggggatctgccggtcggatttatttaccgtgactgccagggcagcgcgtttatgcctcacgcgacagagtggctcgataccattgacgaggcgcaggcggaaaatattttcacccgtgagcagttgctgcgctatttcccttattacctgctggttaactccacttttgccgtaactgctgcgctgggtgctgccgggctggacagcgaagcgaatctgatggctcgtgtacgaacattgctggctgaagtgcgtgaccaggtgactcataaaacctgtctcaactatgttctggaaagtccgtactggaacgtaaaaggtaactttttctgttatctgaacgatcataacgagaacaccatcgttgacccttcggtgatctattttgatttcgctaacccgctgcaggctcaggaggtctga

SEQ ID NO: 30842 - DNA, 252 bp, Escherichia coli
atggggcaaatggtggtcaccatcctgtcggctgtggcacaggctgaacgccggaggatcctagagcgcacgaatgagggccgacaggaagcaaagctgaaaggaatcaaatttggccgcaggcgtaccgtggacaggaacgtcgtgctgacgcttcatcagaagggcactggtgcaacggaaattgctcatcagctcagtattgcccgctccacggtttataaaattcttgaagacgaaagggcctcgtga

SEQ ID NO: 30843 - DNA, 825 bp, Escherichia coli
atgaaaaaaattttgctgctgcatatgttggtgttcgtttccgccactctcccaatcagttccgtggcttctgatgaggttgaaacgcttaaatgcaccatcatcgcagacgccattaccggaaataccttatatgagaccggagaatgtgcccgtcgtgtgtctccgtgctcgtcttttaaacttccattggcaatcatggggtttgatagtggaatcttgcagtcgccaaaatcacctacgtgggaattgaagccggaatacaacccgtctccgagagatcgcacatacaaacaagtctatccggcgctatggcaaagcgactctgttgtctggttctcgcagcaattaacaagccgtctgggagttgatcggttcacggaatacgtaaagaaatttgagtacggtaatcaagatgtttccggtgactcggggaagcataacggcttgacccagtcatggctgatgtcgtcgctcaccatatctcccaaggagcaaattcagtttcttctacgctttgtcgcgcataagctgcctgtatccgaagcggcttatgacatggcgtatgccacaatcccgcagtaccaggcagccgaaggatgggctgtacatggaaaaagcggcagcggctggcttcgggacaataacggcaagataaatgaaagtcgtccgcagggctggttcgtgggctgggctgaaaaaaacggacggcaagttgttttcgcccgattggaaataggaaaggaaaagtccgatattcccggtgggtctaaagcacgagaggatattctcgtggaattacccgtgttgatgggtaacaaatga

SEQ ID NO: 30844 - DNA, 927 bp, Escherichia coli
atgccaaactggtgctcgaatcgtatgcatttttctggtgaaccggcacagattgctgagattaaacgactggccagcggtgcagtcacaccgttttatcgccgcgccacaaatgaaggtattcagctgtttctggccggaagtgccggacttctgcagaccactgaagatgtgcagtttgaaccgtgccccggactgacggatgccggacgtggtgttgtatcgccggagaatatcgcgttcacccgctggctgacacacctgcagaacggtgtactgctggatgagcaaaactgcctgatgctgcatgaactctggctgcagagtggtactggccagcgtcgctgggaaggattaccggatgaggtcagggaaaccatcaccgtgcatttcaccgcaaaaagaggtgactggtgtggcttctggagtaacgaggatgtatcggtgtggtggaaccgtctgtgtgacaatgtactgccggaaaaaaccatgccgtttgacctgctgacggttctgcccacccgcctggatgttgaagtgaatggctttaacggtggtgttctgaacggtgttccttctgcgtatcactggtatacggaacagtatggcgtgaagtggcctgtggggtatgaggtgaatatcagccgtcagggagaaaacttcattcaagtggatttcgacacgccgtggtgtcagccggaaagcaacgttgttgcagaattaagccgccgtttcggctgcacgctggagcactggtacgccgaacagggctgcaatttctgtggctggcagcgatatgagcgtggagagcttgttgatgtgctgtggggggaactggaatggtcttccccgacagatgacgatgagctgccggaagtcaccggacctgcgtggatagtcgacaaggtggcgcattatggcggatga

SEQ ID NO: 30845 - DNA, 927 bp, Escherichia coli
atgccaaactggtgctcaaatcgtatgcatttttctggtgaaccggcacagattgctgagattaaacgactggccagcggtgcagtcacaccgttttatcgccgcgccacaaatgaaggtattcagctgtttctggccggaagtgccggacttctgcagaccactgaagatgtgcagtttgaaccgtgccccggactgacggctgccggacgtggtgttgtatcgccggaaaatatcgcgttcacccgctggctgacacacctgcagaacggtgtactgctggatgagcaaaactgcctgatgctgcatgaactctggctgcagagcggtactggacagcgtcgctgggaagggttaccggatgatgtcagggaaagcatcaccgcacttttcaccccaaaaagaggtgactggtgcgacatctggagtaacgaggatgtatcggtgtggtggaaccgtctgtgtgacaacgtactgccggaaaaaaccatgccgtttgacctgcggatggttctgcccacccgcctggatgttgaagtgaacggcttcaatggcggtgttctgaacggtgttccttctgcatatcactggtatacagaacggtatggcgtgaagtggccttgtgggtatgacctgaatatcagcagtcagggggaaaacttcattcaggtggatttcgacacgccgtggtgtcagccggaaagcgacgttgttgcagcattaagccgccgtttcggctgcacgctggagcactggtacgccgagcagggctgcaatttctgtggctggcagcgatatgagcgtggagagctcgttgatgtgctgtggggggaactggaatggtcttccccgacagatgacgatgagctgccggaagtcaccggacctgcgtggatagtcgacaaggtggcgcattatggcggatga

SEQ ID NO: 30846 - DNA, 1020 bp, Escherichia coli
atggtgtctctcggcgagtttggcgaccagtggctcgcccagcagtcgctgcgtaccctgaccaacgccagtcgccggggcgggctggatatcaagctgccgctgaccatctacaacacctcatgctaccgggggatccctggcagatacatcgctgccggaccactggcttcacgctggctacaacaggtttttgcgaccgacgccaccctggtgcaaagcggcgcagtgatacttggtgaaccggctgcaggctatgtctcccatgaaggctatgccgcgcttgcccgggctccctatcgctaccaggaaatgcttggtgttatctggcgggagaatccgtgccgctggctgaaaccggatgaaagtccggttctgatggcaacactgatggagtgcgacgaaaacaatcagccgctggcaggcgcatatatagaccgctccgggctggacgctgaaacctggcttacgcaactgttccgggtggtcgtggttcctctgtatcacctgctttgccgctacggtgtcgcgcttattgcacatggacaaaatataactctcgccatgaaagagggggttccacagcgtgttctgctgaaagacttccagggcgatatgcgactggtgaaagaagagttccccgaaatggactctttgcctcaggaggttcgtgatgttacatcccgcctgagtgcggactacttaatccatgatttgcagacgggtcacttcgtgacagtactgcgttttatttcgccactgatggttcgtcttggcgtacctgaaaggcgattttatcaactgctggcagcagtgttgagtgattacatgaaaaaacatccacaaatgtcagagcgttttgcgcttttctcacttttcaggccacaaatcattcgcgtggtgctgaacccggtaaaactgacctggcctgatctggatggcggcagccgcatgctgccgaattaccttgaggatctgcaaaatccgctgtggctggtaactcaggaatatgaatcatga

SEQ ID NO: 30847 - DNA, 315 bp, Escherichia coli
atgatccagtccgttttcctgccagacctgactgaagcgggcaaactcctgcggatccattgcggccgtcaacaactgatgaatatccatctcgttatcacagcgccagatcatatgttcacgttttaccgccagccagtgcagtctgaaggtgttggcatactctggcgcatatcgttccagcgcctctttaccccagccacggcgacctttattaaaaacgaatttaggatgaccgctcagcaggcattgcaggcggtcggcattaagattaatcaggtcactggcgctcagcccgcgacgggctttcagtag

SEQ ID NO: 30848 - DNA, 282 bp, Escherichia coli; identical to SEQ ID NO: 21125

SEQ ID NO: 30849 - DNA, 246 bp, Escherichia coli
atgccgggttacacacagagtatgtcctggctgaaggatctttctcatacgggcagacggtggctgtcacaacagcttaccttaatgtgcttattgaagatgacccaggtgcgcacttccggctggttatccgcaacgcggaaggtcagcgacgctggcgctgccggaatactgaaccctgtgccggaaagcagcttaatgcgtggctcgccagtgaagggcttctcagacaataaacgtcattga

SEQ ID NO: 30850 - DNA, 324 bp, Escherichia coli; identical to SEQ ID NO: 23068

SEQ ID NO: 30851 - DNA, 1086 bp, Escherichia coli
atgcacgtcatttacggagaaactattaacgatgtaataatgaaactcctagaaaaagtgcttaatgaaggagttcgtatttcgacaaggaatggggatgctataactatttatgatgttagtatgatcttacgaaaccctagatcaaggcatttaagtttagcgggtcgaaaaaataatatattttccacatttgctgaagctatatgggtttttgctggcgacaacagaattaaaccatatctaaatttttttttaccaagagcgcctaaatactcagatgatggtgtcatttggcgagcagcttatggggaaagactatacgctcacgggcaacttgagaatgtcgtgcaacaattcaaaaaagaaggaatatttacaagaagagcagtcattagcttatacatgcctgacagagatacgaatgaaagcctcataaaagtatacaacatagaacatagtgtcgatattccttgtaataacttaattcatttctttatcactcctgacaaaaatttaaacattaaaatagttcaaagaagcggcgatctaatatttggagtgagcaatataaatcttttcgagtttagtttacttcaagagatagtactttcaatattacagagggaagttgatagcgagattaaactgggatacttacatcaatcagtaacaaatcttcatatatatgatgatagagtaggacaagccaatgaaatatacgaaagaaaagaagaacaaatgacagatttgataaacgatgatgaaatatcattccctccatcgttacaaaatataaaatcattattctgtgatatagtttcattccttgaaagaataataacagaaaatgaacataaaatagacacaatagatatggaaaccgaaaatctaaaaaaaatatttattaaacactttgtagaaactgaaaggaatttactttggggatatgcagaagcagctctatcatatattttccaggaaagattcaatcaaccaatagtgttaaaaactaagttaagcaatgatttcaatctaagcgtaacttctaattattttaataattctaataaggaccgtctatga

SEQ ID NO: 30852 - DNA, 558 bp, Escherichia coli
atgaaaattgcattcatgggcatatcgggtagtggaaaagactttcttgccaattatctgatatccaactatggatttattagattatcatttagcgatcaactcaaaaaattggccaattatatttatccttggatggaaaaggattacccacctgaaaataaaatgttaccactcaatataaccttacctaccggcgactttatcagccattcaccaagagatatatggctgagcttagacagcctaaggaaaattgaagaaaaaatatttattagaatgctatcagaagagttgaaaattttagaaaaaaatggagggacgaataaaaatataataattactgacataagatcaaatgaagaattcgcatggtgtaagaacaatcagttcactatagtacatatagaacgggaaaataataattataaaaaatacgaaatcgacaagtatgtcactgagaataaaacaaaatcagaatatcattttgacaacaatgtgaacggaattgatagttttaaacatttcttcgaaaaggtattattaagtgaacagtaa

SEQ ID NO: 30853 - DNA, 729 bp, Escherichia coli
atggttaggggattgttactattcggaattattttgatggtaattattttgatggggtacttctcttttttaccggcctcacaatggtggtttatcaaaaatatcatatcaaattttgattttgtaaaagcgctcctttcaattctaatattatcattgattactatatttttgtttttcggtattttagagaaaaaatactcattaaagttagaaaaattaactttcggtgggttaaatgttttatttgatagctctgacttgctatataaaagatctgttcgcaattttcttgatactaaaagaagtgtgttcaaaattgatccacattttgattcatttgaagaggtttttaactctttatatgatatctataattttattcgtgttgaaataagagtactggatgttaagcggaaaagagatatggagttgtatggtatatctaataaaatgctaaaaaaactgaatcaactgcttaccaaacatcagaataattacaggcgttggcataagtacatctcaacaaacgatattgtattgacgagggataaagattctaacggtgaaaatgtttctttgatttatcatttaacaccgattggaataatccagactcattattatcatttcagccagttgatggctgattttgaatgcattaataaattcttctgtgaggaagttagtgttgtatttaacatcgatattgctaagtgggatgagtaa

SEQ ID NO: 30854 - DNA, 612 bp, Escherichia coli
atgcataaaacttttctgagttatcatcatgcaaacgaacaggatttgaagaacggaatcattgaagcatttgctggtgcgtcatttattgacaagtccgtcactgacggggatatcagcactaatgtcagtgaagattacattatgcggaaaattcgggaggactatcttggtgactctaccgtaacagtagtactcataggtacagaaactgccagcagaccttttgttaactcagaaattcaagcatctttatggggggagaatcctgctggattaatcggggtaattcgagatgaaatatattcgagcgtgtttagctcgggtgtgtgtagtgatacctcttgcaattgcgggattggaattagaaccattgattggggttatgaacattatctcccttggttaattaaaaaaaatcatagtttttcaaaactcgtcccccactatgatgatatggatgtttattgctccctggttaagtattcagattttatagggaatagtgaattttatattaaccaggcatttgataaaagaaatattatggaacctgcagcaaagaaaaatcccgctgatgttcctgctataagaactaatttactatggtga

SEQ ID NO: 30855 - DNA, 513 bp, Escherichia coli
atgtataatgccaaaataattaaaagaaaagtttttttaagctaccaccatgatggtgaccaatattactatgatgaattctcaaaaaaatttcatgatgtatatgaggctgtaacggataattctcttgatcgtcgagttgacagtgacgatattgactatgtcatgcgacgtattcgtgagtattatatcgcagggacttcatgttccattgtctttgtcggtaatgaatcatgggggagaaaatatattgactgggaaattaaatcgacgcttgataaacaacatggacttattggtgtccagttgccaacattgttatcaaattcttatggacaagtgactgtgcccgctcgactcagtgataatattgcttctggatatgcgctgtgggtaagttgggctgattttacagctagcatttcatcgtgtagggaatatatcgaacaagccaattgtcgtagtaatactctgataagaaacactcgtgaacgccgcttaaggaatgcataa

SEQ ID NO: 30856 - DNA, 1194 bp, Escherichia coli
atgcttgagacgaatttggcaaaaccatttttggttgtttatatcatttggcacccggatttcgccgctggtgctggactggccgaaatattgcgtggacactttcgtcgggaactctatcagaatgttgctggaggaaccggtttaagtgttatttttcgttctgagcctctacctaaaacggggaagccgctgccgatcaatttttcagaatcagagaccaccgcagtcctcatacttgcagaatcatgtatggcaaatgatcctgaatgggggacttaccttcgggagctatccacgcagtcggaaatagctggactaggtacacatcttttccccattgctattgatggagaaggattaaatctgggactggaagagcaggcattacgctgggaccaatggatacaggatgggagcaacgatactgcaaaccttcatatacgattgattagtgagcttacatacgaattttgcaggatgctgcgccattacctggaacatctgaaacaaccagaaaaagatgaagatgagttgcttaattatctcaagaaagttcagatattccttagccattctaaacatgataaagatggagagcggattgctcatttgatacgtgagcaattacatagtggacatgggttaagttcattctttgatgtccatgatatccctgccgggcttcggtttcatcaggtgctattgaaacagctggcgcaaagcgcagttgttgctatacataccgactcttattcttcgcgtgaatggtgtcgccgagagattatagaagctaaacgtaatagtgtacctttagttgttgccaactgtattagcgaattggatgaaaggggatttccttatatgggaaatgtccccatagtgagaatggatccacagcaggctgaacgaattaatatcattattgcacgactgcttgatgaggttctgaaagattttctgtggcgctgtcgtatacaattggttaataccgaacaaagtgcagtgcagtttgttccgcgtgcgccggagttaatctcacttgctggcttaaagttccacggtatcgggcagcctacaattgtatatcccgacccacccttaagttcggaagaggagcgcttatttgaagaagttaaacccggtatcaggcttagaagttttaccgaatggctggcagagggaacatcatga

SEQ ID NO: 30857 - DNA, 321 bp, Escherichia coli
atgaaacgcgatgaatggatgagaaaatgggaacataaacaagtagcatataatcgcaagatgaaccgcgaatttgacttcggtgtcgcagagcgtgattgtgggtataaaggaaatctaaatggtgcatatgttcaacatgttggcgataaacagtattattacattgtcaacttcaaccatgtattgcacgcagatctggttgttattgatgggaaaacaaaaatagtagcgaataaacgcattaataagaacgcagcaatcaatatattaacagtgattcgcacccagatgaatgtgctttacgaaaaaatagcataa

SEQ ID NO: 30858 - DNA, 342 bp, Escherichia coli
atgtctagttttgtcagcgttaaagttttccgtggtactttaccgaacgaagaaagattgggacagtacgccgggcaacctggcgcatgtttccgcgtagctactgataacgacgctcacatcaagtgcttccatgtatctgaaccgcctttcgatgtgaaacaccttgaagatgaaaatcacgttaaacacttcgtttttgcctcgctgatgtttgattctagccataaaacatctaaaaacgaagtggatttgatcggcgctgaactggttgcggaatacaaaatcactgaaggagaaaacggagtggcggaaattgagcgcatcaaacaagctgtataa

SEQ ID NO: 30859 - DNA, 258 bp, Escherichia coli
atggttgtgttcagactatggcgcggcgtaagtaagattgatggcacatatagccgcgtgattgaagatgttaaccgtgggcgtttttatgaactggcatacagggagggaatggagaatacctattttgatgagtcaatccctatgtggcggaagatagctggtgaaatagctttcgttgctcgctatgggacttataaagatcacaacacgctaacagatgccgaactggtggcaattctttacgaaggggaataa

SEQ ID NO: 30860 - DNA, 228 bp, Escherichia coli
atgatgcgtgcaattattgacttcattattggatggttattttgttcttttttcgtattctcatgtatagctacggtttttattggaattttatgtggtgtgtcgtttgttacatgggagccaccagaaattccatcacctgatgatgcgctttatatattaagggttattattgctgttagtgtatttgttgggttctttttcgctgattctactgatgatttataa

SEQ ID NO: 30861 - DNA, 933 bp, Escherichia coli
atgggtagacgcaagttaacgcatgaagagcaaattgcagctattgagaaagttaacccaaatattgaagtgttggaggaagtaacctgcagcacaacaaaagtatcatgccgctgcaaagtttgtgatcatgagtggtctgctactcctaacaaccttaaacacgggaacggttgccctaaatgcgcaaggttaaaaaaaacattaacacacgaagaacatattgcagatatagccaaagttaacccaaatattgaagtattgggggaagttaataacgccagggataaagtcccgtgccgctgcaaagtttgtgatcatgagtggtctgttagtccttacaaccttaaaagtgggtacggctgcccgaagtgtaaatctttaaaactagcacaaatcagaaccttaacacacgaagaacagatcgcgactattgcgaaggttaatcctgatgttgaagttataggcgaaattgttaataacgcaacaaaagtattatgccgctgtaatgtctgcggtcatgagtggtctgctatacccagtaaccttaaaaaggggcaaggctgcccgaaatgcgcgaaaagcggtttccttagtcatgagtatggaaaaatttacatcatggttgatgatctggaagtgccaacgatgatgaaaattggcgtgagcgttagtgagaacaggcgaagaaatatggtattaaatagcgcgcataaagcaggtgttagaatccatgatttgcatatcgtgaagacgtgggaaggaccaacaggaaaagttcaagaattagaaagcacgatgcataaatatttcagcaattataaaattaactttactgtaaaatttgatggtagcaatgaatttttttattacaggccggaagtattcgacatggtagaagaagcatataaagagattgtttgctgccaatga

SEQ ID NO: 30862 - DNA, 219 bp, Escherichia coli
gtgaatattgacccggcgataacgattgatatggccctgaacaccggcctggcacttcttggttatttctacatcatgttctgcagcggacgatggctgtcactgttgttcaaaaatggaataaacgccgtaagcaggagcaacgccagaaggcaatggatgcatttttcgaagccttcgggattgacagcatggaaccaggggatccagctcgcgtaa

SEQ ID NO: 30863 - DNA, 795 bp, Escherichia coli
atggacaagatattttcggctacaaccagtattccattcagtcagtacgtgggcgttacaatggaaaatgaggtttttgctataggtagtggttttgaagggcttgaagaaccgatcccatatgaatttgccattagcaatacccggactattggtggtcgattgtatgttgtaggatccgcacgtagtgttgttcgcaggatagatagaaataattgggagaaactaaataaaggtatccatctccctgcgcaagatgaaattaaaacaatccgtgaacagatgctattcctggatgctgctggttttagttgtgtggatggcttctctgaaaatgatatctatgccgcaggcggtaaaggagatgtctggaatttcgatggtgatgaatggaggcaaattcattttcccagcaacatgctcattgaatctatctgttgtggtcaggatggctatgtttatatcggtgcgcaaagcggtactgtatttaaaggtcgaaaagatcaatggaagatgattcatcggggggagttaaccttaccgttcaggcaaatggtatggtatgaaaattgtgtctgggcaacgtctgattatggtgtgtggcaaataatcggggatgatgttgttcagccagatttacccagcgaggtaaaaatgtgcactggttatatcagttgtacagaaaaaaccctggttctggctgggtattatggtgtagctcgcttagagaacggtcactgggatatattgattaattgtgttcaggcagagaaaggtgatttctgttctgaatag

SEQ ID NO: 30864 - DNA, 156 bp, Escherichia coli
atgagggacacccccgctaaccataaacgcggtaaaaacccggtgtgcatcgtttttgattattcccgcacactcacgcagaaggaattccccgtcgggctacggtcatggttaatgcgggaatacggcgacgatacagcgcagctaaaagggtaa

SEQ ID NO: 30865 - DNA, 420 bp, Escherichia coli
ttgatcttcctgcccttaacggtagctgaagatgactgggctggatggaaaatcctgcatggtgcattgggagagcagatagaattggttggcgacgatctgtttgtgaccaacgtaaagtatattcagcgcggcattgacgaaaaccttgccaattcagcattgattaaactcaaccagattggttccctgagtgaaacctttgatgcggtacaactttgccatgacaacaactggggcacctttatctcacaccgcagtggtgagacagtggacagctttatcgccgatatgacagttgcaatgcgcgcaggtcatctcaaaacgggagctccatgccggggtgagcgtattgaaaaatataaccagcttatgagaattgaaccgccccgggtttcctggagagtattttatctgtga

SEQ ID NO: 30866 - DNA, 213 bp, Escherichia coli; identical to SEQ ID NO: 7905

SEQ ID NO: 30867 - DNA, 441 bp, Escherichia coli; identical to SEQ ID NO: 22297

SEQ ID NO: 30868 - DNA, 414 bp, Escherichia coli
atggggggacatactcttaaagattgggttaataataatgacttaaaaattctaaataaacctgaggttcacatctatgatagagatgttgccatccctcctcagtatgaaaaagaatgtaagtcagtaaatgctagaaatgatggttccatagcattcatgactgaaaaaagggaaatggaaaattatttacatcctgatgctattcaggcggtgtttggtgtaaacataaccatagatgatacgacagatgtatcaacagaggtatctgctttaacacgttataatgaaagtaaagcgaagaagaagataaataaatttgctacaggaaaaatgagttatcaaatgctcactgcaagtgatgcaaaaggcgagacattaacttggtttaatgctatatatgcgaaattataa

SEQ ID NO: 30869 - DNA, 252 bp, Escherichia coli
atgcgcgactggtggcagccgacaaaagcaaacttcttcggacacctgaaaaagccgcagattatcgcagccctgaatgaggccggactgtccggtgccgcacgggacgcggagaagatgaagaaaggtgatgcggctgaacatgcagagcaccatatgaaagacaaccgctgggttccaggctggatgtgtgcaccacatccacagacagatgccactgaacgcaccgataacctggctgatgccgcctga

SEQ ID NO: 30870 - DNA, 273 bp, Escherichia coli
atgaagacatctgataatgaaagtattaaatatgaaattactggccaggcggtgctccagatactgcgcatgaagataaatttttcgttgcagactcttattaagcaattactcgtaatgaaatcggctgaggaaaatactttccgacgagatttaattgacagcataattcgtgattttagcaacagtgatacaggagggccaaaccgaagaacagcgatcgctgacaataaaaatatgttcactggtaagaaaataaacagaatacattaa

SEQ ID NO: 30871 - DNA, 693 bp, Escherichia coli; identical to SEQ ID NO: 8185

SEQ ID NO: 30872 - DNA, 153 bp, Escherichia coli; identical to SEQ ID NO: 28129

SEQ ID NO: 30873 - DNA, 366 bp, Escherichia coli
atgactgtcattgtaatgcctttggttttatttgtatattattacgcaaagtttattttaacattgtggatgggggctgagtatgcagggatttcggtcgaaatattacggattatgcttatagggtatatttttaactgttattcacaaatctcttttgccaacatacaggcctttggaaaagcaaaatacactgcatacatccatatgatggaatttattccttatttgataatgttatatataatttcaaaggaatatggggttattggtgttgcgtggttatggacaattcgagtaataattgattttttgatgcttttatatatgagttatcgttgtaataatcttatgaaaaaagggtag

SEQ ID NO: 30874 - DNA, 1518 bp, Escherichia coli
atgttatataatataccttgtcgaatttatatcctttccactctgtcattatgcatttctgggatagtttctactgcaaccgcaacttcttcagaaacaaaaatcagcaacgaagagacgctcgtcgtgaccacgaatcgttcggcaagcaacctttgggaaagcccggcgactatacaggttattgaccaacaaacattgcagaactccaccaatgcctccatagccgataatttgcaggacatccccggagtagagataacagacaactccttggcaggccgtaaacaaatccgcattcgtggcgaagcatcctcccgtgttttaattctcattgatggtcaggaggtaacttatcagcgcgccggagataattatggtgtgggactgttgatagatgagtctgcgctggagcgtgttgaggtagtgaaaggtccatattccgtactgtacggttcacaggcaattggcggtattgttaacttcataaccaaaaagggaggtgacaaacttgcatctggagttgtgaaagctgtttataattccgcaacagcaggctgggaagaatcaatcgcggtccaggggagcatcggtggatttgattatcgcatcaacggtagttattctgatcagggcaatcgtgatacgccggatggacgtctgccgaataccaactatcgtaacaatagtcagggtgtatggttgggttataactccggaaaccatcgttttggcctctcgcttgatcgctacagactcgcgacgcaaacttactatgaggatccagacggaagctatgaggcatttagtgtcaaaatacctaaacttgaacgagagaaagttggggtattctatgacacagacgtggacggtgactatctaaaaaaaattcatttcgacgcgtatgagcagaccatccagcgccaatttgccaacgaagtaaaaacgacacagcctgttcccagtccgatgattcaggctctgaccgttcataacaagactgacacccatgataagcaatacactcaggcggtcacattgcagagtcacttttcgctgcctgctaataatgaacttgttaccggtgcacagtacaaacaagacagggtcagccaaaggtccggtggcatgacctcaagcaaatctctgaccggcttcattaataaggaaacacgaactcgctcctattatgagtcagagcaaagtacagtctcactattcgcacaaaatgactggcgattcgccgatcactggacatggacaatgggagttcgccaatactggctttcttcaaagttgacgcgtggtgacggagtatcatataccgcaggcattataagcgatacctctcttgccagagagtctgcgagtgatcacgaaatggtaacatctacaagcctgcgctattcaggtttcgataacttggagttacgcgctgcgttcgcgcaaggctacgtatttcccacactctcccagctttttatgcagacatctgcgggcggcagtgtcacatactga

SEQ ID NO: 30875 - DNA, 258 bp, Escherichia coli
atgggtcaggccaacataatctctgatgtttttattcgtgctgcctctagtgcaaaagatgacagtaacggtaccgaaacaaatgttccgggctgggccactctcaactttgcagtaaatacagaattcggtaacgaggatcagtaccggattaacctagcactcaataacctgacagacaaacgctaccgtacagcacatgaaactattcctgcagcaggttttaatgcagctataggttttgtatggaatttctga

SEQ ID NO: 30876 - DNA, 903 bp, Escherichia coli
atgaatagtatagcaattttagaagcagtgaacacctcttacgtacctttcaatggtcagcagattatcaccgccatgactgccggagttgcatatgttgcgatgaagccaatcgttgaaaaccttggaatgagctggtcaacgcagcaaacaaaactcatgaagcagattagcaaattcaactgtgttcatatgaacatggttgccgctgatggtaagcttcgtaagctactctgccttcctttgaagaagttaaatggatggctgttcagcatcaaccctgagaaagttcgtgctgacattcgcgataaactgattcagtaccaggaagaatgctttactgtgctgcatgactactggacgaagggaaaggcagaaaatgcacgtaagaaaacatctgttgatgacaggactccgcttcgtgatgctgtaaatatgctagtcagcaaaaagcatctaatgtacccagaagcttatgcaatgattcatcagcgtttcaacgtggaaagtattgaagagcttgattcatctcagataccgcaagcagtagagtacatccacagggtagtgcttgaaggcgagttcatcggaaaacaagagaagaaaaccaacgagctttctgcaaaagaagcaaacagccttgtatggttatgggattatgccaaccgctcacaggcattattccgcgaactgtatccggcgctaaaacaaattcaatcgaactattcaggcagatgctacgactacggtcatgagttctcgtatgttatcggaatggcgagagacgttttaatcaatcacacacgagatgttgatatcaatgagccagacggaccaacgaatctttccgcatggatgagacttaagaataaagaattacctccttcagtacataactactga

SEQ ID NO: 30877 - DNA, 438 bp, Escherichia coli
atgaaacaaatgtcactaattgagatggatggttttctgaaaggtaaatgcatcccacgagatttaaaggttaacgaaacaaacgctgaatatctggtgcgtaaatttgctgaagcggaggccaagtgcgcggcgctggctgctgaagttgaggctgtgaaatcagcacatcaagatgctgtaaacaccatcatgtataccgccaatcgaacgggtgttttatacacagagaaggcaattcaaatgtcctgcaaaaccccggccaccgatgctttcctgactgaagtccgggctaaggcgtttgatgacctttgcgcggcgttcgttaagcacgcgtcggtgtccgggctggacgatggcgactgcgttacggtgaaagaggcgactgacgccctgctgcattgtgcggaacagcttcacaagggagtgcattcatga

SEQ ID NO: 30878 - DNA, 261 bp, Escherichia coli
atgatggatgtaaaagagaaggttttgcaggtgatgcgttcccgggctgccctgcaagataaagctctcggcggggaatatccattcaggatggcaacctggaatctgcggttggcaatggagaaggaatttcctgatgaagaatggcgttcggcagatttgcgcaaaattcttatggagctggctaaagacggaacagtatccaaagatacccatgccagccggattggtcaggcggtatggagactggaggtgaggtaa

SEQ ID NO: 30879 - DNA, 204 bp, Escherichia coli
atgctaaaacagcaagatatgacagaaaccgccgccgcagtccttcatttcttacctgctgacaagtgggtaacgccacgcatgatgacgagaactaccggagtaagcgaagcccagtgccagttaatactgactcagttagttctggcgggtctggcgaaggataacggcgggtacgggaataaattcagacgctgccagtaa

SEQ ID NO: 30880 - DNA, 714 bp, Escherichia coli
atgaattgtagcctgacattaagccagaggttaagcctagtatttacagtcgttttgctgttttgcgcagcagtgacatgtggcgttcatatttacagcagtaatctgtatggcaatgcaatggtacagcgtttatctgcagggctggcgcaacagattgtcatcacggagtctctgctggataatcgtgggcaggtgaatcaccggacattaaagagtctgtttgagcgtctgatgacgcttaatcccagtgtggagctgtatattgtctcgccggaaggtcggctgcttgtggaggccgcccctccaggtcatatcaaacgtcggtatatcaatatagcgcccttgaaaaaatttctctccggtgctgtctggcccgtatatggtgatgatccccgaagtgtaaataagaaaaaagttttcagtaccgcaccgctttacctgagggatgatctgaaaggatatctgtatattattttacagggagaggaacttaatgctcttactgatgcagcctggacaaaggcactatggaatgcactgtactggtcgctgtttctggtagtgatatgtggtctgctgtcgggtatgctggtctggtactgggtaacccgtcccatacagcaactaactgaaaatgtcagcgggatagagcaggacagtattagtgccattaaacaactggcaattcagcgccctgccacccccccctag

SEQ ID NO: 30881 - DNA, 741 bp, Escherichia coli
atgaataaggtttttgttgtttcagtggtggccgcagcctgtgtatttgcagcaaatgcaggagcaaaggaaggtaaaagtggtttttatctgaccggtaaagccggtgcctctgtggtgtcactttcagaccagcgtttcctgtcaggagatgaggaagaaacatcaaagtataaaggcggcgatgaccatgatacggtattcagtggcggtattgcggccggttatgatttttatccgcagttcagtattccggttcgtacagaactggagttttacgcgcgtggaaaagctgattcgaagtataacgtagataaagacagctggtcaggtggttactggcgtgatgacctgaagaatgaggtgtcagtcaacacactaatgctgaatgcgtactatgacttcctgaatgacagcgcattcacaccatgggtatccgcagggattggctacgccagaattcaccagaaaacaaccggtatcagtacctgggattatgagtacggaagcagtggtcgcgaatcgttgtcacgttcaggctctgctgacaacttcgcatggagccttggcgcgggtgtccgctatgacgtaaccccggatatcgctctggacctcagctatcgctatcttgatgcaggtgacagcagtgtgagttacaaggacgagtggggcgataaatataagtcagaagttgatgttaaaagtcatgacatcatgcttggtatgacttataacttctga

SEQ ID NO: 30882 - DNA, 369 bp, Escherichia coli; identical to SEQ ID NO: 10061

SEQ ID NO: 30883 - DNA, 162 bp, Escherichia coli; identical to SEQ ID NO: 6944

SEQ ID NO: 30884 - DNA, 243 bp, Escherichia coli; identical to SEQ ID NO: 9259

SEQ ID NO: 30885 - DNA, 234 bp, Escherichia coli
atgaacaaatccgatgaaatgattcaggaactacccgatggggcattcacccgcgagtgtgctgaaaccgttgttacacagtaccggaatgtctttatcgaggatgatcagggaacgcattttcgcctggttgtccgtcaggatggcacgttgatctggcgctcctggaattttgaggactgtgccgggtactggatgaaccggtacatcagggatttcggcattcgtaagtaa

SEQ ID NO: 30886 - DNA, 528 bp, Escherichia coli
atgagtgcacgtggtatcaacaaggtcatcctcgtcgggcgtctgggcaatgatccggaagtccgttacatccccaacgggggcgcagtggcaaacctgcaggtggccacatcagaaagctggcgtgacaaacagacgggggagatgcgggagcagacggaatggcaccgcgtggtgctgttcggcaagctcgcggaagtggcaggtgaatatctgcgcaagggtgcgcaggtctacatcgaaggtcagcttcgcacccgtagctgggaagataacggtatcactcgttacgtcactgaaattcttgttaagaccacgggcaccgtgcagatgctgggacgtgcaccacagcagaacgctcaggcgcaaccgaagcctcagcagaatgggcagccacagagtgctgacgcgacgaaaaaaggtggcgcgaaaacgaaaggccgtggacgtaaggccgcgcagccagagcctcagcctcaacaacagccagaacctccttatggcttcgacgatgatgcgccattctga

SEQ ID NO: 30887 - DNA, 711 bp, Escherichia coli
atgtcagatgtcatgacggatacagaacaggttaaagcagttgtacagggagtttcggcgtggatgccggtgatttccactctggccggtggtgttctggctggcggggttgccttactggtgagcaggatgaatcaccgctacgcacgtgagcgtgaagcaattgcggcagctgaacggcaacgtcatgaaatcatgctcgccgaagacaaaaaagaaaaggagctgtatttcatctctactcagttggtattccgtcttgagcgttttgctcaggagtgcgcggaagtggttaatgatgacgggtgggaagatgataaggggtacacccgggcaagtgttagcgcggaggcatttgccactgaagatattgacggcgattggcgggtgctgccaagcagacttctttatcgtatccgtgaattgtcggtacttattcccgaagctaaccggtatatcagcgttgtaaatgataatgataaccctcccgactggcagatgatgtttaaagaacgacgttaccaatattcgcgtctggggatgcgcgccctattactggccaggcggttaaggcaacttaatgccatgccttcctcacaccttgataatgatagcccctggtccgtacaaaacgtgttatgggctgagtggcgtaaacaacgaaagtccaggtcgaaaatggtgcgtgaagttcctgattatgatttatga

SEQ ID NO: 30888 - DNA, 297 bp, Escherichia coli
atgcataattcaataattcaggtctgggattatctgacacattgtggccataaattcttatggctaaaaataaaccccgtaccgccaggatataccggttcggtatacacacagcagtttgtcattttcagcaaagcatgtcgtattctggccacgcttgatgtgcacagacaacattgggtgtattcaggaatcactcctcgctgtctgcccgctgataaaaatccaagcatgcttaatcacggtatacctttggatagagggattgcattacattacgcatcacaggggtactga

SEQ ID NO: 30889 - DNA, 642 bp, Escherichia coli; identical to SEQ ID NO: 17156

SEQ ID NO: 30890 - DNA, 135 bp, Escherichia coli; identical to SEQ ID NO: 10665

SEQ ID NO: 30891 - DNA, 135 bp, Escherichia coli; identical to SEQ ID NO: 10665

SEQ ID NO: 30892 - DNA, 135 bp, Escherichia coli; identical to SEQ ID NO: 10665

SEQ ID NO: 30893 - DNA, 270 bp, Escherichia coli
  misc_feature (258)..(267): n is a, c, g, or t
atgattacaagtatacgctatcgcggcttctcattttattacaaagataacgataataaatataaagaaatctttgatgaaatactggcctataattttaaaacagtaaaagtattacgtaatattgatgataccaaagtatcgttgattgatacgaaatatggtcgctatgtttttaaagtctttgccccgaaaacgaaaaggaatgaacgttttttaaaatcttttgtaaaaggtgactactatcagaatttgatnnnnnnnnnntga

SEQ ID NO: 30894 - DNA, 1344 bp, Escherichia coli
atggctacgtggcaacagggtattaattctggtggttttctggctggcatcggtacgcaaaatgagaatgcgccaaaggcaagcgacattaacgcaacgcttggtctgatccgcgaaaacaatgaactggctcgctcaggtgcaaataacgttgctctgacaggtcttcgtggtctggctggcgttgctgatatttataagcagcagcaacagcaggagcgtaaagcggcattccagaaaggttatgcagatgcttatgcgtccggtgacagggagaagatgcgtaatcttattacagcattcccagaagagtttgaggaagtccgtaaaggcatggggtatgtcgatgacgcccagcgggatgattttggcaatctggcgcttaaagcacaggtagcttcgtcgcttggtccgggcgcatttggcaggttcatgatggataatgagcaggagatgcgtcgtttaggtatccctccagaaactattgctgaaatgcaggttaatgacccgcagggcttccagcactttgcaggtaatctggcactgttttctctcggtcatgagaagtacttcgatatcaaagatcgaatggaaggccgtcgacttgagcaagggcgactggatgaaagtatgcgtcaggctgacatggagaacgcgagaggatgggcaaatatccagaacgctcaactagacagggctcagcgagcacaaattcactcagatgagatgggattgaagctaatggagctggggcaaaaaggtaagccgtcagcagacttaattaagggattaaattctgacattaccaattttggcaaaaattataactctgtcagagcggcagcaaactctctgcaagcccttagcaaggtaaatactggcgctgcccaacttgggattatcttcaactacatgaaatctcttgacccgcagtcagtcgttcgtgaaggcgaacaggttcaggtaatgcggtctgatggcatatggggacaaatcaaaggatacatagaccagcttaatgctggaaacggcctatcgcaggaggcaaaggataacattgttaacgccgcaaaaatcaacgccaatgctatggggcagcagtttaaccagcaggttgacgaatatctcgatacatatggagaaactattcctcaggggctaagaaaaagccttgaaagaaggaaagcgaagctatttgacgatgtttccgggcagcctacatcacaggctggcactggacaggcaaaagcggcaaccggaggaatatcagaaggcgcaacggcaaccaaccctaaaactggtcagaaaattatttacaggaacggaaaatggcagcaaatgtaa

SEQ ID NO: 30895 - DNA, 396 bp, Escherichia coli
atgaaaacctaccgaataaaattgccgtggcctccttcaaacaaccgatattggcgacactcaagagggatccactacatcagcgactgggggaagagataccaagaagaagtaatcgaattaatccagcaacaacagctagacatcaaaatcacacctcgcatcagaataaccatccacgcagcacctcccgataaccgcaaacgagatttggacaatctgccaaaagccgtttttgacgcactcaccagtgcgggcttctggctggatgacggtcagatagacgatatgcgcgtcattcgctatcaggcgattaaaggcggaatgcttttgttggttgtgactgaaacatgcggcagtttgccaatgattacagagctactggaggccgcatga

SEQ ID NO: 30896 - DNA, 906 bp, Escherichia coli; identical to SEQ ID NO: 5092

SEQ ID NO: 30897 - DNA, 432 bp, Escherichia coli; identical to SEQ ID NO: 7321

SEQ ID NO: 30898 - DNA, 192 bp, Escherichia coli; identical to SEQ ID NO: 12354

SEQ ID NO: 30899 - DNA, 183 bp, Escherichia coli; identical to SEQ ID NO: 11010

SEQ ID NO: 30900 - DNA, 321 bp, Escherichia coli
atggttttaaatattgaactccggcatttcgtcagcaaggcggggagcaccgtatcgctgctttgcctcaaagaatgccttatggacagcggcatcgcaggtgagccgaaactgttggcgcaggctcatctggtgacgacgccagagccagacataccagccgctgcgggcaacccgaagtacacgacacatcgctttgatgctgaactctgcccgatgattttcgatgaagacatacttcatttcaggcgcttcgcgaagttgtcgcggccttttggaggatggccagttcctcagcctgctccgccagttgtcatttaa

SEQ ID NO: 30901 - DNA, 198 bp, Escherichia coli
atgctcatcacaacaaaagaaggtaacaataataaaatatttattatttcttattattatcactgggaaattataagaaatgtccgattttttttgaatcttacaaatgacaatgacaataaaagccggttgttgcatgcattttcattctttatcaccaataaaaaaataaatttttatttaacattaccccattaa

SEQ ID NO: 30902 - DNA, 234 bp, Escherichia coli
atgacagcgcttcccgaccatgccgccagtcccctgatgacccgcctgcaggacgggctgcgcacggagtctgtccgctctcaggcccgtgaacagtttaccggtgcggtggaccggatatttgacacagcggagagcgtctgtgttgcctctgttgtccgtacggccctgcgcgctgttcgtgacaccgtggtctctgttgcccgcgcggtatggaactggattttcttctga

SEQ ID NO: 30903 - DNA, 474 bp, Escherichia coli
atgaaaacattgtctcagaacaccacctcttcggcctgtgcaccggagactggcctgcaacaactggttgccaccatagtccctgatgaacagcgcatcagcttctggccgcagcattttggcctcattccacagtgggtgaccctggagccccgggtcttcggctggatggaccgtctgtatgaagactactgcggtggtatctggaatctgtacaccctgaacaacggcggggcatttatggcacccgaaccggatgacgatgatgacgaaacatgggtactgttcagtaccatgaacggtaaccgcgctgaaatgagcccggaagccgccggcattgctgcctgtctgatgacgtacagccatcatgcctgtcgtacggagtgttatgccatgacggtccattattaccgtctgcgggattacgccctgcaacatccggaatacgacgccattatgcgcatcattgactga

SEQ ID NO: 30904 - DNA, 774 bp, Escherichia coli
atgctggcggttagcaccggttctggcttcattggtggtattattgcgggcttcttggcgggttacattgcgaagttaatcagtacgcaactgaaactgccacagagtatggaggcactgaaaccgatcctgatcattccgctaatttccagtctggtggtcggtctggcgatgatctacctaatcggtaaaccggttgctggcattctcgatgggttgactcactggctgcagaccatggggactgcgaatgcggttctgctgggggcgatcctcggtggcatgatgtgtactgacatgggcggtccggtaaacaaagcagcgtacgcattcggtgtgggtctgctgagtactcaaacctatggcccgatggcggcgattatggcggcaggtatggtgccaccgctggcaatgggtctggcaacaatggtggcgcgtcgcaaattcgacaaagcgcagcaggaaggtggcaaagccgctctggtacttggtctgtgctttatttcggaaggtgcaattccgtttgctgctcgtgatccgatgcgtgtgctaccgtgctgtatcgttggtggggcgctgactggcgcaatctcaatggcgattggtgcaaaactgatggcaccacacggtggtctgtttgttctgctgatccctggcgctattacgccggtattgggttacctggtagcaattattgccggtacgctggtggcgggtttggcctatgccttcctcaaacgcccggaaacacaaatagtagaaaaaaacgcataa

SEQ ID NO: 30905 - DNA, 909 bp, Escherichia coli
atgaaaacgctgctgattattgacgctaatctcggtcaggcacgcgcctatatggcgaagaccctgctgggcgcggcggcgcgaaaagcaaaactggaaatcatcgacaatccgaacgacgctgaaatggcgattgttctcggtgattccatcccgaacgacagcgcgctgaacggtaaaaatgtctggctgggcgatatttcccgggcagttgcgcaccctgagctgttcctgagtgaagccaaaggccatgcgaaaccttacactgcgccggtcgctgcgacagcaccggttgctgccagcggtccgaaacgcgtagttgcggtgactgcttgcccgactggcgtagcacacacctttatggcggctgaagccattgaaaccgaagcgaaaaaacgtggctggtgggtgaaagttgaaacccgtggttctgttggcgcgggtaatgcaatcacccctgaagaagtcgcagcagcggatctggtgattgtggcggcagatatcgaagtagatctggcgaaatttgctggtaaaccgatgtatcgcacctctaccggtctggcgctgaagaaaactgcgcaggaactggataaagcggttgctgaagcaacgccgtatgaaccggcgggcaaaactcaaacagcgaccactgaaggtaagaaagagagtgcaggcgcttaccgtcacttgctgacgggcgtctcttacatgctgccgatggttgttgcaggtggtctgtgtatcgcgctttcttttgcttttggtatcgaagcgtttaaagagccgggtacgttggcagcggcgctgatgcagattggtggtggttcagcctttgcgctgatggtgcggtactggcaggttatattgccttctccattgccgatcgtccgggtctcacgccgggtctga

SEQ ID NO: 30906 - DNA, 216 bp, Escherichia coli
atgtttgcaaggtgcgtttattctgacactgtgtgctttactgttggggaattatatagcgttgaccttcttaacgggtgcaagcgcggcgcgggcggtattcattatgtaaaagataatgacggcgatgcgtggcaattttacggcgatcatgcgaaaggggttgttaagggtagttttgataatcgcgtaatggcgcgttttgttaagtggtga

SEQ ID NO: 30907 - DNA, 201 bp, Escherichia coli
atgaaacaacaagagataaacatgaaaaaagtgattattctttttgaagattataacggtgaggcatggtgcaagtatttaagcggtgttgaagcacggttggcgctaacgtttattgccgcactggatgaaggggattttaacgctattccggttaagccagtagaaatctatcgtcgcgaggtgaaggatgaagcctaa

SEQ ID NO: 30908 - DNA, 567 bp, Escherichia coli
atgactgcaacgtatggttatagtcaggataaccacggacaggtaaaccaatatacgggggtatctggttctctgttggagcagcataatctcagttataacatacaacatggttttgctaatcaggataatagcagtagtggttctgttggtgttaattatcgtggggcatatggttccttgaattccgcctacagttacgataatgaaggtaatcaacaaataaactatggcatcagtggtgctcttgttgtacatgaaaatggtcttacgttgagtcaaccattaggtgaaactaatgttttgataaaagcgcctggagcgaataatgtggatgttcagcgggggacaggaatatccactgactggcgtggatatgcagttgttccttatgcaacagaatatagacgtaataatatttcattagatcctatgtcaatgaatatgcatactgaactggatatcacttccactgaagttattccgggaaaaggtgcgttagttcgtgcagagtttgctgctcatatcggctgtctcttatacacatctccgagcccacgagactaa

SEQ ID NO: 30909 - DNA, 528 bp, Escherichia coli
atgggctgtattttcatcggcgtgttcctgatgcctggcgcagtcagacgttttggtaagaagaaggtctatatcggcggcctgctgatttgggtgctgggcgatctgctcaactatttcttcggcggcggctcggtcagctttgtggcgttctcctgcctggcattcttcggctcggcgtttgttaacagcctgaactgggcgctggtttccgacaccgtcgagtacggcgagtggcgcaccggtgtgcgttcggaaggtacggtctacaccggcttcaccttctttcgcaaagtatctcaggcgctggcaggtttcttcccaggctggatgctgacgcaaatcggctatgtgccaaacgtcgcacaggctgaccacaccattgaagggttgcgccagctgatcttcatctacccaagcgcactggcagtagtcaccattgtggcgatgggttgcttctacagtctgaacgagaagatgtacgtccgcattgttgaagagatagaagcccgtaaacgcacggcgtaa

SEQ ID NO: 30910 - DNA, 1263 bp, Escherichia coli
atgatcaagattggcgttatcgccgatgattttaccggcgcgacggatatcgccagttttctggtggaaaacggtctaccaacggtacaaattaacggtgttccaacaggtaaaatgccggaagcaatcgacgcactggtgatcagcctgaaaacgcgttcctgtccggttgttgaagccacacagcaatcgctggcggctctgagctggttgcaacagcaaggttgcaaacagatctatttcaaatactgctctactttcgacagtacggcgaaaggtaatatcggcccggttaccgatgcattaatggatgctctcgacacgccgtttacggtcttctctccggccctgccggtcaacggacgtacggtttatcaggggtatttgttcgtaatgaatcaactgctggccgaatctgggatgcgccatcacccggtaaatcccatgaccgacagctatcttccccgtctggttgaagcgcaatccacagggcgctgcggcgtcgtttcggcacatgttttcgaacaaggtgtggatgccgttcgtcaagagctggctcgcttacagcaagagggctaccgctacgcggtgcttgatgcgctgaccgaacaccatctggaaattcagggagaagccttgcgcgataccccactggtaacgggcggttctggtctggcgattggccttgcccggcagtgggcgcaagaaaacggtaaccaggctcgcaaagcagggcatccgctcgctgggcgcggcgtagtgctctccggttcatgctctcaaatgaccaaccgccaggtagcacattaccgtcaaattgcaccagcccgtgaagttgatgtggcacgctgcctctcaattgaaactctggccgcttatgcacacgaactggcagagtgggttctgggccaggaaagtgtacttgctccactggtttttgccaccgccagcactgacgcattggcagcaattcaacagcaatacggtgcacataaagccagtcaggcagtagaaacactgttttctcaactagcggcgcggttagcagcggaaggcgtgacacgctttattgtcgcaggcggtgagacctccggcgtagtcacacagagcctgggaataaaagggtttcatattggcccaaccatttctcccggcgtgccgtgggtaaacgcactggataaacctgtctcactcgcccttaaatctggcaacttcggtgatgaagcctttttttcacgagcccaaagagagtttttatcatga

SEQ ID NO: 30911 - DNA, 543 bp, Escherichia coli
atggaaaacaacgagctgacgtcgcaattggctcaaatcagcacggtcagcgggattgaaaaactcaataccacgctcggatctatttccggacagattgataacagccagtcgttacaggccagtaacctgatcggtcacggcgtgatgatccccggcaccactgttcttgcgggaaccggtagtgaagaaggggctgtgaccacgaccacgccgtttggtgttgagctgcaacaggcggcagacaaagttacggccaccatcaccgataaaaacggtgcggttgtccgtaccattgatatcagtgaactgactgccggagtccacagtttcacctgggacggtacgttgactgacggcagcactgcgccgaacggttcttacaatgtagcgattagcgccagtaacggtggtacacaactggttgcccagccgctgcagtttgctctggtgcagggtgtgatccgcggcaacaacggtaatacgctggatctcggcacttacggcaccaccaccctcgacgaagtacggcagataatttaa

SEQ ID NO: 30912 - DNA, 273 bp, Escherichia coli
atgattaccccacaggaagcacatcagcgcgcccgcgcccttgttgaacggtacctcaacgagtgtgaatgccgtgacctcaccgatatcatgtgcgccctgacggcgttaatcagcatggccacgcaggccattgtggcgactaacggaaaggaggccgccctgcagatactggtgaacacactcacccacgcggcagagcacgaggtgccgtaccggatggaaatcactgcagaaggcgatctgcacatcattgttgaccggaagcactga

SEQ ID NO: 30913 - DNA, 363 bp, Escherichia coli
atgaatactgttttaagtgttcagggtgcttctgcgcccgttgaaaagaaatcgtttttttctaaattcactcgtctgaatatgcttcgcctggttcgtgcagtgatcccggttgctgttctgatgatgttgttccctgagttagctatggctgctggtaaaggcacggacctgatggctaaaggtcaggaaacggttaaggcgaccttcggtaaggactccagtatcgttaaatgggttgttctggctgaggtgctggtcggtgcggtcatgtacatgatgaccaaaaacatcaagttcctggtcggctttgccatactctctgtatttattgcagtaggtatgtctgttgccggattctga

SEQ ID NO: 30914 - DNA, 729 bp, Escherichia coli
atgagaaaaaataatacggcaataatatttggcagcctgtttttttcctgcagcgtgatggccgcaaacggtacgctggcccccaccgtggtgccaatggtgaacggtggtcaggccagtattgccatcagcaataccagcccgaatctgtttaccgttcccggtgaccggattatcgccgtgaacagtctggatggtgccctgaccaataatgagcagaccgcctccggcggtgtggtggtggccaccgtcaacaaaaagccctttacgttcattctggaaacagagcgtggtctgaacctttccattcaggccgttccccgtgaaggcgcggggcgtaccattcagctggtcagtgacctgcgcggaaccggagaagaagccggagcgtgggaaacgtccacgccttacgaatccctgcttgtgaccatcagccaggctgtccgtggcggaaaattacctgcaggctggtatcaggttcctgtgacaaaggaaaccctgcaggccccggcggggctgtcttcagtggcagattccgtatggacggggaatcacctgaagatggtccgctttgtcgtggaaaataaaacgctgtctgccctgaatatccgggaaagtgatttctggcagccgggaacccgtgccgtgatgttcagccagcctgccagccagttactggcaggtgcgcgcatggatgtgtatgtcatccgtgacggggagggcaactga

SEQ ID NO: 30915 - DNA, 648 bp, Escherichia coli
atggcttttccctatctcgcctttgaaaaaatccagatagccggatgcatcatcactcggctggccaacagcctccacgaatgccgatttgccaacagtattcacactgcggatataaaaataataatcatggcccggtttgatattgatactggcagctatccagtacagcgccgagccaagatagcgggctgcggtttcaacctgcctgatatccgcaatccgcttttccgagaaccagaactcaaactgtaccgtcgggtcataaacggcaagatgcggcgtggcggttatctgaaaataccccggcgtcagctcaatggtggcgggttttgcaggcgcgttaatccggaaggtggtggtcgcaggttcgccctgctggccgtagctgttaatggcccgcaccgtcagggtgtattccccgagcggcaggccgctgaaacggtgctccgtgtctgcggtgatagcggtggtcaccagtctggcatccgttcccttaccactggtcaggcgcagactgaagcgcacacccttcaccacccgcggcgtatcccagcgcgccagcacctgatattccccgctgtctgcggtaacttcggcggtcaggtgctgcactgccggtgggatgacgctgttcagggaacctga

SEQ ID NO: 30916 - DNA, 858 bp, Escherichia coli
gtgactgatcttcaacaaacgtattaccgccaggtaaagaacccgaatccggtgtttacaccccgtaaaggtgccggaacgttgaagttctgcgaaaaactgatggaaaaggcggtgggcttcacctcccgttttgatttcgccattcatgtggcgcatgcccgttcccgtggtttgcgtcggcgcatgccaccggtgctgcgtcgacgggctattgatgcgctgctgcagggactctgttttcactatgatccgctggccaaccgcgtccagtgctccatcaccacgctggccattgagtgcggactggcgacagagtccggtgcaggaaaactctccatcacccgtgccacccgggccctgacgttcctgtcagagctgggactgattacctaccagacggaatatgacccgcttatcgggtgctacattccgaccgacatcacgttcacaccggctctgtttgctgcccttgatgtgtctgaggatgcagtggcagctgcgcgccgcagtcgtgttgaatgggaaaacaaacagcgcaaaaagcaggggctggataccctgggtatggatgagctgatagcgaaagcctggcgttttgtgcgtgagcgtttctgcagttaccagacagagcttaagtcccgtggaataaaacgtgcccgtgcgcgtcgtgatgcgaacagggaacgtcaggatatcgccaccctggtgaaacggcagctgacgcgtgaaatctcggaagggcgcttctctgccagtcgtgaggcggtaaaacgtgaagtggagcgtcgtgtgaaggagcgcatgattctgtcacgtaaccgcaattacagccggctggccaccgcttccccctga

SEQ ID NO: 30917 - DNA, 2199 bp, Escherichia coli
atgaaatttgataaacccgcaggggaaaacccgattgatcagctgaaggttgtcggtcgtccccatgaccgcatcgacggaccgctgaaaactaccggcacggcacgctacgcctacgaatggcatgaagaagcccccaacgccgcctatggttatatcgtcggttccgccattgccaaaggatgcctcaccgccctcgatacggacgccgcgcaaaaagcgccgggcgtactggctgtcattaccgccagtaacgccggggcactcggcaaaggcgacaaaaacaccgccaggctgttaggcggccccactattgagcactatcatcaggccattgcgctggtagtggccgagaccttcgaacaggcacgagcggcggcctcgctggtgcaggcgcactatcgccgtaataaaggagcttactccctggcggacgagaaacaggccgtcagtcagccgccggaagacacgcccgataaaaatgttggtgactttgacggggctttcacctccgctgcggtgaagattgatgctacctacacgaccccggaccagagccatatggcgatggaaccgcatgcctcgatggccgtctgggatggaaataagcttaccctctggacctcaaatcagatgattgactggtgccgcaccgatctggcaaaaacgctgaaagtgcccgtggagaatgtgcgtattatctccccgtatatcggtggagggtttggcggcaagctgttcctgagaagcgatgcgctgctggcggccctcgccgcccgtgcggtgaaacgtccggttaaagtgatgctcccccgccccactattcccaataacacaacgcaccgccccgccacccttcagcacctgcgtatcggtgccgaccagagcgggaaaatcactgctatctcacatgaaagctggtccggaaacctgcccggcggcacgccggaaacggcggtacagcaaagcgaatttctttacgcaggggcgaatcgtcatacaggcctgcggctcgccacgcttgatttgccggaagggaacgccatgcgtgcgcccggcgaagcccccggtctgatggcgctcgaaatcgcgatcgacgaactggcggaaaaagcgggcatcgatcccgtcgagtttcgcatcctgaatgacactcaggttgaccccgccgacccgacgcgccgcttctctcgccgtcagcttatcgagtgcttgcgcaccggagcggataaatttggctggaagcagcgcaacgccacacccggacaggtacgcgacggggagtggctagtcggccacggtgttgcggcgggctttcgcaataatctgctggaaaaatcgggtgcgcgggttcacctggagcaaaacggcaccgttaccgtggaaacggacatgaccgatattggcactggcagctacaccattctggcccagacggcagcggaaatgcttggcgtaccgctggagcaggttgcggttcacctcggcgattccagtttcccggtttctgcgggttctggtggacaatggggcgcgaatacctccacctccggcgtttacgccgcctgtgtgaagcttcgcgaaatgattgcctcggcagtcgggtttgatcctgagcagtcgcagtttgccgacggcaagattaccaacggtacccgaagcgccatgctacatgaggccaccgcaggcggcagactgacagcggaagagagcattgaattcggaacactgagcaaggagtaccagcaatcgacctttgccgggcattttgtggaggtcggcgtgcatagcgcgacgggagaagttcgggtccggcgtatgctcgccgtgtgcgcagcggggcgcattctgaatccgaaaactgcacgcagccaggtcattggcgcgatgactatgggcatgggcgcggcactgatggaggagctggcggtagatgaccgtttgggctacttcgttaatcacgatatggcggggtatgaggtgccggttcatgcggatatcccaaaacaggaggtgattttcctggatgataccgaccccatctcctccccgatgaaggccaaaggtgtcggtgagctgggcctgtgcggcgtgagcgcggctatcgccaacgcggtgtataacgccaccggtattcgggtacgggattatcccatcactctggataagctgctcgataagctgccggatgtggtttaa

SEQ ID NO: 30918 - DNA, 306 bp, Escherichia coli; identical to SEQ ID NO: 28810

SEQ ID NO: 30919 - DNA, 267 bp, Escherichia coli
atggaatccatacataccgataaaccgacttactatgtttgtgctcaacgtctcacgcagttcgaaaagatttcgcaccagttcacctttttctggatgagaaagtttgctgttttgacctgttcgctgttcaaaacgagtgaaaccggccatgaatcgcttttgtgcatagttatgcagccccctgaaaacaattctgacgcatttttctgttttaccctggtgtttccttgtctttttgtattttttgcgtcagggagtgattga

SEQ ID NO: 30920 - DNA, 1119 bp, Escherichia coli
atgaatattaactttaaacatatctttcctttattgtcgtcattttttatttcaggatgcgactctgatggaataagcaaggtaaagtctttcgtatattacgacattgacgactcaatgactgtaggtaaagccttcgatacaaggagtgattgcatcaatggcacatggagtgaaaaagaggatgatcgaggcagaatcatcgttacatatacctgtgatattagtgaaagtggcctaaaaataataaattcagccattatgcaagaacctgaaaataatgctgaacattctataacacaaaataacaacagcataaaatcaaccaatgaatcactagaggaatacaaacagaaaacgcctcttgttgaaaaaacaaaagaggtcgtaatagatcacataagaaagctaaacagtgcctttaatgaagatccaatcatatctagcaaactcacaattagaccttatctagacagcatgctatatctaagggattataatgacaatgcgctaaatgcaatttgtaatggatacacatacattcaatatgccaacacttacagttggcgtgatgtaagtgaagatgatgtaaaagaatcatgcaaaaagcacatatatcaggtatatcaatcatttaagaaaaatgcatcaccattaataactaaaaacttccccggtttctacgaacaggtccccccctgtgagaacgcagatgaatgcataaaaaaaacaaatagttactttgatgataactttctcaacatctacaaaagaagccaagatagagcacctcaaacaatatctgatttaaaaaagcacaatatagaaataagtgaaaagttaaatgattgtagaaaaaaattaaatgtctcagatgtcaaactaacctactactggtttgtaacagacaccggaggagttgattatttagatggggcattgacatataactttcagggaaagaatagagtcgaaagttttcacaaacgactattgcaatatgcatacattaactacaacgaaaatcaaatacctcgagactttgtaacatcaataaaaaatagcatttattataagaggttctacacctataaaatcgaagattgcaccaagttttaa

SEQ ID NO: 30921 - DNA, 186 bp, Escherichia coli
atggagcgcttcttcaggagtctgaagaacgaatgggtgccggcgacgggctatgtaagcttcagcgatgcagctcacgcaataacggactatatcgttggatattacagcgcactaagaccgcacgaatataatggtgggttaccaccaaacgaatcggaaaatcgatactggaaaaaactctaa

SEQ ID NO: 30922 - DNA, 291 bp, Escherichia coli
ttgatacaaaatcatattaaaaatatgactcctgaaatttgtaaggcctctagggccttagttaacttgactcagaaagagctagctcttatggcgggaatagcgacaccaaccattgctgattttgagcgcggcgcaagaaaacctcatggaaacaacttgagatctatcattattgcttttgaaaacaatggattggattttgttgaggaggatggtgagataatcggaatctttatcagaagaaagaatgtcagaaccgaggaatctattgatctgtcaggtcattga

SEQ ID NO: 30923 - DNA, 1128 bp, Escherichia coli
atgccacatagaaacacatctaataaactaacgtgcatcgaaagtttttgtggtgccgggggtatgtccctcggattaaaacaagcaggttttgatgttaggttggcatttgatattaatgaaaatgctgtagaaacctacaacaaaaacattggtaatcattgcgaaaaattagatgcttctattgttagcgggaagcttcttttggaaaaagcaggcataaaaacgagactagatctttttagtggtggaccgccttgtcaaggattttcaaaacaaaaaagaggcgcccatcttcttgatgacgatagaaacaagttagttcttgaatattctaggctagttaatgaattaaaacctagagcttttttatttgaaaatgtggaaatttttggtcaaaaaagaggcaaagatctaattaatgagattaagaacaagttgattgattacaatatatacacatatttcatctgctcatctgattttggagttgcgcaaaaaagaggccgtttcctaatgattggaatagacaagtcagaaggtaaagtcgtccccaaactattaaaatcagataaaacccttacaataagagatgtaattggtcagttaccgcctccaccagaggattataaagagcatccagacataccaaatcatataaaatgtaaaataaaaaagattaatgaagaaaggttttcatacgttcctcctggtggaggatggaaagatataccattcaacttaaggttaaaatgccaccaaaaggttgatacagcatcgggaggatggcctgacgtttatgggaggcttgaatgggacaaacaatgcccaaccataacggcaggcttcgatagtttcactaggggtaggtatggacacccatcacaaaatagagcaataacattaagggagggcgcaatgctacaaggattccctgtaaactatagattctatggtaaccgtgatgctattaggctacaaattggaaatgctgttccaccgccagtatcctacgcagcaggaacagcaataattaattgtttaaacacaatgcaagataaaaatcactttaacttccaaaacccaatggagttggataaggatggacaatttagtcttgcaatctaa

SEQ ID NO: 30924 - DNA, 906 bp, Escherichia coli
atggatatcttgaaagaaaaaattgacgttgcttcacggctttataatttaaacgtgaaccatatatcagaaacattgcaggtaatagaatatgcaatgtttttattaaaaaacaaagcagggtatggttactttggttcatttaatggggtgaatacacaggaatatcattcatttacatttgatggtgaatattccaggccagtaagagatgatctctttattactgattgtgatttctttgtatcagggtttagagagttcaatgaaagtttgaagaatattggtagtagatggacatcatttgattctaggagagctaataaaataatttatacatctgtaatgtctgttgcatgctgttttgatctttggaaaagtggtagcagaaagactccgggaacattttttgaaattttcatggcagcagtattaaagttgatgattcctgatgagcttttctcaaagcacataccactaatagatcagcttgaatcagatgatgagtcaattgatccatcaagcgtgtctactgatattgttataaaatctaaatgcaaaaacgctagtgtagttataccattaaagataactacaagagagagaattgttcaaccatttgctcagcagagaatattggactcatactttggaaatggtgtttatttttctttcttagcgtgtattagcgagacgcaacaagacaagaagaaaaaaaaggttaatcatatatgtgttccgggaacaataaaattatatcaaaaatatctctctagtctctctggtatgtattactgtgatattccagagcgttacttggaaagagatttgaccgacataataccggtcaaatctatgggtgatttcttatttgatatttactctttctttagattgcaagactaa

SEQ ID NO: 30925 - DNA, 312 bp, Escherichia coli
atgtgtcagattcaggtatccgccaaggctgccggcatcatcccggaccgtgccggcgcgggagccgtcatcatccttaacatcaacggaagaatggccagcagcaccatatactcccgcggtcacagacataccggcaacctctgttctcagcaggtcaccctccagacggacgaagccatagctgccgctgctttccggcgtggtcccacgggcaataccgccgttgttatcgtgaccgagatggccgccctgaatgctgagacggacgctgttattttcaccatttacaccggtctgatggctgcgtga

SEQ ID NO: 30926 - DNA, 207 bp, Escherichia coli; identical to SEQ ID NO: 9728

SEQ ID NO: 30927 - DNA, 384 bp, Escherichia coli; identical to SEQ ID NO: 5770

SEQ ID NO: 30928 - DNA, 822 bp, Escherichia coli
atgcgattagcttcccgttttggtcggtataattccatccgccgtgaacgtcctttaacggatgatgaattaatgcagttcgtgccttcggtattttccggtgataaacatgagtcccggagtgaacgttatacgtatattccaacaatcaatatcatcaataagttacgtgatgaaggtttccagccattctttgcctgtcagagtcgggttcgtgatttgggacgcctagaatacagtaaacatatgttacgtcttcgcagggaagggaatattaacgggcaggaagttcctgaaattatcctgcttaattcacatgatggttcatccagttatcagatgatccccggaatttttcgttttgtctgcacaaatggcctggtgtgcggaaataattttggcgaaatccgcgttccacataaaggtgatattgtcgggcaggttatcgagggagcgtatgaagtgctcggtgtctttgataaggtcactgataatatggaggcgatgaaagaaattcatcttaacagtgacgagcaacatttatttggcagagctgcactgatggtcaggtatgaagatgaaaataaaacgccagtgacgcctgaacaaataattactccccgtagtcgggaagataaacagaacgatctctggacaacctgtcagcgggttcaggagaatatgataaaaggtggattgtcggggcgaagtgcctccggtaaaaataccaggacaagagccattacaggtattgatggtgatatccgaatcaacaaggcgttatgggtgattgccgaacagttcagaaagtggaagtcatga

SEQ ID NO: 30929 - DNA, 822 bp, Escherichia coli
atgcgattagcttcccgttttggtcgatataattctattcgccgtgagcgcccgttaacggatgacgaattaatgcagtttgttccatctgtcttttctggtgataaacatgaatcccggagtgagcgttatacatatatcccaaccatcaatatcatcaataagttacgtgatgaaggtttccagccgttctttgcctgtcagagtcgggttcgtgatttgggacgccgcgaatacagtaaacatatgttacgtcttcgcagggaagggcatattaacgggaaagaagttcctgaaattatcctgcttaattcacatgatggttcatccagttatcagatgatcccaggaatttttcgttttgtctgcacaaatggcctggtgtgcggaaataattttggcgaaatccgcgttccacataaaggtgatattgtcgggcaggttattgagggagcgtatgaagtgctcggtgtctttgataaagtcattgaaaatatggagacaatgaaagagatacatcttaacagtgacgaacaacatttatttggcagagctgcattgatggccaggtacgaagatgaaaataaaacgccagtgacgccagaacaaataattactccccgccgttgggaggataaacagaacgatctctggacaacctggcagcgggttcaggagaatatgataaaaggtggattatcggggcgaagtgcctccggtaaaaataccagaacaagagccattacaggcattgacggtgatatccgaatcaacaaagcattatggatgattgccgaacagttcagggagtggaagtcatga

SEQ ID NO: 30930 - DNA, 504 bp, Escherichia coli
atggacgaaaaatccctctatgcccatatccttaacctgactgcaccatggcaggttaaatcccttaccctcgatgaaaatgcaggttccgttactgttacagtcggaattgctgaaaatactcagttaacctgtccgacctgcaggaaatcctgttctgttcacgatcaccgacatcgtaaatggcgccaccttgatacctgccagttcatgacattagtagaagccgatgttccccgcgttatgtgcccggagcatggctgccagactctgcctgtaccgtgggcaggttccggcagtcggtacactctgctgttcgaatcgttcgtgctctcatggcttaaaatcagcaccgttgatgcggtcagaaaacaacttaaacttagctggaatgccgttgacggcatcatgacccgcgcggttaagcgaggcctgtcgcggattaaaaagcctttatcagtgcgtcatatgaatgttgtcagcgccagtgatataagacggtaa

SEQ ID NO: 30931 - DNA, 666 bp, Escherichia coli
gtggaggagtggcgggaatggcaacttgctgaaggacgaaaacgcagcgaggagattaaccgccagaatcgccagttgcgggtggaaaaaatcctgaatcgttcgggcatccagcctctgcacagcaaatgctcgtttgcaaattatcaggtgcagaacgacgggcaaaaatacgcgctgagccaggccaaatccatagctgacgaactgatgaccgggtgcacgaattttgtgttcagcggtaaaaccggcaccgggaaaaatcaccttgcagcggcgatgggcaaccggctgatggtgaaggggcgcagcgtgattatcgtcaccgtgtctgacgtcatgagcgtgttgcatgacagctacgacaacggcaaatccggggaaaaatttttacaggagctttgcggggttgatttgctggtcctggatgaaataggcgttcagcgggagacgaaaaacgagcaggtggtattgcaccagataattgatcgccggacagcatcactgtgcagtgtcgggatgttaacaaacctgaatcatgccgcaatgagtacgcttcttggtgagaggattatggaccgcatgaccatgaacggtggtcgatgggtgacgtttaactgggatagctggcgtccaaatgtcagcaatatgagggttgtgaagtaa

SEQ ID NO: 30932 - DNA, 510 bp, Escherichia coli; identical to SEQ ID NO: 29910

SEQ ID NO: 30933 - DNA, 939 bp, Escherichia coli
atgacgcgttacgacgcgctggaaaaccagtgtgaggaatccgacctgctggaagcagaaatgaagctgatgcgctgcatggcgaaggtcagagcgtggacgccggagatacgtgccggaagcggtgtggtggtgtcctggcgttatggcaacgtatgtgtccagcgtggtgtgcagttgcgcagtgaagatgacgcgactgacgacgctgaccgcacggaacaggtgcaggagaaagcgtcagtggaggaaatcagcctgccgttgctgacgaaaatgtcctcagagcgcacgctggcagtccaggcggcactcatgcagcaaccggacaaatctctggcactgctggcatggacgctctgcctgaatgtgtttggcagcggagcgtacagtaaaccagcacaaatcagcctggaatgtgaacattactcgctgaccagcgatgcgccatcggggaaggaaggtgccgcattcatggcgctgatggcagaaaaagcccgtcttgcagccctgttaccggagggatggtcacgggacatgacgacattcctgtcactcagtcaggaggtgctgttatccctgctcagtttctgcaccgcatgcagccttaacggtgtccagacccgcgagtgtggtcgcacgtcacgcagtccgcttgactcgctggaaagcgccatcggctttcacatgcgtgactggtggcagccgacaaaagcaaacttcttcggacacctgaaaaagccgcagattatcgcagccctgaatgaggcagggctgtccggtgccgcacgggacgcggagaagatgaagaaaggtgatgcggctgaacatgcagagcacaatatgaaagacaaccgctgggttccaggctggatgtgtgcaccacatccacagacagatgccactgaacgcaccgataacctggctgatgccgcctga

SEQ ID NO: 30934 - DNA, 939 bp, Escherichia coli
atggctcgttacgactcgctggaaaaccagtgtgaggaatctgacctgctggcagcagaaatgaagctgattgactgcatggcgaaggtcagggcgtggacgccggagatgcgtgccggaagtggcgtggtggtgtcctggcgttacggtaatgtgtgtatccagcgtggtgtgcagttgcgcagtgaggatgatgtggctgacgacgctgaccgcacggaacaggggctggagagcgcgtcagtggaggaaattagtctgccgttgctgactaaattgacctcagagcgcacgctggctgtccaggcagcactgatgcagcaaccggacaaatccctggcactgctggcatggacgctctgcctgaatgtgtttgacagcaaagcgcatagtagtcccgccagaattcgcctggaatgtgagcattatgcgctgaccagcgatgcaccgtcagggaaggaaggtgccgcattcatggcgctgatggcagaacactctcgttttgctgccctgctgccggaaggatgggaacgggatatgacgacgttcctgtcacttagccaggaggtgctgttatccctgctcagtttctgtaccgcgtgcagtcttaacggtgtccagacccgcgagtgtggtcacacgtcacgcagtccgctggactcgctggaaaccgccatcggctttcacatgcgcgactggtggcagccgacaaaagcaaacttcttcggacacctgaaaaagccgcagattatcgcagccctgaatgaggccggactgtccggtgccgcacgggacgcggagaaaatgaagaaaggcgatgcggctgaacatgcagagttccatatgaaagacaaccgctgggtgcctggctggatgtgtgcaccacgtccacagacggatgccactgaacacaccgctaacctggctgatgccgcctga

SEQ ID NO: 30935 - DNA, 375 bp, Escherichia coli
atgaaaacattacctgtattacccgggcaggcggccagttctcgcccgtctcctgttgaaatctggcagacactgctcacccgactgctggaccagcactatggtctcacgctgaatgacacaccgttcgctgatgaacgtgtgattgagcagcatattgaggcagggatttcactgtgtgacgcggtgaactttctcgttgaaaaatacgcgctggtacgtaccgaccagccgggattcagcgcaggaacttcgtcgcagttaatcaacagcattgatattctccgggcacgccgggcaacaggtctgatgacccgcagcaactacagaacggtaaataacattacccaaggcaagcatccggaggcgaaatga

SEQ ID NO: 30936 - DNA, 294 bp, Escherichia coli; identical to SEQ ID NO: 15293

SEQ ID NO: 30937 - DNA, 201 bp, Escherichia coli; identical to SEQ ID NO: 8170

SEQ ID NO: 30938 - DNA, 252 bp, Escherichia coli
atgaccggctgggaactgcgaatctggcgaaaaagcatgctctggtcacgcgaaaaagcggccagagaatttggcgtgacacagagaacatggcacgcctgggaaaatgcggagcaggtggatgttaccgtctggaggaccacccaggcactttcagtccgtgacctgctgcctcacatgcaggggatgcgcaaggcagatatcatcaggcgactggaaaatgaactgggggaaacggcagaggatgtgtga

SEQ ID NO: 30939 - DNA, 258 bp, Escherichia coli
atgaaagtcatattcacgtcgaaccgttttattgattttcttatccggcttttgattacagcgattgtcatttccccggtaattatctggtcgtgggatacggtaaaagaaaccactgcaggtgagatgcttgctgcttgttttgttattttttactccggtgtgctcctgtttattctgtatttttgtttttctgccctgactggcctgcagaaagatgatgaaagaaaaagtgatgaaaggaatgaagatgaataa

SEQ ID NO: 30940 - DNA, 321 bp, Escherichia coli; identical to SEQ ID NO: 5987

SEQ ID NO: 30941 - DNA, 486 bp, Escherichia coli
gtgttttattttcacacggttctcatcaaacggttcgatttccaggttgagcgagaccttacctttggttttcgtgttcatcacaccggaagcgacttcactgagaactgcgccgattttggtttcaaatacgccgccgtccagctccccgataaattcctgcacgttggtactgcgttcgctagccattttgctgctcctcatcatatcgaccctgcaaggtcggttggtttctccacaaaacagagaagaacacctgcggtggcagccgcccgggtggattgggttatgagcccgtcgtccggtgatgctcttctctgttttgtaaaaagagcggtaccagccggaagcaagggtacaagctggtaccgccaggactacacacagcataaagttgtggtgccgggtgcctcccggtgcctggcgaaggttgcacaccaggcgggtgggtatccacagaaggtcgactgtcagcctcaaccttaa

SEQ ID NO: 30942 - DNA, 579 bp, Escherichia coli; identical to SEQ ID NO: 8705

SEQ ID NO: 30943 - DNA, 426 bp, Escherichia coli
atgcaatatgcgaaacctgtcactctgaatgttgaagagtgtgaccgtctctcctttctgccttacctgtttggcaacgattttctgtatgccgaggcatatgtgtacacgctggcgcaaaaaatgatgccggaatatcagggaggcttctggcatttcatccgcctgccggacggtggcggttacatgatgccggatggcgaccgttttcatctggtcaacggtgaaaactggtttgaccgcactgtgagtgctgatgccgcaggtatcatccttacttcccttgtgattaaccgccagttgtggctgtaccacgacagcggggatgcgggactgacacacctttaccggatgcgcgatgcgcagttgtggagccacatcgaatttcaccccgaatgcaatgcgatttacgcggcacttgactga

SEQ ID NO: 30944 - DNA, 315 bp, Escherichia coli
atgagagttgagcagaataatttcagggacatgctctccgtttatctctccgttacggcgcaggcgcagcatgtgttttgtgtatccccggcggcccgggtcgcgcacacaggtctggcaggcgaagaatggctgaaaaccttcctgctgcaggctttccagtacggtgatggtggggatgtacgtatagttctggcttcgggacgtgtgtttctcttccccgaaaatccccggcacatggtgcatcagctcttcatgtgtcagtggacggtcacggcgtatctggtttgcagcataaccaaaacgacttgctaa

SEQ ID NO: 30945 - DNA, 279 bp, Escherichia coli; identical to SEQ ID NO: 20986

SEQ ID NO: 30946 - DNA, 645 bp, Escherichia coli
atgagtgttatggcaactttaagggaactttcagaagtatggacactttttagcaacatgcctgatgacaccaccttaggtgttgatttagcagcgctatatcttggtatcagcgttaaaactttagcgagatatagacagaacggtgatggaccctcctatatccagtatcaatcagaagatagcaaggcaagaaaccaacgtgttaattacttgttgggagatcttcgtacatggcgtgatattcataaagtgaaaagtacaatgcacgctgcgcaagttagaggattaacgtttacctcaatgagcgattttattaagaagcaaccttatttattagtaaatgaaaaattatcaggggggcagggaaaccgcttaggtaatggaaaaataaagttcacttacgaaaagaaatttatcttagggcacattctaagtatccaagagagtatgtttgataattttctaagaaagaatgaaatttcggctgtttggatatctaccgaaaaagctattcaaatggaatgggtagatgcaaaacaaaaagaaatgtttacaaatatatttatcaaggaagttgaaagaattattggggtaataaaagtaaacgatgaaaagagtgttttatcgcattatcaagggtaa

SEQ ID NO: 30947 - DNA, 1410 bp, Escherichia coli
gtgaagcccacccttaaccatgcgggaaaagtcgttttcgaagcaaacccagagcataaaccttacatagtttttgatgaccaccgcgactcaccagttggctttggtgtgaaggtcagtttgacgaaaaaaacgtatgtaatccagagaagagtgtcttccggtgatcgtagtgtgagtgaaggtaagaaacctagttctgtgctcaaagtaaaagttggaaatgtttctgattttccgaatatcgatcaagctcgtgaagtagcccgacagttggttcagaccatgatcgcaacaaagaggaatcccaatagaatcaagcgagaaacagaggcttctgaactcactatcagcgaagtctttgctcaatacagaaatcatttgatgggtagatctaaaccagcgaaacccaacacacttaatgtgctgagcaaagcagaaaacaggctttctgaatggtcagggcttcgagtgaaggatttaacaggcaaagaaattcttcgcaagtttgatgaaatcgcaagtagagcaagaacggccgcagagcaaacattccgctgggctaacgttgctgtaaaacacgcaatcgagattgaagcagggaatgcccagacccagcaacgacaaccctctttgtcctacaatccattctctatcttgaaagttcagaagaagttcaggactcgatcagaactggaagacagctacaaagcaaaaggtgtcagaaatccgctttcgccaaaagatactcttggacgatttttaacagcattacataacaagagaagcttcaaccgtcttggctgtgattaccttctgctgactatccttcttggtgctcgtaaggaagaaacagcttctctgtgctggcgagagtctcttacaaaggaagaagctaaaacgacaagctatgtagatcttgaaaatcggctcattcgattctatgacactaagaatcgaaacgatcatgagcttccaatctgtgatgctgtcaaaagaattctggaagacagaagggacattgttcatgaagcagaaacccgtccagaaagacttatatgggttttcccggcccgttccaaaagaagcaaaattggacactattcggatagcaaaagtttgagagagtatctatgtacggaagctgagatcgtcaaacttggtatgcatgacctaagacgtactttcggaagagtagcagaagaacttacttcttatgctgttgttaaaagattgctcaaccataggaacacaacagatcccacagaaagatacgctatgcctgaccaagatcgagtttttgaagcattacaacggatcgagttgcatatgcttatgactgctcctaagttatacaatgcattgttagcttcttctaaatatccaccattgtctgataacaaggagtag

SEQ ID NO: 30948 - DNA, 570 bp, Escherichia coli; identical to SEQ ID NO: 17228

SEQ ID NO: 30949 - DNA, 693 bp, Escherichia coli; identical to SEQ ID NO: 11600

SEQ ID NO: 30950 - DNA, 276 bp, Escherichia coli; identical to SEQ ID NO: 11599

SEQ ID NO: 30951 - DNA, 873 bp, Escherichia coli
atgaatccgtctgatgccattgaggcaattgaaaaaccgctctcctccctgccttactcgctttcccgtcacatcctggaacatctgcgcaaactcacccgtcacgaacccgtgattggcattatgggtaaaagcggggccggtaaatcctcactctgtaatgcactgtttcagggggaggtcaccccggtcagtgatgttcacgccggcacccgggaagtacggcacttccgtctgagtggccacggtcacagcatggttatcactgacctgcccggggtgggcgagagccgggacagggatgcagagtatgaggccctgtaccgtgacattctgcctgaactggacctggtactgtggctgattaaagccgatgaccgtgccctgtctgtggatgagtatttctggcgacacatcctgcaccggggacatcagcgggtactgtttgtggtgacgcaggccgacaaaacggagccctgccatgaatgggatatggccggtattcagccttctcctgcacaggcacagaatattcgcgaaaaaacggaggcggtattccgtctgttccggcccgtacatccggttgtggccgtatcggcccgcaccggctgggaactggatacgctggtcagtgcgctcatgacagcgcttcccgaccatgccgccagtcccctgatgacccgactgcaggacgagctgcgcacggaatctgtccggtctcaggcccgtgaacagtttaccggtgcggtggaccggatatttgacacggcggagagcgtctgtattgcctctgttgcacgcacggttctgcgtgccgtccgtgactcggtggtctctgttgcccgcgctgtatggaactggattttcttctga

SEQ ID NO: 30952 - DNA, 579 bp, Escherichia coli
atgaaattcttcatgatgaagcgtgtaatgctggcgattgcactccctgtacttgtcgcttatttcggaggaagtaaggtcatgtcagtttattgggtgcccctgttttttatcagtgcgatgctatgtgcaacagcttatggcaaatatgtcgttaggaaaaacaatgatgctacattcaattatctgaatgaaaataatgatggtatctatattcataaattcaatgactgcgagattcggttagacaaaaataaacaagaagtatttcttaaaaatagcgcaggagcaaaaacctattcttttaatgatattaaagaatggcgctacaacattaaatatggaggtgaggttgcaggtgctggtttgagtagtatcagagagaacggtaaaacattaggtcaaaacatcgctgatacaggtttctttatccgtgtgaaagacgttcgtaaaccagagtggcatatccggttttatcctcgcaatgattcttttaactctcgtaagggcattaatgatcttaaatctcaacttaatcaatggatggagatcttcgaccagaatttgaatgctgcatag

SEQ ID NO: 30953 - DNA, 1134 bp, Escherichia coli
atgaagggaatgcagaagataaagcgaggtaaaaacttcgctggcgtcgtgctttacgcattaaaaccagcttctcatcataaaaaagatccgatagtgattggcgggaacatggatggaagcgctgctgaagatctaatagttgaatttaataccacaaaagcgcttcgcccggatgttgctaaacccgtctggcacaattcgcttcgcttgccgaaaaacgaagcgctgacagatgctcagtggtcagagattgctgatgattacatgtcccgaatgggcttctctgaaacgcacctcagatgctatatccttcatgatgatgcggccggccagcacatccatatcatcgccagtcgcatcgaactcagttcggggaagctctacttaggtaaaaatgagaaccttatcagcacacgtatcatagaagagctggagcaggactaccagctaacaagaaccaaaggagctgatgcactgaaaccctcttcatcaccagtaaaaagtaaaaaatcacgtaatgaagctatgttagaaggcaggactggcgaaaaatgcccaaagacgatcatacaggaagctatagatacactcataaccagcaagatttccgaggaagagtttgtgcagcagcttgcagcacaaaagataaaagcaattcccaacagggcttcaaccggaaaaatgaacggtttttcgtttgagtacgccaacatttcattcaaggcttctcagcttggtaaaaagtattcatggaaaaacttagaacagctcatacgcattgatacaatccaaacgatggagtctgatgcaatagtttgttttggtggagtggatgcgagcgacatattgcttcccttacctgaacgacctcaaccactgttgaaagaaaatttggatgctagaacaataacagctaccaatagttatataaatctcacaatgagatggatagaagcaatcccctggttagatagcatagttggtatcgtaaaaagcttgcataaatctttgcttgaacacaaaaacaaaccagcacttatcttttctgcttcaccactttctatagacctaccatctgttccttctgttgaaaaatctgtgaaaacaaacacttttagactgaaaatttag

SEQ ID NO: 30954 - DNA, 363 bp, Escherichia coli
atgaaaaatacttttaataaaatatataaaaaagaatcacctgaaagtttgttaagaacacattgcatcagtgttcgtttaaatcaagatgagctacagcttctcaacacgaaacgcggtgataaaaacaagggagagtggcttcgtttagctttccttgaaaagctccctgtagcagttcctgcaataaatattgaagcttggaaatcactgagcgaaatatcacagaagctgaacaagcttgtcgctcatctggataacaaaagccagggaagctctctgacgcaaacagaactattcgcagtgaagcgacagatatcagagcttcgcatgaagctgattactgctgacttatggaaataa

SEQ ID NO: 30955 - DNA, 831 bp, Escherichia coli
atgaatcaatcagagcagagaaaaaaaatactggttcttacacctcgctttccctaccctgtcattggaggggatagattaagagtctatatgttatgtaaagaactttccaaaaaatatgatcttattcttctgagcttatgtgatcaaccactagaacttgaaataaatataaatgactcggtcttcaaagaaattcatcgtgtctatctaccaaaatataaatcatattataatgtattaaaagctttggttacgcaaaaaccgttgcaaattgcttattatcaatcggacacatttaagaataaatacaataaattaattaaacaatgcgatgcagtattttgtcatctgataagagttgctgattatgttaaggatacagacaagttcaaaattcttgatatgacagatgcaatatctttgaattacagtcgcgttaaaaaattagcaagtaaaaaaagtttgcgtgcaattatttattctctggaacaaaaaagattagaatcatatgaacgttctgtggcgaatctttttgatttgaccacttttatttcatccgtagaccgtgactatctctaccctaatccgggcagtaatatccatatagtcaataatggggttgatacatcagccttgagatatataaaaagagaaataaaaatcgataagcctgtggaacttatatttatcggaaatatgtattctttacaaaatatggatgctgcaaaacattttgctaagaatattttaccttgcttgtatgatgagtttaatattatttctgtctcttatacacatctgacgctgccgacgatctactctgtgtag

SEQ ID NO: 30956 - DNA, 510 bp, Escherichia coli
atgaaaaaatggatgttagccatctgcctgatgtttataaatgagatctgccatgccactgattgctttgatcttgcaggccgggattacaaaatagatcctgatttactgagagcaatatcatggaaagaatcccgttaccgggttaatgccatcggtattaatccggtaacgggatatggcagcggactgatgcaggtagattcccagcattttaacgaactggcccgctatggaattaagccggaacatctgacaacagatccctgcatgaacatttataccggtgcttattatctggcaatagcctttaaaaaatggggcgtctcctgggaggccgttggtgcatacaatgccggattcaggaagaccgaacgccagaaccagagacgtcttgcttacgcatcagaggtttaccggatttatacctggataaagagcagtaaaggcatccgggttccgaccacgaagaaatcactttcccaaattaacagtgtgcagaacaattaa

SEQ ID NO: 30957 - DNA, 771 bp, Escherichia coli; identical to SEQ ID NO: 19695

SEQ ID NO: 30958 - DNA, 561 bp, Escherichia coli
atgtatgaaattggaaaaaagaaatgcggaacaaatattttcgaaagacatagttttttagataaatatggcaaacctttcattctaaatagtcatcaagcgagacatttattaaacacgtttgcctaccttggtggaatgtctgattttgatatcgcaagatggtccgggcgtaataggattaccagcaatagggattataaccatgtttcagaagagcacatgaagtgttatgccatcgacataagcgaacagaagcaaagtacgattgagcctttcttaggaactgatagtgggatctctgactcgaaccttgatcctgatgtgcatggagctgtgcttgctacagaacagggctattgccaacatcactactccatcaaaccatgttccaggttccctggattagatggaataacaggtagcagcagcgtcgagttggccgagcttgtagacaagttggcgtacaagactgagcaagacaagaacgatggcgtatatggtgcagagcaatggttagaactacatcttatgtataaagaaaaactcaataaaaaatag

SEQ ID NO: 30959 - DNA, 402 bp, Escherichia coli
atggcaaagcatttaagtagaagagatatcgattatatactttattcaatcacagactggaacatgaaaggcgacaagctaacttggaacaacttatgcaaaaaagtatcaaaaaaaatcgggaaaaccccaacaagacaatccttatatgctcacaaagaaatcgtaaatttatacacggctaaaaagaaggctatcaggcagaacggtgaactcgttgagaaaccatccagtattaaaaaagcctacgaaaagatcgataaattagaaatcaaagttgcagaactgtctaacctgaacaatatactgcaagagcttatagctaagctacagtactcttgttatctcaaagggattaaagaacacgaaattgaagaaaactttccaattataaaaagataa

SEQ ID NO: 30960 - DNA, 819 bp, Escherichia coli
atggcgaagcccttctgcgcccacgctgaagtccacggtctgcgtttccagcagctccgttttaatcagccacagcccggcgcggtgtgcctgcccccgactggtacagccaaaggcatccatcttcgtgacgttacgaccgtaacgggcaatggcctgcgtgtcctccacaagctctgtcgccgtctcccagccgttatccgggtcaatccagttcacctcaacggcattatggcggtctttcagggcgctgaagctgtagcggaacggcgcaccatcatccggcatcaccacattactgcagttataggtccacaccttatccgatggtcggtcctgcacgaatgtcagcgtctgtccgttccataccggcatacagcgcatcgccgagcagaaatcactgagcacatcccacgccttacgctgtgtggtcagccaggcattacaggtgatgcgcggctccgtgccaccaaagccatccggcaccgactggtcgcaattctggccgatgacatacagcgcccatttgtccacatccgccgcaccgagacgtttccccatgccgtagcgcggatgggtcagcatatcccacagacaccaggccatgttattgctgtatgctggcttaaacgttccgtcccagataccgctgtattgccgcatctgcgggttatagttcgacggcacctgcagaatacgcccgcgcagatgataattacggctcacctgctgactgccgaactgttccgagtccacctgcacgccgaccagtgccgtgttcgggtagcactgtttcacatcgatgatttcggtgtatga

SEQ ID NO: 30961 - DNA, 813 bp, Escherichia coli
gtgtcctggcgttatggcaacgtgtgtgtccagcgtggtgtgcagttgcgcagcgaggatgatgcggctgacgacgctgaccgcacggaacaggtgcaggagaaagcgcccgtggaggaaatcagtctgccactgctgacgaaaatgtcttccgaacgcacgctggcagtccaggcagcactgatgcagcaaccggacaaatctctggcattgctggcatggacgctctgcctgaatgtgtttggcagcggagcgtacagtaaaccagcacaaatcagcctggaatgtaaacattattcgctgaccagcgatgcgccatcggggaaggacggtgccgcattcctggcgctgatggcagaaaaagcccgtcttgcagccctgttaccggagggatggtcacgggatatgacgacgttcctgtcactcagccaggaggtactgttatccctgctcagtttctgcaccgcgtgcagcatccacggcgttcagacccgcgagcatggtcacacgtcacgcagtccgctggactcgctggagagcgctatcggattccacatgcgcgactggtggcagccgacgaaagcaaacttcttcggacacctgcaaaagccgcagattatcgatgccctgaatgatgccggactgtccggtgctgcgcgggacgcggagaaaatgaagaaaggcgatgccgctgaacatgcagagttccacatgaaagacaaccgctgggtgcctggctggatgtgtacaccacgtccacaggcagagacggaaaccacggagtaccgtgacgaccaggcagaagccgcctga

SEQ ID NO: 30962 - DNA, 246 bp, Escherichia coli
atggatcattcgtctgacaccagtgcaggttattacattaaaaacttatctgataacgtcaatgttatagacaaagcagtagaacgttatctaaaagatatatcagatgtatttcttggtaaaagagaataccaaggggattttttacaaaaagccctcacaatggacataaaaaaagaacataaaaacgatagaagttgtgaacgttgccaacattttaaaacatggaataaggggggggaatga

SEQ ID NO: 30963 - DNA, 369 bp, Escherichia coli
atgcttcgcactgccaaacccgatacgcaactgcccgttacgcccctgctgctgaactatctgcgccagcttcgaatcaaactgacagtagctgcgttttttctgcagacagacccccagcacctttttcgaacagaactcacccacactcaccgtcagtttattgtcctttgcctttcccagcgccttttcttcactgttgcacttcgccagacccacatcctgaccccagccaccatccttacagcagttactgaagccggctgcggccttacggcagaatttcgcctcacccgtgaaagccctgacatccacaccattcagggcggcaacatccttacctgcggcggcaagcgcagccagctgtga

SEQ ID NO: 30964 - DNA, 462 bp, Escherichia coli
ttgtgctgcttgaccagtacactgctagataaccatttcctggatgagctggttcgtaaacagcaggcttcgcaggacgggaaaccccggcagggtgctctgtattttgtgtcgttttccattcccgaagaggggctgaaacgaatgctgggcgaaacccggcactacggtatacccgccacactgcggggcatggtgaacaatgacctgaagaccaccgctgaagccgtgctgtccctggtgaaagacggcgcgactgatggtgttcagatcgacccgacgctgttttcacagtacggcattcgcagtgtaccggcactggtggtgttctgcagtcagggatacgacatcatccggggaaacctgcgggtcggccaggcgctggagaaagtggccgccacgggtgactgccggcaggtggctcatgatttactggcagggaaaggagtttccgggaaatga

SEQ ID NO: 30965 - DNA, 207 bp, Escherichia coli; identical to SEQ ID NO: 8329

SEQ ID NO: 30966 - DNA, 216 bp, Escherichia coli; identical to SEQ ID NO: 5262

SEQ ID NO: 30967 - DNA, 300 bp, Escherichia coli
atgattaaatactcttgtgggctaattgggaactcctcctctggtttaattgaggttccatctttaaaagttgcaacaattaacattggtgataggcagaaaggccgtgttcgtggagccagtgtaatagatgtacccgttgaaaaaaatgcaatcgtcagagggataaatatatctcaagatgaaaaatttattagtgttgtacagtcatctagtaatccttattttaaagaaaatgctttaattaatgctgttagaattattaaggattttattaaatcaaaaaataaggattactag

SEQ ID NO: 30968 - DNA, 405 bp, Escherichia coli; identical to SEQ ID NO: 21208

SEQ ID NO: 30969 - DNA, 177 bp, Escherichia coli; identical to SEQ ID NO: 4925

SEQ ID NO: 30970 - DNA, 318 bp, Escherichia coli
atggtttacgagtattgccggaagcgtggcctgtatccggatgcagagtcttatccgtggaaatcaaacgcgcactactggctggttactagcctgtaccagaatatgcgggccaatgcgcttactgatacggaattacggcgcaaggctgccgatgaactgacttgtatgaccgcgcgaattaaccgtggtgaggcgatccctgaaccagtaaaacaacttcctgttatgggcggtagacctctaaatcgtgcacaggctctggcgaagatcgcagaaattaaagctaagttcggactgaaaggagcaagtgtatga

SEQ ID NO: 30971 - DNA, 318 bp, Escherichia coli; identical to SEQ ID NO: 14217

SEQ ID NO: 30972 - DNA, 375 bp, Escherichia coli
ttgtcagatctcgtaccaaaattgccagagccagtacttcctgcattacctacaactattctgcctgccatttccgaacttactgcatcattgggtatcccccgtcatgttttggcaagagacgaggaaattcagtatgcatggcgcgaccttccccgtgaactgcgtgaaattccaccagatcttcgtggtgaactggtcgccagaatgtgtgttgctgtcagcactggcctatttgatggggcaatgaactacgcatggaatgccgctatccttcagctaagaacaaaaatacggaattttggcctacccattgtcgcgcagattctgcaatcggactttgaagaaaagcatctattggatgcttcaggatag

SEQ ID NO: 30973 - DNA, 309 bp, Escherichia coli
atgtcacccactccccttcctctcagtgatgagaataaccacttatttgatattgataaccctgttcttgttttggcgttgcactaccgccagccggaggaaaacctgccggaattcgccagcgcattgttactgttgccgcccgagttactgaaagtttctatacggcgggatacggtgcgggtgtttcgcccgatgccactaaacattgatgcgatctcccgtgagttgactgaactgcgggatatggcgcaacagccagtgaatgccagatatctggtctggcacagtggtctgacacaggcataa

SEQ ID NO: 30974 - DNA, 1017 bp, Escherichia coli
atgtccacattacgcctgctcatctctgactcttacgacccgtggtttaacctggcggtggaagagtgtatttttcgccaaatgcccgccacgcagcgcgttctgtttctctggcgcaatgccgacacggtagtgattggtcgcgcgcagaacccgtggaaagagtgtaatacccggcggatggaagaagataacgtccgcctggcgcggcgcagtagcggtggcggcgcggtgttccacgatctcggcaatacctgctttacctttatggctggcaagccggagtacgataaaaccatctctacgtcgattgtgctcaatgcgctgaacgcgctcggcgtcagcgccgaagcgtccgggcgtaacgatctggtggtgaaaacagtcgaaggcgaccgcaaagtctcaggctcggcctatcgcgaaaccaaagatcgtggcttccaccacggcactttgctgctcaatgccgaccttagccgcctggcaaactatctcaatccggataaaaagaaactggcggcgaaaggcattacctcagtgcgttcccgcgtgaccaacctcaccgagctgctgccggggatcacccatgagcaggtttgcgaggtcataaccaaggcctttttcgcccattatggcgagcgtgtagaagcggaaatcatctccccggacaaaacgccagacttgccaaacttcgccgaaacctttgcccgtcagagtagctgggaatggaacttcggtcaggctccggcattctcgcatctgctggatgaacgctttagctggggcggcgtggaactgcatttcgacgttgaaaaaggccatatcacccgcgcccaggtgtttaccgacagcctcaaccccgcgccgctggaagccctcgccgggcgactgcaaggctgcctgtaccgcgcggatatgctgcaacaagagtgcgaagcgctgttggttgacttcccggaccaggaaaaagagctacgggagttgtcgacgtggatagcgggggcggtaaggtaa

SEQ ID NO: 30975 - DNA, 1101 bp, Escherichia coli
atgacgttgcgtcaggaagggacagacagcactgaactgcaacagcaactgcgaacgcatcagggctttgcaccgctgctggcgctggatgtggacgcccgcgccgtcgccacggtggtggcggactggaccggcatcccgctatcttccctgctcaaggacgagcagagcgacctgctcagtatggaacagagtcttgaaaaccgcgttgtcgggcaaagcccggcgctctgcgccatcgcacagcggctgcgggcggctaagaccggcctcacgccggagaacggcccgcagggggtattcctgctgaccggccccagcggcaccggtaaaaccgaaactgcgctcacactggccgacactctgtttggcggtgaaaaatcccttatcaccatcaacctctccgaatatcaggagccgcataccgtctcccagcttaaggggtctcctccgggctacgttggctacggtcagggtggcgtactcaccgaagccgttcgcaaacgcccttacagcgtggtgctgctcgacgaagtggaaaaggcgcaccgcgacgtaatgaacctgttctatcaggtatttgaccggggctttatgcgcgacggcgaaggccgggaaattgacttccgcaacaccgtgattctgatgacggctaatctgggcagcgaccacatcatgcaactgctggaggaaaaaccggacgccacggacgcagacctgcatgaactgctgtatcccctgctgcgcgagcacttccagccagcactgatggcgcgttttcagacggtgatttaccgcccgctgggacaggaggcgatgcgcgccattgtggaaatgaaactggcgcaggtggcccgccgtcttcaccagcactatgggctggaaacggaaatcagtaacagcctgtacgacgccctgaccgccgcctgcctgctgccggacaccggtgcgcgtaatatcgacagcctgctgaaccagcaaatcctgccggtcttaagccagcagttgctggcgcagcaggccgtgcatcataagcctgcccgactgcggcttgactgggatgatgaagacgggattgtgctggaatttgatgagaaataa

SEQ ID NO: 30976 - DNA, 612 bp, Escherichia coli
gtgagtttcatgcttgagatttttttcccgctttgcgccgctgatcccatccgttggcagcgccatacacccgacgtggagcacggtatctggcctgacgttgctgatgaatgtctccagcaatggctgcaaactgatgcgattcgactctacattcccggcgaatggatcagcgtctggcaggttgaactgcctgatgtgccccgcaagcagataccgacgattctgcccgccttgctggaagaagagctgaaccaggatatcgatgaactgcattttgccccgttgaaaatcgaccagcaactggcaaccgtagctgtgattcaccagcagcatatgcgcaacattgcgcagtggttgcaggcaaacggcatcacccgcgctaccgtcgcgccggactggatgtccattccttgtgggtttatggctggcgatgcgcaacgggttatctgccgcatcgatgaatgccggggatggagcgccgggcgggcgctggctccggtcatgttccgcgcacagctcaatgagcagaatttaccgatttcactaaccgtggtcggcattgcaccggaagaactgtctgcatgggctggtgcggacgcgaacgcctga

SEQ ID NO: 30977 - DNA, 594 bp, Escherichia coli; identical to SEQ ID NO: 26173

SEQ ID NO: 30978 - DNA, 1032 bp, Escherichia coli
atggaaaaaacacgtaagcgccgtggtaccggacgggtgacgctgcaggaggtcgctaactttgcaggtgtcggaaccatgaccgtctcccgcgcgctgagaacaccggaacaggtttctgacaagctgagggaaaagatagaacaggccgtagaagagttgggttatattcccaacagaactgctggcgcccttgcatctggtcacagtcatacagtcgccgtactggttccttccctgacagataaagccagctcccgctttatgcagtcgttgcagcaggtgcttaataaaaatgaattccagctactgcttgggtgtcatgagtataatcagctcaaagaagctgaaattctgatgacgcttcttcaaggcaacccggcggcgttagttatttttggttctcagttggctgataaaactcaccagatactcgagaaaacaaatatacctaccgttaacgttgtcggttcccctttcagtccggctcaaattaccatcgaaacagcattttttgaagcatcacataaactgaccgaacatctgctggagcagggttataagaatatcggatttatcggtgcgcatatggaaaaccgcctgcaacgtcagcaactgaacggctggcataaagcaatgctgagccattaccagaacactgatcttgttatcacaatgccggatgccgcaagtctgcaattggggcgttacgcattaaacgagatattactgcgacaaccagagctggatgctgtgatttgcagccacgaagagattgcgctgggtatcatgtttgagtgtcagcggcgtttgttaaaaatccctggaaatatcgctgtagcttgtcttgacggttcagacagttgcgatcaaacacacccaaccttgacatccatccgtattgactacaaaaaaatggggatagagacgggtaagttactgattggactattgaataataatcatgatgaatcagaagagtcgcgtatcgtgcaattcaactaccagatagaattacgtcagagtacatga

SEQ ID NO: 30979 - DNA, 5286 bp, Escherichia coli
atgctcccacgccgttcccagcttaacgcgctctatgatgctaacagtggtaacgccgttcaaacggtacacggttggccaacgcagcgtcagccctactggagcagttcgcccgcggatcaggtgccgcattactacaccatagccctcaacgatggcgcgcggaccgttggtggtagcacggcggtttatgtcagttgcctgacgacggctaacaatcctgccagcagcattacgctggaagtggtggacccggcgcagtggaacgcggcagcaaatgcggcgaagctgaaaaaaggcgaaacgctacaggtgaaggtgacggtaaaagatgctcagggcaatccattgggtgatatgccttttaccctgaagcgtggcgatggttatacccgctcaaatgaaaaacacattgccggtagcggtgatgcgctggttgcgccggttgtgatcaatagtggcctggcggatgaagcttcgctcaatgataccgccgcagcatacagcgcgatgaccggcagcgatggcactaaaattctcactattacccgcccggatacccatggcacaaaaacgtcgctgaccgccgcgctctattcagacacaacgaaaaaagcgaccctcgataccatttttaccgttgtcaccagcccggacagcaataaagcgaaaatgtgggggcatatgccggaaacggtgacggctgcggatggaacggtctttaaacgcccattattgttgaaagagttatccagtacgtcgggtcgaacagcgattgcagaagataatgaggactgggcgcaatttacccaaactcaggcgacaagcacatcctctaatggttgtggtagtgaatatgttccctctcaggccgggctggagtcattgtatgaagccaaccgcggcaatgcgatgaaaacggttcagggctggcccgtcgcctcaagttaccttaccagcacgacaggcagcagtagtctggaacagcgtgacttaaaggccgtcaatctcagttcaggcaccagttcgataattccatcggccacaaaagaactgcttacctgccagacgacgccgatcgtcaaggctagccaaatcgttcttgaggctgcggaccccacaaaatttgacagtacgaataatgttgtcaaagcgaaaaaaggggaagaagtcgtggttcgcgtgaccactaaagattcgcagggtaacccggtgggaaataccgcgtttacgcttaaacgtaaccttagcgtcaatcgggcaaatgcgtctacaacggtgacagcaggcgcgctcatcgtgacggatgcctggggtaacacgcagagtaatttttcctcaacaacagcactgatttatggcgttaccggcgcagatggtacgacaacacttgcactgaaacaggacaataccacgggtttaaaaaccgaactgaccgccatgctggatacagataataacgtaaaatcaatgcttccggtggtctttacggtgataaccagccccgatacccctaaagcaaaattctgggggcatatggccgaaacgatgaccggtgcaggcgggcttatttataaaagaccgttattgcaagatgagctttccgttacaaccagtcgaagctcttttcaggaagatggagagagctggtcactgttctcgccggaccagtcgaacaacacatctgtaaatggttgcggtgcaggatatgtcccgattgaaagtgagctggagtcactgtatgccgatgaaggttacgtgccaatacatgacgttacgggatggcctgtatcacgcgcctatatctccagtacggttgttgcctattacactcaaacatttaattttaaagcggtttcgttaaaaacgggtgatggaacggaggtcatgtcaagcagtctaggactgctaagttgtcgggctaccccagtggcggtgaccagccacattattgttgaagcgaacgatgcgacacaatttgtcaaagttgacgaaaccctcagcgcactaaaacggaaaaaaggtgacgacgcggtgattcgcgtggtgacaaaagatgcgcagggaaatgtcgtaccaaatgttccgtttattctcaaacgtgaaggatcgacaaatcgccagaatgtacagttgtcgaacagaactatcactgtaatcaacgctgcgggaacgtcggcaagagtggatactccatcaatctccctttatgcggtgacaggtgcagacgggacagccacgtttacggtaaagcaggatgattctataggcctggtaaccaatgtgtacgctcaggcctatcagtcgagcctggaatccaacaaattacccgtgatgtttaccgtgataaccagcccggatacccccctggcaagttactgggggcatatggcggaaacgttcactacgcgttctggtactgccttcaaacgccccttactctctgctgaaagatcgtcgggccagtcgtttatagaagacaatgaagagtgggccgtgttgagatcggcaacaaagggggatatcgataaaagcgggtgcgatgtacattatcaaccactgttaagcgaactacaggcattgtacgacgaacacccaagtcgtgcgataaagaccgatctgggtattccggtaaatagctactggtgggcttacgacatggtggcatatgcgggtaactggtacgatcaatatatttatctgttaaatggatcaagtggaagagcgtcttcaaccacctcggcattaatgctgtgcctggtaaaccctcatccagaggcggcttctattgaaatgacctcaacggcggaggatgcaacgaaaacggccagcaatgatggcaggcccagcgcaacagcgaagaagggagaggttatcccgatgactgttacggtgcgagatagcgcaggcaatccactgccaggtgccagctttaaccttaaacgaggaactgcgctgaaccgcgctaaagctgcgtacgatgcctctgcagatgatcttaccatcatacctgtggaacctactggggtaacgtcaatcttgtatggggatgggacgcaggctcttctgaagacagggagcgatggtaaagctacgtttgaggtcagccagaatagcagttatgggctgtcaacgccgctcagcgcagaactcatgcgcgatacctcgaaaagcgtcacgctggatgtcattttcacggtgataaccagcccggattcgccaaaagcgaaatactggggccatatgccggaaacgtttaccagttcggcaggcgtgaccttcaagcgcccattactggcagcggaagcgactacggggagctcggtaaacggtaataatgagacatggtcatatatatatagtactcaaaaagcgacggcagattgttcgctggaatatcaaccgcgcctcagcgaattgcaggggttatatgacgatcacccaaacggggcgttaacgaaagatctggggttgccgatagcgtcaggaaactggtggatttatgaattacttaactccaatggtagctcctggtattaccaggtctttaacctaagcacgggacgagcatcatctgcactctctccggttgctctaatgctctgcctggcacagcctcactctaagccgtcaagcgttaccctgacttcagtagcatttgatgagacgaaaaccgccagtaacggcggcacaccttcggcatcggcgaaaaagggcgagacaatcccgttagtcgtgacagtaaaagaccaaaatggcaacctgctgagtggcgagagcgtgacgcttcagcgggcgcaggcgaaaagtcgttcaggaattaggccctcatcgtcggcagatgatcttattgtagatgtcgtcacaccgacagcaacccgtatttcctttgctcaggatacggcaaaatggcttggttttaccggcagtgatggcacagtgacgttcaatgttacgcaaaacgccaccaccggcctggcaacgccgtttacggtctcgcttgcacaagatccgcagatcacgtcaaacctggacctgatatttaccgtggtcaccagccctgacgcccaggatgccgactactggggtcatatgccagaaacggtgacagcggcaaatggaaccgtctttgaacgaccgaaattgtggaaggagctgccatcgacctccggggtaaataaaaccaataacaataatgaggactggccctatttttcgtcaaccactaaagcaaatgccagcctcagcccttgtgaggaagcccggcaaccgttgctcagcgatatgaagtcactgtatcaacgttatcccaataacacccttacgacggaaactggctggtcagtttattattactggtgggcgcaggatcagtcgacagatggtaaaaatcagtcgctcaatatgaaagatggcacaacgacattgaatggtaatgccgcttatcaggcgtgtctggtgtctgcgcgcgcaacggtttccagcgtcacactgacctcaacagcgtttgacgcagctattcaggcggcgaaagtgaaaaaaggcgaagccatgcccgttaccgtgacggtgaaagacagcgccgggaatacggtaccgaatgtggaatttactttgaaacgtggcgatgcatcgccgcgtaacgctggggcgacgttgtatggtgatgtggtggcgatggacgatctcatcgttcagccgttatctggttcggctgttacgctgagtgaaagcggtaataccattagtggcatgacaggcgcggatgggacggcaagttttacgctccgccaggataatacccctggttataaaacgccactgacggttactctggctaattacgcttccgcgacagacacgctggacgctatttttacggtaccaaccagcccgaatgtttcctcggcgcacttttggggacatatggcagacactgtagtggtgaatggtaaatcgctacatcgaccgttgttaacgacagaattgccgtccggggctaatcccgtatcctcaccgattattaactacgaaaactgggcttctgcacatatcattgatgccagtaaatgggatattgcaaggcagtgtggcagcatagaaaatgcaccgacatacaatgaattagagttgttgcacactgtttttaattcactgggatggccgtcttcaccaagttttccttatttgtcctctcaacagtgtgggatggacgaaggcactggagcacaggattgtagtatcacgctaatgaataaaccgggtctggtgacctgcttccagtaa

SEQ ID NO: 30980 - DNA, 927 bp, Escherichia coli
atgagtgagccaaccatcgaaacacctccaagaatgaccgaggccaaagtcattagggtacgcactcgtggtttttataatttagttgagataggtgcagtctttctagttgcaaatgtaatttttgctacagggatattagactcaaccttttattatttatttcccagtgcgagagcagatcttacacatttgccgagctttatcaggtcaatattcgcagtgtcatttgtaatcgtttacaccattatctatggtgtgtctccaatccaaagaatgtttatgagaattacagggagtgattcagtcgacaaatcatcgatgtttaatattgtcgatattataaatgagataaaactactcaagaaggctcaagaggaaagggctgctgctgatgaagatgaatctctggatttttatcttaaaggtttgattaatagctctgaaggtcttgcgaaaaacatatattctcgcggtagtctttatttattagtcggtgtttgttttgcaatagttggattaggtttcttctattctcaatcacatgtaattgatgctaaggatgatgcggtaaccaaggtaatgtatcttctccctaattttggcgtgttgattttcttggagttaatcgcatttttctttttgaagcaatatcgggttacgatggatgagtttcgctattacgaggcaataaaacgttcacgtgaggaaagctatgccattataaagcttgtaatggctagccagaaagatatcgatatgatagaccttctggataaaattaattttagctcaagagttggaaaactagaatcagggcagactactgaaattattgaagcaagaaaattagacaaaaatgaacttgaaaccttagtaaagcttaccgaggcagttgcgggtaagattggacagggaaataagtag

SEQ ID NO: 30981 - DNA, 1038 bp, Escherichia coli
atgagtgttaaaaaactgacatcgggtgaatggctttgtgatttccgcgtcgacggggctgaaagtcgccgcgtgcgtaagaagttttcaaccaaaggtgaagccgttgccttcgagcagtattaccgagaagaggcacaaaataagccgtggatgggtgagaaggaagaccgtcgacgtttgagtgaactgattgagctgtggcataacctccatggccagtcgctcgctgccagcaaatcgcgattggccaaactgcacattgtttgccggggtcttggcgacccaatcgctacccagcttaccgccaaagatttcgcccattatcgggataaacgtctcaagggtgaaatcgacaatggctatcacgcaaattctgaaaagtggattgcgaaacctgtgactgtgaaccgggaacaacagtacctcgaagctgttttcaatgagctgaagcgcttgggtgagtggagtctgccaaatcctctcgaaggtgtgcgagttttcaaagaagccgaaaaagaaatgtcttggcttacccagcctcaaattcgcgaagtgctcaatgcttgtgagtcatacgggaaaatttatttaacccgtatcgtcaaagtgtgcttagcgactggtgctcgatggagcgaggccgagcgtcttactcgttcacagctttcaccccacaagttgactttcactaaaacgaagggaaagaagaatcgtacagtaccgatccctcggtggctatatgacgagttggctcctttacagggaaaaatgttccacccctgctatcaggagttcaagaaaatgctcgctctgaccgatatagagttagctgaagggcaaaaaacgcatgtgttacgtcatacatttgcgagtcactttatgatgaatggtgggaacattttagtactgcaacgaatcttgggccattctaacattagggaaaccatgagatacgctcattttgcaccagatcatttagaagaagctgtaactcttaaccctatttctaatttaacaggattatatgatgagtga

SEQ ID NO: 30982 - DNA, 579 bp, Escherichia coli
atgaaattggatgagttagagggtggaaaagcagtgctgcagcgcatccttgatgcgtatggcttcaccatgcaaaaacaactcggtgacttgcatgagctgtcatcgggaacaatcagcacttgggttcggcgtaattttttccccggggatgttgttgttgcatgcgctttggacactggggtgtctttacgttggttggcaacagggaaggggaacaagtttgatgcagaccatactaatggcgaaatgaaaacattagaccgattggatattgttgcaggtaagctgcaggaaaacggtcattggattgttgatgctaacctcttttctactgaggcgacgcaccccaattacatagtaaaaggccagcagtcctggatagttgattttgatatgactgatatagcaaatgggcgatggatgctcagtatcgacggggatcatgatgtctatgacgttgcaaggatcccggggaacagaataaaagtcagcaacgctgatgccgattttcaatgctcagtttctgaggttaagtgtattggcatggtgctggtaagcctgacgaaatctagctaa

SEQ ID NO: 30983 - DNA, 225 bp, Escherichia coli
atgactccacaaattgcaatcccgtccggcgcggatctcatgacttatgacgaatttgctgaatgctacggctacagcattcgcactgtaaaacagatggttgctgatggagatctcctcctgatgccccgtaaaaaagacggtggtgctgcgcgtatcaatatggttgccttccgtgctcgactcttggctcagggccttaattgccgctatgtggcagcctaa

SEQ ID NO: 30984 - DNA, 222 bp, Escherichia coli
atggccgatgttatggatggagtacaggagcgcgaacaagccgagcgcgagcgccatatcaacaacgcgcgcagccgtattactgtgccttctcgtttcctctgtgaagtatgtgacgtaccaattccggaagcccgacgaatcgcgcttccgggtgtgggcttgtgcgtgacctgccagcaaatcgccgagcttaaatcaaagcattatcgggggatatga

SEQ ID NO: 30985 - DNA, 2055 bp, Escherichia coli
atgctcgcggctttgctgcatgctagaaaggtgctttccctccagcccgagtgtgtacgttttgacgtttatcgcactgctgcggtgctggagcaaaatcagggcagtcaacgagccaatgcttttttaataagcttctgcaaaaaggcattgccgcgttttgaactggtcgcaaaaaaatacgagtgtaccggtattaacagcaacgtatcagccgctgttttcggttgtcatttcgatactcagcttatgcaatatctggcgtctcgcatggtcaacatagtcgccagatacaaccgactcccggatatggcacgcgccgacatcgacctgctggctgctgatatcgccgattttatccgtgcagagttagtcaacattgacgattctgacatgtgtgaactggagacattaaatgcctggtatatgcatgctggtttcatcactcagcaattcaggataatgccaccagagtgggaacggtcgcgggataaatattgggatcaggataaagtcgctccagcaattgcccgtatgttttcggaaaaatggtggcgtggccgtctgcgtcgcattgcggctgcgtggcgcgaacacctgcaaatcgcaatcggaaatgtcagtaagaaaaaacatgtctacgcgagtaaaaactgcgtgacagactggcgtgaacagaagcgccggacgcgcgaatttctcaaaggtctggagcttgaagacgaagacggcaaccgtatcagcctgattgaaaaatacgatggttcagtcgctaactctgcgattcgacgctgtgagcttatgacccgcattcgtgggtttgaaaatatctgcaatgagctcggttatgttggtgagttttacaccctgaccgcaccgtctaaatatcacgccacgacaaaggcaggctaccgtaacaccaaatggaatggatccaatccatccgatacgcaatgttatctcactggcctgtgggcacgcattcgcgcaaaactccaccgtgaagacattcgtattttcgggatccgcgttgcagagcctcaccatgacgggtgccctcactggcatatgctgatgtttatgctcccggaggacgtcgataccgttcgtggcattattcgggactacgcatggcaagaagattttcacgaactcaaaagcgataaagccaaaaaagcacgtttccacgcagaagccattgatccggagaaaggcagcgcaaccggctacgtcgcgaaatacatctcgaaaaatatcgacggttacgctcttgatgacgaaaccgatgacgaaaacggtgaactgttgaaagagacagcccccgccgtttcagcatgggcggcgcgctggcatattcgtcagtttcagtttatcggtggtgcaccagtgactgtttatcgtgaattgcgtcgccttgcagataccgagaccgcgcacggtctaagtgttgagtttgcggctgtccatgatgccgccgatgccggtgattgggctggctatgttaatgcgcagggcggtccgtttgtccgtcgcgatgatttgcaggtgcgtacgctttatgaaccgcgcaccgagtttaaccagtatggtgaggaaactgtctgcattcgtggtgtgtacgactccaccgttggtgttggcactccgattttaacccggctcacgcaatggaaaattgttccgaagcgtgccgttgatttggccgttgacgttaaggacggcttcgccgtcccttggagttctgtcaataactgtacgggaagcgaaagcgatccaccggaactcgatttatcaaaacccctgagtcgacgtgaaaggcgagagctgacgaaccgaatcaggaaaccaaagccacctaagaggccgaaatttatccacggaacagatgagcaaagtgctccgatagaaaaaactatcgacgagatccgtctgacaaccggcattaccatcagccggggagaagccctgcacctgatagcaggtggcaaaagttgtattaacggtaaatggttgcgtggaacgtccaaaggtgaaattttctccgcagcgccatag

SEQ ID NO: 30986 - DNA, 183 bp, Escherichia coli
atggttgggaaacatttcagccgaacgcagcaaaagtgggcttgtgtgcaatttatcgccgagatatctcttattgccaactgcaaaccggcagatttgaagctggcactaactctgattgccggcctagctaacagcgaaagcgacgaagaaaaagacgaaattttctataaggctgaatag

SEQ ID NO: 30987 - DNA, 984 bp, Escherichia coli
atggcaacgcaagattataagagtaaaatgctgcattatcgccatgcaataatgcttcctaaaaaggatgctcttttaacatcaaacctgcaagataggttggcaaaccttgtgaaaatcaaggttccaaatgttgctgatagattattcttccctgatgttccagataataatggtaatgtcgctgctcacgcccacatggttctttcaaatagcaaagaaattcatggaatgttttttgcggaaattgtctatattgaaccgggtagtagcattcctgttttctctgttagcgattatgctaaaacagctttaacatacgagacattaaatttatcaagtgggaatgctagagagtatttagaaagcattgcatacattggtgtgattaagaaccacttcataattctgcaaagcagatctattagaataaaagatattgaaaattatataaatttcatactacaagacaacctatctattactgatgataacttcatcgttttacaggcaaacaacctgtctctaaatacggattttttaaaacgtaacatagtaaaaaatgttagcttaaagctgcctttaacctactatggaaataatattgatgatacagctagtgagctattaaaaacgctcgtaggtgaacatcgaattaatgaaatgaagaaaaatgccattttaaatgatggttcacctgacagggaatctctatcaattgatatttccattgggtataaatataaagcaagcgagtctgagcaagacatgttgcgtaaaattacacaaggcttggttgataatagagatgaaagcttaacaattgagttaaaaggtgcaggaatactcaggaatgatgagattcaactaaaggattcagttaatattgaatacagcaatggaatgctaattgctgacaacgttgctgaagaaatgatttcatggttattgcgcttactagacaccggagtaattaacccatga

SEQ ID NO: 30988 - DNA, 687 bp, Escherichia coli
atgataaacaatacgttacaaacatatgcaaaaaacatagcaagctcaattgtaattgggcttatatgtggttttgttattgtttttgtttattcaaaatactcatttttaattgatttcgatcctataatttcaaaggggatctctgtctttagcgccgtaatcattagcctcatgtttaagcgactaattgatgctgatgataaaataaaggagttagaactccccgcaaacactccatcaaggataaaggattactttgatgatcaaagaacttcatacattcttgacaccactaaaaacaaagtaaccattgcatatatttttaccctgattttgttttttttgatatcactaacgttatcagcgtcaataacaaaagttaatgtttattatggggtattttttaattccgcactaacgactacttgcttggttttttcagtgtatgcgatactattcattaatagacagacggacatttcaagaaacgcaaagtcattcttaagtgaaataataaaaacagaacaagaaagacaaaaattaatagacaccataaataaaaacattcgtgatggtgttagtaaggttaacactaccgaaataaggaaaaacaaagcattcaatattagagagtatgtagataatttagaaaaagaggttccaccaccacaagataagcaataa

SEQ ID NO: 30989 - DNA, 1029 bp, Escherichia coli
atgagcaagaatcgcaacaacaagcgacagcagccgcgcccccaaagtcacaccgccgcatcggcacagagcatggaggcattcacctttggcgagccgacgccggtactcgatcgccgcgacattctcgattatgtggagtgcatcgacaacggccaatggtatgagccgccggtgagcttctccgggctggcgaagagcatgcgcgccgccgttcatcacagctcaccgatttacgtgaagcgtaatattctggtgtcgacctacatcccgcacccgctgttatcgcgtcaggatttcagccggttcgtgctcgattatctggtatttggcaacgcctttctcgaagagcgtcgcggtctgactggcaagccgctaaagctggagacctcaccggccaaatatacccgtcgtggcgttgatgatgacgtgtactggtatatccagtcctacacgcaaccgcaccagttttcgcccggttccgtcttccacctgcttgagcctgatattaatcaggagctgtacgggatgccggaatacctgagcgcactcaattcagcctggctgaatgagtcagcgacactgtttcgtcgcaagtattaccagaacggcgcgcacgcagggtacatcatgtatgtgaccgatgccgctcagaacagcactgacgtcgaagcgttgcgaaaggcgatgcgcgactcgaaagggctcggcaattttaagaatctgtttttctacgcaccgcacggtaaaccggatgggattaaaattgtgccgctgagcgaagtcgcgacgaaggatgatttttttaatatcaagaaagtcagcgccgctgacctgctcgacgcgcaccgcatcccgttccagttgatgggcggcaagcctgagaacgtcggctcagtgggcgatattgagaaagtggcaaaagtatttgttcgcaatgaattaactccattgcaagataggattcgtgaattaaatcattggtttggtgataatttaattaagttcaagccgtatacctttgattaa

SEQ ID NO: 30990 - DNA, 1770 bp, Escherichia coli
atgaccactacaaccgacacatcactactcaacgatccgcgacgacaggccgcgcttttgttctggcagggctattccgtgccacaaatcgcggaacagttgcaggtcaagcgccccacggtgcagagctggaagcagcgcgataaatgggaaaaaaccgcaccgttaaaccgggtcgagttcacgctcgaggctcggctgattcagctctatgcaaagcctgacctgacggctcatgactttaaggtcgcggattttctggcgcgccagatggaacgcctcgcgcgggtcagtcgttacggtcagacaggtaacgcagcggatttaaacccgaacgtggccaaccgcaacaaaggggaaaagaagaagccgaaaaagaactttttcagcgaagaggctatcgacaagctcgaagagattttcctcgaccagtctttcgactatcagctcgagtggtggcgcgcggggctggcgcaccgtatcaggcacatcctgaaatcacgacagattggagcgacattctactttgcgcgagaggcgctgttacaggcgctgaagaccggccacaaccagatatttttatcggccagtaagacacaggcctatgtatttcgaaaatacatcatcgcctttgcccgactggctggcgtcgagctcaccggcgacccgattgtgctcggcaacaatggcgcggagctgatgtttctcggcaccaatgccaacacggcgcagagccacaacggcgacctgtatgtcgatgaaattttctggatccccaacttccagaagctgaagcgcgttgccggtggcatgtcttcacaggagcatttgcgcacgacctatttttcgaccccctcatcgctggcgcacggtgcctatccgttctggtcgggtgagcagttcaacaagggacgctcagacaagagcgagcgcgtcgatatcgatatcagtcacgcagcactcgcgaagggtgtcgcttgcccggacggccagtggcggcagattgtcaccatcgaggacgcactcgctaaagggtgcacactgtttaacatcgacacgctgaagcgcgagaacagcgtcgatgagttccgtaatctgtttatgtgcgagttcgtcgacgataaagcgtcggtattcccgttcgaagagctgcaacgctgcatggtcgacagcctcgagaaatgggaggactacacgccatttgccgaccggcctttcggtcaccgcccggtgtggattggttacgacccgtcattacgcggcgacagcgccgggtgcgtcgtcatcgcgccgccagtcgtcgccggtggacgattccgaatcctcgagcgccatcagtggaaagggatggattttgctcaacaggccgaatccattcgcgagctcacgcagaaatataccgtcgaatacatcggcatcgatgcgaccgggctcggacagggcgttttccagttagtgcgctcattctacccggcagcgcgtgaaatccgctacacgccggaaatgaaaaccgcaatggtgctgaaagccaaagacaccattcgccgcggttgcctcgagtacgacgtcagcgcgaccgatatcacgcagtcgtttatgtctatccgcaaaaccatgaccagcagcgggcgcagctcgacctatgaggccagccgcaccgaggaagccagtcacgccgatctcgcgtgggcaaccatgcacgtattaatcaatgagccgctgaccgccgcgaccggcgaacagtcatccagtattatggagtggaactaa

SEQ ID NO: 30991 - DNA, 864 bp, Escherichia coli
atggctaaaaaaaattcgaaatggtttcgcatcggcgtcgagggtgacacctgcgacggtcgcgtcatcagtgcgaccgatattcaggacatggccgacggctttgacccgcgcgtctacggctgtcgcattaacctcgagcatatccgcagcgttattcccgacagcccgttttgccgctatggcgatgtcacggaagtgaaagcgcaagtgatcgacgacgactcggcactcaacggcaagctggcgctgttcggcaaaattgccccgctcgacaacctgctcgcgatgctggcgaaaggccagaaggtttacacctcgatggaaattcgcccgaactttgccaataccggcaaatgtcacctcatcgggctggcggtaaccgatgacccggcaagcctcggtaccgaatacctgcaattctgctcccgcgtacaacaaaacccactggccggtaagaaagaccagccgggcgacctgttctcagtggcaacccttgccgagctggaattcgaagacctgcccgacaacctgctgaccaaaatcagcgacaccgtgaaaggcatcttcagccgtaaacaggctgacgacgatgcgcgattcggtgacgtgcacgaagccgtgaccgccatcgccgtgcaggtgcagaccggcggcgaaagcgctgaggtgcgtttcagccagcttgaaagtgatgtcgctaccgtcaaaaaagcgctgaacgaacaggccgcagccaccacgcagcaattcagcaccatcaaaaacacgctggaaaacaccgaagacaaaacgcaaccgcgccgcaagttaagcgccggtggcgacggtgattcggcgggctccacgctgaccgactgctaa

SEQ ID NO: 30992 - DNA, 1206 bp, Escherichia coli
atgcgtaaagaaacccgttttcaattcaataaatatctgagccgtatcgccgaactgaacggcatcgaggccagcgacctcgacaaaaaattcactgtcgagccgtcggtcactcagaccctgtttgacaaaattcagcagtcgtccagcttcctgaagctcatcaacatggtgaccgtttccgagctgaccgaagagaaagtcggcatcgatgtgaccggctccattgccagcaccgctgacaccgacggaggtgtcgagcgtaaaaccgctgatttcgcgaagctcgatgcatatcgctatttctgccacccggtgaacttcgactatcacctgaagtacaacaaactcgacctgtgggcgcgttttcaggatttccaaatccgaatccgtaacgccatcatcaagcgtcaggcgctggattacatcactatcggctttaacggcgtgagccgggcggcgacttctgaccgtgctcagaatccgctgcttcaggacgtggctgtcggctggttgcagaaataccgcaacgatgcgcccgagcgcgtaatgtcctgcattaccgatgatgacggaaaagtgatttccgacaccatcaaaatcggctcaaaagataagggtggtcattacgccaacctcgacgcgatggtcatggatgctttcgagtcgctggtcgcggaaattcaccgtgaaaacccggaaatggtcgttatctgtggtcgccgtatcctgaccgacaaatacttcccgatgattaacaaattccaggcgaacagcgaacagctcgccggtgagctgattatcagccagaaaaccatcggtcagcttcaggcggtgcgcgcgccgttcttcccggcaaacagcgttttcatcaccacgctggataacatttcaatctatctgtacgaagacggccaccgccgccacatcgtcgagaatccgaaactggatcaggtggagaactacgagcaggtaaaagtcgattttgttatcgaagactacgaggccggttgcctgattgagaatatcgaaattctcgagcaggaagaaaccgccaccaccgaaccggtcagcgcggcggtatttgctgctgagatggtcaaggcaatgcagtctctgaccggcaccgctccggccagcgcgcctgtcgctgacggcgaaacttccccggctgaaaccggcaccactgacggcgtggaggcgtaa

SEQ ID NO: 30993 - DNA, 759 bp, Escherichia coli
atggcaacccccgcacagcgtcacgcgatgcgggtctcggctgtcagggcatcgcagcgggacaatgccccgctgcgtcatgcctcaccttacgagcaaatgctcgtcaagctggccgcagaccgccggacgctatcagcgattcgttctaaagaacgcaaagcggataaaaaacgcgaattactcccgctgtacctgccgtgggtcgctggcgtactggaaagcggcaccggcgcacaggatgacattctgatgacggtgatgctctggcgtctggatgcgggggatatcaccggcgctgtcgagattgcgcgctatgccctgcgttttgacctgtctatgccggaaaatcattcccgccccgcgccttatatgctggccgaagaggtcgcgctcgcggctctccgcgcccgtatcgccggtgagccggtcgacgcttcgcaactgctcgaggtcatcgggctgaccgatgccgccgatatgcctgacgaagtgcgcgcccgactgcataaggtcaccggtctgaccctgcgtgatgccggtcagcttcctgatgcactggcgcacctgcaacgcgccttacagctcgacaccaacgccggggtaagaaaggacattgagaccctcactcgtgagctgaacccgaaaccggtcgtcgtcaaaaaaacggcgccgaaagccgcgaaaaaggcacccgcgaaaaaacaagattcaccggtgaaacgagggcggggacgcccgaagaaagtcaccggttaa

SEQ ID NO: 30994 - DNA, 501 bp, Escherichia coli
atgaccatgattgtgatgaataacccggcgcaacagcgcgacccgatggtcatcccgccggtgccggttgacgagccggtgattaaaaacacggcctttttcccggatgttgatccgaagcgcatgcgcgaagaaatgcgcctcgagcagaccgtgacgccggtgcgtctgcgccgggcgattaaaaccgcgatggcggagaccaacgccgagttaaccgactggcgcgaccttcagctcgccgccggttacgcgcgacttgaggatgtgccgacggatgaactcgacggcgaaagtgtgcgggtttttcactacttcaacgctgtttgctcgatgacgaccgcgacgctgtacgagcgttaccggggcgttgatgcgagcgccaaaggtgacaaaaaggccgacagcatcgatgacaccatcgatgaaatgtggcgtgacatgcgctggtcggttgcccgtatccaggacaaagcgcgctgcatcgtggggcaaatctga

SEQ ID NO: 30995 - DNA, 204 bp, Escherichia coli
atgaacatcttcgcgcatcagggcgacacgctcgacacgttatgtcagcgccattacgggcgcactgaaggtgtggtcgaggcggtattgctggctaatccgggactcgccgagctgggcgtcgtcctgccacatggcacggcggtcagtctgcctgaagttgacaccgcaccggtatcggagaccgtgaatttatgggactga

SEQ ID NO: 30996 - DNA, 222 bp, Escherichia coli
atgggactgactgtggataaaatcacaacctttctgacctactggctgtcagtggtgctggcgtatttcggtacgcagacgccggaacggctcgcgctttatgtcgggggaagctgcgccatttttaccgcgctggttaacttctggtaccagcgaaagaaataccgctatctcgtctcgatggggattgataagggggttattcgtgggctcattcgttaa

SEQ ID NO: 30997 - DNA, 510 bp, Escherichia coli
gtgggctcattcgttaaacgttgcagtgtggccgtcgtgctggcgctggcggcactggtgcctgattttcgtttgcttcacacctcgccggaagggctcgcgctgattgccgacctcgaggggtgccggttgcgtccttaccagtgcagcgcgggtgtgtggacgtcaggcatcggccacactgccggggtggtaccgaaacgggatatcaccgagaaggaagccgccgcgaatctggtcgccgacgtgctgaacgtcgagaaacgactcgcggtctgtgtgccggtggacatgccacccgccgtctatgacgcgctggtcagcttcgcttttaacgtcggcaccggcgcggcctgtcgctcgacgctggtgtatcacctgaaacaccggcaatggtggcaggcctgtgaccagctcacccgctgggtgtttgtgaatggtgagcgtaatgccggggtcgaaaaccgccgctttcgtgagcgcacctactgcctgaagggggtgaaatga

SEQ ID NO: 30998 - DNA, 414 bp, Escherichia coli
atgaaaacgatagtcgtgttgttagtgctggccgtggccgggctgctctggatgcgccacgaaaacaccagtctgacccgttcctttgaacgggcgaataaagtcgccggtgaccaaaaaacggtgattaccatgctgaaaagccagcttaaaacggcctcccgtatccgtggggaaaatgagaccgctcaggtcttactgcgcggtgagctcatcgatgccggagcgcgggcacagcgtcgggaacagaccattacgaggttactcaatgaaaatgaacagcttcgccgctggtatagcgctgatttacctgatgctgtgcgccggttgcaccagcgcgccgcctgtgccgacgccggtgattgtttacaacgcatgtccgaaggtcagcctttgcccgatgccgggaagtga

SEQ ID NO: 30999 - DNA, 468 bp, Escherichia coli
atgtacaagccgaagagtctgcgaaaagccttaactgacgccgtgccggtgctggcacgaaaccccgatatgatgcgtgtctttatcgacaacgggaatctggcctcgacgctggcgacgtcgctgtcgtttgagaaccggtacacgctgaatgtggtggtgaccgatttcacggatgatatcgagctgttactcgtcccgattcaggcgtggctacgcatacatcaggctgacattatgacgaccgatgaagggcgtaaaaagggattcacctattttgccgatatcaacgacaacgacagcgtcgatatcagtatcagtctgatgctgaccgagcgcactatcgttaaagaacagggggataagcttcacgttgaacaggctgaagagccgcagccgccggagcccgttacccggccagttgagctgtatgttaacggtgagctcgtgagtcgattgcatgaatga

SEQ ID NO: 31000 - DNA, 468 bp, Escherichia coli
atgaatgactttaaaccctttgacgatacgctcacggggctgatagcagcgctgtctcctgccgcccgtcgcagaatggccgcagatatcgctaagaccctgcgagcccgtcaacagcgccggattaaaatgcagaaagccccggacgggacaccttacgccgcccgaaaacgccagccggtaaaagccaaaacaggccgggttaagcgggaaatgttcgctaagctccgcaccagtcgctttatgaaagccacagcggggaatgactcggcggtcgtggaatttaccggcaaggtacaacggatggcgaatgtgcatcagtacggtctcaaagataagcctgggcgaaacagtgcgccggtacagtatgacgcccgaatgcttatcgggtttgatcatgaatcaaaaaatatgattcatgacataattatggtttctttagctgaggcggctagatctattgattga

SEQ ID NO: 31001 - DNA, 1344 bp, Escherichia coli
atggaaaataaaaaatatcaagtatttgtgagctctacatacgtcgatttaattgatgctcgcaaaaaaatcatagaaacggtccttagtttataccactttccagttggcatggagatgtttagcgctgatgactctgagcagtgggatataataaaggagactattgatgctagtgattattatgtgattatcattgggcataagtatgggtccgtttctaaagatggtattagctatactgaaatggaatataactatgctaaatcattaaatataccggtgttggcttttattagagggagggacgttttaacaaaaccacatgaacgagaaagtgaccctcaaaaagaaaagcaactaaatgcttttattgaaaaagctaaagctaacaaaatgtgtgatttttgggagacaattgatgagttagcgacgaaggttgctatcgccttaccaaaagtaatgcgacgaaatccacgaataggatgggtgcgcggtgaccaggtcgcatctaaagagattaccgccgagttggctgagctatctaatgaaaatagaaaattaagggaaaaagtccgcgaatatgaaagccaattacatagcgatgcacctcaattagagctgagcatgattgataatgacttagctttgacggtggatgtggagtcgacttatcaggattaccttccacaactatgcaaggaagcggtacctcttgagttgaaggacactatcaccattgatgagattgaatcatataactcttcactgcctactgataaagatgtggatttatataataaaaaaatgagattgcactgtaattacaaaaacaatgcaattacagtgaagcccgttttaagaaataatgggaggacttttgcgtcaaatgtttatgttgagattgattttcctgaattcctaatagtgcttaaaggttctaatgaagacttatttataaaagagccgaaattaaaaatccctgagtccccaataagtaagcataaaaaaagactcagtgctataatgtcactcgaaaattttaggatgggtatttttgatgatacatcgatggtaatggctaaacctcatttcgaagtgccagcaataattaaacggatggctgatttaggaacagttaaccaagatgagtgggtcatgaaagaggaccataaaatcacgttgcgtgcgaaaaaagtgttacagagcttaactgttgagtatgaggaaatagtcatcattcccttaacgattggctctggagttattaattttaaaattatatgtgagcaattgaaggagcctgttgttttttctcgtcaggttacagttaccccaagctag

SEQ ID NO: 31002 - DNA, 642 bp, Escherichia coli
atgaatactcgcgcaactcttcaggacgctttacgcctccttcgcaacctgatacgtaccggcgtcgtcgtcgaagttgacctcgatgacgggcgctgtcgcgtccagactggcggcattgttaccgactggcttcagtggctgaccacacgcgccggtcgttcacgtgtctggtgggctccgtctgtgggcgagcaggttttactgctggccgtgggtggtgaactcgacaccgcttttgtgctgcccggcattttttcggatgaccaccccgcgccgtcggcgtcggctgatgcttttcacatcacctttcctgatggggctgttatcgagtacgagccggagaccggcgcgctgaccgtgagcggcattaaaaccgcagacgttacggcgtcggattccatcaccgcgacggtaccgctggtgacggtgaaagccgagacccgcatcaccctcgatacaccggaagtggtctgcaccaacaaactgacgacggcgacgcttgaggtacaacaaggcggcaccatgcgcggaaacatcgaacacaccgacggtacgtttaaatccaacggcgttcaggtcgacagccacggtcacggcggtgtgcaaagaggtggagcctggacggagggcacgaaatga

SEQ ID NO: 31003 - DNA, 348 bp, Escherichia coli
atgacgacccgttatatcggtatgaacagggagaccgggcgcgccatcactgacgccgatcacatccgtcagagctgtggcgatattttgcgaacgccggtcggctctcgcgtgatgcgtcgcgattatggctcgctgttgttctccctgattgatatgccgcagaccgacgcgctgagactgcaaattatgtgcgcctgttatatggcgctgctgaagtgggagccgcgcatcagcatcagctcgctgacggtagaacgtcagtttaacggtcagatgattgttgagctgaccggcgagacccgggacaccggcaaaaccctgtcactgactattcctgtgagttga

SEQ ID NO: 31004 - DNA, 909 bp, Escherichia coli
atggcaaacatcgacctgagccagctccccgcgcctgacgtcgtggaaacgctggattttgagactattctcgcggaacgcaaagcgacgctggtctcgctttaccctgaagaacaacaggacgctgttgcgcgtactctcgcccttgagtctgagccactggtgaagtatctggaggaaaacgcctatcgggaggttatctggcgtcagcgtgtaaacgatgcggcgaaaggctgcacactggcttatgcgagtaataacgaccttgatgtgatggccggaaacaacaacaccgcgcgacagattgtgacgcccgccgatgactgcactatcccgccgacacccgccgtcatggaatctgataccgatttacggttacgcgcacaacaggcttatgaagggctcagcgtggctggtccggtcggcgcatatgaataccacggtcgcagcgccgacggtcgggtcgctgatatctcggttgtcagcccgtcaccggcctgtgtgaccatcaccgtgctgtcacgcgaggatgacggcaccgcatccgatgagcttctgaccatcgttgaaaaagcactaaatgctgaagaggtgcgcccggttggcgacagggtgacggtgcagagtgctgaaatcgtgccgtatcagattgatgcaactctgtatttttatccggggccggaggccgagccaatccgtcaggccgcagaggaaaaactgaaggcatacatcagcgcacaacagcgactgggccgggacattcgtcagtcggccatctatgccgccctgcatgtcgaaggtgtgcagcgtgtcgaactcgccgcgccactggctgacattgtgctcagtaaataccaggcatcctgttgcaccgaataccacatcgctgacgggggggccgatgagtaa

SEQ ID NO: 31005 - DNA, 612 bp, Escherichia coli
atgagtaataagcgactgttgcctgttggctcatcgctgctcgaggtcgccgccgcccgcgcggccgcagatattgagcgtgtgccggtaccgcttcgcacgttgtggaactggcgcacttgcccggtgcggctgctgccgtatctggcgtgggcattttcggttgaccggtgggatgagagatggccggaggccacaaaacgcagcgttatcgcctccgcattttatgttcatgcccacaaaggcaccatcgccgcattacggcgcgtggtggagccgctgggctatctgattgaggttaaagagtggtgggagctcaacgaagagccgggaactttccggcttgtggttggcgtactcgagaccggcatcaccgatgagatgtatctcgagctcgagcgccttattgaaggggcaaaaccggcaagccgacacctgaccgggctcgctatcagcctgagcaccaccgggcgcgcttatgtgggcgcaagctgctacgacggcgacctgttaaccgtatatccctatgcctccggggagattgtcgtcggtggtgagttttgtccggcttcggccattcatctgattgataacctgcgagtaagcgcatga

SEQ ID NO: 31006 - DNA, 579 bp, Escherichia coli
atgcaggttggctatgtgcgcgtatcaacaaatgaacaaaataccgcgctacagcgtgacgcgctggaacggtcgggatgtgagctaattttcgaggataaaatcagcggtaaatcgacaaacaggccagggttaaatcgcgcactcaggcaacttaatgccggtgatactctcgttgtctggaagctcgacaggctcgggcgtagcatgcgccatcttgtctctatgactgaagagcttcgccagcgaggggttaatttcagaagcctgaccgacagtattgatacctcaaccccgatggggcgatttttctttcacatcatgggcgctcttgcagaaatggaacgcgagttaatcgtcgaacgaacccgcgccgggctggatgcagcccgggcacaaggcaggatcggaggtcgtaggccgaagctgacgcctgatgaatgggctcaggctggccggttgattgcggccggagaatcccgacagcgtgttgcactgatttttgatgtgggcatatcgacgctgtataaaaaatttccggcgacaaatcccgttgtgtcagccaccggcgaaccctga

SEQ ID NO: 31007 - DNA, 1188 bp, Escherichia coli
atgagtgattatcatcacggtgtcgaggtcgtcgaaattaacgacggcacccgcacaatctcgacggtatcaacggcggtcgttggcatggtctgcacagccagtgatgctgacgccggggctttccctctcaatgagccggtgctgattaccaacccacaaagcgccatcgcaaaagccggtactaaaggtaccctggcaaaatccttacagctcatcgctaaccagtcaaaaccggttgtcgttgttgtgcgtgtcgcggagggtaccggcgacggcgaagaggcacaggcgcaaaccatttctaacatcatcggcaccacggatgagaatggcaaatataccgggatgaaagcgctgttaacggcgaaagcggtcaccggcgtgaagccacgtattctcggtgtgccggggctcgatactcaggaggtggcgaccgcgcttgtctccgtggctcagaagctgcgcgctttcgcctatgtcagcgcgtggggctgtaaaaccattgctgacgttatcgcctaccgcgaaaacttcagcgcccgtgagctcatgattatctggcctgacttcctcgggtgggataccacggccaacgcgaccacaaccagttatgcaacagcgatcgcgttgggactgcgcgcaaaaatcgacaatgacacaggctggcataaaaccctgtcaaacgtcggcatcaatggcgtcaccggtatcagtgcgtcggtcttctgggatttgcaggaatctggcactgatgccgacctgctgaatgaggccggtgttacgacgctgattcgtgccgatggtttccgcttctggggtaaccgtaattgctccgatgacccgctgtttcagtttgagaactacacccgcaccgcacaggtcatagccgacacaatagccgaggggcatatgtgggcgaacgataagcccatcaccgcgacgttgattcgcgacattatcgacggcatcaacgcgaaattccgcgagctgaaaaccggcggttacatcatcgatgcgacgtgctggtttgacgaagaggccaacagtaaagaaaccctgaaagccgggaaactgtttatcgattatgactatacgccggtgccgccactcgaacacctgaccttacgccagcgcattactgataaatatctggcgaatcttatctcgtccgtcaacagcaaataa

SEQ ID NO: 31008 - DNA, 519 bp, Escherichia coli
atggcattaccgcgcaagctcaaactcatgaacctgtttatcgatggggtgagttatctcggcgtcgtgcagtccgtcacgctgccgaaattaacccgcaagctcgagaactatcgcggcggcgggatgaatggttcggcaccggtcgacctcggcctcgatgacgatgcgctgtcggctgaaatctctctcggcggcttccccgatgacgctatctggtcgttatacgctgccaccggcgcggcctccgtaccgctacgttttgccgggtcttaccagcgtgatgacaccggcgagaccgtgccggttgaggttgttctccgtggccgtcagaaagaaatcgacctcggtgaagccaaacagggcgaagacaccgagtcgaaaatcgctctcgcgtgtacctatttcaagctgacgatgaatggctcggaactggtggaaatcgacaccgtgaacctcatcgaaaaagtgaacggcaccgacatgctcgaggcgcaccgacaaaatatcggcctgtaa

SEQ ID NO: 31009 - DNA, 273 bp, Escherichia coli
atggataaaactaacgaaaatatcgtcactctgattaaacccattaagcgcggtgagcaggttattaccgacgtcaccctgttaaaaccgtgtgccggaacccttcgcggtgtcagcctggcatctgtcgcaaactctgacgtcgatgcgctgattaaagtgctgccgcgcatgaccatgccgtcgctgaccgagcaggaagccgccgcactggagctgcccgacctgctgtcgtttgccggtaaggtggtcggttttttgtcaccgagttag

SEQ ID NO: 31010 - DNA, 2430 bp, Escherichia coli
atgagtaataacctcaaactcgaagtgctgctgaaagctgtcgaccaggcgacccgaccctttaaagcgatccagacggcgagcaaatcgctgtctggcgatatccgcacgactcagcaatccctgcgtgatttgaatggtcaggcatcgaaaatcgacggttttcgcaaaaccagcgcacaactggcggtaaccggacaggcactggaaaaggcaaaacaggaagccgccgagctggcggtgcagtttaaaaacacggaacggccaacggcggcacaggccagagtgctggaatcagcaaagcgttcggctgaagggttacaggcaaaatataacagcctcacccaatcggtgaagcggcaacagaccgagctcggcaaagcggggattaatacgcgcaatctgtcgaatgatgaaagccgcctgaaaaactctatcaatgaaactaccgcacaacttaaccgccagcatgaagcactggcgcgggtcagcgcgcaacaggcaaaactcagcgcagtacaaaaacgctatcaggcaggaaaggcactggctggaaatgcggcatcgatgggcgctgccgggataggcatggcaacgaccggagcgcttgccggtgttgcactgatgaagcccggttatgattttgctcagaaaaactctgagttacaggccgttctcggtgtcggtaaagactcagctgatatggtggcgctccgcaaacaggcgcgccagctcggtgacaacaccgccgcgtcggctgatgatgctgccggtgctcagattattattgcaaaggctggcggcgatgctgcggctattcaggccgctacccccgtaacactcgatatggcgctcgcaaaccgtcgaacgatggaagagaacgccgggttattgatggggatgcgctctgccttccagctttcaaacgataaggtcgcccatatcggtgatgttctgtcgatgacgatgaacaaaaccgccgccgactttgacggcctgagtgatgcgctgacttatgccgcgccggtggcgaaaaatgccggggtcagcatcgaagaaacagccgcaatggtcggcgcactgcatgacgccaaaattacgggatcgatggcgggtacggggagccgtgccgtattaagtcgcctgcaggctccaacgggcaaagcgtatgacgccattaaagagctcggcgtcaaaacggctgatggtaaggggaacacacgtccaatatttaccatcctgaaagaaatgcagcggagttttgataaaaacaacctcggcaccggccagcgtgccgaatatatgaaaaccattttcggtgaagaggccagctcgtcggctgcggtactcatgaccgctgcctcgagcgggaaattagaccagcttaccgcttcccttaaagcatcggatggcaaaaccgctgagctggtgaaggtcatgcaggataacctcggcggcgattttaaagagtttcagtctgcgtatgaagcggtaggaaccgacctgtttgaccagcaagagtcatcattaagaaagctggtacaaacgacgacagggtatgtattgaggctcgatagctggatccaaaagaacaaatctcttgccaccacgctgggtgtcattacggcggcagctgtcggtattgtggggatgattggtgccattggccttgtatcgtggccggtaattactggcattaacgccatcatttcggcggctggtgcgcttggtgcggtctttacgacaatcagtggcggggtcattgcggctattggtgctattacgtggcctgtcgtggcggtagcggcggctgttgtcgctggcgcgctgcttatccgtaaatactgggagcctgtcagcgcattctttgccggtgtggtcgaggggctcatgagtgcctttgcgccggtcggggaaatgttcgccccgctggcacccattttcgacggtctcggcgaaaaacttcgcggcgtctggcagtggtttaaagacctgatagcgccggtgaaagcgactcaggacacgctcaacagttgtcgtgatgttggggttatgttcggtcagacgctggccgatgcgctgctgatgccgcttaacgcctttaacaagctgcgaagcgggattgactgggtgctcgaaaaactcggcattatcaacaaagaatccagctcacttgaccagacagcggcgaaagccaatgcagcgacgcagaacggttacagcccggcaatcagcgcatacaacagctatcagccggtcacggcacccgccggtaaaacctacatcgaccagagtcggccaatctatcaaatcaccgtgccgggcaatggtatgccgggagatcggttgggtaatgatttgcaggatgcattagaaaagtatgagcgcgagaagcgcgccaaagcccgcgcaagcatgatgcatgactaa

SEQ ID NO: 31011 - DNA, 462 bp, Escherichia coli
atgctggcattaggtatgtttgtttttatgcgtcagacgctgccctaccagagcatgcagcgcagcgcggattatagctgggcgtcaaactctcgcatcgggaagcgtgacgcttttcagtatctcggcgagggggaagataaaatcaccctgagcggtgacctgtatcctgagctgaccggcggtaagctcacgatgctggcgctttatgcaatggctgaacaggggcgcgcatggccgcttatctctggctcaggctggatttacgggatgtttgttgtcagtaatgtctcggagaccggcacggtattttttgaggatgggacgccacgaaaaatcagcttcaccctgtcactgacccgtgtcgatgagtcgctcgccgcggtgtatggcgatattggaaaacaggccgaaagtctggtcgggaaagctggcgatctgctgtcgatggtgggggcgtaa

SEQ ID NO: 31012 - DNA, 1173 bp, Escherichia coli
atgctggatattatcaccggcgcgggtgccacgctgacgcccgactttatgctgacactggaaagcaaagatatcaccggcaatatcagtgaccggctgattaacctctcgatgacggacaatcggggttttgaggccgaccagctcgacatcgagctcgacgatactgacggtctggtcgcattgccgattcgcggtgcggtgctgtcgctgtatctcgggtggaaaggtttctctctggtcagcaaggggcgatttaccgtcgatgaggtagagcaccggggggcgccggatacggtaaccattcgcgcccggggtgcggattttcgcgggacgcttaattcccgtcgtgaggagtcatggcatgacaccacgctcggcgcaatcgtcagctcgatagctgagcggaacaagttaacggccagcgtcactgattctcttgcggggatccagattccgcatatcgaccagtctcaggaatccgacgccgttttcctgactcgcctcgcagaacgcaacggcggtgcggtctcagtgaaagcgggtagattgctgatgctcaaagcgggaagcggtaccactgccagtggaaaagctattcctcaaattaccatccagcgcggtgacggtgaccggcatcagtttgccattgccgaccgtggcgcttacaccggcgtaaccgctaagtggctgcacactaaagacccgaaaccggcgaaacaaaagcagacagtgaagctgaaacgtaagcccaaagagcaacacctccgggcgctacagcacccgaaagcaaaaccagtgagcagtaaagtcacggccaaaaagcaaaaagagcaggaagcccgcgagggtgaatacatggccggtgaggctgacaacgttttcgcgctgacgaccatttacgcgacaaaggcgcaagcgatgcgtgcagctcaggcgaagtgggataaattgcagcgtggggttgcggagttctccattatgttagcgaccggccgcgaggatatttaccccgaaacgccggtcagggtctcaggctttaagagcgttatagacgagcaagcatggataatcagcagggtgacccataatctcggtgggaatggcttcacaacggctgtagagcttgaggtgatgctttcggatgtagaatatgacaccgacgaatcttga

SEQ ID NO: 31013 - DNA, 723 bp, Escherichia coli
atgctttcccactcttttgaagatcttgcacaggcctttcgggttttattagagtctaactggtcactacagcgtttgttggctattgatcgtgctgaagcaattggcaatttagaatcgggcctgaatacacaacttaatgcttttcataatttgtatgacaacatgcaaagcaatggattagagcctgactggtatttgaaacctgaattattaatgatgcttgttattcgaaatgctcggcatcataacaaggccaaccgtattagaagtatttataactatcatcgtcagtccatgaacgaccctacacagcaaaaaaactatttttatgtgaatttcccggcacctccagaggaagaaggtggtggctattttgaggttcctatctcatggggagatattgataagatgctttctctgccgcgtcaagaatcgagactccgaccagaggccaaagaacgtatacgtgattatttagatgctaattcatttgaagcacaagcaaaccagctaggtctcacaaaagaagatatattcatcaactatgtgccgttatctatgagcgctggaatcgcacttcatccattcatcaaagataatatttcgcttaatgatgattcggttgaagctaaaagctttttatcgctttttgcttcaacacatcctgcgttaacaaagcaacatatctgcaaggcgatagctttttcattaccaatctaa

SEQ ID NO: 31014 - DNA, 570 bp, Escherichia coli
atggttgcggtgactgtactgatccccgccgtctggctggtgacactgatctccaccgtgccgtccggctctgtaatcaccgtcggagcaaccgttgcaccgttgcctgccatcacgctgaccgtctgtccggcaagcgcattgccgaacgcatcggtgaccttcacccgcagcgtgttcgccattgcgccgtctgccactgagttatcctgcctcacctccagactcgcgatctgcgccgtcctgacatcggcgataaacgtgacgttccggctctggctgctgctgttgatgctggcagtgactgtactggctcccgccgtctggctggtgacactgatctccaccgtgccgtccggccctgtgatgaccgtcggagacaacgttgcaccgttgtctgccgtcacgctgaccgtctgtccggcaagcgcattaccgaacgcatcggtcaccctcgcccgcagcgtgttcgccgtcgaaccgtccgcctctgaaccatccttaatgaccaccaggtccgcgatctgcgccgtgctggcatcggcgataaatgtgacatccccgctctga

SEQ ID NO: 31015 - DNA, 591 bp, Escherichia coli; identical to SEQ ID NO: 5774

SEQ ID NO: 31016 - DNA, 477 bp, Escherichia coli
atgctaaatgaagtcagagcctcgcaatttaaaatttatcatgatcttgtcttgttggttgaatattcagatgaagtggtttcgactttgatcaagaaacctgtcatcgtaaataataatggtgaacaatattattgggttacaaaaagtgatgcccaaaaattaacaaaaattggctgttatactcgcacggccatggatgaaatgtacaatcatttatctgtatgtctggctcataatattaatgagtattttggtatacaagaaaccaaatatattcttgatcaattagagatgaagtatcctgatctattaaaagaaatattaagatatataaccgtgcagcgcatttcagaggtaattcagcgtctgatccaggagcgaatttcagtgcgcaatatgcgtttagttatggaggctttagcattatggagcccacgagagaaagatataattacactcgtcgaggtgcattag

SEQ ID NO: 31017 - DNA, 384 bp, Escherichia coli
atggagcccacgagagaaagatataattacactcgtcgaggtgcattaggtcgctacatttgccataagttttcatattctggagaaattaaagcaattgtgatttcgcctgaaatagaggacagaatcagagatggtgtcaggcctaccgctggcggtacttttcttaatctcgatgcatccgaagctgagatgattctggataattttaaactggctctttctggaatcaatattcctattaaagacattattttactgggatctgtggatattcgtcgttttatcaaaaaacttattgaatctagttatcgagacctcgaagtactttcgtacggggaactaacggaaaatgttcccgttaatattctgaaaactatttag

SEQ ID NO: 31018 - DNA, 426 bp, Escherichia coli
atgcaatatgcgaaacctgtcactctgaatgttgaagaatgcgaccgcctcttctttctgccttacctgtttggcctggattttctgtatgccgaagcgtctgtatacgcgctggcgaaaaaaatgatgccggaatatgaaggcggattctggcacttcatccgcctgccggacggtggcggttacatgatgccggatggcgaccgtttccacatggtgaacggtgcaaactggtttgaccgtacggtcagcgccgatgccgcaggcatcattctgacttcccttgtgattaaccgccagttgtggctgtaccacgacagcggggatgcaggactgacccatctttaccggatgcgcgatgcgcagttgtggcgtcacatcgaatttcaccccgaatgcaacgcgatttacgcggcactggactga

SEQ ID NO: 31019 - DNA, 195 bp, Escherichia coli
atgctgtttttgggagatgataatgagatgtttaacccatattactctggtaacggtgatacagtttatcgcctgttatctggctggttgggggaatgccgaaacaatttttatgctgttcttcatagtactatggcagggactgtttatatggttgttctctcaaatacgaaaaaaacggaatgtgtcggatga

SEQ ID NO: 31020 - DNA, 192 bp, Escherichia coli; identical to SEQ ID NO: 5763

SEQ ID NO: 31021 - DNA, 258 bp, Escherichia coli; identical to SEQ ID NO: 25290

SEQ ID NO: 31022 - DNA, 621 bp, Escherichia coli
atgccgttctcacaaaaaaaccgcttgccatgccgcaatcagtcaggttacatttccgctgcacctcataaaacgggtgccgggtttcgcagcctgctgactacgtacgcgcacaaccgcgccagcggtttttttatgtgcgaagcattgccacatctttttcgcacacgaattatggtggggcgtacagggccgaccttggtcgggccggagtcgtgcgtagccggtactgcgaaccctgtatgtctcaccacccacagtttcgcagctctggatggtgagtttttaaaacttactacgtacgaggccacaccatggcaaaccgcaaacaacagcgcgcatacgctgcgcgtcgtcacatccagactgaaatcaaccgcagacttttccgcgcatcacgcgtcgcacaaatcatgcacatcaatatgctgcatgagcgcagccacgcactatcgaacacctattccgcctctgttttcagctatctggcggatgatctgcgcgagcttcagcagctcatccagcagcaaaacaaactccattaattcctgttccgggcctttcctgcaccttgcggcgggaggccttcgcacatctgtaacaagaggattgccgcaatga

SEQ ID NO: 31023 - DNA, 267 bp, Escherichia coli
atgaccattctggactacatcgctactcatccgggttgtagcggcggagaaatcgccacagcactgaataccccaaccacagccattaatgctgagttacgccgactttggcgcggcggcttagtcatcagaacaaaccgcagcacaggtggtcgcgctcgcaaaacaggaggccaggcttcttaccacgtaaacccgatgccattcgggtgtggcaatccacttactcacatgtttaaccagctactgaaggaagccagaacatga

SEQ ID NO: 31024 - DNA, 204 bp, Escherichia coli
atggcaattaagcgtttttccgtcattcgtttcacatccagagggcgtgaatacgaggttgacgaacggctgattaaaacgctcgaccgtcaccgttcgcaacctgacgcgcatcacatttacctcactgacgacacttacttctgcgccaccaacgtggtgcaggtgaatcttatccgacaggtacaggagccacgcaaatga

SEQ ID NO: 31025 - DNA, 351 bp, Escherichia coli
atgaaactacagcgcaattcttcacagccgcgcttccgcaacggtgcggaacgccacgctaaccgtttcgctaccagtgcatcacgtagcaactctcgctacagcctgagcgaaacacacgcaacgccggatggctacccagtaaaacaaatcggcgagcatacctggctgattgagaaagctggaattgtggtccacaaatgcccacgcaatccgtttaccggaaaccgcatttttgcattgagctgcggcgacaatcagttcgggcaggatttcacattatacgaagcacttcgcacggttgatcgtctgcttcgcgggcaaagttttattaaacaggctgatttataa

SEQ ID NO: 31026 - DNA, 1047 bp, Escherichia coli
atggagtttttcaaaaagacggcacttgccgcactggttatgggttttagtggtgcagcattggcattacccaatatcaccattttagcaaccggcgggaccattgccggtggtggtgactccgcaaccaaatctaactacacagcgggtaaagttggcgtagaaaatctggttaatgcggtgccgcaactgaaggacattgcgaacgttaaaggcgagcaggtagtgaatattggctcccaggacatgaacgatgatgtctggctgacactggcgaaaaaaattaacaccgactgcgataaaactgacggcttcgtcattacccacggtaccgacacgatggaagaaaccgcttacttcctcgacctgacggtgaaatgcgacaaaccggtggtgatggtcggtgcaatgcgcccgtccacgtctatgagcgcagacggtccattcaacctgtataacgcggtagtgaccgcagctgataaagcctccgctaatcgtggcgtactggtagtgatgaacgacaccgtgcttgatggccgtgatgtcaccaaaaccaacaccaccgatgtagcgaccttcaagtctgttaactacggtcctctgggttacattcacaacggtaagattgactaccaacgtaccccggcacgtaagcacaccagcgacacgccgttcgatgtctctaagctgaatgaactgccgaaagtcggcattgtttataactacgctaacgcatccgatcttccggctaaagcactggtagatgcgggctatgatggcatcgttagcgctggcgtgggtaacggcaacctgtataaaaccgtatttgacacccttgcaaccgctgcgaaaaacggcactgcagtagtgcgttcttcccgcgtaccgacgggcgctaccactcaggatgccgaagtggatgatgcgaaatacggcttcgtcgcctccggcatgttgaacccgcaaaaagcgcgcgttctgctgcaactggctctgacgcaaactaaagatccgcagcagatccagcagatcttcaatcagtactaa

SEQ ID NO: 31027 - DNA, 276 bp, Escherichia coli
atgagcagaacgattttttgtactttcctgcaacgtgaagcagaaggtcaggattttcagctgtaccccggcgaactgggaaaacgcatctataacgagatctccaaagaagcctgggcgcagtggcagcacaaacaaaccatgctgattaatgaaaagaaactcaacatgatgaatgccgagcaccgcaagctgctggagcaggagattgtcaacttcctgttcgagggtaaagaggtgcatatcgagggctttacgccggaagataaaaaataa

SEQ ID NO: 31028 - DNA, 309 bp, Escherichia coli
atggccgtttgcgcaaacagttacgcgctcagcgagtctgaagccgaagatatggccgatttaacggcagtttttgtttttctgaagaacgattgtggttaccagaacttacctaacgggcaaattcgtcgcgcgctggtctttttcgcccagcaaaaccagtgggatctcagtaattacgacaccttcgacatgaaagccctcggtgaagacagctaccgcgatctcagcggcattggcattcccgtcgctaaaaagtgcaaagccctggcccgcgattccttaagcctgcttgcctacgtcaaataa

SEQ ID NO: 31029 - DNA, 1551 bp, Escherichia coli
atgcaacgtcgtgatttcttgaaatattccgtcgcgctgggtgtggcttcagccttgccgctgtggagccgcgcagtatttgcggcggaacgcccaacgttaccgatccctgatttgctcacgaccgatgcccgtaatcgcattcagttaactattggcgcaggtcagtccacctttggcgggaaaaccgcaactacctggggctataacggcaatctgctggggccggcggtgaaattacagcgtggcaaagcggtaacggttgatatctacaaccaactgacggaagagacgacgttgcactggcacgggctggaagtaccgggtgaagtggacggcggcccgcagggaattattccgtcaggtggcaagcgctcggtgacgttgaacgttgatcaacctgccgctacctgctggttccatccacatcaacatggcaagaccgggcgacaggtggcgatggggctggctggtttggttgtgattgaagatgacgagatcctgaaattaatgctgccaaaacagtggggtattgatgatgtcccggtgattgttcaggataaaaaatttaacgctgacgggcagattgattatcaactggatgtgatgaccgccgctgtgggttggtttggcgatacgttgctgaccaacggtgcaatctacccgcaacacgctgccccgcgtggctggctgcgcctgcgtttgctcaatggctgtaatgcccgctcgctcaatttcgccaccagcgacaatcgcccgctttatgtgattgccagcgacggcggtctgctacctgaaccggtgaaggtgaacgagctgccagtgctgatgggcgagcgttttgaagtgctggtggaggttaacgacaacaaaccctttgacctggtgacgctgccggtcagccagatggggatggcgattgcgccgtttgacaagccgcatccggtaatgcggattcagccgattgccattagtgcctctggtgctttgccagacacattaagtagcctgcctgcgttaccttcgctggaagggctgacggtacgcaagctgcaactttctatggacccaatgctcgatatgatggggatgcagatgctgatggagaaatatggcgatcaggcgatggccgggatggatcacagccagatgatgggccatatggggcacggcaatatgaatcatatgaaccacagcgggaagttcgatttccaccatgccaacaaaatcaacggtcaggcgtttgatatgaataagccgatgtttgcggcggcgaaagggcagtacgaacgttgggttatctctggcgtgggcgacatgatgctgcatccgttccatatccacggtacgcagttccgtatcttgtcagaaaatggcaaaccgccagcgacgcatcgcgcaggctggaaagataccgttaaggtagaaggtaatgtcagcgaagtgctggtgaagtttaatcacgatgcaccgaaagaacatgcttatatggcgcactgccatctgctggagcatgaagatacggggatgatgttagggtttacggtataa

SEQ ID NO: 31030 - DNA, 1200 bp, Escherichia coli
atgatgtctggaacgaataagctcagcgacaggaaactaaaggcgctgcaaggaacgcatagggatcgtgttgaaatgcttgctgacggagaggggttaggggtcaggttatcaactaaagggcatgtgagctgggttttttcatatcgccttggagggcgtgagagttcagttattcgtcttactctagggaattaccctgatattagtctgaaagatgccaggatgtggcgtgagcgttgccgtcaatggttggctaatggtcttgatccaaaaattgaactccaactttttactgaagaatcccgtgctcctgttactgttcgagatgcgttggaatattggttggtcaattatgcaagacataagcgcaaagatgaggaattgataagggcgcaattctgcaaacatgtctaccccagaataggccattatccgttatcacggtgcgatactcgccattgggtaaaatgttttgatgagattcgcgctataagttcaaaaacggcggggcgtatgtttcagctctccaagcaggcattgcggttttgcaatgttcggcgttatgccatcagtgatgccctggttcatttaacgttaaccgatgtaggggaatctgccggacagcgcgaccgtgttttgagtgatgccgaactatcagatctttggtattttgcaaaggagaaacatcgggatatttatttttctagattaataaagttgcttattgtctttggggctagaactgtagagattcgccgttctcattggattgagtgggattttaatgaatgggtttggattgttccaagaaataacagtaaaagtaataaaaagattattcggccaattcccgaaggcataagagactggttaaaagagctaaaacaggaaaccgggaggacgggcttacttttgggtgaggagagaacgcatagagctgtttctctgaaaggtcgcagaatgtataaaatattcgggcataatgaaaaatggacactacacgatttaagacggacattttcaactggattaaacaacatgggggtaatgcctcatattgtcgagtcattattaggtcacgtatataatgcaggctccgcagaatttaactataatcttagccagtatatcccatttaaattaaaggctctaaatgactggcttgaatgtttagaaaaaatggttaaagataaataa

SEQ ID NO: 31031 - DNA, 1053 bp, Escherichia coli
atgacgttaccactaagagattactatcctattgagcgcgcggcaaagttattagactgcgatattgacgatcttattcattgggctgtgacaggctgcattcgtatttgtataaaaattgaatctgcatatggagtattaaatatcccagatgaaaaagatgtggttaatttcgattgtctgcgtaagtttatggattcagaaccgtgtaaatcacggttatctgatcttgatgccatttcagaaagggcggcagaacaccatggttttaattatataaaaaccaagtcgagaattatatttgattcaatgtgcgaatctctaagtcattcatatgtagcgcccaaatttggtgacatagcaattgatactgcatttgctttgttaaattattataacaggggggtatattatggggaaaattatcacatatatagtgtatatcgaatagcaacggatgaaagagctgtggcagttgtgccaccagtatttaaaggtattcaagaaaaataccataagtattttgttgaaataggcggcattttcgctttggggggaagtttttttgccaactatgattttaataagaagtttaaagccaaccgaataattaatagcaatattataattgcttctgacgttgatatacatataggactaattgttactgaggatgtttcttttgatattggtgatttatatatcttaaagaatgattttttaaaaatacaaaatgctacaaactccaatagcgagttaagaaaagattatgttaatccattggcagatactttatatttgtgtgcgggtaacaatatattaagttctgaggatggagagaaagacatatgcaccaataaaaacaatatagaacgattatctaaaacaatgaaggatttttttcgtgcgatgcttgttattcattataaagaactcgaaaacaatccggtaaaacttgctgatatattgaccgcggaagcaagagaggcaggactcaatatgcgctttgataaaagtactatatcaagatggattaaagcatcatctcagtaa

SEQ ID NO: 31032 - DNA, 321 bp, Escherichia coli
atgactcaatccgcattcattccaccaactccagaacagcgccgcaccatactcgccgagtatggctttgactgcgaagaacgcatcagggaagagaagtgtaaaaaaatgaccacgctttcacgctcccgccgctgggaactggagaagatcggtgcttttcctcctcgtcactctttggggcgttgctcatgtacctggctgttaagtgatgttttgtggtggctacgtaatccgccagttattgccaaagtgaataacccatacgaaaacgccaaaaagaaaagggagagagaatccggtagcgccagagttgaataa

SEQ ID NO: 31033 - DNA, 528 bp, Escherichia coli
atgattatggcttttttactctttaaaatcaatcactcagcgcaagtgagcaaaaataatttgcaatattgcttgactcgcttttttgtcatggcgtatcgtttgcccgcacctcataaagcgggtgccgggtttagcagcctgaacaatcaagcgggtagccgctatatttccgtaatgcggtttttttgtgcccgtaattccaccctaccccgtattatggcggggcgtaatgggggagcctttgcgctcgctggttccttgattgccagtctgctaaccctgttacgtcccgccaccatgtttagcagcgtgctggcgagactccgtaaacttaatcaaggagccgccaaaatggctatatcaacacgccctgattttatctggcgctttatgcagtgccacggtaaaaatattcgccttcataccgttaccgctgccagtgagcgcgaagcgcgcgccctgcttccggcatcccgtctggtctttgttgcccgtattcgtatccgggaggcgtgcaatgtttaa

SEQ ID NO: 31034 - DNA, 183 bp, Escherichia coli
atgtttaagctccttatcaccctgattaactgccagagcggcgacgttcgtcagttttttcatgtcagggaatatcagacctgtgatgatgccctgcgtgctgccagccgcatggagtacagccgcacgaatgaacaggggcgattaacccacaaatgcgcagtaaaaatcatggaggggtaa

SEQ ID NO: 31035 - DNA, 300 bp, Escherichia coli
atgtctaaacgtcagaatagcgaaaattttttagatagagaatatgttggcttttttacagaaagtgcaaaggaagatctcacagatgtgattaatctcgtcagtttaatatctgtggtttttgacgataaaaatggcagagcatcagcagaaattataaatgaagaaattgcatctctgtctaacattatttatagggaattacaatcaataaaatctggtatgcattcatccggcggaattttttcatggcatagcgccgaaaccgccgggattgccaaagcaataagcaacgagtaa

SEQ ID NO: 31036 - DNA, 1002 bp, Escherichia coli
atgtcgatcagaaagatggatgatgggcgatggctgctcgatatcaggccccaaggggcgtacggcaaacggatacgtaaaatttttgtcaggaaagggagtgcggaggccttcaaagaacatattttacagaatttccataacaacccatggctggctaaacctgctgatcgacggagattatcagagctgcttgatatatggtggatgcttgatggccgtaaccaggcttacggtgatacctacaggatccggatggagaaagtgattcgtgaaatgggagatccgcgtgccagccagatgacgcaaaaatttatgcttgagtatcggtcagagaaattacaggccggcttaatgccatccagcattaatcgtgacttgtgcgttctgtctaccatgttcacggtgctgattgaagctgaggtctttcacaacccgaaccctgtacgcggtatacgcaagctaaaaattcagaatacagagatggcctttctttctgatgatgagattgagcggcttcttgagcgactggagggtgatgcgcgtcgtgttgccattctgtgtctttctactggtgcccgatggagtgaagcatcggaactacgtggagagcacatcattggcaaccgggtgacgttctttaacaccaaaaacggaaaatcccgttcggttcctgtggctgattcggtcgtgccgctgattaagacccgccggacggggttgttgtatcaggttgattatctgaagttccgggagatccttcaggaggtgaagccggatttaccgaaggggcaggctacgcatgtcatgcgtcatacatttgccacacactttatgattaacggtgggaatatcgttacattacaacggattcttggacatgcgactatccagcaaacgatgacttatgcgcatttttcccccgactatctggcggatgccatgaggtttaacccgatagctaacatggcattcactgaacaaaaagagccagtagagtaa

SEQ ID NO: 31037 - DNA, 462 bp, Escherichia coli
atgaagttgagctataagctggttatcgctgttttcttcgtttctgtcgttggttcttttatctgttcagtgaatcattaccacaataaagctattgaatacaaaaagcagcgtgatgagaatgctatggcattagattcggctatggcgaccatctctgatatgcagaagcgtcaacgtgacgtagcagaacttgacgccagatacacaaaggagcttgctgatgctaacgcgactatcgaaagtctccgtgctgatgtttctgctgggcgtaagcgcctgcaagtcgctgccacctgtgcaaagtcaacgaccagagccagcggcatgggcgatggagaaagtccaagacttacagcagatgctgaactcaattattaccgtctccgaagtggaatcgacaagataacggcgcaggttaactacttgcaggagtatgtaaagttgcagtgtttgcattga

SEQ ID NO: 31038 - DNA, 687 bp, Escherichia coli
atgagaatttttgggtgcggtgttttagttagtgtcgtttatttctttggcttaggtattacgatccatgttcttgatttgaaccagatgacgtcgtggaatgagtttggagattttcttgctggtgcattttccccagtggcctttttttggcttgtgcttgggtatttacagcaacaaaaagaactacagcaaaatactgaagcgttaaagttacaagccactgagttgaaaaactcagtcgaacaatataaagagatggtttccgtttctaaacagcaattagaaaatgaatcaatcaaagccatgacagaaaggctggaaagagaaaaagaaacgaagcctgatctatatatgttgaatctgggatggtcagttaaaagtggtgatcagtatgagtataattggtcggtatttagtgatggtaaaacagcgaaaaatataagcttaacttttgaccctcctatcggggaatatagctcgtatttttttagaagtagcaatggcgcaattaaacttcctaaaaataaaataaatgctggagatgtgcctgaaaattttcgggtcgttttgacttatgagagtatattggggtattcgtatgtatctgaatatcattatgagcatgatatgaatggtatgtataatttaattgattctgctgattatcagcgaacaaagatttaa

SEQ ID NO: 31039 - DNA, 4455 bp, Escherichia coli
atggaacccatatcaattacagtggcaacttatgtagcaactaaacttattgatcaattcatttctcaagaaggatatagttggattaagaaagcattattccccacagaaaaatatgtggatagattatatcaactaattgaagagacggcaattgagtttgaagaaacatatccagtagaaagtggagcaattccattttatcattctaaaccattgtttgagatgttgaatgagtacatcctttttaaagagttccctgacaaagagatgttattagacaagttcaaagaatatccaagcgtcactcccccaactcaacaacaactcagccttttttatgggatgttgtcgttaaaaataaataattgttcgaagttaaaaaagctacatatcgaagaaacttataaagaaaaaatattcgatattaatgaagagcttattcaaattaaacttgttttgcggtctatagatgagaaactaacttttcacttgagtgatgattggttaaatgagaaaagtagtcaagcaatagctgacttgggaggccgatacacacccgaactcaacgtaaagctagaaatagcagagatatttgatggtctcggtagaactaataatttttctaaaatattttattcgcatatagatagttttctggtcactggaaagaaattacatagttgcgatgtaatttcctcacaattatctgaaatagaccagtccttaaaagaaatttctgatatatatcaagaaattaatttttctaaattagatgaaatccctataaataaatttaataactatgtttctagctgccagacagctattggcggagcggaatcaatattgtgggaactccgagaaaagtcagaacaagtaggtgaaaccaagcattacagtgataattattcatctactctgcgaatgcttcgggaacttgactatgcgtgcaatgaattacgtgcattcattaattcaacaacagtgaagttggctaacaacccattcttacttctcgaaggaaaagctggaattggtaagtctcatttactggctgatgtgattaaaaatcgaattgcttctgggtatccttctctactcatactagggcaacaacttacttcagatgaatctccatggtcacaaatcttcaagagattacagcttaaaatcacttctcgtgaattcctagaaaaactgaatttatatggcaaaaaaacaggaaaaagagtcttagtttttattgatgctattaatgaaggtaatggaaataaattctggaatgacaatattaacagttttgtcgatgaaatcagaggctttgaatggcttggtctgataatgtcagtcagaacaacatatagaaatgtaacaatttcacatgagaatgttgagcgaaataattttgaaattcatgaacatattggatttcagaacgttgagttggaagcggttagtctattttatgattattacaatatagagaggccttcatcacctaaccttaatccagagtttaaaaaccctctatttcttaagttattgtgtgaaggcattaagaaaaatggtttaaccaaagtgcctgttggatttaatgggatttcaaatatttttaactttttagtggaaggggtaaataaatcattagcatcgccaagaaaatatgcattcgatcccagttttcctcttgttaaagatgctctcaatgaaatcataaaattcaaattagagattggtcgtaatagtatttcacttagagatgctcactcagtggttcaatctgtagttaatgattatgttgttgataaaaccttcctcagcgccttgattgacgaaggattattgactaaaggcatagtgagaaatgatgataattctactgaggaagtagtttatgtggcttttgaaaggtttgatgatcatttaactgttaattttttattaaatgatgttgaaaatatcgaaagtgaatttaagtcagatggtcgtctgaaaaaatattttcatgatgaatgtgacttttatataaactcgggaatagtagaggcgctgtctattcaattgccagaaaagtatggaaaagagctttatgaatttctgccggagttcagcaataatcataaattactagaagcctttattgatagcttgatatggcgagatattaaggctattgatttcgaaaaaatcagacctttcatcaatgaacatgtttttaaatttaaagatagttttgatcatttcctcgaggcagtgatctctatttcaggtttagttgaccatccctttaatgctaatttcttgcatgattggctaaaagattaccctttggcaaatcgagattcgttttggactacaaaacttaaatataaatatagtgaagactcagcatttaggcatctaatcgattgggcatggggcagaacagacaaaagcttcgtttcggatgagtcaatcgagctagttgcaactagtttatgctggtttttaacttctagtaaccgagaacttcgagattgctcaaccaaggctttagtgagtttactcgagccaagaattcctgtattgagaaaaataattgataagttttatggtgtaaatgatccttacgtttgggaaagaatatttgcagttgcattaggctgtacattgcgaactgataatattaaagaactaaaatatttagccgaaactgtttaccaaaaggtattttgttctgagtatgtgtatccaaatatattacttagagattatgctagagagattattgaattcgctaatcatcttggattggagcttgaaagcattgaattatccaagactagaccaccctacaacagcatttggcctgacaagattccttcaaaagaggaactagagtccctttatgataaagaaccttatcgggcactctggagctcgattttgggaggtggggacttttcacgatatactattggaacaaattataatcattctgattggtctggttgcaagtttaacgaaacccctgttgaccgtaagcaagtttttaaaactttcaaatctaaactaactgatcaacaaaaagatttgtatgatgctacagatcctttcatttatgatgataaatgtgaaggaattaaatttggtcgtgtggtcggtagaaaagcacaggaagaaataaaggcgagcaagaaattatttaagaattcattgtcatacgatctattaagtgagtttgaaaatgaaatagagccatacctagatcataataataatcttctggaaactgataaatactttgatcttcgactagctcaacaatttatattcaatcgtgttatggagcttggttgggatccggagaagcatggtaattttgaccaacaaataggaactggacgtggacgtagagaggcattccaagaacggatcggtaaaaaataccaatggattgcttattatgaatacatggcaaggctagccgataattttattcgttttgaaggttatggtgacgaacgaaaggaaaatccataccaagggccatgggagccttacgtaagagatatagatcccactatcttacttaaagaaactggaacgaaaaaaataagcaataaagaaatgtggtggcttaatgatgaagtgtttgattggacttgctctaatgaagactgggttaaaagttctactactataactaatccatatgctttgattgaagttaaagatgataatggtgatgaatggatagtattagaaagttatccatcatggaaagaaccaaaaattattggaaacgatgattgggggcacccacgaaaagaggtttggtatcagatcagaagttatatcgttaaagttgaagaatttgaaaattttagatgttgggcaatagctcaagactttatgggcaggtggatgccggaatgtactgatagataccaattatttaatagggagtactattggtccgaagcatttaagtcttttaaatcagattattatggtggatctgattggacttcggtaacagaccgggagtctggagctaagatagctgatgttagtgtcacttcgattaattatttgtgggaagaggagttcgacaaatcaaaaatagaaactttgaattttttgaagcctagtaacttaatctttgaaaagatgggcttaaaaagtggggaagtagagggtagcttcaatgatgaaaatggaactatggtttgctttgcagctgaagctgtatatgcttcaaagccgcatctacttgttaaaaaagaaccatttttaacaatgttaagggacaatggttttgaaatcgtttggacattattaggtgaaaaaggtgttatagggggatcactcacatcaagtcatcattatggccgacaggagtttagtggagcattttattataaagacagtcagctaacaggaagtcataaaactagctttacgagataa

SEQ ID NO: 31040 - DNA, 312 bp, Escherichia coli
ttggttattttagatggagatgtcagggaggaaatcctagagaaaaataaaagcattgcttctaaattgctttttttacctttcgactcaattgaaaaggaaatttttaaaaaatccaataatactcaatacaatctgccttatgttggaaaattaaaagggaaaccagagaaaagaaacaaaaaatattttgataaactaacaaagaggaacggatttgatatggagaagatattctacattgcagaaaaagataatcaagaagctgtattaaattttgaaaacaggctttcatcttttttaaaaatgtag

SEQ ID NO: 31041 - DNA, 876 bp, Escherichia coli
gtgttcggtgatgtccacactcactggcttaccgctgccgttaatcaggttcaccgtggcggcaccggtctccggaagtgtcacttcacggtccagcgtcagggtgcgggtggcagcatcaatggacaggacacgtccgccggtcaggatcccggcatagtcgttatcacagatttcaatgatgtcaccgggtgtgtgccgcagcccctgagacccgagcgtgaaatccaccgtctgcgtttccagcagttcggtctttatcacccacagtccggcacggtgggcctgaccgcggctggtacagccgaacgcgtccatcttcagcaggttgcgtccgtagcgcagtatggcttccgggtcttccaccagttccgtggaggtctgccagccgttctgcgggtcggtgtaattcacctccaccgccgtgtgccggtccttcagggcactgaagctgtagcggaatcccacgccgttatcatccaccaccacatcgctgttggtgtacggccacaccacatccgacgggcggtcctgaacgaacgtcagcgtctgaccgttccataccggcatacagcgcatcgcagagcagaaatcactgagaacgtcccacgccttacgctgttgtgccaggtacgcattaaaggtcatccgcggctcggtccccccgaaaccatccgggaccgtctgatcgcagtactgcccgatggcatacagcgcccacttgtccacatccgccgcccccagacgttttcccatgccgtagcgcgggtgagtcagcatgtcccacaggcaccaggccgggttgttgctgtatgccggtttcagactgccgtcccagataccactgtacgtgcgtttttccgggtcatagtttga

SEQ ID NO: 31042 - DNA, 411 bp, Escherichia coli
atgaaaattcgtcaggcgcagaccagcgcaacctacattctgccggaccccggtgaactgaataaacgcgtcctgatctgccagcgggtggatatgcccgcggataactttggcgtggagcctcaatacccggttgcgttccgggcatgggcgaaggttatccagaccagtgccaccacctggcaggaaaccgcgcagaccggagatgccatcacccattacatcaccattcgctaccgccgcgggatcactgctgattatgaggtggtctgcggtgacagtgtgtaccgggtgaaacgtcagcgcgatctgaacggggcgcggcgctttctgctgctggagtgtacggaactgggcgaatttacgcagagtcacggaggcagcaatggcgactcccttttttcacgttga

SEQ ID NO: 31043 - DNA, 210 bp, Escherichia coli; identical to SEQ ID NO: 12508

SEQ ID NO: 31044 - DNA, 303 bp, Escherichia coli
gtgcgccagcgcgatgttgctgcgctcgatgcaaaatactcgagggaattagccgatgcgagagctgaaaatgaaactcttcgcgctgacgttgccgctggtcgtaagcgcctgcgtatcaacgccacctgtccaggtcccgtgcgtgaagccaccggcaccgcccgcgtggataatgcaaccggcccccaactggcagacaccgctgaacgggattatttcactctcagagaacggttgatgctgatgcagaagcagctggaaggggcgcaggactatatccgcactcagtgcctgaaatag

SEQ ID NO: 31045 - DNA, 303 bp, Escherichia coli
gtgcgccagcgcgatgttgctgcgctcgatgcaaaatactcgagggaattatccgatgcgagagctgaaaatgaaactctgcgcgctgatgttgccgctggtcgtaagcgcctgcggatcaacgccacctgtccaggctccgtgcgtgaagcccccaccacctccggcgtggataatgcaaccggcccccaactggcagacaccgttacacgggattatttcaccctcagagagcggctgatgacgatgcacaagcaactggaaggggcacaggactatatccgcactcagtgcctgaaataa

SEQ ID NO: 31046 - DNA, 279 bp, Escherichia coli; identical to SEQ ID NO: 20986

SEQ ID NO: 31047 - DNA, 279 bp, Escherichia coli
gtggtggcgaaaacgtcttatgtggcagaggacggtaccgaaaaacgttatctgccggagggcatgctggtgctggggaatacggcggcagaggggattcgttgctatggtgccattaaggatgcacaggcgttgtctgaaggagtggtggcttcttcccgttacccgaaacactggctgaccgtgggcgatccgtcctgtgaattcaccatgacgcagtccgctccgctgatggtgctgccggatccggatgagtttgtggtggtacaggtgaaataa

SEQ ID NO: 31048 - DNA, 195 bp, Escherichia coli
atgaataagcagcagcaagccgtactcaacatggcgggattcataaaaagtcagagcctgacgctgctcgaaaaactggacgcactcaatgccgacgaacaggccgccatgtgtgagaaactgcacgaactcgcagaagaactccagaacagcatacagacacgctttgaagcggaaaatcttaccgggatataa

SEQ ID NO: 31049 - DNA, 174 bp, Escherichia coli
atgattatagcaatagcaatgatgcttctttgtataatgcttggcggcttcatgatccgtagttgtatgggtaaaaaagactcttcaagcgaagctaagcaatcaatatcagatgttagaaaaatgatagataaaaaagcactgattaaatataagaggattaatagaatatga

SEQ ID NO: 31050 - DNA, 198 bp, Escherichia coli
atgactattgctgaacggctacggcaggaaggacatcaaattggctggcaggagggtaaattagaaggtttgcaggaaggcatgcatgaacaagccattaaaattgctttgcgcatgctggaacagggcattgatcgtgacctggtgctcgcggccacccagctaagcgaagccgatctggcagcgaataaccactaa

SEQ ID NO: 31051 - DNA, 282 bp, Escherichia coli
atgtctaatcagtttggtgatacacgtatcgatgacgacctgacgctgcttagtgaaacactggaagaggtgctccgctcctctggcgatcccgccgatcagaaatatgttgagctgaaagcgcgtgcagaaaaagcgctggatgatgtgaaaaaacgggttagccagcttcagacagttattactatcgggcgaagcaggctgtttatcgtgctgatgactacgtccacgaaaaaccctggcaaggaattggtgtgggcgcggccgtcgggctggtactag

SEQ ID NO: 31052 - DNA, 213 bp, Escherichia coli
atgctgattggtctggaaatcatgattaacgcctccgcgctggcctttgtggtcgccggaagctactggggccagaccgacggtcaggtgatgtacattctcgccatcagcctcgcggcggcagaagcgagtatcggcctagcgctgctgctgcaacttcaccgtcgtcgccagaacctgaacattgattcagtaagtgagatgcgcggatga

SEQ ID NO: 31053 - DNA, 1113 bp, Escherichia coli
atgattggtcaacggctggacgatctcaaattacgtgagcgttatggcgctaacgtcatcggtgttgaacgctggcggcgttttcgtcgtgttatcgtgaacgttaatggggtttctgaatttcgcgcgcgtgacgttttgcttattgatatgtctgcggctgatgtcgatctccggcaattttgtagtgagcagttgctggagccgatggtactacgcggcgagtatttttctgaccaggcacttgatgtgggcatggcagagatttcattaattcctgagtctgaacttattggtaaatcggtgcgcgaaattggttttcgtacccgctacggactgaatgtggtggggctaaagcgcaatggcgaggcgatggaaggttcgctggcggatgagcctctgctgctgggcgatatcatcctggttgtgggtaactggaaactgatcggtatgctggcaaaacaggggcgtgactttgtggcgctgaacttaccagaagaagtgagtgaagcatcgcccgcgcacagccaggcaccccatgcgattttctgtctggtgctaatggtggcgttaatgctgaccgatgaaattcctaatcctgttgccgctatcatcgcctgcctgctgatggggaaattccgttgtatcgatgctgaaagcgcctataaatccattcactggccgagcattattttgatcgttgggatgatgccgtttgctgtggcattacagaaaacgggaggtgtcgcgctggcggtgaaagggctgatggacattggcggcggttacgggccacatatgatgctgggttgtttgtttgtcttgtcggcggttattgggctatttatctctaataccgcaacggcggtgttgatggctccgattgcgctggctgctgccaaaacgatgggtgtgtcgccttatccatttgcgatggtcgtggcgatggcagcatccgccgcctttatgacgccggtttcttcacctgttaacacactggttttaggtccgggaaattacagcttcagtgactttgtgaagttgggggtaccgttcaccattatcgtgatggcggtttgtgtggtgatgatcccgatgctgtttccgttttga

SEQ ID NO: 31054 - DNA, 675 bp, Escherichia coli
gtgaacggtgaattgatttgggttctttcattactggccgttgccatcgtcttgtttgcgacgggcagagtgcgtatggatgcggtcgctttgtttgttattgtcgcgtttgcattaagcggaacgctgacggtccccgaagtattttccggcttttccgatcctaacgttgtcctgattgccgccttgtttattattggcgatggtttggtccgtaccggtgttgccactgtaatggggacatggctggtcaaagtggcgggcaacagtgaaatcaaaatgttggttttgttgatgctgaccgtcgcggggcttggcgcgtttatgagttcaaccggcgttgtcgctatctttattcccgtggtgttaagcgttgccatgcgtatgcaaacgtcgccgtcgcgcctgatgatgccgttaagttttgccgggctgataagcggcatgatgacgctggtggcgacgccgccgaacctggtagtcaacagtgaattgctgcgtgaaggctatcacggcttcagtttctttagcgtaacacctattggcctggtcgtgctggtgctgggtattttgtatatgttagtgatgcgtttcatgctgaaaggggatacccagaccccgcagcgcgaaggctggacgcgtcgaacctttcgcgatcttatccgtgaatattga

SEQ ID NO: 31055 - DNA, 5286 bp, Escherichia coli; identical to SEQ ID NO: 30979

SEQ ID NO: 31056 - DNA, 984 bp, Escherichia coli
atggcgtcaggagctcggctgtcaatagcgctgacggaagcgggattaagtgaacggacgtggcgacgctggcaaacgtcgtgggaagacaagcgtgtcagcacggtcaggccctccccggtgaaccagttaagtgagcaagaagagcaacagatactggcagtgtgccatcagccagactacgccagcctccccccgtcacaaatcgtaccggcgttggcggataaggggatttatctggcaagcgagtcaaccttttaccgggtactgcgtcgtcatggagaggtgcatcgccggggacggcaacgggcagcgcagaaagtcaccccggctacgagttggcaggccagcgggccgaatgaggtgtggacatgggacattacatgggttccgtcaaccgtaaaggggcgctggttttacctgtatctggtggaagacctctacagccgaaaaatcgtgggatatgaagtgcatgaaactgaaagtggtgagcaggcggcagccctgatacaacgcacggtccttcgggaaggatgctggcaaaacccgccggtactgcatgcggacaacggcgcggcgatgaagtcacagacgttgcaaatgaagctacacgagctggcgataaccccctctcacagccggccgggagtgagtaacgataatgcgtatgtggagtcgctgttccggacactgaaatatgtcccgcagtggccgtcatcagggttcggcaagctggaggaggcgcgtgaatggatagaggtttttgctcagtggtataacgaaatgcacagacatagcggcatcaggtatgtgacgccgggtcagcgacatcgtggagaagacggtgtgttgctgaaaaatcgggatgaggtgtacaaaaaggcaaaagcggaacggcctgaacgctggtctggcagaacacgaaactggcatccggtaggcaaggtaatgctgaatccagaacgggaaaaacaggcagcctaa

SEQ ID NO: 31057 - DNA, 504 bp, Escherichia coli
atgacaagatgggaacagatcgtgaaacgaatttcaccagaacgtaaatcggctgcactggctaaattactaccgccttacaacatgaccgtcaccgcagttgcgcagatggaagggatatcggaagctaccctttattactggcgtaacaaggcgaaagcagagggaataccggtgccgggtgcaaacaaaactacagaccaatggtcagccgaagcccggctggctgtgattatcgaaacagctacactcagcgaaacagaactcgcgcaatactgccgtaaaaaagggctttacctggaacagattagtcagtggaaacaaggctttttgcaggtgtcttcgcccactgacaaagcggcgctcaaacaaagccagaaagaagttaaacaactaaaacgcgaactgcttcgtaaggaaaaggcgctggcggaggcggcagcgatactggtgctgcgaaagcagttgcgggatttttacggggaaaccgacgaggacgactga

SEQ ID NO: 31058 - DNA, 1341 bp, Escherichia coli
gtgaaaattaaaaagatcaaaaaactttttaaaaatcccaaatcatttattgcggactctcgttattttaattttataaatagtaaaaaaaaagttgataataaattagaaataggatttattgtaatttctcagaaccatgatttatcaagatactcaatagatagtataatacaggcaaacaatgcagcatcaaaatctttcccttatatcgttatacatgactacgatgaaaaatgtggtactgaaactatacatactatagttaaaaaacttgatacaccatacataaaaatcctctttgatggagaaaaaatacacagggattttattattaaatttttaaatcacaatatagatcctaacaataatgatataatattacatgcattttctacaaattcaaatgtaaaacaggtagatggtttattatctagttctaaagatatatcattcaataatcagttgtggaaagaacatgcggttttgttattttctacgctaataattaaatctgacttaatattaaacactagtaaaatacttcatcacggtggaagaattatagattcgctaaatgtgcttcgtatttttagagaatgtgaggaaatggactatgttttatatttgaacgatatgtattctttcaatagtgcctcgctgaaactggaggaaaagataaaagtattgatggaggatgagttattattaaaaataacatttgcagaaatctttgaacatgtaagcttgggggggaggaatgttttttataggaagacgttgttttatttcatacacaatatagttttgttcttgctaaaaaacaaaaaaacagatgagcgcctccatgaggaaacaaaaacattaattaaaaaccagttaacagatataataagaatacttggagttgatatactaaagggcttttctgcaaaaaattataatcacgttcacaaaattggatatttaaaactaataggagtgaaagcagataaagatctatgttatattgaagatataaatagcgagaataaagttgtaaaagtcaaaatagcatcacaaacagatgcctacccacagatattacttaataaagagtatttaattccttttacagccaaggttaaagacttaacaatttttgacgttaatttctcacacgagatatatttttggttctcttatgatgcaatatcacaagaacttgtcataaaaaaagaaaataatactgaaatcctctctggtggaaaacattataaaaaaataaaaatagaaaacataataaaaaattttgaaagaagagatttaattaaggaaggtgcgaacaagttcctgatatga

SEQ ID NO: 31059 - DNA, 1491 bp, Escherichia coli
atgccatactttcagtatcctgatgagtttcccctgagctcgctgcctccactcattcgtgatgccgttattgaagctcagcaaatcacgcaggctcccctggggcttgtggcagcatctgccctgggcgctgtttcacttgtctgccagaatctgattgatgtctgcagactgaatacactgcgggggccggtttctcttttcttactgacgcttgctgagtccggagaacgaaaaaccgcagtggacaaattattaatggagcccctgtaccagcaggagatgctgttatattccagacacaaaaatgaactgacgacatggaaaaataaggaagagcttttaaaggcgcagaaaaaagcattgttgtcaaaactgaataaagaactccgcaaaggcgcggatgagtcagaaacgctcagacaactggaagcgcttcagaaaaacagaggggaaaaacctgtaagatataaattcatttttaatgatgccacgacagcagcaattaaagatcagctttgtggtcagtggcgttcagtgggtatcatgtctgatgaagccggtataatatttgatgggtataccctgtctgagctgccttttattaacaaaatgtgggatggctccgtattgtcggtggacagaaagaatgaacccgaacagatgattgaaaatgccagaatgacattatccctcatggtacaacccggtctttttgaccgatatatggagcgaaaaggttctgttgccagggacagtggttttcttgcccgttgtctaatcagtaaacctgccaccacgcaggggaaacgctttattaacggagctgtgaccccgggaggatcattaacggcatttcatgaacgattaatggaactggccagaggcagtattgaaaaatccagtaaggatgaacgttattgtctgcatttttctcctgaagcgcaaaaaatatttattgatcactataatgttctggagcaggatttgtctccttccggacccttaagccagtttcggggacatgtttcaaaaaaaacagaaaacattgcgagaattgctgcgttattgcagtatttcagtcagggtgaagggaaaatctctgccgatatcatgacgtctgctgtcgtaataagttcgtggtacacagatgaatataaaaaattatttgcgttacctgatgaatctgaactgcagctgcaggacgcccgggagctgctcgactggctcattgaggagtgccgcggagaatgcccgccccgtgtcaggaaaaattatattctccagtgtggcccgggccggttccggaacaggaaaaagctgaacgtcctgctgaacattcttgcatctcaactcaggctctctgtcgtgcaggaaggaaaaaccacctatgtcctgctttccgaaataaacaatatcacgctgcctgaactgaatgcgtgctacagccagaaactgataagatggcatgagcaatcctttggcttataa

SEQ ID NO: 31060 - DNA, 1323 bp, Escherichia coli; identical to SEQ ID NO: 13296

SEQ ID NO: 31061 - DNA, 243 bp, Escherichia coli
atgaaggatgaaatacacagtaccagcattaacccggatgttgttgagcagtttctggcccttatgaacacacattgtaaatcctcagaagaggcactcgccatgctgagtacgctttgttacaacctgatgatgacatgcggtatccattccatggacagccagatgctcaatgggcatgggatatccatgcaacttcaggggattgatattgccgaaaggccaggcaagaatattcactaa

SEQ ID NO: 31062 - DNA, 369 bp, Escherichia coli
atgaaagataacaacacaaccgccaccccagaagcctggaaaatgcgttttctggccaacgggacatccggcacatggttttacactgacgacattgcagtcactgacgcgtggcttcgcgcgcacccggatgatgtggaggttatccctctctgccggatacagccccgccagcattcccatgaacaacatattgaagaactccgcgcagccctggcccggatgctccatatgcatcatatgatgctgaaaaccacacattaccgggaaaatatcaccgatgcccgttgtatccgtgaaatgcatgaagcgccattacaggcgctcaatattctgtccagatacccgcataaaaaggacgaggtgtga

SEQ ID NO: 31063 - DNA, 216 bp, Escherichia coli; identical to SEQ ID NO: 8252

SEQ ID NO: 31064 - DNA, 294 bp, Escherichia coli
atgcatatatgctttgaagagctacctttcttgatttcatatagtgctttatataaggggtttaattttgaagacgacaatctaatatttccactgctgttatcttttaaaatattttcaatgacgtatccacctaaagaaatagtcccttctttatataaatacttcgatttatttaacttgaatttattaatggagagaatggatgaaatctcatttataaaaaaagtgctgcttaatatattgttttctttttttgttgagaacaaaagatcatctgcatatcgtgtataa

SEQ ID NO: 31065 - DNA, 582 bp, Escherichia coli
atgaacaactcatggtggcaggaactaatgcattttttcctgcaaggaatgacacttaaacagttgattcatatgctaatcatcctgatcatattgattattgttatgccggtaagcgtaaaagaatggataaacctgcataatccagaaatccttcctcattattggatgtattacatcctgttgttctgcgttagctatgtgcttaacggtgtagttaattccgcttatcacgctgtgactgaaagaattgaggtatccgctgctcagaagcgcaaatccaaagaagaaaaatatgtgcaagatttgtttgattcgttaactcttggagaaagagcgtatttggcattcgctgtagccgctaataaccagctacaaacggaaaagggagctcatgaatcaatttcattgctcaaaaaaggcctcctcgttcgaaggcctcctgctgttggatatcctgataccgaccgttttattatcccggaaagctatagacatgagtgctacattaggtttgccgggaaggcagacagccttatggatgaacttatcgctcaggataagcatggcaaaaacaagtaa

SEQ ID NO: 31066 - DNA, 192 bp, Escherichia coli
atgattctggataattttaaactggctctttctggaatcaatattcctattaaagacattattttactgggatctgtggatattcgtcgttttatcaaaaaacttattgaatctagttatcgagacctcgaagtactttcgtacggggaactaacggaaaatgttcccgttaatattctgaaaactatttag

SEQ ID NO: 31067 - DNA, 282 bp, Escherichia coli
atgaaagatttaacactcaaatttgaagacagggccgacttttcggcctttatggatagcactggctattatgatgacgagtcgatgcaggatgatattcttatcgacgtgataggtaacgtgtacaaagaaaccggagaactgactgaagatggcgaaccggtatgtgttaaggaagacggatattttgtaaacgtgcgcatcattaatgattcgcaaatatcgtcattattcgatgaatacgtggttgctgttgagcatcaacttcgtggctggatgtga

SEQ ID NO: 31068 - DNA, 549 bp, Escherichia coli; identical to SEQ ID NO: 10880

SEQ ID NO: 31069 - DNA, 180 bp, Escherichia coli; identical to SEQ ID NO: 9255

SEQ ID NO: 31070 - DNA, 588 bp, Escherichia coli
atgagactgcgattctctgttccacttttcttttttggctgtgtgtttgttcatggtgtttttgccggtccgtttcctccgcccggcatgacccttcctgaatactggggagaagaacacgtatggtgggacggcagggctgcttttcatggtgaggttgtcagacctgcctgtactctggcgatggaagacgcctggcagattatcgatatgggggaaaccccggtacgggatttacagaatggtttctccggacctgaaagaaaattcagcctccggctcaggaattgtgaatttaacagtcagggtgggaaccttttctctgattcccggataagggtgactttcgatggcgtccggggtgaaacgccggataagtttaatttatccggtcaggcaaaaggaattaatctgcagatagctgatgccaggggaaatattgcccgggcagggaaagtaatgcctgcaataccattgacgggtaatgaagaagcgctggattacaccctcagaattgtgagaaacggaaaaaaacttgaagccggaaattattttgctgtgctgggattccgggtcgattatgagtga

SEQ ID NO: 31071 - DNA, 2520 bp, Escherichia coli
atgcgtggaatgaaagacagaataccttttgcagtcaacaatattacctgtgtgatattgttgtctctgttttgtaacgcagccagtgccgttgagtttaatacagatgtacttgacgcagcggacaagaaaaatattgacttcacccgtttttcagaagccggctatgttctgccggggcaatatcttctggatgtgattgttaacgggcaaagtatttctcccgcatcgttacagatttcatttgttgaacctgcgttgtcaggagataaggcagaaaaaaaattgccgcaggcctgtctgacatcagatatggtcagactgatggggttaacagcagaatctctggataaagttgtttactggcatgatggtcagtgtgcggattttcatgggttgccgggagtggatattcgtcctgataccggagcgggcgtattacgcatcaatatgccgcaggcctggcttgagtattctgatgccacctggctgcctccctcacgctgggacgacggcattcccggactgatgctggattataacctcaacgggacggtttcccgtaattatcagggaggagactctcatcagttcagttataacgggactgtgggggggaatctggggccctggcgcctgcgggctgactatcagggaagccaggagcagagccgctacaacggggaaaaaacgacaaacagaaatttcacatggagtcgcttttatctgttccgtgccattccacgatggcgggcaaacctgacgctgggcgagaataatatcaactcagatatattccggtcatggagttatacgggagccagcctggaaagcgatgaccggatgctgccgcccagactgcgaggctatgcaccgcagattaccgggattgcggagactaatgcccgtgttgtggtgtcgcagcagggacgggtgctgtacgactcgatggtccccgcagggccattcagtattcaggacctggacagttcagttcgcggacgtcttgatgttgaggttattgaacagaatggacggaagaaaacctttcaggtcgatacagcctcggttccttatctgacgcgtccgggacaggtccggtataaacttgtctccggtcgttcccgtggatacgggcatgagaccgaagggcctgtatttgcgaccggagaggcatcctgggggctcagtaaccagtggtcgctgtatggcggggctgtgcttgccggtgattataatgcactggcagccggtgccggctgggacctgggtgtgccggggaccctttccgctgatatcacgcagtcagtagcccgtattgagggagagagaacgtttcagggaaaatcctggcgtctgagctactccaaacggtttgataatgcggatgccgacattacgttcgccgggtatcgtttctcagagcgaaactatatgaccatggagcagtacctgaacgcccgctaccgtaatgattacagcagtcgggaaaaagagatgtataccgttacgctgaataaaaacgtggcggactggaacacctcttttaacctgcagtacagccgtcagacatactgggacatacggaaaacggactattatacggtgagcgtcaaccgctactttaatgttttcggactgcagggtgtggcggttggattgtcagcctcaaggtctaaatatctggggcgtgataacgattctgcttacctgcgtatatccgtgccgctggggacggggacagcgagctacagtggcagtatgagtaatgaccgttatgtgaatatggccggctacactgacacgttcaatgacggtctggacagctacagcctgaacgccggccttaacagtggcggtggactgacatcgcaacgtcagattaatgcctattacagtcatcgtagtccgctggcaaatttgtccgcgaatattgcatccctgcagaaaggatatacgtctttcggcgtcagtgcttccggtggggcaacaattaccggaaaaggtgcggcgttacatgcagggggaatgtccggtggaacacgtcttcttgttgacacggatggtgtgggaggtgtaccggttgatggcgggcaggtggtgacaaatcgctggggaacgggcgtggtgactgacatcagcagttattaccggaatacaacctctgttgacctgaagcgcttaccggatgatgtggaagcaacccgttctgttgtggaatcggcgctgacagaaggtgccattggttaccggaaattcagcgtgcttaaagggaaacgtctgtttgcaatactgcgtcttgctgatggctctcagcccccgtttggtgccagtgtaaccagtgaaaaaggccgggagctgggcatggtggccgacgaaggccttgcctggctgagtggcgtgacgccgggggaaaccctgtcggtaaactgggatggaaaaatacagtgtcaggtaaatgtaccggagacagcaatatctgaccagcagttattgcttccctgtacgcctcagaaataa

SEQ ID NO: 31072 - DNA, 720 bp, Escherichia coli; identical to SEQ ID NO: 30187

SEQ ID NO: 31073 - DNA, 501 bp, Escherichia coli
atgacaaaaatagagatgatgaactcattaggagcttctcagcaagaaaagatgatgaaccaaatagtgttggacgatcatttgttgaaccaaatatcaatgacaatagaacctctgacagaatcaatgatgatattatcggagtcggtcagtacggcattaaatcagacgcaacagacactaaccagagtgaacaactcattagaagcaacaacaaccgctttaaactcagcgaaaaatataatagaccagcaagccataaagttagaagaacaacacaaaaagctgcacaaatactcaacagagttaaaaaacaataccataaagaatcaatcaaaacttataataaaagtggcctcggtggtaggagtaatacatatattggtggttctatcagtaggatactttatcatgcagaaacagcaacaacagctacccatcaatttagactcaaaggccgtagcaatttcaatagtagagcagttaagatcgaagaggtaa

SEQ ID NO: 31074 - DNA, 678 bp, Escherichia coli
gtgtccggtcagcacatccaggcgtccgccattttccagtacgacattatcagctttaccctccacaacaaagaatgctcccaggcggtttatgccggtaacggttgcagccgtactggtaaccagtgcgccgccctgcttcagggtgacattcgtggctgtaccaccggcgtccacctgcagtctgcccttctgattaacggtggtattcccggccacacccccgtttttgacaatctgccagccgtcactgtttacaacagtgccagacgccgtaccgccgttgtgcacatactggtaccccccattcagcgtggtatccagtgcgtgaccatgtacagtctggtcgccgccggcataaaccacagtggtatttgccgttccttcagcagccacaatctgacgaccatttttattgatggtggtgcgtacggcatctccgtagacggtctgcccggtatcaccattttccgcatccggtcccccttccgcgccggtattcacaaccgtgtcggttgccactgcgccggatttgatggcctgccagcccttctcattaatgacggtacccgttgcaatcccgccttcatgtacccactgctcaccgccgttcagagtggtgttcactgcctgcccctgaaggctctgtccgcctccggcactgataaccgtgtctga

SEQ ID NO: 31075 - DNA, 747 bp, Escherichia coli; identical to SEQ ID NO: 22330

SEQ ID NO: 31076 - DNA, 159 bp, Escherichia coli
atgaaaggttatgcattacagaatcagagggaccaatttccaactgagttttctcatgtacaatacaacttttattcaataaatcggcttttcttttttccagccgttccctttgaatttcagattttttatcaactaatgctgtataagcatggctaa

SEQ ID NO: 31077 - DNA, 225 bp, Escherichia coli; identical to SEQ ID NO: 10107

SEQ ID NO: 31078 - DNA, 282 bp, Escherichia coli
  misc_feature (265)..(274): n is a, c, g, or t
atgaatttaatattctctaaatattctgtattttttatttttttcgctttttttgcttttccgctctcagggcaggccaatgattcagttgttgttacatttactgggattttgttggcaaaaagctgtgacattactaccggaagtaaagatcagtcggtaaaaatgggcacttatgatgctaatgaatttttaaatgtaggtgatgtttctccgagtcaaacgtttacgattaatgtacaaggatgcccgactgcaaaaagtnnnnnnnnnngccattaa

SEQ ID NO: 31079 - DNA, 192 bp, Escherichia coli
  misc_feature (30)..(39): n is a, c, g, or t
atgtacaaggatgcccgactgcaaaaagtnnnnnnnnnngccattaatggtgaatcaggttttcgtgatttagtgttaaatgaaaacggtgatgctaatttgacgtttaaacttcgctataaatcaactcaggaaaatgtacatgccgggcaagcaaatgctctgttgtattttgatatcgattatcagtga

SEQ ID NO: 31080 - DNA, 741 bp, Escherichia coli
atgcaagggaaagccaataaacttttgcttcatatatgcagcgcaatgttattatttttgacatcgtcctggtgtgtgtttgctggcacgggttctgaatgctatatagaaagcaattcagccgggggttacactatgttaattaatactcccacctataatgttgtaactcgagaggtcactaatcctcaggaaatggccgatgctaccaaggatgtacctattacacttcggggtgatggtgtggcctgtaaagccataccaaatggtgatgagactatacactttcttaatactgctgatgccggactgatatcaggatatacgtcagggcgaggctctacattattaaaaacgacggtccctggtattgtttataccgttgaattaatttgtgatagctgtcctgaaccaatcgacttataccttccgacagttggcgaggacaacttcacgcccaactctgatacatggtgggtatggagccaaacagatgacaaatggaagttacgttttcgttttttctatactcctgagttcaaacctaagaatggagtttccagtggaacattatcaccaggaaaaatcgctttctggtatattggtatcaacactcaaccctggatacacttttacgttgacacaaatacatttagatttaccgtggctcaacctacatgtactaccattgcgctggactcaaccagccaaaatgttagcggtaataaaataaatttgtga

SEQ ID NO: 31081 - DNA, 162 bp, Escherichia coli
gtggcgctgtttgaattactgattaacacacccgcggtggggaatttgattcgtgaaggaaaaacccaccagttgccgcatgttattcaaaccgggcagcaggtggggatgataacgtttcagcagagttatcagcagcgggtgggggaacggcgtttgtga

SEQ ID NO: 31082 - DNA, 1032 bp, Escherichia coli
atggcgaccataaaggatgtagcccgactggcaggcgtttcagtcgccaccgtttcccgcgtcattaataattcacccaaagccagcgaagcttcccgactggctgtgcatagtgcaatggagtctcttagctatcacccgaacgccaacgcccgtgcgctggcgcagcagaccactgaaacgatcggtctggtcgttggtgatgtttccgatccgtttttcggtgcaatggtgaaagcggtcgaacaggtggcttatcacactggtaattttttattgattggcaacggttaccacaacgaacaaaaagagcgccaggccattgaacagttgattcgccatcgctgcgccgcgctggtcgtccatgccaaaatgatcccggatgccgatttggcctcattgatgaagcaaatacccggcatggtgttaatcaaccggatcctcccaggttttgagaatcgttgtatcgctctggacgatcgctacggtgcctggctggcgacacgccatttaattcagcaaggtcatacgcgtattggttatctctgctctaaccactctatttctgatgccgaagatcgtctgcaaggatattacgatgcccttgccgaaagcggtattccggccaatgatcggctggtgactttcggcgaaccggacgaaagcggtggcgaacaggcgatgactgaactgttgggaagaggcagaaatttcaccgccgtggcttgttataacgactcaatggcggcaggcgcgatgggcgtgctcaatgacaatgggattgatgtaccgggtgaaatttcgctgattggttttgatgatgtgctggtgtcacgctatgtgcgcccacggctgaccacggtccgttatccaatagtgacaatggcgacccaggctgccgaactggcattggcgctggcggataatcgccccctgccggaaatcaccaacgtctttagtcctacgctggtacgtcgccattcagtttcaacaccgtcgctggatgcaagtcataacgcagccagcgactag

SEQ ID NO: 31083 - DNA, 483 bp, Escherichia coli
atgtatttttctgccgaactggcaaagattgctgagattaaacgacaggccagtggtgcagtcacaccgttttatcgccgcgccacagatgaaggtattcagctgtttgtggtcggaagtgccggacttctgctgaccactgaagatatccgctctgaacagtgccacggactgaaggctgccggacgtggtgttgtatcgccggagaatatcgcgttcacccgctggctgatgcacctgcagaacggtgtgctactggatgagcaaaactgcctgaagctgcatgagctctggctgcagagtggtactggacagtgtcgctgggaaggattaccggatgatgccagggaaaccatcaccgtgcatttcaccgcaaaaagaggtgactggtgtggcttctggactaacgagaatgtatcggtgtggtggaaccgtcggtgtgacaacgtactggcggaaaaactatgccgtttgacctgttga

SEQ ID NO: 31084 - DNA, 147 bp, Escherichia coli
atgccgtttgacctgttgacggttctgcacacccgcctggatgttgaagtgaagggctttaacggtggtgttctgaaagatgtcccctctgcatatcactggtatgcagaacagggctgtgatttctgtggctggcagttgtattag

SEQ ID NO: 31085 - DNA, 435 bp, Escherichia coli
atgtacggaacatgcgaaacactctgccgggagctggcagcgcagtatccgggagacacgccgctgatgctggttgtctggtccccggaagagattcagcccctcgctgacggaatggatatttccctgtccgatcatgaaatcaggactgtcctggcgcgcctggaggacatcccggaagaccagtggattgagcccgggatttcttccgccgcggcgatggagattatcagcaacgtgagcgaaaaccgccaggtgaccgtccctgctgaactgctggagatcctgactcagatcgctgaacaggcactgtggaaacgagaatgggccgcccgggatcacggtttcccccttccggaatacgtcacccgccgacaggcgatggttgatcaggcccgcagcctgctgaaaaacaacacacacgaaaacgactga

SEQ ID NO: 31086 - DNA, 465 bp, Escherichia coli
gtggaggccgcctgtcagcccgcgcgaaaacccctggcaggccgacgcctgccggaagggaagcgggccacgctgacgcgtcgcccattacccttcccgtttgtgatgtgtccggaatgtttttttctgatgctatttttctgtggttactgttgttcttcttcctgttctttccgtttctcttctgtttgtggctttcccgggcgtccccctggcggggcgggctgtcgtgaacggatccagcggagctgtctccgccctggcgggcttccatccctgacgcaaaaccccgggtttgcagcgaccggaacggtcgcgccacccttgtcgcgccgtgacctgcgctcccgacatcccggcaaaaggctgccgggatgtaatgggcaacgccgtttcgcgcatgcgctctccgtcgttgcagcgggtccctgctcattgtctgccgggtgccacacacccgtatga

SEQ ID NO: 31087 - DNA, 267 bp, Escherichia coli
atgaaatcaggtgttcagctcaatctcagagcaagagaatcacagcggatactcattgataccgctgcagaaattcttcataaatcgcgtacagacttcattctggaaatggcctgtaaagctgctgaagatgttattctcgatcggcgggtgtttaattttaatgacaggcaatatgaagaattcatcgaaatgcttgacgccccggttacagatgaacctgccatcgaaaaattgctggcaaggaaacctcaatgggaggtgtaa

SEQ ID NO: 31088 - DNA, 489 bp, Escherichia coli
atgggaggtgtaacagcaccagagcctttatcctcatttcatcaggccgctgaatttgtcagtggtgaagctgtgcttgatgactggttaaaacagaaggggctaaaaaatcaggctctcggagccacccggacttttgttgtatgcagaaaaggtacgcaacaaatagtcggtttttactcactggccacggggagtgtcaatcatacagaagctacaggcaatcttcggcgcaatatgccagaccccattcctgtcatcatacttgcacgcctggccgttgatgtgtcattccgtagaaaagggcttggcgcagatttactgcatgatgcagttcgtcgctgttacagggttgccgaaaatatcggtgtacgcgcaataatggttcatgctcttacggaaagcgcaaaaaagttttatatttatcatggctttacgctatcaaaaactcaggagcaaacattgtttcttaaactccccggcaagtaa

SEQ ID NO: 31089 - DNA, 1296 bp, Escherichia coli
atgccgacgcgcagagagtttttaattaaaagtgttgcgggtgctttaattgtttcaatgcctcgcattgtatttgcaaacacaaataacaaagcaataaatgctacagctatcacacaagtttttggtgacggagttcgacttattgcgatcgctgtagaatttgaaaaacctataaacaaggaagaactttcaacaatagagtttagcgtaaaaaattatcacatcaataaaacatttgtcagccagtcaacagctttggttgaagcaaaatcaggtaagtacgtgatacttgaactggagcacagcaaaccacaaaatgaatggcaagaaactataacggacccaacaatacaaaaagcagtgcccaaacaagggcaaggtaagcctacctgggttgcaggagaaaaactaaaccaaacaattaaatataaagatgcttctgctgttgtcgtcacacaaaataccacactgggaactaacgccgtttcaaatctggtagtggatagttttagacaagatgaatataaagataaagaaagcgggaaaatactaaaatataatttctttattcctgaagaacaaaataaaccattaccactggttctttttatgcatgatgcaggggctaccagtacacaagttacaacgactctgtttcaggggttaggcgcagtaatttgggcagaacctgaagagcaaatgaaacgcccctgttatgttttagctcctcaatataatgaaatcattgctgatgatgactggcgtacctcaacattgcttgatacaacaataaatcttgttcagtatttggtaaaagaatataaaatagatcctgagcgtatttatgttactggtcagtcagggggatgtatgctggccatcgccatgaatattaaatatcctgattttttcgcagcaagttacctggttgcaggaaagtgggatgcggaacaagttgctccaatagctaaaaacaaattatggtttatggcctcagaggatgattcaggggcttttcccagcttcaacgcgattactgaacgtcttgagcaatttggcggaaaggtttctcgcgcggcatggaatggccagtgggagcctgagcaatatcgatttgctgccgacactttgtttgaagaacaaactaatatccgttataccgcttttataaaagacagtgtatttgatgaatattcttcacgagaaggggcaagcgggcatcgtaacacatggcgtattgcttacagcatagaacctgttcgcgaatggttatttaaccaacgcaaacaataa

SEQ ID NO: 31090 - DNA, 687 bp, Escherichia coli
atgaagacgttattatttgtaattctatttttttctgcatctgtatatgcagatacggcatcaaaaatgaattttgacgaaatacttacacgctctgctcaaggagatgcagaagcacaagtcagattgggggaagcatacctgaatggaaactacaatcaaacggtgaattacgctcagtcttttaaatggttgacgaaatcagcagccagcggaaatccccgagcaaaactggatttagggattttatatcttaatgggtatggtgtaccgtttgattatgccaaagccttaaacctttttgagcaagcggacttagcgggagaaatgaaagctccacgttatcttggaattatttatgaaagaggattaggcgtttctcaggactataagaaagccgcggaatattataagaacggcgataaacataatgatattacggcgcagtatcgtctggcaaaactttatgagcaagattatggtgtagaacgcgattatcaaaaagcgataaacctttatcttaaacatatcaacagaatggatcatatcactgcccccagttttgtggctttaggtgatatttattctttgggattgggggtagagaaaaatccacaactggcagaaaaatggtatcagaaagcgattgatgcagataaagtgagccgcttggaattcggaaaataa

SEQ ID NO: 31091 - DNA, 1755 bp, Escherichia coli
atgaatagaaaattgaagtgcttcatatcattagcgctctttactggctctctcatttttcctgtatccgtattatccgcaaataagcacttcccggcgacaccagtttcccccaaaaactatgaagatttggctggaataaatccagtcactgattgctccgcgctacaacaaactgatttaacctctattgccggggagggaagtcaggttctgaaagcgactctggatgaaaaccgtaaagtctgcattgttacagggcgtctggctcctcagattggctttgaggttcgtttaccaacagagaattggcgtcagcgttctcttcagattggctgcggtggtttgtgtggacgaatatcagatgaaatcggtgctgctaacggatgcctccatataacagatggttcttttgttacttcagcaactgacatgggacatactgtagccgatggttcttttggcaaagattcgcggttgcgaacagattttgcttaccgcagtgtccatcttactgctcaggcaaccagggctttgatcacggcattttacggtcaaaacgcaagatattcctactttaccgggtgctctgatggcggacgggaagcattaatggcagcgcaacgatatcctgatgattttgatggcatcattgcaggggctgcggcgatgaacttccagacccaaaatggtgtataccatccctggctggcccagattaatactgataatgacggcaaccacattctgcttgcggataaattaacgctgattcataaggcggtagtgtctcagtgtgattctcttgatggtgacaaagatggcctgatcagtaatcctctttcctgtagccctgatctgcagaatcttttatgtccgtccgcgcaatctgataccagccagtgtctcacagctcaggagctggacgtgttgaataaaatttatcaggggccaaaagaccctgaaagtggtttatctttgcttgccggtgggccattgcctgggtctgaattagcatggaaaggtatttttatacctgaaagtaaaaaaggccctctgttcagtacaaaaatcggacaggatgctaatgatgtactgtttaaaaaagaagatacgccagaggaatttgatttacgcagaataaattttgatgcatcatattttgacaaattgagtaagttacatcgtttttatgattcaacgaaccctgaccttcacgcattctatcaacgtggaggaaaattaattttgtggcatggtctggcagaccagcatatcagccctttgaacacgatcaattatcatcttgctgttcagaaaactatgggtaaaacagtaacaagccaatttgagcgactgtatttgctgccaggagtatatcattgtggtggtggtgaagggccggacagcattgatttactcagccctgtgatggcatgggtggaaaaaaatattccgcctcatgaaatattgactgtacagcgtaataataacgaagctgggacattcggtcagccaacgtcattgatagttggcaataaatcacagtcctcagaacatgagggtaaagaatcatccgttgtgcaagttcgccccgtttacccatatccggaagtcgcagtatataatggacatggagacagaaatatccctgaaaattatcatcctgttatttttgataaaatggataacttaacccaatggttgggagataaattcttttctccctatgagtttttaaattcctccgactga

SEQ ID NO: 31092 - DNA, 546 bp, Escherichia coli
atgaaaggacgggaatatgttcttttactgaatgagaaaggagaattcattggcacggaagaaaaatatgatgtacacacaacccacacccctctccacctggctttttcctgctggctcttcaatagtgaaggccaggttttgataacccgccgctcacttggaaaaaaagcatggccaggtgtctggacaaactcggtatgcggacatccacagctgaatgaatctttcgagcaagccattacgcgccgctgtcactttgaagtcggagcagaaattactgatataacccctgtttatccagaatttcgctattgcgcaacagaccccagtgggattatggaaaatgaaatttgcccggtatatgcggctaaactaacaaacacaataacccctaacccggacgaagtgatggactgttactgggtttcgttagatgcactgtatcagacattgataacctcaccacgggtgtttagtccctggatggtgttgcagttcggttcagaaaagacacgaaaaagattgatgagttttgtgaaatag

SEQ ID NO: 31093 - DNA, 717 bp, Escherichia coli
atgttaacaggaccatatgtgaatggcgcagcagtaatcgtgggtggtttgttcggtgcgcttatcggtacacgcatccccgatcgagtaaaaacggcactccccctgaccttcgggctttgctcggtaggtcttggtattaatcttgtaatcaaggtgaaatacatgcctgcggttgtgctggcaatggttattggagccattattggcgagatatttttcctggaaaaacagattggcagagttgccggaacaacccggggactaataaaccgcattttcccccccgttcagggattaacacatgatgaatttactgagaaatttgtcgcaattctggtgctattctgtgccagtggcaccggtatttttggcgctatgcatgaagggatgacaggagacccatctattttatatataaaaactgtgctggaccttttcactgcggcaattttcgccaccatgctggggttctctgtaatgactatcggggttccgttaatcatcgtacaagtggctctggctatgctggccgtatatatattgcatctgattacaccggatatgatggccgacttctcctgcacggggggattgataatgatcgcgaccggactacgtatttgtaatattaaagcgtttcccgtcgccaatatgctaccaggcttaattctggttatgccgatttctgccctgtgggccagtttatttgcataa

SEQ ID NO: 31094 - DNA, 585 bp, Escherichia coli
gtggcaacaaaacgcatgattgttggaattagcggtgcatccggatttcagtacggagtaaagacactggaacttctaaagaaactggatgttgagattcatctcgtagtttctaaaggagcagaaaaaacctgccatctggagacagattatcgacttgacgatatttttgccatggcggatgttgtccacccaattaataatctgggcgcagcaatttccagtggctcattcaaaacgcaggggatgattatcaccccctgttcaatgagaacactgggggccattgcccactgtatgaccgacaatctgctgacgcgtgccgcggatgtagttctaaaagagcgtcgccgtctggttctgctggcgcgggaaacccctcttaacctgggacatattcgcaatatggctacagtgaccgagatgggaggcataatttttcctccggtccccgcattttatcagcgaccacagacggttgaggagatagtgacccatagtgtcaaccgtgctctcgacttatttgatttaaatataaaagaccttccacgctggggggaaggtcttcttaattacaatgaataa

SEQ ID NO: 31095 - DNA, 1473 bp, Escherichia coli
atgaaaaataatgttcatgatctccgttctgcactggagctactaaaaacattacctggtgaatatgtcgaaaccgatacagaagtagatccgcatgcggagctttctggcgtttatcgttatgtcggcgcaggtggaacctgtcagcgcccgacccgtaaaaatggtcctgtaatgatgttcaaaaaaattaaaggttttaacgacatcagtgtagccattggccttaatggttcccgtaatcgcgtcagccacttcctgaattgtcctccggagcgtctggggcatatgctgaaagactccgtacagacaccaattccacctgtcctggcaacagctccggcagcagcacaggaagttgttcaccttgcgacagatcccgattttgacctgcgtaaacttttacccgcaccaacgaatactgaggaagatgcaggtccatacattacgatgggtttgtgctacgcgtcagacccggaaacaaatgagtctgatatcaccattcaccgtctgtgcgttcagagcaaagatgaactctccatgtggcttacccctgggcgtcacatcgatgctttccgcaaaaaggcagaagctgcaggtaaaccgttaccaatctcaatcagtattggcgttgacccggcgattgaaatcgccgcctgcttcgagccaccaacaacgcctctgggctttgatgaactgagcatcgctggctccctgcgaggccatcccattgaaatggttcagtgcaaaaccatcaacgaaaaagcaatagctcacgcagaaatcatcattgaaggtgagctgttgccaaatatccgtctgcgtgaagacaagaatacaaatacaggcaaagcgatgccggagtttccgggctatacaggtgaagctaaagacgcaatccctgtcattaaggtaaaggctgtcacacatcgtaaaaatcctatctggcgaaccactgtagggcctggagaggaacatgtgaacatggctggaatcccgacagaagcaagcatcctcgatatggttgaacgggcaatgccgggaaaattactgaatgtttttgcacattctgctgggggtggcaaattgctggcagtgatgcagttcaaaaagtcagcggctgtggatgaaggtcgccagcgccaggccgccctgctcgccttcgctgcgttccctgagctgaaacacgtcattctggtcgatgaagatgtcgatattttcgatagcgatgatgtactgtgggctatgcaaacgcgttatcagggcgatgttgatactgtcactattcctggcgttcgctgccatccgctggatccgtctcaggtcccagattacagcccaagcattcagcaacagggggtatcctgtaaaaccatctttgactgcacggttccattccatctgaaaagccactttgaacgttctaaattcaaagaggttgatgtgaaacgtttcctgccggatttcgaataa

SEQ ID NO: 31096 - DNA, 945 bp, Escherichia coli
atggatttaaagcgtttacgttacttctgtcgggtggtggaacagggctcagtaagtcgggctgcaaaagtgttgaatatggcgcagccaccacttagtaaacgtattcaggaactggaagatgagttgaaagcaccgctctttatacgcaaaggtaatcgtatcgagccaacagaggcgggtttttttctctaccgtaaagcatgcgagatcctgcgtcaggtggaagatactacgcgggagactatggctattgcgcaaaaaaataatcctaaacttcatctgggaattacgcacctttttcagtcttatttcaggtcgctactgctggcattttgtgaacgtaatcccgatatagaagtgagcatatcagtcacggactcaagtcacctggaagatttacttaatgacggaacaattgatttagcgctgatccaacgaccgtatcgtgatgaagggtatgatgttgtttcttttgatcccataaaacctgtggccgtaatcagtaaaaaatgtttgccatacatacctgacacgcctgttaactatataacactggccagcttcccgctgatattgttacatcgggcgaaggattctggcatctatgaaaagctgcttgacttattcaggaagacaggagtaactccagaagtgttaatgcatatatcccagccgggtatgattatcgactggctggagtcagggctggctgcggccactcttttaccttcatcagaagtagatgcaacttgtttacgccattgtcacgtggtagatattttcccctccccccagcttttttatcctgcgatggtgaaaatgcctgccactaactggattccagaagtaatggaaataattgcagccggatatccctgtaacatgaatacagttattccatatgttaaggaaagagaagtttcgctcactcgtgacaagtga

SEQ ID NO: 31097 - DNA, 435 bp, Escherichia coli
atgacgatcagccgttggctgaaaaaacaacatgttctcacttggtgcgtacagcagaaaggtgaactctggtgtgcaaatgctttttatctgtttgatgcggataaagtagctttttatttacttacggaggaaaaaacgcgtcatgcacaaatgagtggtccaaaggcacatgtagccggaacggtaaacggacagcctcaaacgatagcattaatccgtggtgtgcaatttaaaggtctgattcgtctactggaagatgaggaaagtcacctcatacggcagatatataatcgtcgtttccctattgccagaatgttgtcaacaccagtatgggagatccgtatcgacgaaatcaaattcactgataatacactgggatttggtaaaaaacttgtctggcaacgcccaataactgaacagcaaggaatataa

SEQ ID NO: 31098 - DNA, 492 bp, Escherichia coli
atgaaaaagatggggtcagtaatacttctttgcatgtctgtttttatcctgcagggatgtagtgatgctaaacatctgaagaaaacatcagtaataaataccaatactaatgccaatgccaatgccaatgccaatgccaatgccaatgccaatgccaatgctaatgctaatgctaatgctaatgctaatgctaatgcggatattgatattcagggggtggattcagaacagtatcagtatctgaaacaatgtgtaaaaaatgcaagcgcactggctaatcttaatgagagatataaaaaaacgctgaaagagatgcattttctcattaatgaggcaaaatcttacgctgcaagtaacgtatccgggaatgtacagaagacaatcacaccgttgtttgaatataaaataaactacaaatgtaacgatattgagcagcttcttattgaagaatacaacaggaaaatccaggccactccggttaaggcacaatga

SEQ ID NO: 31099 - DNA, 777 bp, Escherichia coli
atgaaaaagactctgattgcactggctgtggctgcatctgcagttgtatccggttctgctatggctgctggctgggaacaaaacggcactggtggttctgttgacctgggcggtaccctgactccggttacgaaagctaccccgtgggaagtaaaaactggtgatgcagtaactggtctggatgcatcaattcagagaggccagaaggttatcaatattactgtgaataaagcaattccggttctgggtattcgtactcagacttctcaggcatttccgggacaggctggtatttctccacagattgattttggtagtgctgttaatgttgatgcatttgaaaatggtcgtgcaccagtcgctctggaagtgaaggataataccaatgctaaaattggtacgctgacctcgtctttgggagcgtctgcactggtgtctgttaaaggcccatggagtggatataaccattcttattctgatacagctgggcagggattctttggcggcttacctaaaaatgcagcagcgactccgaatgaaaacatcgcagtgaacgtaatgcctgaggttgcagatcattatattgatcagggggttaaatattcttcagttggtgtaaccacaaccttttctaatactgaagctacttatagtggctattatggcgcaggtattgagcagggcaaaactatcaagatcacacttgatcaggctgcttccggtgatgctccaatccagtggaaagcgtctctgccggttactgtttcttaccagtaa

SEQ ID NO: 31100 - DNA, 783 bp, Escherichia coli
atgaaaaagactctgattgcactggctgtggctgcatctgcagttgtatccggttctgctatggctgctggctgggaacaaaacggttctggtggttctgttgacctgggcggtaccctgactccggttacgaaagctaccccgtgggaagttaaagtcggtgatgctgtcactggtctggatgggcaagttcagaaaggccagaaagaaattagtatttctgtgaagaatgctattccggttctgggtattcgtaatgctgatgagaatggctttaaggggcaggaaggtattaaaccccagattgactataagggggctgtagatattgacggtttcaaaaatggtactaccacagtgtatatggaagtgcggaatgaggccggggaaaacattggttctttagaagcaccgttctatgcggcagctgcgcttacttacaagaatagtaacggtatgggcagtaaattaattgctgcctctgattccacaggttcattttttggtggactaggtaaaagcacatcagcaattatgtcaagcggcggatatgaacgtctggaatctatgtatccagaactcgtagaaaaattcactgttgccagctggaaaacggcaatggtgaatgaaggattcaccgacaaagcagtcgatttttggagtgtatatggtggtggtattgagaaaggccagactatcaagatcactcttaaggaggcagcttccggcgatgctccaatcaaatggaaagcagctctgccggttactgttacctacatgtaa

SEQ ID NO: 31101 - DNA, 159 bp, Escherichia coli
atgctcacaaaaacgacgatctttttatctgtatttttatttgtttttggtgatttgtgctgtgagtttggcttttgtttggttgtttatactgttgttgttctttatttcagttataaagatcgtgaaattgatgtttttcgctataaaacaccgtga

SEQ ID NO: 31102 - DNA, 207 bp, Escherichia coli
atgaagaaaacgcagatactgtcttttattcaggagataaacacgccatgcagaacggctgacatttcttcacattttgacatgagcgcttatcaggcccgccattaccttatgtgccttgaaaaagaaggaaaaataaggcgtacacctcttcgtcgtggtgcccgtactttatgggaggtagcaagggaggtggaaaagtattaa

SEQ ID NO: 31103 - DNA, 681 bp, Escherichia coli
atgtctgataatcgttcccggcatgatcgcctggcggttcgcttatcactcattatcagccgactgatggccggagaatctctgtcactaaaaacactgtcagatgaatttggtgttacagaacgtacattacagcgcgattttcatcagcgtctggttcacctggacttagagtacagaaatggccggtacagtctcagacggcagagcaacccgggcgcgatccctgaaatgctttcctttatacagaataccgggatcgcacggatacttccgctccggaacggacgactgataacctgtcttaccgacaaccaggagccctctccctgccttatctggctaccggcgccggatatcactgcaacactccccgagtgtttctcgcaactcatcctggcaataagacagtgcatccacatctcgctggtgactgagcaatggtatccgtcactggaaccctgccggctcatttattacagcggaagctggtatctgatcgcgttacagaagggaaaactgcgggtctttcccctggcagacatcaaatcggtcagcctgacatcagaacggtttgaacggagagaccacatccacagtctggtcgctgaagagcgttttatctccgctctgccacatttccctttcatccataaacttatcaacacctttaacctgtga

SEQ ID NO: 31104 - DNA, 522 bp, Escherichia coli
atgctgaacaaaaaactgaacatgcaggtattacgtcattccctgatgatagcttcggcaatatccgttcttaccggttgcgactattttaccgacaactgggaaatcagaaacggcgcatgccaggccatcagtagtgaaggaaatgaaactgccctcatttctgatgaaggtatggtttttatgagcatggacaagggatgtccggataatctcgattttccgggaacccgctttatcacaaccagaatcaacgaccagacctggaaatctctcatggtatgtaacagcgccacgggatttcgcagaatggtgacgctgggggataccccccgtgcagcaccggatatggcagcccgtgccataccggctttcacacacttaatgggagcaaccgttaccattgaagggaaaacagccaccttccgtaaaggtaacttcaccgaagcctgtaagacatttattccgaaatcactcagccacacgaatacccggaagaacaaaaatagactggccccctga

SEQ ID NO: 31105 - DNA, 717 bp, Escherichia coli
atgccaattgtggaaaacattcctgacttatcccactggcgaacagtacaggagttttctatcacccaggccgctttattgttggccggaattgatccttatgattaccctactcttgaacatgtcagagataataaacatgaacgttggaaaatggcatgggggttggctaatggaatggtaacagccatccgtcgtggtgtcttaactcctgttgaatgtacctctgaaatagttgaatacgataattggggaaatgtttgtgatattgagtacaaacgtctgacatcagcgcaactgaccgatcgtgcatatgagataagcaaggataaaactttaattagtcgccattctttatatgagtggataaaaaatgagagcgttgattttgcgagatgccctcgccctatacctgttaaggaagttaatccgccagcaatcattgaatcatctcatcaggtaattaatcctgacgagtatttgtgtacttatgggcataagagtgatgggttggagtatgtgcaggatgctataagagaactatggtcgacgtatgacccagatgacccacagacggctccgacagagcatgaggtacttgaatatttgaaaaaacggggggcgggttctaatgttgctagggctgtgaatctgattttaaggcctgaacatctgaagcgtattggtagaagaccaaaaaaacaaaaagttaaatag

SEQ ID NO: 31106 - DNA, 486 bp, Escherichia coli
atggttctggttaaggctcctggcgctgataatgtcaaaatagagaaccagaccggaattcataccgactggcgtggctatgccatattaccatttgcgacagaatatagagaaaatcgtgtcgctcttaacgcgaattcccttgcagataatgttgaactggatgaaaccgtagtcactgtcatcccaactcacggtgctattgccagagcaacatttaatgcacaaatcggcgggaaagtattaatgacgttgaagtacggtaataaaagcgttccattcggtgcaattgtcactcacggagagaataaaaatggcagcattgtcgcggaaaatggtcaggtttatctgactggacttccacagtcagggaaattacaggtttcatggggcaatgataaaaactcaaactgtattgtcgattacaagcttcctgcagtctctcctggaaccttgctgaaccagcagacagcaatctgtcgctaa

SEQ ID NO: 31107 - DNA, 339 bp, Escherichia coli
atggcgctggatgagttcgcgagagtctgggacgacaaatacccgcagatcagcaaaagctggcgtgcgcactgggaaaatctcaatacgctgttcagttatccgccggacatccgcaaagccatctacacgacaaacgcaatcgaatcgctgaacagcgtgatccgggctgcgattaagaaacgcaaggtgttcccgacagatgactcggtacggaaggttatttatctggcaatcaaggatgcgtcgaaaaaatggagtatgccgatccagaactggcggctggcaatgagccgttttattatcgagttcggtgaccgcctgagcgatcacctttaa

SEQ ID NO: 31108 - DNA, 675 bp, Escherichia coli
atgaataatctggactgcaatgcatcgaattattcaccggtatggggcgtgaccgaatttcttttctggaaattagccccaaaaaaatggggtggtggtgtaccttttgggcgttatttcaaagatggctgggtaaaatataaccaccttctgataacgtcagctaccaatacatataatttgccagcgcctttactggctggcgtgtgttggatagaagtcgggggcgatcccagtattgtagatatgctggcatttgatgttcgggctattgactggagtgggcctgagtggattgatgaacatatcacaataacttcgagaccagaagaaacatcttttggtgcagtgagtatgcaattgcgtactgcagccagaacgcttgggcttgatgagtcaaaaatggatacctctcaattgcgtgaactggcaaattgcctccagcatgatatttttaatattcaacttgtggccagacatctttatcaattagctgaaagagatggatttcagtcctccttaccacacctgacgaaagagcagataagaattattggtgcccgttataaccggggtatatcgcttactctggaggaaataaaggaagataccagttatggcaattttattgtcaacaactggttgcatttctctcatttactcatcgcccattag

SEQ ID NO: 31109 - DNA, 288 bp, Escherichia coli
gtgagaagaataattcagatatcaggatggttattattcattatgggtctgatcatcatcatgcttttttccgggaatgagtatcaatggatgcaggatatggatccttcaataacagcgttgcctcagggaaatgggaacagagaaataatcaaaatgttgatttattttattttgataattgttcagattgctctttattttttttcagtagcccgtactggaaggattttttcagcttgcggcattttgctattactgattatcgcatggagttctgaacaataa

SEQ ID NO: 31110 - DNA, 1431 bp, Escherichia coli
atgaagattgttcctgtagtattagctggaggtagtggtacaagactttggccattatcgagaacgatgtatcctaaacaatttctgaaaatatttggtcacatgaccatgttacaaaccactttatctagaatgaatagttttcatgatgcaactgatgctatcgttatatgtaatgaagctcaccgtttcgtggttgctgaacagctaaatcagattgataaaaaaagtactatcattcttgaaccttgtggcaggagtacagctcctgctgtcgcgttagctgctatgcatattgtcgaaactatcaacgctgatcaagacgtgctattgttagttctcccggcagaccatataataaaagatctagacacctttcatcaggccgtaaaagtagctagctcctttgcatgtggtgggaaacttgtaacttttggcattcctcctctaacacctgagaccggatatggttacattcaacgtggtaatagcattggcaccgtagagggaagtgaatgctttgaggtttctaaatttgtcgaaaagccagacgtaaatactgcaacgcaatttttaaatgattccaattactattggaatagtggtatgtttatgtttagcgcccgaacttatcttgaagaattacaaaaatactgtcctgatattgtgagtgtatgtcagaagtcttacgataattctgtctgtgacttggattttatccgtattgatgaaaaacaattctcgaattgtctggatttatctattgattatgctttaatggagcatactaatgaggccatagttgtacctatggatggtgattggagtgacgtgggctcttgggcatcattatgggatataactaataaagataataacggaaatgttctttggggcgatatacttactagagatagttcgaataattatatctacggtgaatcaggacttattacaactctgggcgttgaagatttagtcatagttcaaacaaaagatgctcttcttgtagctaatcgaaaatctgttcaggatattaagcaacttgttgagcaattaaagttacgcgacagaagtgaatattatattcatcgcgagacttaccgaccttggggtaaatgcgataccattgataaaggcaaaagataccaagtgaagagaattgaggttaagcctggtgaaggaatatcgttgcaacttcatcatcatcggtctgagcactgggtagttgtctctggtaccgcaaagattacaattaatggcgttgaaaaaataatcagtgaaaatgaatccatctatataccactaggtgccaagcactgtttggaaaaccctggaaaaatcacactcgaattaatcgagatacgttcaggaagttatcttgctgaagatgacataattcgattttttgataaatatggtaggatataa

SEQ ID NO: 31111 - DNA, 177 bp, Escherichia coli
atggcgagacagcgacgaatcgttactcaaatagcgttagacaacctgatttttactcctaccaaacgcaccaaatcccgcaagaaaccaatccccacagaaagccaggtaaagacattcgattatgtctacgggctgttacaggccaaatggaaccgcatgaggaaaacaaggtga

SEQ ID NO: 31112 - DNA, 231 bp, Escherichia coli
atggcatttcgttattttgagcttaccgaaaatattccttttgaggatgcaagagagcttcatgtacagttcaaacaccacttagaacatgttgtaaaggcgtcatttatgccaggaacacatgaaaagcatttaattgttgaaggtcgggatgacgaatcgatagaacagatatttggtggacataatgaaaagtttatacatctttatcacattgtcaacgacggatga

SEQ ID NO: 31113 - DNA, 252 bp, Escherichia coli
atgggaagagatgacccgcaatttaatctgcggctaccttacgaattaaaggaaaaactaaaacagcgagccaaatccaatggctgctctcttaattcagaattagttcagatagtgactgatgctgtatcaaggccatccaaaatttcaggctatcgagacgatgcagaacgcatcgctgatgagcagtccgaacttgttaagaagatggtgtttgatacgctgaaggatttgtacaaaaaaaccacctga

SEQ ID NO: 31114 - DNA, 951 bp, Escherichia coli
atggaaaatctactcgaacaaccaagctatacaccccacttctccggtcatgagactttcccactaaagcagatgtggctgaaaaagtcttatgatcaaaaaaacattgataacactcttgacaaagctacctttactcaggatgaggctattggtgtgtttggtgtaggcaaaaacatggtgtcttccatcaaacattggtcgctcgcatgcgggctacttgaggagtctaacaccaacaaaggcgttttcattattccaaaagaatgggacctaatccttcgggataaaggattagatcctttttgtgaaaatccaagcacagcttggcttgtgcactggcgtttagccggtttaccggcgtctaacagtaagcatcgctcaacaacttggtgctatatctttaacaatataacatcatcttcattttcacgcgataatatcgtagagcgtcttaaagattatgcagcagaaagaaatctaaaaatctcagaagcaacattaaagagggatgttgaggcctgcattagatcatactgcccaaaatcagataacaatatagaagaaaacgcagaaccactattatcagaattaggtttaattcaagaggaaagtcgaggtatgttttccttcaagagaggacagaaatacacactcagcgatcatatttttgttttttcactcatagaattttgggagtccttatattctgaagctaatacgttatcttttgaaactatagcatatggtccgtcatcccctggaagagtatttaaacttgatgaagactctgtcgcggaccgacttgcagcccttgaagaaaaaacaaatggtttcttaaaatggtctgactcttcaggaattagacaagttgtaatatcaaatacatctgaaaaagaattggctaacttaaaaactgaacaaattattatggcgtatggtgatttataa

SEQ ID NO: 31115 - DNA, 1023 bp, Escherichia coli
atggctaaagaatattcatacgaccccacaggccctgtaaaaacccgggatttgcgggtgtgcaaattttatgcaaaagttttaaaaaccgaatttaataactttcctgatatcccctgtcaggatatcgaaatttgcagatatgaattaaacaatgcaattcacaaatatgcgcccaatgaatttgccataaaaagtttaatgttcgccctggagagtaagcgggaagaaaatattcttccggatgaatcattcaactggttaaaaaagaatgagagagccacattctggttatgggcaacactccacaacatggatgatattgagctaaaacacatgtgtggccatatcaatgaaagcctgtatgacggtattcccaccacctggtatcagcgtttaaatttaagtctgtcaccaacaaaccatcaggacagaataaaccttatcatcgcatttatggatgaacttattttccctgcacccccactgatgcacagaaaaaaaacactaatggaaaatctgaaacaaaaatggaaaacagtcttcgccagaccgttaccattaaaatggttgccggataacgatgtggacgctgtattgtgggcctgggaatctctgaaaaaacaccagtccggaacattcgattcttttgggaatacaggccctctactgactcaatggttctctcctgtcagccattcagaacgcgttctggctttacaggcggctctcgatatctgggatgcacctgacagcagacgtttatttttgcttaatctgaataaagcctggaatcagcaaaaattacgtaaatcccgtacagataaaaaagcaatcaacacttatctgaaaaacgaaactaaaacccgactcgatttaatggcggaacacaacagattgcgtattggagatatgctggagaaactgattaatgagtactatcaggaacatttttgcaggcaacacaaccacacagaaacagaaacccggctgacgacaaattctgaagcacattcaaaataa

SEQ ID NO: 31116 - DNA, 1134 bp, Escherichia coli
atgagcgtggattttgttcttcgtactaattgtttatattttaacataaaaggcaacattaaaaaagaaaacattatatctgaagctattttagatatagccatccattcagccttatataaaataaaaaatgttatacatactattgattcaaataataagtttgacatttcaattataatacctgttcataacagagaaaacttaattattgaatgtattaagtctattaattcacaaacgctagataaaaacagatttgaagtgatttttattgatgatggttcaacagataaaagtgttgcagcaattgagtattttattgcaccggatataaaccggcgtgtaattcgcagggaaatcccctccggaaatgcttcagctccacgcaatgaaggaataaaagcagccaaaggacgttatgttttctttctagattcagatgatgcaattcattcagagttactttatgatgggctgcatattgcagataaaaataatagcgatattgtatattttaagcaagcatcatctacagggcgaggagtacccgtgcgggcattcagaaaaaatgctaacaaagcagatattatcaaaaatcatttattcagatcactgaaaattttcaagttatttaagcgagaattgcttattaataatggggttttattcaacccatcaatacctgtttacgaagacatgattttttcatgtcatgcattaaccgtatctaatacagtttcagttttatcagataaggagtattatattcttaacgggcacgatcaacaacatctttctaaagttagtttcccagtagaaaatagaatttttgttttacaatgcggattaaattacattttaatatccaaaaaacaaaccaatgaaaaagtaaagatgtttagtgcttgggttgttatttgcattgaacatctagctgccattgaaaaaaacaaaaaagtgccagacaatgataaaagattttttttcaaaatgatgtataagtcattagctgcacattcagaccttattaattttgacttgatttataacaaattcaaatcccttgcacaatttcttctggatggagatcatgaaaatttcagaaaagatgtcttagctcttaacaaataa

SEQ ID NO: 31117 - DNA, 144 bp, Escherichia coli
atgggcgcaatttgcaggctacagattgagaaattctcgcatttttcggtggcaaaaatggggcaaaacactgcaaaaggggcaaaaatggggcaaaaaaagagtgggttatcgtggcttattgtagttgccgataatgtttaa

SEQ ID NO: 31118 - DNA, 549 bp, Escherichia coli
gtgatcttcaaaattaagtggttattttcagcgttaatactttctttttttctgaaaaaaatatcattcccatcatttttcgcttttcctgttttttttaaaggcttgagaagagtttccattggtaaacatgttagaatatttccggggtgtcgtttcgagactcatggtaccggtgaaatcatcatagaggatgatgtttcaattgcccaaaatgtacatattacatcaggtaccaaactagttatcgggcaagggacgttgataactgctaatagttatattacatcaatagatcatgattatgaaactatcggagttcctatcccacgtcagcatctagattataaagagacacgtattggtaaaaattgctttatcggtatgggggttgctattcaggccggtacaattcttggagaacaatgtgttgtcggtgctaactctgttgtcagaggagtttaccctgactattgtgtaatagcaggtgtaccagcgaagattataaaagtttatgataaaaactcgggagaatggattcgtgtctga

SEQ ID NO: 31119 - DNA, 444 bp, Escherichia coli
atgcttgatattaaaaattggaaaggagaacaattacaaacgattgaacacatcgctcctcaagaaaaatcccacgaaggttggttagaggatatttatgaggagcaagaacttattgatcgattaggcaatttaacattattaccaagtcgtgaaaactcctctcttaaaaatggtagctgggctaagaaaaaattattttacaagattctgtctgcaatgacaccagaccagttagagccattacaggagcaaggtaagatacaaggaataaatttagcacaatctacaagtgagctattgtcaaagtctaggtatttaccgcttgttaaagctgtagctttagttgaaggtgattggacaaaagaacttatagagaaacgtagcgtcagaatcgccgagttagcatgggaccgtatccatgcttggttgaatgttgaataa

SEQ ID NO: 31120 - DNA, 156 bp, Escherichia coli
atggaagaattctccacatttgataataaaatagaaaaagatatttatgaaagtatttctctggaggcttgcattaaggccaggatgtcttatggtggaaccggacctgatgctgtcaaaaaacaaatagagattgcaaaatcacttttaaaatag

SEQ ID NO: 31121 - DNA, 1038 bp, Escherichia coli
atgatggaaatagtacttagaacattaacaaagaaaaaaacgttgcttttgatggggcttttctttgggttattttcattgttgtcatttattgttaacccattttttgattttttaatcgagactcttaatatagggttgtcaagaacatctctatctattgccttgcttcttgcttcagccttttcattatcacttatttatttgcaatctggaggaggtgaagaaaaatatgaaaatcatcctctggagttattgttaaaagaattagagtcccaaagaaagttaactacagagcaactgaaagagttaagggaaaaagttgaatcatatgagtcaaaaaacacccttactgaagaggaaaaaagattaataatagatggtgccgtagagcaaacaagtcaagatgccatcaaaacgattttcgcaactgaagcggaaaatttacggaacagcattaaagatagcctgggatttgaaagactaactgaacggtcatatgacattacccgtagactcaggagagaaataacagatttgcgtcttcgctccaatattaatctattaattgggatgagtattaccgctggcggactatatttgctatggacgacggtttcgattgttgattcttctgaattgctcaagcaacttgcttcagaaggaaatgaatcaaactataaattcataaaaaacataattctcccgattatcccaagagtaatgttagtcgtttttgtagaggtttttgcatatttcttcctgaggctttataaaaatggcctggctgaaataaaatacttccaaaatgaactgactaatgtcgagtcgaaacttgctgcagtggagttttcatttattactaataacccagatggcttaagaacttcaattgagtcattatccaaaacagagcgtaactttattctcgataaagggcaaactactgttgaacttgaaagagcaaaatcagagtcagaattgactaggaatataataaaaacgataccggctttctttaaaaacaaccgcaagtaa

SEQ ID NO: 31122 - DNA, 951 bp, Escherichia coli
atgaacgagttagacggcatcaaacagttcaccactgtcgtggcagacagcggcgatattgagtccattcgccattatcatccccaggatgccaccaccaatccttcgctgttactcaaggctgccggattatcacaatatgagcatttaatagacgatgctatcgcctggggtaaaaaaaatggcaagacccaggaacaacaggtggtcgctgcatgtgacaaactggcggtcaatttcggtactgaaattctcaaaatcgtacccggtcgcgtgtcaacagaagttgatgctcgcctctcttttgataaagaaaaaagtattgagaaggcgcgccatttggtggacttgtatcagcaacaaggcgttgagaaatcacgtattctgatcaagctggcttcaacctgggaaggaattcgcgcggcagaagaactggaaaaagaaggtattaactgcaacctgacgctactgttttcttttgctcaggcgcgggcctgtgcagaagcaggcgtttttctgatttcgccgtttgtcgggcgtatttatgactggtatcaggcgcgtaagccgatggacccgtatgtggtggaagaagatccaggcgttaaatcagtacgcaatatctacgactactataagcaacaccactatgaaaccattgtgatgggcgcgagtttccgtcgcaccgaacaaatcctcgccttaaccggctgcgatcgactgactatcgcaccgaatttgctaaaggagctgcaggaaaaagtttcgccagtggtacgtaaattaatcccaccttctcagacgttcccacgcccagctcccatgagcgaagcggagttccgttgggagcacaatcaggatgcaatggcggtagaaaaactgtctgaaggcattcgtctgttcgccgttgatcaacgcaaactggaagatcttcttgccgccaaactataa

SEQ ID NO: 31123 - DNA, 489 bp, Escherichia coli
atggataaaacttcgtttccgctccacggttttatcgtcttcctgcaccgtataatgctcggtcacaggaatagcgatgagcggcccaacgagtttttgcggcccgctggtactttggcgaatcgcatcttccacatcgctacggtaatcggcacgttcgacaatcacctgccgaatcagcattatcggaatcaacaacagcaatactgcaccaaacaaggtggtcattttccagaacaggggggatttcaacatagtcttctcctttgcaatggcagcaggatacgaaggctatgtgggaagaatttgaagctatgtgaagtgacggtgaagtcgaagcgaggccagcacgccaccttcctgcacgttgcgcagcgtgacttcgccgttaaacaaacgggcgacctcactgacgaacgccaaccccagaccgctgcttttttgcccatttgcacgcggcaaagagtaaaaccgttcaaaaatacgtga

SEQ ID NO: 31124 - DNA, 285 bp, Escherichia coli
atgaaacgcaagattattgtcgcttgcggaggcgcggttgcgacctccacgatggcggcggaagaaattaaagagttgtgtcagagtcataatattcctgttgaattaatccagtgtcgggttaatgaaatagaaacctatatggatggcgtgcatttgatatgcaccacggccaaagtggatcgtagttttggcgatattccgttagttcacggcatgccttttgtttctggtgtcggtatcgaagcattacaaaataaaattctgactatcttacaggggtga

SEQ ID NO: 31125 - DNA, 1065 bp, Escherichia coli
gtgctgctggtagcgatccatcactggctgctgaacctgcttattggtcaccagagtgatttcaggacgtttgtccatgccgatacctgtcgcaacaacagttacgcgcagctcgtcattcatatccgggtcaagagaagtaccgataaccacagtcgcgttgtcggaagcaaatgcacggatggtgttacctaccgtttcgaactcatccagacgcaggtcgaagcccgctgtgatgttaaccagcacgccgcgcgcgccagacaggtcgatatcttccagcagcggagaagagatagccatttcagcagcttcttccgcacggtcttcaccgctcgccacgccagaacccatcattgcgtagcccatttcagacattacggtgcgaacgtctgcaaagtccacgttcatcaaacccggacgagtaatcagttcggcgataccttgtacagcacctttcagtacatcgttcgctgcgccaaacgcatccagcagggagataccgcggcccagaactttcagcagtttgtcgttcgggatagtgatcaaagagtccacatgcttggacagttcagtgatcccctgctccgcgaatgccatacgcttcttgccttcaaagttgaagggcttagtgacgacagcaacggtcaggatacccaaatcttttgccacttcagcgacgactggtgctgcacctgtaccggtaccaccacccatacccgcagcaataaagaccatgtctgcaccttccagcgccgcacgcagtgcatcgcgatcctcatcagccgcattgcggccaacttctggattagcgccagctcccagtcctttggtgataccgctaccgatttgaatcgtctgtccaaccgctgttttacgcagcgcttgtgcatcggtatttaccgcgaagaattcaacaccttcaatgcgctcgcgcaccatgtgttcaacagcattaccgccgccgccgccgacgccgatgactttaatcaccgcgtcattggtaagttccattggttcaaacatagtttctctccgatttgtgcctgtcgcctgaggccgtaa

SEQ ID NO: 31126 - DNA, 198 bp, Escherichia coli
atgattttacgtacagaaatctacgcaactgcctgtattatcggcggtattgtccacgctacggcttattacacattttccgtaccactggaaacagccagtatgatgggcatggtcgtgacgctattgattcggctggcggctattcgttggcatcttaagctaccgacgtttgcgctggatgagaatggtcgttga

SEQ ID NO: 31127 - DNA, 243 bp, Escherichia coli
atgtcatttgccagtcttattccgaatatcgcagccggactacatgtaccagcggttgtaatgattatgccgatgcattttgccacgacgctagcgcgcgctgtttcgccgattactgcggtggtggtcgttacgtcaggaattgcaggcgtttcgccttttgcggtagtgaagcggacagcgatccccatggcagtcggtttcgtggtgaatatgattgccactatcacgctattttattaa

SEQ ID NO: 31128 - DNA, 369 bp, Escherichia coli
  misc_feature (345)..(354): n is a, c, g, or t
atgaaatatccgacaggcgtggaaaaccatggagggaaattacgtatctggtttgtttataaagacgtaagagtcagggaaaatctgggggttcctgacacagcaaaaaacaggcgcgttgcaggtgaactacgctcctctgtttgttacgcaataaaaactggtgttttcgactatgcaaaacagtttccctcctcacgcaatctggaaaaatttggtgaggcccgacaagatttaaccataaaagaactggctgaaaaatttctggcactgaaagaaactgaagtcgccaaaacatcactcaacacataccgtgccgtcatcaaaaatatcctgagcataatnnnnnnnnnngagcataatcggtga

SEQ ID NO: 31129 - DNA, 1896 bp, Escherichia coli
ttgctacaggtcggtgtattaggtacgggtgaactgaatattaccaccggaggtatagttaaagcgcgtgatacacagatagctctgaatgacaaaagtaagggcgacgtgcgggtggatgggcagaactctcttcttgaaacattcaatatgaacgtagggacgactggcacaggtacgttaaccctgacgaataacggcacgctgaatgtcgaaggtggagaagtttacttaggtgtttttgagcctgctgtaggaacgctaaacattggtgctgctcacggtgaggtggcggcagatgccgggtttattaccaatgcgacgaaagtggagtttggtcttggcgaaggcgtttttgtctttaatcataccaataacagtgatgccggctaccaggtcgatatgctgattacgggtgacgataaagacggaaaagtgatgcatgatgcaggccatacggtgttcaatgcagggaatacttatagcggtaaaacgctggtcaatgacggcctcctgactattgcgtcacatacggcagatggggtaacaggcatgggttcgagtgaagtcaccattgcaagccccggtacgctcgacattctcgcatcaacgaacagcgcaggagattacacgctgaccaatgcgctcaaaggcgatggcttgatgcgagtgcagctgtcatcctccgacaagatatttggctttacccatgcaacagggactgaattcgccggtgttgcccaactgaaagacagtaccttcactctggaacgcgacaacaccgctgcgcttactcacgcgatgttgcagtctgacagtgaaaataccacatcggtaaaagtgggagagcaatccattggtggactggccatgaatggcggtacgctcattttcgatacggatattcctgctgcgacgcttgcagagggatatatcagcgtcgatacgctggttgtcggcgcgggtgactacacctggaaaggccgtaactatcaggtaaacgggacgggcgacgtgcttatcgacgtgcctaaaccgtggaatgatcccatggcgaataaccctctgacgacgctcaatttgctggaacacgatgatagccatgtcggcgttcaactggtgaaggcgcaaacggttattgggtcgggtggctcattaacgttacgtgatttacagggcgacgaggtggaagcggacaaaacgttacacattgcgcaaaacggaacggtggtcgccgagggtgattatggattccgcctcacgaccgcaccaggtgatggtttgtacgttaactatgggctgaaagcgctgaacatccatggagggcaaaagctgacgttagccgaacatggcggagcctatggcgcaacggccgatatgtcggcaaaaatcggtggtgaaggggatctggcaatcaatacggtgcgacaggtttcgctttccaacggtcagaacgactatcagggggcaacctatgttcagatggggacattacgtaccgatgcggatggcgcgctgggcaacacccgggaactgaacatcagcaacgcggccatcgtcgatcttaatggatcggcccagacggtggagacattcaccgggctgatgggttcgactgttttgttcaaagaaggttcgctgacggtgaataaaggtgggatcagtcagggcgaactgacaggtggcggaaacctgaatgttacagggggaacactggctatcgaggggcttaatgcacgctacaatgcgttaaccagcattagcccaaatgcggaagtcagcctcgacaatacgcaggggttaggcagaggaaatattgctagtgacggtctgttaacgctaaaaaacgtgaccggcgaacttaacgaagttagccaacggcgcgcacacctttaa

SEQ ID NO: 31130 - DNA, 666 bp, Escherichia coli
atgaaaaaaaatgcccagtccgtggaagcctggctggaggcgatgatcgccgtggcgcgctattaccgcctcgatttttcccaggagaatgtgcgcgcgaccgtcaactgggagcgcgacagcaaacgggaagagttactcactgatatggcgcggcagttagggatggggctgcggctggtggaattttccgccgactcgcttaacccgtggcggctgccgctgatcgcggtgtttgataatcaacagattggcgtgatcacccgccgcgacaatcacgacaatatcagcgttcagttcagcggtgacgaagggctggaaaccacattaaacgtcacggatatagaagacaaaatcgttgaactggcgctactgcgcccgctcagcgcaattcccgatgcgcgggtagacgactatattcgcccgtatcaggcgaactggttctggaatctctcgctaaaagactggcggcgctatggcgatattatgctggcgtcactggtggcgaacgtgctggcgctggcggcgatgattttctcgatgcaggtttacgatcgggtggttccggcgcaatcgtacccgacgctgtgggtgctgttcgctggggtgatgatggcgatcctgtttgaattctgtatgcgcatggtgcgcatctttccgatgtga

SEQ ID NO: 31131 - DNA, 921 bp, Escherichia coli
  misc_feature (905)..(916): n is a, c, g, or t
atgtccagaatcaataaattcgtacttacagtcagtctgctgatttttatcatgatttcagcagttgcctgcgggatctacactcaaatggtaaaggaacgggtgtatggcctgaaacagtccgttattgatactgcttttgcggtggcaaatattgctgaatatcggcgtagtgtggcaattgatctgatcaacacgctaaatcctacggaggaacagctgttggttggcttacgcacagcttacgccgactcgctttcaccctcttatttgtacgatgtcggtccttatctgatttccagtgacgaatgtattcaggtaaaggagttcgagaaaaattattgtgcagatattatgcaggttgttaagtatcgacatgtcaaaaatacagggtttatctcttttgatggtaaaaccttcgtctattacctctatccggtaactcacaatcgtagtctgatatttttgcttggtctggaacgtttttctttactgtcaaaatcgctggcgatggatagcgagaacctgatgttctccctgttcaagaacggtaaatcggtgaccggtgatgaatataacgctaaaaacgccatcttcaccgtttcggaagcaatggagcacttcgcctatttgccgaccggattgtacgtatttgcttataaaaaagacgtttattttcaggtatgtacattgattattttctttgccgcattggtggcagtgatatcgggtgccagttgcctctatctggtacgcagagtgattaatcgtggtattgtggagaaagaagccattattaataaccattttgaacgcgtactggatggcgggcttttcttttcggctgccgatgtcaaaaaactctacagtatgtataactcggcattcctggacgacctgaccannnnnnnnnnnntttaa

SEQ ID NO: 31132 - DNA, 279 bp, Escherichia coli
atggaatataaagatccaatgcatgagctgttgagcagcctggaacagattgtttttaaagatgaaacgcagaaaattaccctgacgcacagaacaacgtcctgtaccgaaattgagcagttacgaaaagggacagggttaaaaatcgatgatttcgcccgggttttgggcgtatcagtcgccatggtaaaggaatgggaatccagacgcgtgaagccttcaagtgccgaactaaaattgatgcgtttgattcaagccaacccggcattaagtaagtag

SEQ ID NO: 31133 - DNA, 564 bp, Escherichia coli
atgcctgtaaaagagcaaggtttttctctgctggaagtgttgattgctatggcgatcagtagcgtattgttgctgggggctgcacgctttctgcctgcgttacagcgtgacagtttaacgagcacccgtaagctggcgctggaagatgaaatctggctgcgggtatttaccgttgcgaagcatctccagagggcgggttattgtcatggcagctgtaccggcgaagggctggaaattgtcggacagggtgactgtgtcattgtgcagtgggatgcgaacagtaacggtatctgggatcgcgaaccggtaaaagagtccgaccagattggatttcgtctgaaggagcatgtgctggaaacgctacgcggtgcgacatcctgtgaaggtaagggctgggataaagtcactaatccggatgccatcattatcgacacttttcaggtcgtacgtcaggatgtcagcggcttctcgccggtgttgacggttaatatgcgtgctgccagtaagtctgaaccgcaaaccgtggtgaatgccagctatagcgtgacaggattcaacctgtga
